United States Patent Application Publication US 2011/0014706 A2 - sequence listing, part 27

SEQ ID NO: 56609 - DNA, 1530 bp, Arabidopsis thaliana landsberg
tagaattaagtaacccccagaatataaaaaaaggagccagggttcaaaaatgttttagacaaatgcacctgaaatctttgtcataaagacatctcaagatttttccaggaatccaattaaaatcgccagtgtctaccttcccatcagcacaccgtaagcaatatacccggaacaactcagtcaacctttccattgtgtatgtttttacgagtatctgaattagaaaaagaactatgagttcaaatgtcttcaaattttagtatgcaactatcagagacaaccagactgaatacataaaacgtacagctttgtcacgaagccgttcagcaactaacttcatagtgtcaactggaatcgacgtcaatgcactcacagacacatcacaaataacagcaacaacttgtttgcggatattctcatcataatccaagagccggtcacagagagcagctacataagtattaacactataagattagtcaattctaatgcatattaatggcatgataaagaaagcttacatataatttgagaagcctcagctctcaaaggatctgagagcaaacagtccttaatatggtcaaggatggccatcctaacttcaactaccctatcggtcagccttttcagaaactccaaaaaaattgaatcgaactcttcagagatgacacgtccaggcaaggaaaacaactctccaaccaatccaaccactttcaaacgagtttccagtttatccgcctgtatatgttaatagtatgcattatgtattattcaataccaatctacttgaaaagatgggctcataccacatgaaaagtattgaaacaacaaatggataagagtgattattcaaacaaaatacataataataaaagtattgtgcatggcagagtcatgatgacatttgacgtgcaagatagtggcagaagaccaaaaataaaattataccaaaagctctccagtgagatatggtgcaactccagatagggcctgaggagcacagcggtacaaatcatagataacctcatggtagtcaatttgactgctggaaaatcggctatctccagacattgaagagataaggaactgctttatgtcagattcaactttgggcgcacaatgctctatgactttcatagcaagtcttcttgcagcatctctaacgtcctgccatcataaatgcagaatatgagctgtctgatattccataaaacaacgaatcctaaattggattataatcagtggccagagccagcaacgtgagtatgctcacacttctattgcggcccaatttagagagtaaaattagtaaaaggtgctcttgcacatcttcgctttcttctaaaagaacaatcattatattttgcattgatgagaaaacaatctccggatggtcatctctgcacatacagaaataaaacaatctttcagtatgaagcccacaagaaaagaaaaaaatcacagaaaccattcatatttagcattactagccaagaacaccaacgaaaagcacaactgaaaatcaaaaaa

SEQ ID NO: 56610 - DNA, 1253 bp, Arabidopsis thaliana landsberg
aacatctcgaagcagatggggttgtcatataactgataatgttctttaccaaatagcttctgcaagatgtgtatgcgaggtaaactctgtctctttatggggcatgaccgccattactgattctggtgttgttcaactggctaaatctaacaccgttgtttgtgcactgcaatcttgaagattccttttttggtttaatcatttcagacaatcttgattttgatttgacagatttcaagaacttcctcactgcaacacctaaacataggaggaacatttatgaccgatgagtctcttttcgcaattgcagaacgctgccatcagcttaaggtaacaacaatcatctaaccaaataatactctctagattcatgagaatcacgctttcgaaattggaatcctttatgcagacaatcggaatgtggtgttgccgtcatgtgacagagagaggccttcttgttcttgtaaacaaatgcagaaaactcgaatccatcaacttatggggaaccagagttcctgtagattgcttcattgctttacttaccatcagtcctgctcttcagatcaaacccatggaattgcttctcaatgctcagaatccaccaccgttgctgcatgctgtctagtgttgctcatcatatttcttgtttgttgtgtacatagtaattcatacaattgaatctgcatatatcttatgtgttctctcatcaatcaacaacatatatatataaatattcagtaaagtttctattggagtagaattgtgtctatatatatatatatatatataagttgcataacaatcaacagaagctgaagacacacatacacaagatttctgcctatagctctgcagtctacaatacaagaatcaaatcagaaactctttctaaggcaattcatgtcaacttaggctctctcattcgttctaaagaagtgatcaagattctctaacctaagaatctctccacgtggtttgattggttgtgtcatagtagaaatatcagcaacggaagcaatgagaagcagaagacaacaatgttgtttagttgggccacagaagctaaagatcttgagaactgaactgaacctgagtagcttccacctgagttgcttccagccgttgaatccatgcttggagttcttgtctgtacagtaacatttttgcatgaaccataagctgctcctggctgcaacatcaagaaccaaaatacgggtgccggttttagataatttaggcttgtaagatcttat

SEQ ID NO: 56611 - DNA, 525 bp, Arabidopsis thaliana landsberg
  unsure (1)..(525): unsure at all n locations
aaatgttcactcactggattatttgaaagtaggtcgttttttctgcataaagattttttatgaggttagtttttaatacaataaaaagtttgaagttaggtttactattattaaacaccttgtatgtagtagagtgaaatttaccaacctgctaacatatgtaatatacatgatacatgatacatgccacgcatgtttttgttatacaatatgcataatagtcatatattaaatgtttgattcttcacattaaaaccaaaaaaaaatatatattaaatgtttgaattgccctggcatcccacttgctttagcttgggacttgtttagagagttataattaaaatccagattatcgaaattgtcttcttatttcaaatttaaaactagttggtaattagttgattggcatgcagatcttagttagtagtgttggtacttttccattgcgcctagtacaaaaaagattgnttttttttccaatacatattattactgatttgatattaaatttgaaaataaaacatt

SEQ ID NO: 56612 - DNA, 780 bp, Arabidopsis thaliana landsberg
actccatcgtgttggttttaaacctatgtatatgatgacttagaaaaatgtgtatgtatttttagtatgagtttttaagtttgatttttgatttaatttggagaaaaaaataactaagattataaagtttgaggttctctattaaaaatgataatgaaaattatgttaataatgtttttacttataacaaataaagaatatgttcaaaaaccaaattaaagctagagaaaaaccatatacattcaacatctaaagaaaactaatatggtagtgcaattaaacctgactaatctcgaaagaaaaatcaaaccgaaaaaaataaaaataaaaaaataaacttctgaacttatcctatgagaaagttaactcaaagtaagattttaaaaaaatatcaaaacggaaatctgttgagcaaattaataaatagaagattaaaaatttgtacttgttgttcaagcttctttaatggagaccccaattctttatatttttttgaagaacacatcttgagaagacatctctcatcatccatgtcatacacctcgtacagcatccgatgatttaggttttgtggtgaatatatcttagctagcatcaacatattctatcaaacagttttaagattgaaggaaaaagagataaaaaagaagaggttttcatcgtattctttatatgtacattcaacatcttatcaggatatgcgccatgagcacttgttacctttgcaagttcgaactttaaacaactagttctttacatgtacattcatcaactagtttt

SEQ ID NO: 56613 - DNA, 1028 bp, Arabidopsis thaliana landsberg
acggaagggtcttttgtggcttctcttaactggaaaggtgtggctcttctgtacattattataagttggttctggatatgtccagtcgattagttttcctcaatagattatcttatgatatccttttttaccctttttcgtataggtacctagcaaagagcaagttgaagcactgtcgaaagacttggcgaaccgtgctgctgtgccaggtttggatattacctttttcgctctggctgttgcaaataaaggagtctgtttattggctcattcaaacttgtttgacatcaatgcttacaagaaattgcttaacagaaatgaaataaatttgtgggttttgtgttatactttcattcattcttaacttgtatccaatttttatacagattatgtgtacaatgccattgatgctctgccttccacagctcatccaatgactcaatttgctagcggtgttatggccctccaggtgtggttctctaaactcgtattgttgtttctgttcttcttgtgataagcgttggaaacttattgttttttttggctataagtaaacaattttcagcagaatgataattttctttacctaatatccaggtgcaaagtgagtttcaaaaggcatatgagaatggaattcataagtcaaagtatgcttttggggttctgattgaattcatgatagcgtttcatattagctggcatcataacaaagattttttcttccaggttctgggagccaacatatgaggattgcctcaacctgattgctcgtgttcctgttgtagctgcatatgtttatcgaaggttagtgaagactctttttgtactctttttcatgtttcttgtagcttctggattttcggcaatgattttttttttattggaaaatttgccatctcttgtttttgctttgtattgactgttgaccttttccatgcatcattgcaggatgtataagaatggtgattccattccctcagataaatctttggattatggtgcaaatttttcccacatgttgggatttg

SEQ ID NO: 56614 - DNA, 495 bp, Arabidopsis thaliana landsberg
tgtaagtagcattagcgccaaccacgagccaacctagcatatatagtggtattgcttctcgggagggtcgacatggaaaacaacacaagaggtcatgtctaggccactctctaaggctatgtcgctatcaggctgtatataacaaggaccgctaaacagtcatgtccgctaaatttagcgaacaccgaggtcctttattcgtccaacaacgaacgataaagcctccggtaaaaatagtgcttgtcacaggacacgctaaatctagagcttctcgggcgtccgcgtcgtcgcttcgtctccctcctgcgtcggggcggaaccttcccctcgctagctcccgagccgcacgtcgatcacctagactggtctcctcccattccgacaccaccctggatcgcaagagcaagtctagcaagggtgtcgcgagatcgaaagcgatgtccatggccgcgctcgccgccgctatcgtggctggcgacaatagctcagatctcg

SEQ ID NO: 56615 - DNA, 515 bp, Arabidopsis thaliana landsberg
ctttaggtaaataaggccgcatgcagcggcctttttgtcatgggggggtgtgggcttcaggtgcgcacttcgtccaccagcagcttgaagtcgtcaatgtcctcgaagctgccgtagacgctggcaaagcggatgtaggccaccttgtccagcttgcgcagctcgtgcatcaccagctcgccgatgcggctggagggcacttcgcgcacgccggcggtcagcaactgctcttccacgtgctcgatggccgcatccacctgggcggaggccaccggccgcttgcgcaaggccagggcaaacgaggcctgcagcttgtcgcggttgtagtcgatgcgccggccgtccttcttcaccacggtgggaaagctcacgtcggggcgttcgtaggtggtgaagcgcttgccgcagctcatgcactggcggcggcggcggatgaaggccccttcctcggtcacacgtgtttccaccacggcggaatcagggtggctgcagaacgggcacttcatgcggtcacc

SEQ ID NO: 56616 - DNA, 1007 bp, Arabidopsis thaliana landsberg
ccagtgaaaggcttatagtgcttagtgtccagacaattttggcttcttcacgtgctatcacccttcatttactctaactagtctgaaagaacaacaaaatcgtttatcacttcatctagttctattagcttatgtgcgtttgttatgcggatggactgaagtttgcttgataaattatgcttcatgtttttcttttgtcatgggaccatttatagtcttttgattatactcttaaactgttttcatttttagtgaaatatttacatcttaggaaaaaaagaaaaaaaaacgtagtcaaaatgtgcatcgaacagttctaaggaacacgtctaaggaggattgagtcaggtgctacatataagacttgatagtttttattcctactatatatacttcccaaactagtgaattccgcattagttatcaaaactactattttgttcgctttgttttatataaatgagactatttggattagctaggtaagcataacaaaatatagctctaaaacaatgtttggatagcttagaaaaaatccaaaaataacacacacacaaaaaaggtgaggaacagaaccactagaccactttattttagttcaaatgatcttataatctgtaattgttaatcttccatctacatataaactatatgaattttccaagtatatacaaagctccttacctagtaagaaggatctttgaaaacaatcacaaaaactatacaacaaacagcgaataatacgatcaaaatatcgaacgtgagagcagtcattgcttgatcactaagctccatgtttcttccacctaaccggtcaaccatatcaggtattgattcatagcccctaaaatcttgctctttcggatcctctagcttcattctcattttctcagcttgacgactcgcaacttcttgagccagtgtccagtcataaaacctccgagtctcttcatcgctcaaaacattgtcgacttctcttagtttcatgaacttttctgaagctgttt

SEQ ID NO: 56617 - DNA, 798 bp, Arabidopsis thaliana landsberg
tatttggatatgtaatttatttggataggaagagcaagaagcagtcactaagcaacttaggaagaacatggcttacaaagctaatccggtaccaagtttctaccaagagggtcctccaccgaaacaaccattgaaaaaggtatggaacgaaacctcactgtcttcacttaccttttttacgcccactttgattcattttattgcttgtccaagactgaaaacatattgaatgatgagattcaacatttagttttcttttcttgtgatcgggtaagataggcttatcctcaccacaaacagcttatcctactcaactacgtctatggtcactttagctttgtttttattttaattttaagcagtaactcactaccacaattgtgaattcactttattcatggtaacagaagttgctgaatttctgtattcagatgttggattttggttatatgggctctagtagtctacggtaggaatgattccaaacgcggagattttaactttctatgattgtttgatttgcagtttccattgactcggcctaagtcaccaaaccttaaccgtagaaagagctgcagcgacacagttaacgcatcatatcaggaagtgaaggggaagcattgtgctcgacatcgtcacagtgtaggtggttgcaaggatgaagtcaaaacgaacagtgtcccaaggacaccaaatagcagcagcaaagatcagatgagaaagtccaaaaagggaacaccaaagtctgaagaagtacatgaaatgtttaatagtggccatgatggagagactggtgag

SEQ ID NO: 56618 - DNA, 1608 bp, Arabidopsis thaliana landsberg
gcataactgtttctctgcatttgatgacattgcagcctagtcgcagtagctaccctgtggtgaaagcacaatctaacaaggtaagctccttttttagtgatctctttgagaaagtgtttatccagaaacttgttcatttctggactctccttctgcctttaaaggttagtactggtgcatcatcaaatgctgccaaagttgatgggccatcatcagctgaaggaaaggagaaaaactcattgaaggagtcgtctgcttcttctcctgaattagctacagaagagtctatttctgagttccttacccaagtaacaactcttgtcaagtgagtaaagttgctctgttctattacttaaatcattttaaccgtgattaatactttacctccatcatgtaggcttgtggattcaagagacattgttgagttgcagttgaaacaactcgactgtgaactagtcattcgaaaaaaagaagccttacctcaacctcaagctcctgcatcttatgttatgatgcagcaaccaaatcaaccatcttatgcccagcaaatggctcctcctgctgcacctgctgctgccgcaccagccccttctacgccagcctctctgcctccaccatccccacctactccagccaaatcgtcacttcctactgttaaaagccccatggctggcacattctaccgtagtcctgcacctggtgaaccaccctttattaaggttagattattttctgaaactaagacatgcgcttttcggttgatgttaatgcatgtgctttataaatagcgatttttgcaaattcatggctgctgcatttcactgtctgaattcgtaccatataactttcttggtctttcaggttggagacaaagtgcagaaggggcaagttctatgcattgttgaagccatgaagttaatgaatgaaatagaggtgagtttctgaatcatctgaaaatggggtaccatctgaaccttttatctaccttaactacttcgaatcatctcttactaaatacatacactaaaaaaatatgttgtttctctgttcaatcccacttagtcatctacttcatatgatttgtcaattatatatggatgaatacttgtgcttaacgtgtgccattgatttaactctgaaacttgaacttcttctcctcagtctgaccataccggaaccgtagtcgatattgtcgcagaagacggcaagcctgtcagcctcgacactgtaagttttctaattgtcgcagattacactgtcagaattttgtgtgctttactagaactagtttttacgatttcatcatttcaattgaaaggttatatataatttagaaagatatctctactgatattcgatgtttttgcgattttacagcctctgtttgtggttcaaccgtagaatcggcaccatgagaaatggagaaaagaagctctactaaattcattctctgtgctttggtaatacaaaatttgctgagacttctaaaaacgtttccccttcgttgtcactgttaaagtctgttaggtttgttagtttggtgaggaagaattgagttttctttagtttctctattcgttaaaaaaaaaaagatgagacatttttttc

SEQ ID NO: 56619 - DNA, 510 bp, Arabidopsis thaliana landsberg
ctcacattataatatttatcactagcaaatacttgtttactgcgaaatttaatgcatatattttgtaaagtagaagccctaaatatatagttagatgcaaaacaaagagtttctctgtttctgcaacccatcactaatttaagcttgttgtctatattctatgttacgtcatacttaactttcttgtccttgacaatgaaaaaaataattccttaaattagttgttaaaaaaaaaagaaaaaaaaaggcaagagatttgttgaaaaggattgaacatatagaaaatgaaaggaaaaacaaattgagctttaactacatgcacaagtctcttgcgccattacagctgcccaacacatttgtcttatgactcaatatatgctgataaaaagacatttactaatgcaaactataataagatctaaaacttcatgtgtttctctctatatatgtgtgaattagttcttggggtataaaaacactccgtcgatgttactatcatacttcttaatt

SEQ ID NO: 56620 - DNA, 459 bp, Arabidopsis thaliana landsberg
caaagtaaatctaatcagtagttcgtaaaaattggaaccaaattaaatatttaagagaaacttgaaagttttgcagtgtggtccgtgcaagaactggtacaaacacatggctggattccaaaaaacgagtcaacttcttggatcttacaaatccaccatcttattaatttttgaactctatgttactactattagtatacatgtgcatgtactgacacacatacacaaatattgaaggagatatgtttttcttttatagtgattggctttttttgtaacactatattgttaaagtgtgattttgaatcattgagttaccagtgactaaatatcaaaccgaagattttttgaattcggtgatgtttttgatcttgtaagtgaattttcctaatcggtaaaacttacctttggtatatctctacattaataagtattcttgagatgatactggattcgttc

SEQ ID NO: 56621 - DNA, 1382 bp, Arabidopsis thaliana landsberg
gctctagtgaaactacaggtcagagaagataacaccagagcacaaactgttacctcaatttgtgtcacacaccttaaatggatttttgttgggattttgcagcaagagaacttatcagcaatgaacactgatccattgtactcagcttatcactactcacatcctcctcttgttgaaaggcttcgagccattgatggagaagacaagaagacagattaagtccgcttaactcgtctcttgtacgggttgatgtcttttaggtgacaggtcgaaacaaaacaaaaaaaagtgtaaaaccatataggcagaggcctcttttgtttgttttttacttttacagtgggttttgcctagttactactagtttttgagtttcttaaaagtggaatcactcgcacggttcgatatgatcatttctgattcgtcttcttttattaaaatgaggagaatctaacgtatatgaatcattcttgttttgaaagtgatataggttatgattggtgttactaccacatgttagaaaatcgtgtaaaagtagtactaaattgaacatgggattcagcgatacagaattattgaacaaggcagaattgtttttatgagaatgatacatttcttgctatgatggtgcaataatgggtttctcttttcgcccaaaccttatccttttttctttatcatattctcataattacattaccctttaaagcatcccttctaaattctggattagtctgtataatatcattcattagttcaccggtttataaaaatcagaaagtttataagtttcaaaattttgctttggtgaaaagatcattcatatggttccaatttccaaaccattaatttaaattttagctcatagttgtatctcttcgtctcgatatggacaagggatcccaaagtacattataaatataaaaactctgggcatgggtcttttgacgcatacaaatttaaaacaacttaagctttagcctttgttctacctaatttagtaaattattagtataaactataaaggatctattatattatttaatacaagaatgaagaaaactatattatctactatattcgctctttcttttttttgtcaaaatggaatgctgatctggccactctacataactttcatctagcctctcatccttatctagataaacaaaatatgtggccctttgataggaaaaaatttcattcaaaaaatgcaaaggcagaataatttaattttacaaacgaatgtgattaatgcagtctatagtctcttcggtataataaaagtgattccttttctccaaaaactattttgaatgatattaaagctcttaaatagcaatacactaaaaacgtagcttcattaatcaaaactcggatct

SEQ ID NO: 56622 - DNA, 554 bp, Arabidopsis thaliana landsberg
cctcttcccgtcccaatgctcgatgaggcctcctgtgcgggtgctgtccgtgatgtagtttcctgcggcccatgcgtcgtcgctcgacagcgccgacacagcactgaatgaagctttcgccccgcccgggaaggcgggccgaagagtctgccacttcttgcccgtccagcgctcgctcagtggctgtgcgaaccagtcgccgcactcggacgcgcagttcgattgaccgaccgcgatcggtgcgccgtcgggcccggacgagatggcgtccagctcgtcgcccatgaactggcggtctcccaggacctgactcaggaactgctgtgctgcggggctcatacgagccgaaaggttgcctcctgcgctgtgcgagggcgtggcggtggccgggccgacggcgagcgctgctgcagctgcgaacgcaacggcgccgaaggctgtgccggtccacggtcccgctcgtctcggagatgggatatgcattgctcaagtcctctcgatcctgagtgtgagctgtcggacgtcggcgaccgggcaggtgccggctctgtcga

SEQ ID NO: 56623 - DNA, 324 bp, Arabidopsis thaliana landsberg
  unsure (1)..(324): unsure at all n locations
ataaaacaatattttacgaagaccaactgtacacttgtaaccaaaattgaatatcaattaaacttgtggggttcatattaaatgacaaaagctgattgattcttgtgacatggtgagcctgactgtgagagtacacaaaaacttttaaacccgaggagatatgaatattggccgaggatggtaagatgattaaaagtanataaatttcgggggcgtaagatgttatatgggggggggaatgaatctctgcgtcacccaacacatacggatcctgtaatttcatatgcacagaatcaaatgccaacctacttgccaattttggca

SEQ ID NO: 56624 - DNA, 545 bp, Arabidopsis thaliana landsberg
tattattttgacttaagcatgcgtgatcgtcgggatgattatgtgtatatcacgtgatagtgtgccttaatatagtaattaagaaaacttgtcaaattaatttttatttaaagaaataaattacaataaatgagaattctttgcattgtgtcatgaagtgatgtggataaatctttaagcttaaaacaatcgggtctacacaaccttgatacgtagcatttagaaatttaaaaaaatctcagaaatatttttttgcatccggtaaaattaaaggtagtctcctgcattactcttgtgcgggaacccaacacattgtctagaatgacaaatactaactagaagatcaaagagtttgtgggaggacaaacctattttggtcttctcgaaagttactttaactgtgtcattgtgtatgcatgtctcatttgtatctttttttagtggaggactcatttatcctacgctccatcaattgtttttttttctgtaactaagacgttccctttgaaacaaattaatctgtgagaatgcttttgaaatagacc

SEQ ID NO: 56625 - DNA, 463 bp, Arabidopsis thaliana landsberg
tgcaagaaatatggatatcacattgagatccgattatccgaactcgtataatcaagttcacatagagataaatctaatcccttttcctttctttttggtcaaaagagataaactaatctttaaaacatcaaaaatttataataaaagatattatacgataaatacttttgccagagtaatgttacattgaaggaaaacaaaatcgaatagtgtatatataatattaattccaaataatgtaaatgtttaaaacataggttaattaaaattacttcccatgcatctagaccaaacaatcttcacagcttttgtcccagcttttactacatgttttgggcctgtttgatcacgccacgtggatccggtaaaatccacgcttgtcttctctgattggctcttcactataggctcttttttttttctttttgtaaactcactataggcttaagctagtctgctacat

SEQ ID NO: 56626 - DNA, 434 bp, Arabidopsis thaliana landsberg
cgtgggatacagctaagaaaggatgtgctgtcttggacgcctacatggacatacagtttattgccctgtgttacgagtcggaagggctgaactcaagggtgcgatgttcagacgggctacctactataccagggggcccaaacgcccgaggcccttttgcattgagagcggatccaatcgctatggagctcgccactgtacacgcgagctctatttgacacgagcgcaagctgccaactcttcatgtttttgcatcatacactgcagtcatgagcaaataagatgggctggcttgacctctaaacgttgttgatcttgctgctgtcccctattaagctggacctttttatcaagctcagactgtcttggaagaggaggctgctcttatcaagaagaggtgaaggcgagttatgcctgatagatcaccctcactt

SEQ ID NO: 56627 - DNA, 1133 bp, Arabidopsis thaliana landsberg
  unsure (1)..(1133): unsure at all n locations
aaacgaaaattgcatgagtaagaacatatctgcttttgtattggctgatcccaatgaaatagtcgatttttctactttaaactgtgatacggagagagatgaagatgatggctatgatgacacatgtgtcagctctgataattgaagtgtcacttctttggagccatatgatcttatggatgatgataaggatttagggaaacaatttacacatttggtggatgttgttggagctcttaggaaaaccgatgatgctgatggggtatgtaactagagagcattgtctgtgacattaaactgatgatgctgatattcttttattaaaaagcacaagagagtaatctttgtgttatattacgtgttgcaggtggagaaagctatatatgttgcagagaaacttgtgcgagcatcacctgatgaattgactcatatagctggtgaccttgctcgaactctggtacaggttcgctgctctgatatagcaatcgaaggtgaagaagattcagctgaagaaaagcggcaaagagctctaattgcgttgctcgtgacccgtccatttgaatcccttgaaactctaaacaatattttgtattcgcctaatgtagatgtaagtcagcgcataatgatacttgatgtcatggctgaagcagctagggagcttgctaattccaagaccctgaaacctaaacacgaagcacggggacctctgatatcaaatatatcagatcctcaaccctggtatttgcctagcaatgcgagtaccccatggaaaaaggtgtctgagacaggnnnnnnnnnnnnnnnnnnnnngaatcgatttgagagagagctacagtcaaagcctggacagacaaagaaaggaaaatctcgaaggtggagcctcaaatcagcagacagagatcaaatcagttctgactggtctcaaaatagattaccattatatgcagcagcatttatgctaccaaccatgaaagagtttgacaagaaccaacatggtgttgacttacttggcagggagttctgtagaaccttggaaaaaatgttcccatgctcggcgtctgtatgcaatgtgaaaagatgcatccagaagcatctgcattagctatctctattctagatatggtcattgaagg

SEQ ID NO: 56628 - DNA, 585 bp, Arabidopsis thaliana landsberg
tttgtcccctatttcctccttgatcttaagggattcaaaataatagcccaattcttctttctcgttttgcatgaagtggtggcaaacacctatatcgttaaggcactgtgccattccttttttgtagtgaagtttttgcgccagcctcatggcttttttgatcagcaccagtgtttccttgggatgatccatctggtatttccaggagagtttattgtaccggtcaactttttcggtattatccggtaaaacatcaattgatttttcttcctggccaaggctctggctccatccccaaaaaggtaaaatcaacaacaccgccaaaagcaaatgtttgaaattgtacatgaatatcaaggtttggataaatgtaaaatttaatacctaaggacggtaaaacattcgtccatattttaaacaaaaatgagcgcggagagtcccctaaaaagatgaacatggacccagagtacgggaaggttgaaatacattcttacgggtacccactttgggcagccctaaatgcttatatttgtttcctgatccgatcgatatggctgatgcgcaaaaacaacatgagaaaatcgt

SEQ ID NO: 56629 - DNA, 565 bp, Arabidopsis thaliana landsberg
cgccggtacggtcagcgtcgctgcagcctcggacacggcaccggggtcggtgaacgccgcattgagggatgcccggtacgggcacagcacgcccgcgatggtctcgggtccgacgtgcctgcgcagcatctgcaagtcctctccggcgtcgtaaccgggtgaccaatccgaccacaagcgctcccagaaacccggttccaacagtactgattccgcgagcccgacctgctggatgaaccagacatagaaggatcgcttgagttggtcgtaggagaggaggccggcgcccagggcggccgtcggcggcacggccagtgccgcatagcgccgaaacgctgcaggttgggatgacaccgcgccgtatccggcattggccccccagtcatgcccgatgagcacagtccgctgatcaccgcggtgcgccgcacgttcggcgaggatgtgctgcacgtaggttcccacgctgatcggaccctgggccgggctgcgatacccgggcagccacggtgccgcgaccccgtagccggcgctggcgagtgccgggccgaggtgtcgccacgtgtgc

SEQ ID NO: 56630 - DNA, 950 bp, Arabidopsis thaliana landsberg
attgatatgtacacatagagaacatattgaagacaatcgaaacacatactcgataaataaatttaaagaaaaaacagagaaaaaagaatttgaaagaacagaagagaagattctctgtctttgtcacaatagtcataaactcttgtcttaagctttcttttccaatctcccatatgatctcgtgcgtgcccacttcccactttctctctctcttactgttgtcttcttcttttttttcatttaaaaaaaaatcatacgaaataaaactattatcacaaccttaccctcttcattttttgtaatgttcttctgtctgatacatctccttaaaatgtaggtcggtgagactgtggcatgttctatggccacaaacttaggtcggtcgatgatatatatgcgttatatataatgctcttcgtgtgtttactattagtctagaggcatatctccgggattggacttgctgatcgagagtgtgaatatgattaacaagattgatcccatgcttgacctgtcggggaacaaattaaccctacgtcaatatattcgtcaaaaacaactttacgtattaaattctgataggcaattccgatattcagtagcaatgtcgtacacgacttatgataatttaatacattgactaattcagacttttaaatttaatatgataatatctaataatgatgtaaaatgactaaagtaaataaataaattgatctatatatgcaatccaaaaatttaaattatataattaatactaacaacgatgtattttcaagtaactaattctatatatgcattttgagttctatatctttgggggttaattaaatagatatattatgatatgatgagattaaaggaagtgtgataattacttacaaagttgcaaagaagaggacgattttcttcggatcaagcatccaagaagtgtgagagcgtttaaaact

SEQ ID NO: 56631 - DNA, 944 bp, Arabidopsis thaliana landsberg
tatcttataggtaccctatcattcactctcttggtgcaagaattggctcggacctaaagttaacataacaatggctccccaggtactcttttttagttcctcaccttatatagatcaaactttaagtgtacttttctggttatgtgttgatttacctccaatttgttctttctaaaaatcatatatctctgtactcctcaagaacttgtattaatctaaacgagattctcattgggaaaataaaacaacagccagaacacgatggaagcgacgtacatgtggaactaaatgttgatcatgagcatgggtcagacatcatagctaacatgacaaaagcaccaagggttaagtacataaccttttatgaagactctgagagcattccggggaagagaaccgcagtctgggagcttgataaaagtgggtattaaacatatgaaacatgctcccaaagtaccttgcattgttttttcaacttttgagtaaccgttattgtgcagcaaatcacaggaacatagtaagatctccagttctgatgagggagttatggcttcagatgtggcatgacattcagcctggtgcaaagtccaaatttgtcaccaaaggtaaaaaagaaacttattggctcttgtaccacttcttattgcttttggtgtaaatatgaataccgtgtcacagccaagcgcgggccacttagagatgcggattgctactgggattacgggaaagcctgttgtgcttggcaagaatactgtgaatacaggtatcactctcctcttcccatccaatgttttttaatcttattcttatctatgattctgaaatctgtattttactgatttggttgctgtaattgtattgtgaaacctaatattgcagatacagttttggggatgttcacttaggacaaagttgtagattgaggaacacatctgctaatatgc

SEQ ID NO: 56632 - DNA, 950 bp, Arabidopsis thaliana landsberg
ggtaactccattttgactaaatatgtcacggttaagaccgctgatgacaccaaccgtaagagtgtggtcaaaaccaaacgggtttccaattgctaaacactgctgtccaacctttagagaatttgactgcccaactttaatcggtttcaggagagtttcaggagcatccacctgatttttgtgataagcagttgattcttttaaaattctataagacaaatgacacaaaacctgtagtttatttataccttcaagacagcaagatccttagcacgatcagcaccaacaagttttccttcaaagttcttctgtacccttcaagatttacacaaacgagcagacatgaaaataactagagagactatataaacggctgaaataatccatcccgcagataaaaaacctcacccatcagatgccagaatattcacacgaccaactacatccccggggctaggatttcttgaaagggcattgccaataactgttcagcagaagatacaactaaaaacttatgatattgtccttgcccatctcaagcactttgtaagctcaataacttttcattcaaatcatcttaccgtgataattggtcacgatgtatccttgtccgtcccagactactccagagccatttccttctggtatctacaattagattatgagtgtaaccgtaagtcaaaacaattgataatgacattaaaaagaggtgttctttaagtactacgaatcagtacctcaaccacacccgtcattttgagctgaggccgtaatgtcacatcaaagatgttgacaacggaataagtattctttttaaacagttgcacaattctcccctgaaacatagaaaagatatataaatctttaggataaccatcaaaacctgaaacttacaagtactttcgctaaagagacaaacctcagtagggaaaagaggtccagctgggaaa

SEQ ID NO: 56633 - DNA, 474 bp, Arabidopsis thaliana landsberg
tatggatctgatcgagatttcttcagttcattaatatggttaagcatttcatgttttttaagctttgacaattcttgcttgtttttattcattttcgatgtcgccgatttcaggagttgtgtttggttgtagttgtccttcagcctagttccagttttgctataatagatgtttcggctctcttactctgtgaagtagtctttattgttaaaggaagagcaacactccgttgtcgtggattgacttgtcctttttgtatagtcactgtgtcgagcgtttctctttattggtggtagccctactggttacgacttacgaagtggccactgataaaattgaagccaactttgatacttaggctattatattttattcgtaaaacatttaaaataatgaaatagtattggtggagattcatatcataaataaagagattcaacacacgttattttttttaaaatcattataatataa

SEQ ID NO: 56634 - DNA, 295 bp, Arabidopsis thaliana landsberg
tatattaaaatatttatataaaaaaatatttgtataacatgatgtcatttgcaatataatgcataatcattaaatttaaaaatcactagttttagaaaataaatcgtctcagggtgtatcgcggttaaaatctaattcatcattattattacaagtgttgcatctttttgggatcttgatgtttgaatccagttaaaattaatggagctcttggtccttttccaatagatcggattctagtcaaaaaagcttctttttttgggttcaaaaggataaagttatcagagatgagttt

SEQ ID NO: 56635 - DNA, 1313 bp, Arabidopsis thaliana landsberg
cgaatctccggccggattctgaacggagaaagaacagtcatctccaataaacagagcaacatctcctaagtctctcacttcttcccatctcttctcttctctcttcagattataaactctaaactcaaccacagatttcgaaatatccgatttgcaccaaacggttttcacgtatttgtccacaagaaacacttctccgccggaacattccactagatgtttcttgtgacctcctcctccgaccaaaccttcagccaaatccgaaaccttgaaatccacatcgtaaattacggctttgcccttatcatctacaacgatgcaacgattgtctttgtataacattatgtcctcgtaaatcacattccatgaattatccaaaattttccatttttcatcgtttccactcttcaaaaaccctaatttcccaccactgtgaatcgcaattatcgccgagtcttcccctgaagacaaaatcacaactttgtcggaatgcagagaccagaaacaaggcactgcaccaccaccattgtttgcgtactccatacgataagttctacgaaccaatctcacatgaaactcctgcaagtcgatctttgacgggaaattctcaggtaagaaacagattctgtcgtttgagaatagatccaagactcgcataatccctggagttgtctcttgaagcttaaccagacaagttctcggattcaaaggagcttcaagtttatagacattgctttgtttcagagtgaagaaaccagaggatgaagaagaagatgaccaaaaaggaagatactttgggaatttagacaaacggttgtttttgttggagagaggaagagagagacgccaagtggcacatacagagcggagacagaggagatgaatggtgtctgatgagtcgtggtcaagacgatcggagatcaactcaagaatatctaaaggaagatcagaccattgagaaggaagaagagaagaagaatccatggaagatgacaaaagtgagggattctgttcttcttgggtttaggaattttggatcatgtaacttgtactatatataaatgtctacataatgtcgttatgattcatctttgatgttgagcttaaaataatttggaagttatccgcggataagaaaattgaatatgatatcattgtgtattgctagacgccaatatttcatatatcaaattgatacatttattttagtatattactatatatggttgtctttgtggtttatatgttgcatgatgtctatttaaacatatattagtggtaagtagaccatgcttttgcaaatgttagatata

SEQ ID NO: 56636 - DNA, 522 bp, Arabidopsis thaliana landsberg
tggattaccaaaggactggtggggtaataaacaccagacaggacaacggttgattcataaaacagctcaaggaactccaaaaccttttcagctacataccaatgttgttcattcagtagaggatagccatagtgtgtattaatgaacacagaaaacacagacttatatggcaagagatgttttagcataagataagttgaattccatctaacatccatgtctaaaccaaattttctaggtctacaaccttttgctttgcagtaattactaaatgaaccaattctctggttagaagagtttaagaaattaatagcagtcctaaacacatctaaataatccttaagccttttcaagccacacttcactatcaagttaataatgtgacatgcacaacgctgatgaagcacactataagttttgttactggtatctgttggatcaacatcagcacccaaataaccaacaagcataggtgacaatgtgagcatgctgaatgtactcatcccaagcatctgtgtcagc

SEQ ID NO: 56637 - DNA, 1074 bp, Arabidopsis thaliana landsberg
gaaaaaaaaatttcaagataatattccatatttatgcatacataaaactatgtttaggataataaattaacaaataataccataacgaggtttaatttaatttaaaatttaaatttccataaacccattagagatagaaagggaaagagagatttacaggaagagataaagaaaaacaacaatgacgaagctcttcttcttcttcttcttctccttcctctacacaatcacaaccctaacatttccgccattaacaacctcagcagcaacatcatgccgaacattatgcggcaacatcccaataaactacccgttcggcatcgacggcggttgcggatctcctcaatacagaggaatgttcaattgctccaccgatctatatttcaccactccttccggcagctataaggtccaaagcatcgattacgagaagaaaacaatggtaatcttcgatcctgctatgtctacttgctcgattcttcagcctcaccacgatttcaaaatggcggatattcaaaacactcttattagaccttcgtacgacaccgttttcgcacttttcaactgttccaacgattctcctgttcataatcgttaccggaatctatgttttaatgccgcgggccactcttgcgacgagatttatagctcctgtacttcctttcgaatcttcaacaccacttctccctatggtatgaatcgctaagttgaacgatttgaatttcaaaatctcgtcgaaatttctcgattttcccccaaattttgaaatctgtgtttccaggtaacaacagtacggttcatacgacgccgtattgctgtttcactaactacgatacggtgcgggtgatgagtatgaacattttggattgctcacattacacgacggtgattgacaatggaaaaatgagaggcgtggggcctttggattggtcctatggaatcgagctttcgtactcggtaacggagattggctgtgaccgttgccgaaagtcaggtggcacttgtggctttgacgccgagacggagatctttctttgccagtgttccggttccaacaacaaccctacgagagaa

SEQ ID NO: 56638 - DNA, 927 bp, Arabidopsis thaliana landsberg
aatagatagtggtgtgattttgtgtgagaagctatacgtgactacgacattattagtgcgaccgatgtttatttagagagttctaattacgaaaaagtaatcatagatctacatatagtccactaattgaagtcattatcttatagtagaatttgataggatccatttgaatttccgagtaagtccactaattgtgtatacttcacgttataaaaaaaaaaaaaaaggaaatcactcaaacaaggttaaaaggaaagttaattccgtttacgtatgtgggctgcaaaaaaaatggaacctaatcataacggtaagagaatactaccgtttgtatatatattactgttacaacttacaacaataatatattctcttactgcgtaacaacaacatatgaagctaaattatttgagtgacttgacgttgtttagtctcattatactatagtttgttctcgagcagatccactaagtagtctgtagcgtaatctagtggttgttgtatggcttgtctcatgaaacatgaaatcaaggattatactacagtctcagggcaaattagaaagcaaataggaagtggaagttttttttttttcttctgcctattcaattctctgctttgtggatgacgacataattatggattaagtgccaaaggactgatgaagatgacgaaataattatggattaagggccaaagatatgtcttttgacttttgtgagacttgaaaagtaaaaattcaatcaatagacaaaatcgaaattgaaatatggcatgatgaaatattgctactttgaacaaattatagcaagaaaaaacagctggaaattattggtaacagtactgataagtagtcgcgaatttggtaccatatatctcgagcattttaactatcctggtcacaattgatcggttatactaactcac

SEQ ID NO: 56639 - DNA, 1038 bp, Arabidopsis thaliana landsberg
aatagctagctcaccaatgtccttagcaaggatggctagaacaggaagaggatttttctggttcctaaatgctctccggcttgaatctgctttctccattctctacagaaaaacgaaacacaaagaaataagttcaagaaaattgctggaacagctgtaaatatagaaataaaacgatagtgaacatcctccacgacaatgcaaatacttgcctgcgcaaaagaagttcgtagtgaggacctgatgtacgtctcaatcctggtacgagctacatcaacttctcctttccttcttctacggtactcgttagatatatcttcaactaatatcctggcagctgatacacccaaagaaacaattccctccatggtatgaatatttcctcggtcaaaagtgtcatggtatgcaaggagccttttctctgcccatcctaatatagcactcagtgtagaacttaaaacctgggagtattcaggatcctttgttgtctttgcatctttagcaacttctgccagttgagaatcacaagcatgaagcaggtccatctcaacttgtccagtaacaacataacgactaaacaaaagccacgtaaaacagaggttatgcagcatttgattgattccaagaattacccacgtcttctttatatgttccattaggtcgtcaacttcctcaaccatggacgtcgcatcattagaatcaaaacacgcttctaaaagcaattcataaagcctgagattaaacggagatccatcagcccagtgacaagaatcagagaaagacccatcagatctagttgcaagagacatgaccgctgatctaagactttgcatttgctcattattccttccagtctccaaaggccgatgtaaagcaccatgaataatctgtcgcagtcgttgagaactattcgtcttatcaagaggtacacgaggatgcaacaaaagacctgcctcaagaaccttcaatgatctcttcagccaagcatcatattcttgatgaacagtaaaatcagaagactttagctgctgtaacaac

SEQ ID NO: 56640 - DNA, 632 bp, Arabidopsis thaliana landsberg
aagattagccaacttcaaatgcgaatatcttgaagccattaactatccagaattttccgtaaaaattgctcatttaatttttctctttctaactgccacgtaatttcaaaatcatagtaagcaccataatacctttctgattttcattttctcgtttacgctctaaattgaactctgaaaatgatttttgatcggtatatgtttttcatttattttcaatcgagaatttctactaagcacctttaagggatttgtgttgcttacaagatttgatatgccaatctaaatacaaaatttttcattaattaaaactgtatttttaattttatgaactatcgaatggcagtaactcttcaaaagtggactggtcctttaaattataaatttaatcgaaatctcaaaaaagatcttgatcttcatctagaaacatcagttacaaaaattcgaaccaaaatcaaataaataagcccacataatcaaagtgtaaaaaatgaattctgacccttttgctttattagctgttaaaacagaaaatttggtttattagattttagcgacgtattgtcttgataggatcatgtaaccaaatggacaagcatatctgtacagagtgttccaaaagtttttggggc

SEQ ID NO: 56641 - DNA, 441 bp, Arabidopsis thaliana landsberg
tcgtgtgtatgcttatgctatcgaaatatgccaacctcacgtgtattgttaaacaaagctattatcgtgccatccttaaaatcacgcaagtacgattcagatgttaccaccgctcttaaagctgccaattataaatcttctaagggtcatgtcggaggacaggtgtcggcgagaggaacaggggacgcgtgcggcccgtgcagcaccccgtcggcgatcaccttgtacaccgcctccgtcgggtgcgtcccgtcccaggacccgtacgtggacgggtccttgcagacggagcacccgggcctgccacacggcacggtctggttcccgcagcaagtccgcagagcgtttgtgaaccctgcatcaatcacactttttgatcagtcagtcagctattggtctttctgatgataaggaaatgggatttcaactgatgaggcatca

SEQ ID NO: 56642 - DNA, 433 bp, Arabidopsis thaliana landsberg
gctcagcttcaccggttcgaagacctacgacggatccagctcgttcgacaccggcaccatcggctcgctgtcgggcggtttcgtcggcggcgaccagctcgtcgtgggcggcacgggcaagctgagctccgcgaatgccggccactacggcaccggcgcaagcggcgtcaagggcacgccgaccggcaccgcgcagatcggcgtgggcggcttgaccctgagcgcggcgcccggcaactccgccaaccccgacaactacaccctggtgggcggcaccgacacctacgacatcgccaaggccgtcatcaccctgacgggcgtgcgccagtacgacggcaccatggccgtgaacgggaatggaagcgtcgccctcgtcaacggcacgcccgcagcctgcgccttcggcaaaacctgctggggggccttcagcggt

SEQ ID NO: 56643 - DNA, 888 bp, Arabidopsis thaliana landsberg
gttcatttagtctcaaagttgataaagcaagtcttaattctcagacggtcagactcagacagagacctcagtcgtaaaaaaacaattcttagacctaaatatataattaatcaatagtgtaatgacccattgtgaactaattcgctgcatctaactgtgagtacctattattgttttataaagccgcaataatcgtaaatatcacttttgacttcaattttcaattttacaaattatcctttattctagattacgaactttgatttgttttcaaattgaatacttttcctaaagaaaaagcaagctaggaagaagcagtaactatatagagaggtaacctagtgatagtgtttcaataatcaacaatgaacgcatatttgtgtttcaagtacacctactactactggtcacattttgtgttaccaatgtagtttcttttgtaaaagtgaggaaatagtgaacaaattaaagtattcaatattataacaaatggttgacgtgtaaattagatgcaaaatggatacgtaaacagcaagaggagacatggttttcagagacgctttgtgtttattaccaacaaggcaacaacgcagctttcttaggtctataagcatgatgtgagttcttttagctttttgcaacactttcaaatagaaaaacaacaaatttgtgagtttctaatcaaataaaaaacagttctttagttttttttttttaaaaaattgattctacataaactactatttcctaatcctttagatcagcatggaatattttctatatgttgttacacattgcgatggaagttagaggatgagataggcaaaaatggagagagtcactgtcacgtgcggtttttggggtggttaagagtagagagtgcaatat

SEQ ID NO: 56644 - DNA, 856 bp, Arabidopsis thaliana landsberg
  unsure (1)..(856): unsure at all n locations
tgttttaaaatagtaatatgcaaaaatcaaatatatgtcaatcaacttcgtcgtcattttttatcgatttaaaatgcataaacaatttgtgaattcattgcgtttctgtgtatattcctgacatgatcatgatcgggcctactggatctgacttatgatattacatccagacgtacatttggtcttagtgtttattacttgtatgatattagtagaaaatgtcatctcacaaacggaacggtcatagttaaaaaaacctttctccactaaatgttttataagaaaagtaatatgttactcgtagttaattttctaacgaatgttatatacaatcacataccgatacttttttctttcttttcttaaaccgttattgtactaaatgtaaaacttgaagaaacattcaccgaagcagagaagataaaggtaacaacaaaaacaaacttatcaattctttgccccttaagtattgataattaaccatccaaatgaaaaagattccaatctttgtattatttctttgttttctccatcctccgatcaataatcacgtcttctccttcttcaccggaaccctaccgtcagtaccagcaagcattgcgtacttatcctttcttgtgnnnnnnnnnnnnnnnnnnnnnnnngttcctcccaaaaccctctgtatgtaattcgcaacctctatcggagatttgcctcctttacacgtcagctcagctggaatctgtttgaggaacgtgatctcatacgtcggcctcgggttcatgaacgcaaagtaaggatcaagaagcttgtatccacgtgtggtggtaccattgaacatgctctgctttgtgttgatcgccacgggaacgat

SEQ ID NO: 56645 - DNA, 700 bp, Arabidopsis thaliana landsberg
acaaggaagcatcaatgcatggagtgtcatccagacatatagaactacgagatggaacagagtttagctttccaacgaacaaaaagaaaccttcatatctcgataggtatccaggtacgttaccaggtggagtgctttgcttagcttatcttcttgaaacgatatcataaaattaataaattgatatgctaaattgaaaaggcttgtttctgattccatacacgaagaaacttcgaattggatctcttagaatgttagggaaagtgttgtttcatattaagttgtggtttggtttgattccacagacttcaaaaagcagtaccttgactctttgcgtgaaaaggatgagcgtaaagctctgaacctgttgcgcgggtttatcttttatataacggtaaatgatctggtttatctggtcttttcaattgttctaaagagtagagatactttgttatatatgatgcaactgatgttgttgtttctcagaatgtggttcgtgatgatgcattcaaaccgtggctcgatcaagaatgtttgaagatcagatgtgtctgacaaaagagtatcagcacttggagttctgacagaagactactaattaggagatgtaagacctttgtttcatgaaataagtttggacaagatttgcatttgtgtaaaattagcctcaccattgtgtagtagttcatgactcaagact

SEQ ID NO: 56646 - DNA, 352 bp, Arabidopsis thaliana landsberg
gcacgtaccagtttcgccgatcggaacatcggccccgacgctcctcgacgtcagagcgcatgcctgcgcaccatggggcgtcgtttaagttggatgaccgtgtcggccgctgcgttagcccccgggtatcggagacgaccgaggattcccgcggtgccggccgtcggcgtcgacgagcacgacgagctggccgaactgcctgtgatcgcccgggacaacacgcccgccacgtagatgatcgggctggggtattacgacacccatacgccgccggcgttggtgcgcatgcagctggaaaaccccgcgctggaacagcgactacgcgccgtaccagcccgatattaaacagggt

SEQ ID NO: 56647 - DNA, 937 bp, Arabidopsis thaliana landsberg
aaaatacaagagatgaacgtaaagagagagcataaaatgtgagtgggggaagatggtttttggttttggaacaacaacaattgatgctttgacaaacaacaacagcaagaaatttgtgtgagagtagagagtcttgcttcagttgaatcaaagattggtcctttttttttcgttttctctttcctgctttttttgtttgtagtttctgatctctcaggaaggctttttataaatttgccctcaatttctccgtccctactactctttttgatcaatttctacgggaaaaagcacgaatctttaaacccgggcatgtccttgtaatcgagtatgttgtgtaagtgatgaatttgtggtgagatctggtgagaagtttcctctttttttctcagattgcggtaaaaaaaagagtttttaataaggaagagattgagattagattttatcgcttttgtttgtgtgatatgggtaacgtgaacgcgagagaagaagcgaatagtaacaacgcttctgctgttgaagacgaagacgctgagatttgttctcgtgaagctatgtctgctgcttctgatggtaaccatgtcgctcctcctgagcttatgggtcaatctcctcctcatagccctcgagctactcagtctcctctcatgtttgctcctcaggtttttgttttggtttcagattcgatgtcttaatctggaggatgtgatgaaagagagagatctgtagcttttaaagtttgtgtctttttttaggtttcggtgcttccacttcaaagacctgatgaaattcatattcctaatccttcgtggatgcaatcgccatcttcgttgtttgaagaagcttctaacgaacaaggaattcctactatgatcactttggtgtcatggaggcaaggagattgctggtgagggacatgggataattggaagacaag

SEQ ID NO: 56648 - DNA, 895 bp, Arabidopsis thaliana landsberg
acacttactttaaatgtgacccagactcaacctatgtagatactacttacctgctgctgcgctggagatatgcgagacagctttgttcatataatctattttctatatctttcattattataagactcctctccaaatgctaccacacaattcctctatcacagccgcccaatcctccatccaaaaatggcttatttccggcgagcagccaccgcattggttctcattttccagctccacctctttctctccctctcaaatgcacataacataacccgaatcttggccaaagaccctgatttctccactttcaaccactatctctcagcgactcatctcgccgacgagatcaaccgccggcaaacaatcaccgtcttggccgtcgataactcagcaatgtcctccatcctctctaacggatactcactctaccaaatccgcaacattctctctctccacgtcctggtcgattacttcggcaccaagaaacttcaccagatcaccgacggctccacctccactgcctccatgtttcaatccaccggatccgccaccggaacttctggatacatcaacatctacgatataaaaggcggtaaagtcgcttttggtgtccaagacgacgatagcaagctcacagctcactacgtcaaatccgtctttgaaaagccttacaacatctctgttcttcacatcagccaagtcttaacctcgccggaagcagaagctcccacggcgagtcccagcgacctcatcctcaccacaatcctcgaaaaacaagggtgcaaagctttctccgacatcttgaagtcaaccggcgccgacaaaacgttccaagataccgtagacggaggcttaacggtgttctgtccctccgacagcgctgtcggtaagt

SEQ ID NO: 56649 - DNA, 830 bp, Arabidopsis thaliana landsberg
gggcttataagggcagtttatgagatggaatctgaagcttttgatattgaagatggcaacttacttgctgaagcatggaattggatccgatacttatcattgttctaacaatgtggactagctgttgaagatgttatttcttggtttgaaatcccagaagatacctggtttgttcttttgttactggaattatcttttgttttcttccagcatttgccaataagccttcacttgggttcaatttcttttagcttttgatttaagaagtgaatcagtttaccatggtcaatttttcggtttgcatttgattttctttaaaatgacatgttttgattttagctcagttgagaaaagttataaaccattagtgattcaacgttagttcataacaaaatacgtaataaaatgagtacagatttgttatgaaaaaaaatcaggaaattctaacgaccactttattcttcttgcctgctgatagaacaagacctctcccttcaacaatatcctcttcgtccactctcttattctcatcatcaactctctcattgttcatataaaacccaccttgcttcaacattctcctcgcagcagatttgctctcaaacaaacctgcagaaaccgatagatccacaatcgataaacccgacactcgatcaataggcagtgagcaagaaggtatatcctctgctattctctcaatcaagttccaatcaagctttgtctcagcacctggtcttaaagcttctgttgctttaatggcttctttcaaaccctcttcgccatgtacgaatctggttacttcttcagcgagtttgatttgtgcggcgttg

SEQ ID NO: 56650 - DNA, 795 bp, Arabidopsis thaliana landsberg
atagcaattcctgataccttcttttgcaaaagcttcttccatgtgaagtcgactttctcatttatttcccacccataatttttagcatcctgccagcagttaaacaacagtatacatcatcaaacacaattctctctcagttgacatgaattgttcatagacatatagcctaaacaataatttaggaacatgaatacaattttgcaaatattgctagggaaaatgactattaagaagtttgcttttacagcttaaagaaagacattgaaatgatgattaaaaaacatggttcatacctcaagttcaccaccgtaagtagctccatagacgagaatctttttaggaacacaaccacggataacacagctgaaagccaaaaaaagtggaaacaaataaaggtataagatcgtgtaagattccaacgtttgataatgcatcaacaaggaacttacgttccaccaacgcctccaatctcctcagagctaatagggtgaaatggaagctcacaaataccaacctacaacaattgattcagaacaaacaacaacaacacattaataccaaaaccagacatacactaatgtctagagatcatcactatcctcaaaaataattcagaccttagcgccatgattagccgaaaacctagcagcacgaacaccgccactcccggcaccgatgacaaacaaatcaaaatcatagtgcgtcgcgttggcttcatcagccgccaccttatcaatctcaccatcaacaagcatcttcctcgccatgattatgcagactcacacaaatcca

SEQ ID NO: 56651 - DNA, 1109 bp, Arabidopsis thaliana landsberg
tttatttcttcttttaattcgccatatgatccaatcttaaccataattaatctatgagatgtaaagtttcaagaatttgtttttaaagacaacacaaaaaaaaaaggtcgtgttaaatacaatgtgcttgatatataaaaagttcgatcctggccgtctcattaaggggacaacatattaatctgatagctatgacctgtgtcgctgtaacattcgggacatgattgcacaacacaaaatttcattaaaaccttacgtttcctttcataaaggtaaaatctctaccccaaattttgaaaccaccccaaattttgaaacctacgtcatcaacaatttatacgcattggaatatagaccaacatttagtaaaacctggaccaaatacaacaagtctgatgttaaaccaccgtttctgtctagctcgattctactgtgatgatcggagttggttcggtaaagaccctaagctacattaaatctataggcaaaaagacagagaaaacaaaaatggaaccgagttaaacaaccttgctcttcagatttgcttcttttctttatcagaggatccgaaatgacttgacaaagtccactgcgtatagttggtgtaaaaggcaaacattataaagtatgagaaacagagaatcatgatcagtgcttcgaataggaaagggtacttctgaggaggtttaatggtaagatagaggacatgaagaactacggagatgaagaaatgggttcgtagtaagaaaacataacccgggaagtttttaaaggagaaaaatgaaacgtcggttttctgtatcgcatggtgattcccgggtgaatgatagatgacggtgaagagaaaagatagtgttaagtaagggatcaagagtttgtcacggcaaagaagagggaacatcgagaagagagcgtaataggttaaatgactgaaatggtcaggtagtttgagaactaatagtgttgcggagagaaaaggcatcaggattgatttctcatgcactgcagattcaaacacaatgaaagaaaaaaagggactgttagatattaattgatggcaaccgtgatcgaagatcaaagtgaaatatttataccttggaaggaaaaca

SEQ ID NO: 56652 - DNA, 484 bp, Arabidopsis thaliana landsberg
  unsure (1)..(484): unsure at all n locations
tatgtgaaacgaaattggtggaatccaaaaaaattctcactcaaccaaaaagttcattaattctcattctgaaaattttcttattcgaatttataacatttttgtattcaagtgtttgtaatgtgaaattgtttttttgtactatgtactacaatttcgcatattgtaacatccttagtaatgttttctacaatctaccagaattgatatttgactgtaaaaccttgttttttttaaataacacaatcccaccaatacgtacacattagaaccttaaaattaaaaaccttaaaaacaaacacaaacgtcacgtcgccaacattggtcattcttttggggatcattcaaaaatagtagagaggcaaaatagatatctaagactctatagcaactatgatgcgacatcatgtttcatacaaagacanaccctataaactctattaagtgttctcaacattgcaagaacagaaccaaaaataaaaaa

SEQ ID NO: 56653 - DNA, 256 bp, Arabidopsis thaliana landsberg
acctttggtgtgtacccgtaccccaagaaaaaaacaagtctccttcttatggattccctgagaaagatgcgggactagttaatcgactatggggtttgcaaggcactagggtgagaacctcccagacagaaccagatgacgctcaatgcaatactgagctggagacactgcttgttcagaccccaccaatggatgccttatatatgatgcatgagggaacacggtctatgaagaagcagagaactaaggatgaaaa

SEQ ID NO: 56654 - DNA, 1113 bp, Arabidopsis thaliana landsberg
gctaatattaagtttagaagtctatttttgattccggcaagtaaaagactgagaaatcatctatattctgtaactctaatgcagttaacaacagatgatttgcttcaagctgcccaaatagaagaaagaggaatgttagatagaaaagacaggagcttggagacatggcgacaagttgcgatcaatgaagctgcaatggctgttgtagcagtgaactttcctgatatgaagaatatagaatttgtaggtttcttaaatctcttttccccttcatacattgaatgaagcttcaactttctgttttaccgcaccgtgacatttcgatgaccttgaccagctgacaatcaaccctagagctggtagagaattgggttatgtccgggtgaagatggatcatatcaaatttaaggaaggcatgcttaggtttgtggctttcatcatacagatttactttcatgattacacgggttctttatgttaatctatatgtcctttggtggtctactatatgtagtcgacaatccatcttggatcacatcactgttcagttcgcaccccgtgctgcagatgaactatggtacggtgaggatcaggtgagagatatgatatatcattttactcttctctaataactgtggtcatatttttttttagtttaccaacctttgctaatgatttgttacagttaagcacgatatgggctgaaacatcggataacgcaagatcagctgctcgatcattggttcttggtggtctttctgataagcatcatggcttgaataacttctgggtagctgatcgaattaacgtaaggccatatcttgacattgttttcacttcagttttcagagaacagatatcatcttctgatacatggatttgcaggatattgatgtggaggcattgcggatattgaacatgtgttacgagcgtgctaaagaggtaaagtagacttctaaatcaactacatctatatcatagcatttcctttatattggtcttgttaaatatatatttacaaacgcatacaccagattcttggaagaaacaggacgcttatggactaggtggtagaaaaactggttcaaaagaaaagttaacgaaacaagaatt

SEQ ID NO: 56655 - DNA, 865 bp, Arabidopsis thaliana landsberg
tcaagtaaggacaattaacatcctcgacaagcaaaacaacgaccaagtcaatataatcatagctaaattctaattgtatcacctaacaaaacaaaaacgttttattgtatttttatgagttttgaaaattacggctatagcgtgaaaggtgagacgtttgtctttagtctttacatgtcaatttacgaaatgacgactgaaatcaaattattctacgtgttttgatgtgcatggcgtttagcttattgtttttttcgatatgcgataatagttttaagtctaccagttttatataataaaatggctattatatttatatctactgtatatgttatttacaccaattttagcaacatgcttcttgactccgactataagtaattgagatggacccaaaacaattataatagtgaggcccatacaaggcccaaagtgaactgaataactaagatacagttatctccgcgccaacacaaaacgacggtaaattactacttgcctgagaaaattttgcccccttttgcttcaatttgttgtttccttaaacccttcaaagcaaaattagggtttctcttggttttcgcaaattagggattttttctctcgttctcatgaaaagatgagtttgatttccaaatccttggcaagaattgaatgttcgccatttttttatccaagagcttcagaaatcactaccggaaaacggataacctctccgcaaatccgtttatacactgcggcggccgtcggcgggaaaactggaaatggagaaaggaaacaaagagccaaagcaccggcgaaaactccggaggcagtgacacctgtgaaaccgctggagattgcgtcagtcacgacgacgacggag

SEQ ID NO: 56656 - DNA, 1407 bp, Arabidopsis thaliana landsberg
acctcatatttatggtcaaaatttggaagcaaaaaaaacaaagcaatcttaagaatttgttcttattaacgaaaataacacaacgttataactaatgtgttttactttggattggatagagcatcctgcatccacaaacgttggaccgaacctgcgtggagagaagctcattacggcttagaggatgaagttgatcaaaaattcgaagatcgacaacgaattgaagcgatgagtctcgtatatagtgagctttgtgcttccacctcgtactattcagttggcattgatcagtctactattacatgtcaattgatttcatctacaaattggttgtaagttatacgttagaatatgcacatggacctctatttctatagtatcgttaacatgttttctagcaattttgttcgccgatcatccctaaatttaccatttgccacgaaatgtaggcaatagacaaaacaaacgtaactcatttagatttaggttcattttataattaaccctcgcgtaaatcaatagagatcaccactttcgttatttccgccaaacaaattaaagaggtgaaaaatattcatcccttttatatattactcatgtagcaagatatcataattgaattccaagcgaagtcatacataacagatgactcaacaaatttttttagtcattcataacaaatgagtcaactaatataatatctttgtcaatatctaaaacaaagttgtatgtaaaattatgtgtgtttttcctaatttttaatctgaagtcttagagctgggggccaatcacattattttaggataaaaacaaaattagcttactaactatactattatattatcaagtataccgatcatccatattcacacacaaattatatattcacttcctcttcctcatggaatacagaaaatgttggaacttctgtgataaatgttagaagttattgcgatttttgcaaataaaattttaaatatgtcattgatgttctgaagtccaagtgatttaattcaggcctaactcatacgttaccacaaagttgaatatggtaaaattggtaaactaccattaatattagatgatcacaattcactagtctatatgtgaaactaattaaaagaatcttagctaaagaaaaaggaagaagaaaagattcggaacctgaacacatttttctaaaaaaaattcttaaagtttaacacaaataaaacataattaattttgttgacagaaaaagcaaaattttagtgattaaaagttgtgtaattaacatttgattaatatctgtactctatattagcaagattttttttttataaccgaagtcgcaagtgatgctgtgaaaccttgtgcttcactgtcatgcactttgtcagcttccgtccggcatcgcgagaaaaaaaa

SEQ ID NO: 56657 - DNA, 954 bp, Arabidopsis thaliana landsberg
gtcgactctccctcgtgaccatatgatcagaattctggatatgctccacgtggttaggagggttgttcttgatcatccagtgctgaaactctttcaccaataacgaaaatagccatatgaacctttttgtagaacaactccatggccttaggaatagcaagccccactcaaactatgtgccagaagaatcaccttctcatcctcacctagactctccattaggcccatcaagggcccaatagactccgcaaccaaccgtagagtctcaggccgttattgatcgattctggatgccgctaagttgaccgcagttacgttatggccttgagatttcaagaatggtatagtttataccaaaaaccaagctccatgaaccatcacaaaatgggcccggccatgttgcgggttgtggcgtggcggagataggacggtagtatcggctgatcaatataacaagaattgaggttaagtaactatttgttttgctcaccattttttcttttcactttattgcgagcttgtgatgaacgaatgttcaaaacaattatatagtagaaactaaataacgaggtgttgacatattgaacagttaatatcacaaaaacattatttgatcattcttaaaagtgattataaaaacagatatactagttggaatcattttcttaatttaatcctttgaaaattttcttcaaatactatactactaagaaagtcttttttcttaacaaaaattaaaattttcaacaatttcgtacttgtaaacgtctttggttgtgtcaataaatatagcctacagtatcagcaattttacaagaaaacgttttaatttgtttcactgttttcccaaagagttcaaaacgcaaacgtcaaataaaatttgaaatattcacaaatcacaacactaagcaaaagagtttttactttttttttccagactgtaaaaaatattgg

SEQ ID NO: 56658 - DNA, 370 bp, Arabidopsis thaliana landsberg
gttctacatagggtttgtaagagctaaaactttaagcgtgagctttttgtgaaacaaatgaaagttagatattaaccgttctcttattctcgagatgattttcaatcgatggttatgctacaaagttcaagtggctcgttcaatataatgagctcttttgtgttcaacatgaatacatgatatcaaacggcttaaattccgtttcatcttttttatcctaagtttatgcttttggtgttaaccatgcatttggcttatttctatacccgattctattaaaactctttaatatattgtaggttttttaatctaattagaaattatttaggtttgccaacaacaacaaaaaaaacatactttcttgaaacgt

SEQ ID NO: 56659 - DNA, 396 bp, Arabidopsis thaliana landsberg
cgtgtctaataaatgttagttaccctgcagaaaagtacactctggtttatatttaaaggaaaacgagccagagagcttgtataagtttcttctgattgttggtgtaattacccagctcgttaaaccaagctttaacaacaaattcttgcatgttgtggtcaactgctatccaatgtccagtgtggcttgttgctcttggctagtcagcgaagcatcccgtgcgccgccacgtccagtgcctttcaagtttcaacacccctgcagtcgctttcttcccagttccaggcgagagcctcgctttcctgtttgacatcggccgtggcagacgagcaatctgcgtatactcgagcgctcattctcaaccggagcctggtatcaccaccaggtagacctgca

SEQ ID NO: 56660 - DNA, 536 bp, Arabidopsis thaliana landsberg
  unsure (1)..(536): unsure at all n locations
cgcgcgcccccgancctcgcactcgacgcaatcgacacgatgacggcgcagccgttttctaacggcgacatgctcgaggtctatgggcagaataagtttgtgccggccgtcaagaagctgaagctcagcaaggaagagcagctctgcctgacgcaggcgatctatcacgaggcgcgcggcgaaagcgaagccggccagtgggccgtcgccaacgtcatcatcaaccgggcgatgagcaagaaattcccgacgagcctgtgcggcgtggtgttccagaacgccgacaagggccgctacaagtgccaggtcaccttcgcctgcgacgggcgctcggacttcggcaccgagacggcggcctggaaccgggcgaccaagatggcgcaggtcgccttccgcgagttccaggtgggcgaccgtccgggcgttatcccgaactcggcgctctactaccacacgacctccgtcggcccgagctgggcccacaaattccaccagggcgcgggaatcgggtcgcacggggtttacgccacaaactg

SEQ ID NO: 56661 - DNA, 1406 bp, Arabidopsis thaliana landsberg
cacaagctttttcgatctgctctttccaactaccatgccttaagttaatcgcaatcggagtcttattcttcttaacaaactctttccccaacagcttcggcaacatcggcattagcctcctctccgcgaaatacaactcgaatcgcttctcctcctctaatttgcgtaaatcggatttcaatttagagactttaataactgtggtgattggaatcttctctgcttcgatcttcttcaaagccgcttcctttgtgattttgttcttgtgtttgtcgtcgatgatcaaacagagctccggcggatcttcggcgaccagatcgatgagaggatgaggaagagggatcatcaaggggttagtacgatccaactgagggattctcttcagtgtcacgattagatagacgaaaccgtcgttctcaagcgattcagagttctcggtcttggatttggagtcccaccattttagcagagacttcacggctctgttaacgttctgcgggtcaaccttcgactggtgtcgctgcggaagtgcagccgtagtagtagtagtactcattctccggtgagaagacggcgcagtgaacacaggttacgtttgcggaattagggttctgagcaaaaattatagggtttacgatttttttctttttttttcttctttcgacattttattcgatttttttttttgtaaaactcaaaaattatatgcgttttattaatgatgcgccactttatccttttttctgggggtaaaattgtcatctgctcaatcgttttctctgaccgccggcgaaactcttcgcgcttccccgactgccggcgaaaatcgacgctgcttcccgtttccggttaattaagagctttcctctgtacctcttcaactcattgtaggctgcgtcttcttcaatggcaacaaggaagcggaagaacgctgattcgtgtagtgacgctcttctaaatcagagcgaattcgatctccgaggcagatattcttattcaattatctcaatcccttggcaccgtattctggtaatgtttccaaaataaagataaattgcaatcgctttaatttctgattttgtggtgagtgattgaacctgtgtcaattctatgctgctgagtgtttctcaggttgatcataatggataggtgcgacgtgcggtcatttgacattgcgtcccattgtataaagttcttcatgtgacgggccttgatactacttcctacgtaatggtcagtatacttcttcattattttacaagaaatcttgaattgtggtattaacaatgtgttgttacttttgcagatgatgtaaaagcttttttggtctactaagaagataaaattagaacctgttaatattgattttgaatataggcttctccaaaatctgatgttactgcaat

SEQ ID NO: 56662 - DNA, 331 bp, Arabidopsis thaliana landsberg
  unsure (1)..(331): unsure at all n locations
cgatctgtatttacgaagagctacgggaacgcctccaccgcaaaattgatgagctcaaaggtggtttttgtggttcanatagaccaagaagcaatgagagaaggaagaagaatctgccaaataagagaaagagggatacagtttctgaggagaagactgtggaggagattaagtcagcagataaaggtaagggtaagttggatgtggaggaggctgcttaggaccttacatttggttatgtcaagattgatgaccatgaacaacaccgaaaagagaaaaagaaaccaacgctttcaaaggcaagagaacttgtaagggctattaagttaga

SEQ ID NO: 56663 - DNA, 210 bp, Arabidopsis thaliana landsberg
cgtccctccaatgatctcgagattgaagattggctctctactgataatccttcagatatttacattatcgggtaagttaaaaagtcacttcaaattttactattttcaaagaaaattaactcttttttttcttcttctcaaaaacagagtattttcctctgttttgatgaacctatatatctttattgatgtaaaacttgttataggttt

SEQ ID NO: 56664 - DNA, 792 bp, Arabidopsis thaliana landsberg
ctttaccgagccttgaaccacagcggaatccgaacatggactggccggaactagctgcggatagcaaccctcagatagttggatcagaggggaagctaaggagggtatttagcagcaacgcgacgctaggatttaagctaccggagaatccatcaggagctagtagatttgcttcggaagcaagacaattgaaacgctcacggagctttgaaactttaaacttgagttggaatgatataaaagaagagattgataataggtcctcctcctcgtccgaagcggaagaagctgcaaaaatcatgcatgatgattcatcagacggagattcgtcttcccaggacgaagaggatggtgacaagatcagaaatagttatggattgccggaagatttggtggaggagtgtcggaaagtgaaagatagtcaaaagtatgtaaggatagtaagtaagcaaatggttgggatctatgtatcggtttggatccgacgacggttaagaagacatgtcaacaacctgaaagtctcaccggtcggagttggcttgatgggctacatgggaaacaaggtaaaacaaaaacctaaccctatcttcctctccaagtaaccccaaccttaacttttttagcactttcttaatatatttgatatgcttgcagggatcagtgtcgattagcatgacgttgtatcaatcacggatgtgttttgtgtgctcacacttaacttccggccacaaagacggtgctgagcaacgccggaatgctgacgtgtacgaaatcatacgtaggactcgtttt

SEQ ID NO: 56665 - DNA, 170 bp, Arabidopsis thaliana landsberg
gattataatagagcagcatccctattacgtacaatgccatgctatctgaaactggagctctcggcttttgtcttaaaaacaagctaaagatgtccttgttaaaaatgttgaaaacactgttttaagtgaagttcgaaaaatgaacggtgcactagacactcttctcatga

SEQ ID NO: 56666 - DNA, 470 bp, Arabidopsis thaliana landsberg
  unsure (1)..(470): unsure at all n locations
tgggcaccggcagctagagtaattgcatatatattctaactaaaacaatagttnatgngttaactgtgaattatatattttggttaattgtttttgaatgaaatatattttagttattggtttgctaataatatataatatacttgtgagtttgaatttagtagtacagtgatatcactaacactaatcacaagactacatgttttgctcaatgtattcaacttcttaaaatgttattattggatcctatccgtgactcttttgatgtttaagcgaatataaattttgtttgacataaaaaaaacgaaaaaaaaacgttgttacatttatatatatatatatatataccataccgaacgttcacaaattataaaaggttgatattttatattggatatctttaaaaattatataagtagtgaatattttttgcggtatactatattcagtttactacatcatgggacgat

SEQ ID NO: 56667 - DNA, 1144 bp, Arabidopsis thaliana landsberg
caatatatatcttttgcattttttacatcatatctttttttgcctaaaattttatacgagaaattttatactattaataatcttattgcctaaaattaaccacttctttttttggtgttctatttcatgcaccgatattaaaaatcgtaggaatatcgatggccaaaataaaataaaatggaagaagatctaaactttgtattttatactggtcctagtcctagaaaatcgaattcttcagtgttttcattaaatgcatagttcaacatattatttggcatgatagattgtctgcaaatgacacatcacttttcctttctgcaaaaataaaagactctataaagtaactttagaatttattcagttcctcaactcgatctagtctctttaattaagcaaacctaattattttaaacgaaaataaacaactcctttttagtgactgaatgattttttggagaaaacatttttctatttgtgtcaaataacaaaaaaaattcaattcttttttgtacattcaattaaaaacataccaaaacatctattaacttcttaaatattttttctcaaatttgtagtccaaaaaaaacacgacgcgtatgtttttttgttgctgttgttgtgtaataagaagagaaagaacgtaaaagaattgacgcggacgaatcgtgttagacccaaaaagaacagctttcaattccattgtccaaattccttaacaaaaaaactctactctcggtggcaccagatcactcctccttctctcttctcctacctttttcacattctctccttcttcttctcgtgagagaaagaaagagagattctttattcattagatcgaagcaaaaatgtccacagcgccgtctccaggcactactccatcaccatctccaccgtctcctcccacaaactcaacaaccaccactcctcctccagcagcctcttctcctcctcccaccacaactccttcttctcctcctccgtcaccgtcaactaattcaacctctcctcctccttcttctcctttacctacttctcttcctcctcgcatctcctcctggatctttaactctcctcttactcaaccttcccctccgctcccatgactgcttctccaccgtttgccaccacaccctcaaac

SEQ ID NO: 56668 - DNA, 892 bp, Arabidopsis thaliana landsberg
tgttggtatacaatggcgctaagatgttgatggttcaccagtcgatgctatgaactgtgaaggagtttagtggtttacctagtagtctagtcttatcaaataaagtattgctagcaaaaaaaaataatgtccaacatattccctagtgtttagaaatcaatttagagattttatttttggtgcgcaagggtacaactaaatagttgcaagggtttttcaaataaagtaagggttacagttgttcataaaataaatagaaatttaaaatagtttataagtaaaccaaatattgtaatacgcggtttattacaatagataatacatattaaatcttgagactaaatcaagctgaaaattcagataaatacgtactctgtatttactgcttcggagggatcaagaatggaataatcatagatagagatgctgtggggcggctcgatccagacaccaactttctgaccccaggtcagatactcaaagtagtacccttcagggtcttcacaagaactcctgctatataaggaatacttgtaggggtgatttctactgaaaggacaaggagacttggtggaacgcctctcgttgataaatctgctccagaaatacaaaatgttactcattgaccctgtgaggccgtaggtcatcacgcaagacccatcgctcaaaaatattgaggaaccatccaatgtttccttcttctcccaaacggactccaaccggttaagcctatacaccatgggctccagagacgatgcatctacaagaaaaatatgtccttcatattcagacatacacctgattgagcggggcgccatagggatgggttgcacaggaagtacgttccaagtacgtgcagttggattgaatacccctagcgcagtttccgaag

SEQ ID NO: 56669 - DNA, 634 bp, Arabidopsis thaliana landsberg
ccactctatccggtcctgaaaaaagtaaccagacatctccctttgataaaacaccgcgtcgtttcccattcccgagcttgcactgactaacagttgcagccaccgcagcggctgcatcattctgccaccaaactttctcggtcattcccttcaacagcttcttaaacaaatcaatgtctaacgaattcccaagattctccttttgcaaaacactgatgttattattgttctgcactgattcagacgatatgcagccgagaaagtctcttacttgcacatctcctgctttctccgaatcctgaaatacgcaaacgcaagtatttagcgtcaggtttgtgatttcgattagataaacattttcatcacagtatacaaacattcaaatcaacaaacctctgctcgtccaagaacaagatcggtctgaaccgggctcccgggaggactcttcttcttggcctgctcagccaccaaaggactcataggcttcaagtgtaccctctcacgcaactctctattaggctgtaacttaggctgcaacggctgacgaagaagcatgttaggactgtaagggctcgttgtcaacgttataggaaccgggatcggaacaatcctctcgttcttgttatgaaagcta

SEQ ID NO: 56670 - DNA, 1032 bp, Arabidopsis thaliana landsberg
aatatggttagaattaagtatctacatcaaatatgagtaagtgaagtaaaagcagcctgattgtattcgatagtcccactccttcctactagttctttaattttataggtgggactgtgggagtttagtacttgatacatattctaaattttagagaaaattatgtatttatctaactatttttacagcaaacatttttgctaaagtgttcgtaattgtgagagactgcaatgtttctgtgaaacaacaaaacagttacagagtttgatctattcaataatcatcacatctctcagattttacttgagattcaattcttgaaacttttgtacatttcaagaaaaacaaaagagatccattcttgtttcctccatatagagttctctacgcgtttttgatcaccggagatcgcgctttcaagttcagaaatatgctcctaaatatattaaaagacaaagatgttaccagaaaactctcttcatatcaaaatgagagaggacggtaaaagcttttaccagcaagaggcgacgaagctgctgaacaaaacgcggaattggagaggcacatactgataattaacccatcccacgataggccagaactgttatttacatagacagttttagaaattaaaaccaaccaaaagtgtaacaaaatgaaatggtagtgagtctcatttattaccttccatgcggttaactggatagtagggtaatcttttccaagtttgtgcttcactagcttccatggccttcctgtgaaaacattacaggacaatgtcagatcttaaactccaaatcacaaatcactaaagagaaaacaaaacaattcatttcagaactagaccatggtcgttaccttcaactactaaaccatagtaagacatgaaaagaaaattgttccaaggagatgatgtaagttgctccaacaaaacctgattcaacacagtttttgttaggtccacaaaatccatccttaagcacacagtaagagatctctgtacctatattgatcatacgaataactcgaact

SEQ ID NO: 56671 - DNA, 392 bp, Arabidopsis thaliana landsberg
tgatatactattcaggtaacatactgcagtttgaggacacatgttacacagctacaatagtaaagtgttaaagttagcaaaccgtgtgtaagtaagaaagccactcattatcggcaattttggagatacgaaaatgtaagcagctaattcaaatagagaggccagattcacttgatagtttaacaaccagacaacagttagttgtcagtattttcgattcgattgtctaatgaatttagtatgctgttacttcagaaaccaaggattgaatcgtattgtgtattggtaacagaatcaacaaaactgttccttgaaattgaaatttgatatttacatttgataaacttcaagtctgccaactaagacttaccgtaagcgaggcttcatagtcg

SEQ ID NO: 56672 - DNA, 2434 bp, Arabidopsis thaliana landsberg
atcaatcttcatgtaaaaagtttgcagatgacttgccatagcatgtttatctgatggaaaatgtcgaagggcctgtggtcacataggaaacaaatataaggataaattacaaattcgaagtaaatggaagatactgatttttacagagttaagtttccacaacctcgatacagaaggagttcctgacaacagaattatgtgcttaaccttttcagcaacatcaaggactgtctttatctgcaaaacataaccgaacgtattttgactaccaaccttttttaaaaagcacaaaatctccactcagagttaaggatgtctcatgaagtgttagagaaagtgtcactgaatcatctctgtgtttatcgaaggtaattaaagtcaaccaggaaatcatagaaaaggggacacaggaagccatgcttaaaaatctcattaatgaggaaaacgaattcttacatacctcaggtggatctgacttctttttcgaacatcgtagatgatgagattcatctactatcaagagggcccattctcgctctagcatggtcgtccggagatgctgaagcatcttgtatgagataaccacaacttttggccatcttggtaaataggcaggattatcttgatgaccgaatactgaaaccaaaagtttcatcaaacacaactcgatttgaaaagatagccaattaaagctttagctttagagctccagaggagaaaaaaaaagtattagagacagaaattgctaaattgcaattctgtattccatcagttaatatgtgcaggacttggaagtgaaagataaaaccagaaaggtaacacgcaaaattgttaattctgtattcaactaatgtagctaacaagtgcaagacacataagtttagaagagaaaagataggcaattcagtagagacttttaccgagatgtacgtcagaaggcaaacaagatggcaaccaacgttccaattcttctgcccatgtgaaacgcaaaacagcaggacagacaacaagtatggaaccctcacttatgaagcaaccggcaatggcgatggcctgacacaagattgaacactcaagattaactactttaccaaactactaaaaactttcttctacaataccaaatatataacctgaagcgtctttccaagccccatttcatcagcaatgaaacacctgccacctctccgtaaaccaaatcttagaccatcaagttggaaaggcaaaagggcattcaccaatttccttggcagggtttcaatcagttgttcaaccttctcctccgtataatgttcaggtaaacaaggttgccatttcccggaaatatatgactgagaaagtttctcaacaacagccaacgttttccaaggtaccccttcaacttcaacgctcttggaccttttaagacatccagagaccttattgtagtctctaatcttataaaccccagcttttcctccatcatcattttgagtgtagtgtaaaggaatcgcctgaaagtaaaatcaactagaatatcaacttcgttcttcgcattatactaaaacccctaaaaaatcggagactcaaaatttccccttttcgtaaaattctcttctacatttcgtcaccctttaacaaaaaacaaaactttacgcgagaaaactcagagaagaacttacatcagatagaatctttctcaattgacgaaggcactcttgttcttcagggcatcgaaacccttgcaattgaaccggcgtaaccgaaaacgaatcaggagaacagatctcgagcctgacgcgaaacttttccggcacactagtactcaatactcgtaccggttcgtagttccgatacccttcttgaggacacacatcgttactaccgtcaagctttcgacatttagctaacctgaaatcttgttgtcgctgtgggttttccgaagaatcgaacgactgctttcgtttctccgcaaaagctaaccgagtcgcttcgtctcttcgcctttgctcttcggaaacctccattgattgaatctgagagttgtgtgaagaagtgaagagaagacattttgaattttgaaacgcaagagcatgaacaagtgaagagcgggtgcgaagaaaccacacgtgtcaactacacacgtgtgaattaaaattaaaatccggttcggtaccaaaaaaccaatcaaaccggatttccaattttataacagagtactatttcgagaaacaaatcttgaactcaagtcatctacaatcttcaagacctctctataaactcagcatcgtagaaaagaaaatatgatttctttgaaaattttacattataaagattcatgaaccaaaaacaaaccatttttcctttaaaccaattcacaactttgatctctttctcaaggacttagcagccttcaacgacttgtgaagatgtggatttgctctgaatcttcttc

SEQ ID NO: 56673 - DNA, 554 bp, Arabidopsis thaliana landsberg
  unsure (1)..(554): unsure at all n locations
ccccccccctctcccaccccccccccccccccccccccccccggggggttttnnttaccccacccgctccccctcgccccccccccccccccccccccctccccccccacncccccccccctccttcccccgtgtctcgggcgccncccaccaaaaccccccccccccccccccccccccccccccccccccccccccccctcccctccccccccccccctctcccccccccccccccccccccccccccccccccccccccccctccccccctcccccccctctcctctccccccccctcttttttttccccccccgttttgtttcccccccnccccccccccccgccgcccccanaacacccacccaccccccccccgccccccccccgcccccccccccccccccccccccccntctcgctccccccccccctcccccctccctttcccctcctcgccccccccccccgccctccctcccccccccccccccccccccccccttgcccccccgcntttttgccctccccccccccctctcccctcctcccc

SEQ ID NO: 56674 - DNA, 488 bp, Arabidopsis thaliana landsberg
tttgaattaatatatgcgacgtatatttgactaatgaaattcttttgattgttaggtgttgcccgttctgcgggtccggacccacgaccggtttctggaggagatgaggtacgatgagaggtacactcctctcctacagagggctggcttggacgtcgtatcgtaccaggtttgccgtgggctgcccaatttcaacccagcggcgttgacggctctggtcgacaggtaaagacttctctagttgtttaatatttacaattatcaaatctactttgcatactaatgattttgtattcgtttgtcttccaataggtggcggccagagactcacactttccaccttccctgcggtgagatgaccgtgacgcttgaagattgccagaagattcttggtctcagcattattggtcgtccagtgaccggtcaggcatcaccaggcggttggaggcagagggtggaggcctttcttgggagactgcttccggatg

SEQ ID NO: 56675 - DNA, 512 bp, Arabidopsis thaliana landsberg
ggagcgttcgtcgcgtgggccatcgggtccgccgcggcgctgctcacccacctgttcgccccggcgctgagttacgcggtcgtcgggatcgtcgtcgccgctgtcgcctccctgatcgccgagcgcctcgcgtcccccgcgcgcagcgccgtccgcaccgaggcgtagcgagtgcctgcctgccgagaccgccgcccccggcaggcgggcactgcccccgcgtcagcgggccggttcgaaggccgcgatggcgttggccagcgcctcgggcgcctcgaacgggatgaggtggccggtgaccgggatgacctggagttcggcgcggtcgaggaagggcatcaggttgtgccgcagcacgtcgacgggctcgacggcgtcgcgctctccggccacgacgagcgccggcacggtgatcgcgcgggtctgctcggcgacatcctcggcgatgccgcgcagcggccactccgtgcgggcatcctcggcgctcgcgagggagttcgtcacgatccgat

SEQ ID NO: 56676 - DNA, 1119 bp, Arabidopsis thaliana landsberg
ttgcttgcagtttgtggcactaattgttataagagttagctctctcagtagcaccaaactggtaagtgagtttctgatacaagtgttgttatataaaaatccaatgtgattgatcgttggggatgatttaacaaagagaatgatcagttctgagaagagcatttaaactttccgttaagtggagtgatgaagatgatttattggtgtaaagacaaatgttacgttgctatctattttggggaataatgtaactttttttaccgtgctatctttactatgtagacgtatataatttctgtcaaacatcttacttcgattttccataactctgttgttacactttcaagagatcatctataactctttcaagagatctaccaagttattcaaaggtaggaaatgcctacaatgtgaaacttaaaaatttaacatattccctcttatttagaggtctagttttgattttcatgtgaggagaacgatttagtgtataatggttttaacttactctgtgttagttaacacatatttatgagtaaattaaatatcaaatgttggaagttgctaagcatattggcctcatttactttgctagaaagttaatagtctacatgttttcactataaacccttatcatcatgcatattgctgacaatgttattttagtttttatgaaattaaaataatatgtgaaatagtgaattctgtcaactaaaattatttcagtcaaaaaataaaaattataaataaaaattaattcgaaaaacaaatatgagcatattattaatgtaatttttagcctaaatggcaaatttttccctacacaaattagctcattatttttcttaacattaaaattatttgtctaaaacctgcattcttctaatagagtgaaacggttttgggtttaagacatgtgagattgaacaaacaagacgttgacttgtgagtagaaggaacatgtgaacttatatggaccatgtgaccttcaactacaatcattggaatgttaaactactgtcttctcttatttggcatctaaattttgtttttattactctctaaacaaaaacgaattaacaagatttctgcccaaaaatgtatgcattttgttttacg

SEQ ID NO: 56677 - DNA, 470 bp, Arabidopsis thaliana landsberg
cacacaagaagatctcaatgacgattaaaaatcgtaccagagatatcactggcttctcagttaacattttcacaattacattctcatccacttctttttctacaggacccaactctgagaaataatcatcctcaagatgactaaataacgcaggtgcatgagttttcactcctgcagataaagaatcaaaggcaaaaccattatcaagagcacaaatttgttctattctcaatcaccaaagttctggttaacaagcgtacctacatcagattctgatgtataacactgtggagaactatgaaatccgcagttgaacagtttgattcctactccatttccagataattcaaggctattcaaaatccgatttccatcactgaatctaccaacaagaagaaactcagatgcaattgttctaagcttaagaaatttaaaaccctaacgaaaccatggtaagcaaccaaaaacac

SEQ ID NO: 56678 - DNA, 1502 bp, Arabidopsis thaliana landsberg
gtgttctcctgttctaatcacgtataatactgtcattgatgggcttgcacaagctggtaaaacaggcaaagcgataaaacttctagacgagatgcgtgcaaaagatttaaagcctgacactatcacctattcctctcttgttggaggtttgagcagggaaggaaaagtagacgaagccattaagtttttccatgagtttgagcggatgggcgttaggccaaatgcagtcacctttaattctatcatgcttggactctgtaagagtcgtcaaacagatcgtgccatcgatttcttggtttttatgatcaacagagggtgtaaaccgaatgaaacatcatacacgattctgatagaaggcttagcttatgaaggtatggcaaaggaagctttggagctgcttaatgagctttgtaacaagggactcatgaagaaaagctctgctgagcaagttgcagggaagatgtagcattaagtagtttactcatgattcaggtcccttctgtggatttgtgcttaagagaacatttcagtggcccctttctacgtattatgttttaggttcagttgtaattttgtcagaaattttgtttggggagtttgcatatcaatatgattcagttgttaccattatcttttggttttaatatatatctatacataaacaatgatatcacatatcattctaagctaaggagggccttcaagacgaatgtagtcatacattatcccttgaaagggaccattgcatcttggctgtttcaggaatatagtattatcaccttgcacaagccggttacctggtatgttcacctcatacagcatgtaaaccccgtggatcccgtgcctcgctattgagttgtctctcccaatgagtccggttgtgaagagagggcggtttgcttccgcatcattgattcgaatctgcaaatagaaagtaccaacaaaacttcacagtcttatctcattcttttctgtagaaaaatgaagtttcatctttacctgcaactctgctaaggttgcagatgctatggcgactcgcagtttgtaattggccttttgatcgatgttttcaagattaaatctaatctgccaagttgttccttcatgcacatctcctttcttcctgggaacatgagcaaagaaccagtctctgcggtaatcactcacaccgacagtgtaaacaaggtcatcatttggatacatatctgtgtatctcttccataacccatattgcctgaacctgcagataaataataaagcagtgttgagttcagtttctcgcacatccaagcagtaaggttcacaaaagtgtagctaataaacctgtcttggtgatggactaacaccctgtttacaagagtgggatcaggatctgggataaagaactcagaagcttttcggtcagggataccgatttcccataatgtaggtccatctcttggaggttcataaacgatatcacccatctcaatcatgcaacctgtgttgttttgcccatcaaa

SEQ ID NO: 56679 - DNA, 1297 bp, Arabidopsis thaliana landsberg
tttaaactctatatattgtattgtttttcttaagatcaatcatacataaagaaattgttttctcaaatcatttgctaatttatctgtttctatttttcttagcatcaccaaatagatatgtcaatttcccatctctttatatataacaaaatatgatttatttctataaaataacaatcatctcatacacattaatctcgttgtgtgtcatctattgtgcaaaactgttttgttagtatcttaaaagattaatataattagtcttagtctttgtcgacacttagtcattgaaatacttaaaactattacaaccaaagattgcctcaaactcaaagtaatgcatagtttcacatgtcgatacaaattttgttttgtccttttatcccaagaaaataaaaattaaatcaatacttattcacacgtttcattaaataacaaagacgttgctttcatcgtctctagccgatttctagattctcctccaccaccattttacccttcttttaaattccttccttcaatcaaaattagaattatttctcaaacctcttctttataactaagacgtctcacatgaacaagaagaataaatagaaacaaagaagatgaacaagaacaggattgatgttaagatcgagacgaagaaaggatcgatggatgagtggcctgagccaatcgtccgagtccagtccttagccgagagcaacctctcctctctccccgaccgttacatcaaaccagcgtctctacgccccaccacgaccgaagacgctcctaccgcgaccaacatcccaatcatagaccttgaaggactcttctcggaagaagggttgtctgatgacgtcatcatggctcggatatcggaggcttgccgtgggtgggggttcttccaggtggtgaaccacggggtcaaaccggagctgatggacgcggctagggagaattggagagagtttttccatatgccggttaatgccaaagagacttactcaaactcaccaagaacctacgaaggctatggaagtagactaggtgttgagaaaggagcaagtcttgattggagtgattattactttctccatcttcttcctcatcatttgaaagacttcaacaagtggccttcttttcctcccaccataaggttcctcttctttaatcattttctcttctttttaagaattttttagtgaattttcatgagtactgagtagaaaataataaatacggtatgtatctattctttaaaatgtacggacatgtggtacaatcttgggaaattatcccctttttatttagt

SEQ ID NO: 56680 - DNA, 423 bp, Arabidopsis thaliana landsberg
ccacaatacgccttatatctatacacaaacttcaaccatgagtcttgaagatcctaaaaatgttgaccgagtcccaaacaacaataaactctcgatactcaactagacaaacctgaacatcatcctacaaaggatgttaactgaaaaaaaaatatccaacctaaacattggcacctcattcatattccatgttcaactaccctgccgaacactatccttcacaaaatcaactacaaacacctgtaacatatcaaacccaatcagacatcaatcacaacacattctaacatcctcttattaactaaacccaccccacaactaaatttacaattaaaacccagatagctctctaatataaaaaaccccttacagaaatgttatgctacccgaacaaacgaatgctacgtaaaacgatttatacac

SEQ ID NO: 56681 - DNA, 311 bp, Arabidopsis thaliana landsberg
gattccaattagtacatcttggtggactgaaattggggataccatatatgtttggtgcaccactggttcctacatctgatatgtccggttccttcctaattgctataatcctaatgaatataaattagcttttacacttgttacgtatctggtacacttatcggacatgtctggtgcatgttagactgaagtgtataaattacatcctctctgagtaccctatctagtgcggtatctagtgccacaccgaacacatcaattgcattatagagacgaactacacatttgacatgctctctgcgtgcttgata

SEQ ID NO: 56682 - DNA, 390 bp, Arabidopsis thaliana landsberg
aacacctcctaaaaatgtgcttattggcttttcttgctatcaccgccggaaatgctattttgtgctcattccttgattggcttgagtcgaagcagcccgaacaacccgacttgtaccatccgcgagtgaagtggcattttgggctactgccccgacaccttggggggagaaaagcggggctagaagaagtagatacggattgatcagcgaggcgccgacaccaacagcgccggcaccgccaagacccctgacaaaattcgggagtactttctgtgtctctgtaccagcaagtagagataggtaatcaataccacttctctgtccaagctctcggataatattcatgtactgctcccggtcagtcttgaataagttcgacagtcttggtga

SEQ ID NO: 56683 - DNA, 623 bp, Arabidopsis thaliana landsberg
caatttccttataggagcgtcactatgaagtacgcactgatcactttgggttggaatccgaatccaagcccttgcactctgagccgtaaggctttctactcagtagatgggggtgaaccaacttccattgaagcaagtggtgttgtttcagttcaaactgaaattaaagccacttcctcagttgtgttctggaccgaaatcactgatgatgaaggcaacgtagttaccagtgaacgtcacagctttaccatcggtgatggtgaggttcctcaagcagacacgggtttgtttcacgtcattgatggctgggtggaacgccctgatgtccctgttgacccggatgtggacccggaccaaccagtagacccagatcagccagtagacccgaacgataacccaatcatggctcgtcgtcggtaaggtttgttaaactttccaatgaagtacctcagtaattctggggtacttctttttattgaggcagcgtcatgccagttcctgaatttacatttgatgggaaaaagattcccattgaaatcaatatgaagatggtaactggagatctagctaagaagtttgatctccacttattaaccatgttttctgatgattcgtggtagaac

SEQ ID NO: 56684 - DNA, 221 bp, Arabidopsis thaliana landsberg
  unsure (1)..(221): unsure at all n locations
ccaacccccccccccccgcnagacccccccccccccccctttcnncccngagttctgggccccccccacccacacaccccccccnncccccccccccccccccctccccccccccccccccccccccccccccccccccccccccccccccccccccttctccccctccccccccccccctctcccccccccccctcccccccctctcccccncccccccc

SEQ ID NO: 56685 - DNA, 411 bp, Arabidopsis thaliana landsberg
cgttatgtctcgcgacaccggacctcgacgccatgcgcgcccgggcactagcccaaaccgcgaccgcgcatagaaggaatggatacggtcatcgcaacagaaaaaaaactcaccgacgatgggctcaccacgatgttgaccacagcttgccgcgacccggtgatgaaccacagactcaagatgaatttcgccaaggctttggtgttctgcttgctggcgccgctgtccagtgtctgcttatccactgagacctcctcggtgtgcagcagcagggcacaacgtggctgcaggcctcggccccgacgaaagcaggattacgggcacgtcttccacatcgggtgcctgtcgacgtcgcagccgaccgcgtccttggcatctctggtggaggcgacggggggcggctggagtttc

SEQ ID NO: 56686 - DNA, 408 bp, Arabidopsis thaliana landsberg
  unsure (1)..(408): unsure at all n locations
tccgctannnnnnnnnnnnnnnnnnnnnnnnnnnnnnnnnnnnnnnnnnnnnnnnnnnnnnnnnnnnnnnnnnnnnnnnnnnnnnnnnnnnnnnnnnnnnnnnnnnnnnnnnnnnnnnnnnnnnnnnnnnnnnnnnnnnnnnnnnnnnnnnnnnnnnnnnnnnnnnnnnnnnnnnnnnnnnnnnnnngcggatgtacatgggtcaatgtgttacaactgcaagactgaagatgccaaagccaaagtagcatttctaatgaatttcaccctattcattctttgacgaagaatgaccaaccaacatgagaagtgggtcttccccccagggccgggggaatccatttttcatttttttttcaatatgaaaaacctaaataccttaaaccctaaacataaatcccacaccct

SEQ ID NO: 56687 - DNA, 471 bp, Arabidopsis thaliana landsberg
  unsure (1)..(471): unsure at all n locations
tattttttctgtaacgtgacgagtgaaggagagaaaaacttaagtgtgagtaagattcctaggatgagaattgtggaaggtgaagtcgtgtaagttgatgtaacataggtctcggatcttcaagcataaaactacataatcatcaacttgcgcaaaagatatctttattataacacacatatatcagcaatgacaaatataaccaaaaaaaaaaagaatagggattttacaaaaagaggttgaaataacattgtggtgacaaaagcatatatcttgtgtatagtgaatgatttgcacaaacaaaaaagagttcataggttttgtaaactatagtgtattgacttagttaatcagggtcgataccgactaatctttttcggatgattattcattcacctaaatnttaagttttttgcagcttcaaattctgcataacaggagaataatgatggaatcatagatataatgttg

SEQ ID NO: 56688 - DNA, 1272 bp, Arabidopsis thaliana landsberg
aaaagggatctatattacgtttatccatgtgaaaattttaacacgtcgtgattttaggcaagctcgggaacgacaaaaaagatccaaaactcgttgatgtggagaaagcttgttcttcgcccgatacaccaacggaagacatggtccgtgaaattctgaacattacatccgaagacatcactaaactcaagaacataattatcgaagatgagaacctcactaatgagaaggagaagaacatgaagatcacgaccgtggaggttcttgcggcctacgtttggagagcaagatgtcgagccatgaagctaaatcccgacacgattacggatttggttatatccgtcagcatccgcagctctatcgagcctccattaccagaaggctactatggaaatgccttcactcatgcttccgtggcattgacagcgaaagagctaagcaaaacgccgatgtctcgccttgtaaggctcataaaagacgcgaagagagcggcgcttgataatggttacgtgtgtgagcaacttagagagatggagaatacaatgaagctgaagttagcttccaaggagatccacggaggagttttcatgatgctgactgattggcgtcatcttgggttggatcaagacgtttggggaggtttagtgaacattatacctttggttcctctgacactgccctttttgtgtgttttgttaccagcgtcaaaagcggttccgggtaagagcggtggtgttcgggtgctgacaacactacctagggacgcgatggccaagttcaaggaagagatagatgcagtactccatccgtgaaacgatgctagttcatgattccaagctcataagaatatgattctagcttgtactattatcattggttccatgatatgcttggcttattttggatttaagaaaaaaacaatttggtttttgcatttgtgttgtaacaattgactcctttgtgttgaaagagattgacagaaattcacttcttttttttttgtcaaccatttgtttgtttgggataatatccgaaaatctgcgaattgagcaaccactctctcaagattagactagagatccataaaatagagattgtgggttagttcattgcgtacatttatttcacatgaattaaatagatcgaccacaaaactcttgttcattagacttaattaacaaattaagtatagcaatcttgttctgtcaaaattaacgctctaaacaatgcagactttgaagcggtagggtctgaatggtgactggggtacga

SEQ ID NO: 56689 - DNA, 1372 bp, Arabidopsis thaliana landsberg
tgagatgcccattctgcagagcatgattacaactgtgagttcatgatcatgtttcatgaaatctaatggctttatattaatatactaaccaaatcagggaggtgtttattaatctgaatcttcttcactctcttcttcagactcggagctaaggaaacgagctgagcttctgagggaaaatgatttgttactctttggaatcttcgttctcttttgttttgctgcaaaacctttcgccactagtgtatcaaacaaatctcccatctccattttctttctcaaaccatcatgttcgtccatgaaccttcagaacaataaacataagactgggaaatatcagattctaacactaacaaagacaatgtaaatatcaaaggcctgtttcactcgataacattcatttgcttgatccgttagaggaaacaacagatgaatacttctatagacaagtgaaaacatcgatgcagcaataattggatcaagcaacacctttcacgtattgctttgaaggtgtctctagttgcataaggaagacccgtttttggatcccggtacctgtatcagcaatacacacaacagctaagaactagttctaaaattgcagagaaaagataatcaggtttctaggttataacatcatttcttttcgagaagtatatatcaaagaaactgataacttctttttagtagacctaagagagtctacttgtgttcatcccagagatcttgttcttccaatgaataaagaagaagaacagaaaaactcttacttggcaggtaatcccgtaatcacacatacagctttttctggatctggaaaagagaaaacaaaccaaaagaaagacagagatcagtatagatcaatatgaacacatttatgttcatctccaaacaccactcaaaattacttacagggaacagacttcgtcgacaactctgaattgaatgacgcaccattacagaattctaaatagttacatcctgcatgtaaagttaaaagtttaaacaaatatagttcttacttttctggaaagatccaattagactggaaaactattttactggagagcttaccatcttttgaatgataccgaatctgaggacccttgtagactgctttatgcacaatcgctttcttttttacttcttcttcccttgccaagacacgttctaaattcctcaagttcatgatttctgcaagaaacctgactttagcaattttgagtttctgatagagcaaatcagatgcagcatcataaaagccaaacctggttgagcagctttcagcagcattttttttgggtcattcggttttcttccctatttttttcttggattggctgacaacacaaaaagaattaacatggcagac

SEQ ID NO: 56690 - DNA, 192 bp, Arabidopsis thaliana landsberg
  unsure (1)..(192): unsure at all n locations
ctancatcttaagcgagagatgggccatgatctgtatgggtcgtaggcccaattcttccgtcctctggtggtaaccgaggtggcccgacttctgtttctgttgatcacgtgatgtcgaggcttgacgcacgtgaggataaccacgaggcgaacgtgcgctcaggaagtcaagttgcattgactaaagaacac

SEQ ID NO: 56691 - DNA, 426 bp, Arabidopsis thaliana landsberg
ggctccctgttcgatggcctgggacgggccgaggccagcggacctctggtgctgcgccagccttcgcctttcgacatcgtgcgccggttcggccaggagctgccggccgggggcaagtcgccgggcctgaccctgcgcaccgagaagggacagtctgtcagcgcgcccgcggccggaaccgtcgagtacgccggcgccctgaacgggtggggcgcggtgctgagggtgcgctcgcaaggcgcctatcacatcgtgctcgccgggctcgatcagataacggcgtcgtccggacaatctgtcgcggcgggcgcccccatcggaaagatgcccgatcatgtatccttggagccggaactttatctggaggtccgcgagaactgcgctccgacggatcccgagcactggcttaaacaagagtcgcggtag

SEQ ID NO: 56692 - DNA, 432 bp, Arabidopsis thaliana landsberg
ggctaacggtcttacgaattatctacgcaggaaccaggagccgaagaaccgtgcctagttgttgctgtttgtgcacgcggggactgcgctggagacagataaacaggttggcctcaagcattttgaggagcatatggcattcaatggcaccgaacatttcaaaaagaatgagctggcgaatgttctcgagaaaagcggtgtgaaccttggcgccgatctcaatgactacacttattttaatgaaaccgcgtacgagttgcatgtgccgacagatagaccaatgggctttaaacaaggcctacagatactggaagactgggcgcatggtgaaagatctgatcatggagaaattgacaaggaacggggggtaatcgtggaagaatggaaactggggcgcggagcctaagccaggttacccgataaatatattcc

SEQ ID NO: 56693 - DNA, 510 bp, Arabidopsis thaliana landsberg
tatctttcaattgcaaacttttgagagcgtcagtgtggatacaaagtttgttaccaatggaaatggtcaatatttggccaaataaaggacaacatccgaaaatggtattttatacattggcggcatgtagcagattaacaaatgtaaacccttgttcatttacaattatttatctaatgaaaatattaatgctaagtagggcacatatatcatatatccaatagcacgatcgactgaaactttccgaacatgaatgagacaagtcttccaaacatgtgttttaactaaatagccacatcaaccctgtttttgaataactataaattgtggaaaaggagatttaattatcattgttttgatgttgttgtaggtaagatgattgacttgtaagctttaatgagcttatccattgtgtttgtttttaaaaatagactcgatttgttttcaattcgtccgtctggatgactcatgatgccatttctcaaattttataacactcagagaaataca

SEQ ID NO: 56694 - DNA, 539 bp, Arabidopsis thaliana landsberg
  unsure (1)..(539): unsure at all n locations
gcgagtacgcaggcgccgatggcggccgggaacggcgcgtcctgctgcaggtccgcgcggcatactagcgctcgccgcctgcgccgtgtgaggagcgggttcgctccgcaggcgcctccatgggaggcacccgggtgagaggctacgcgcgggaagctgcggatgggcggccgaagggaggcggtggtggcggcgagcatcgaggttggcggcgcggggggcacagcgggtgtgagagcaagccggcacggcaaacagggttggtactcttggtaactggcgacttggcgaggacagtcatttccgccttcgccgagctaactttccgttatatgggctgcgcattcgcattcgactttagtgcacatatggtacatacaaattaaaaaaatatatattnttttccattcaacccttattatataaaaaaatttaagtttaaattcattatatttaactataataaanaagaatactttagccgttttctaatttaaatttgctagacatttccattttttatatagctaaatataacg

SEQ ID NO: 56695 - DNA, 344 bp, Arabidopsis thaliana landsberg
ccaccatgcagacttacgtatgatccaattggatactatttttcctggatggtcgaattgagaactacacggaatcttggagacagatttccagtgcaagactgtcagccattcgtgtgaggactcgctgaggtctgccaatatttttaagctggtacacaattgctgaaggaacgagaaacatggagagacccctacagtttttaaccaaggtaacagcaacccggataactatttcacaagcaggggaagaaatacggctgcagttggtgcgagaaaggcccaatctgattgttacttgtcaaaatcaaaacgtgactgagaaaccttttttgattattaca

SEQ ID NO: 56696 - DNA, 291 bp, Arabidopsis thaliana landsberg
catttataattttcgatccaaatgaatctgtctgcgcgcacagcgaaccttatgaatccgcgcctataccccactagatggtgtatatgctaatctgagcgtgcgtgggtcggcgtacagatgaatccacggttacacctaagccccaaatcttacaattgacatgaaaaaaagcctaacgcgcgggaaggccggatttctcatggcttacagtgcaagggagtaataagcgttgaggtcatcacggcgcattcgcatggagcttcctaacctatatgtcgcatttcaaca

SEQ ID NO: 56697 - DNA, 1348 bp, Arabidopsis thaliana landsberg
ccactcaactacctcgcttcgcccgaaaactactcggattacgttcatttcattgcatgtggtccattcaccatgtcactatgacacacatccaccaaatatgacattctcagttcacttctatctacataaaaaccaattatcatatattgtttaagcgttttattatttttcgtacctaatttatatatgcttacgttaacaattaacatgttaattaaattatcgtgtttatctaataaatatcaaatgttttatttttttctgtaaagtaaactggacgtttgaactaataaacacaaacacaaataatttgttcgaattaacaatctaataataaatttataacatgttctagagatggaaatgtcaataagtttggttcttctttcggctttttaggtcagtgagaaaaaaactattacgtcctttttccaactgaatatcattgttggtcagattcgaacccaaatactttgataaaacagccggtctaaaagtgacgagtgtctcgtaatgttttatctagggtcaaaagctgtgatgatgatgaaggtgtttgtgttagaaagaagaagaagagagagagagagagagggtactcataaaggagaaatggatggtggatatattaagagaggatatgtaataaattgaagatccattgtctactattgtggattaaaagcattgtcttcccgacattgcggattaccattaaatagacaactcgatcgagccatatctttttggtcaaatccaccatcctttgattccttttctcatttctccttcctcaccttctttgaattttactcgagtgccttattctttcatgtcttttatttggtccactgtgttaaaaaaaagtcgattcttttttataaaaaaaaacttgtggactcatcatgttgaattacggtagtatttcggattaattgatagaagatttcatttcggctatagacgtaagaataaacgaaaatactttggaaattaaccctaatccatgaccgatatatatttttttcttttcatcgatgggcttgatctttcccaattatcctggctggtttgatataaatcgtggcagttggataccttgaacgcataatgggagcttaatcaccgtgtttaaacattgtgattaggccaataagtcttgttggatagattttgacgcgtgaccccaaaagttagacacgtatcggatatagtagatggacatgttgataatggcaatcatgatcatggtgaatggggcatgaccatgggaaacacatctttgcaagacaatccatttaaaattgccatgtcgtttgcaccacaaacccaactgctcattatt

SEQ ID NO: 56698 - DNA, 918 bp, Arabidopsis thaliana landsberg
aaactagaggatccctgataccaacaaacttactgtcatttaacatgttttctttcctctatgttgtgtagggcatgtatattcgttaaattaaagtgcatgcggcaaattaaatgacgttaaaaatatggtacgaaaatactataagtaaataagatcaaatgtttggggatatatcagaacgtatctctcaaaatttgaggatacatatccggtacctagtccaatacaaaatattggttttaattgttttgtatgtttatcatcataataatttccttagcaataggcaaaaaataataattcataaaaaaaattgaaatttattgcaaaacgacagtttactttaattagacataaaatgaactcttttttttttgctgttttaatttttatggcgtatgctttatatgcttgaatgcgtctcgcatttttacgtacaaaattgctacgcgtagcaaaatttataatttagctctataacctccaacttgacctcattcttcgatgactggtagaaattcctcgccgttggtcgtatctctggtattactggtgttctatgttgagtttctcctgccggtgcctcctccaacttgacctcattcttcgatggctggtagaaatccctcgccgttggtcgtatctctggtattactggtgctccttgatgagtttctctcgccgccgcctcctccaacttgacctcatttttcgatggctagtagaaattcctcgttgttggtcgtatctctggtattactggtgctccttgatgaatttttcccgtcgccgcctcctccaatttgacctcattttttgatggctggttgagatctctcagagttggtaatatctctaatatactggtgcttattgatgagtttctcccgccacatttgtgcctgctctgttcgg

SEQ ID NO: 56699 - DNA, 557 bp, Arabidopsis thaliana landsberg
cgatttgatcggttcagagaggtcggatctgacacggcgaattgaagattggagtgaagagacggaggatcggagagaagagagagatacatcggcgtgtgagagagaagagagctgagcgagcaattcagggtgacgagagatgacgtcattacggagctgtgaatcgaggaggcggattgcttggtggagacgttcggcggtggaggccggagatccagaagcgagagcggcggaggagaatgatgcggaggagaaggaagatgagaggaatggggagaggattggatcggtggcaaaagaatcgagcggcgaagaagaggaagatgacggtgtttgtggtggtggtgcgccggaggagagtgaagaaggaggagggtttttgaaggtggagagacgttgaagagatggagatgatggtgaaggagacgatggaggtagtgccatttttttacagtttcaatctctacaggttttgaattttgcaatggcgattttagcaggagatcaaagcgatactcatttttcaaagttaatctctgaaacaccaaaaaaaa

SEQ ID NO: 56700 - DNA, 500 bp, Arabidopsis thaliana landsberg
ccttagaataactagagtgaattcggctttggggattaatttgcagcgacacactgatgcagagtacttacttggtatatcagcgtaatgtattgtgcagcggcacaaccacagtgtcaataacatatttcgagctcgaatttgactggcagagaaactaagctggtggtttttatgcatctgtgctcatgaatatataatatatactgttagtctgttactggagcgatacaggatgacaagattaagatcgcgcttatttctgcctgtaaggctgtaacacgtttgttgcatgctgtccttctgttcttattttttactccaagaattagtcaatgttgacgatttttctttttcagtcagtgaagcgagtcatagagtaaggaaggatttcaaatctttgattcggacagttgttagtagtctaatgagtgggcttagtgatgcagctcattttgggttgaagcaacacaaccacatttctggatttctgattctga

SEQ ID NO: 56701 - DNA, 108 bp, Arabidopsis thaliana landsberg
tttggtgtaagtaaaatatttttaaatcgattttgaatttgatttttgtaatagtaaatttgaattttttaaaagttgaaaatttgttgttagtagaacaagaaattg

SEQ ID NO: 56702 - DNA, 985 bp, Arabidopsis thaliana landsberg
aacttacagaaaatttggatgtagtgtggttgagtcgtcataagatttcatgtggtgaaagtaaaatttatcatcttgagtagcacataaactagatctttgttatgtgtgtaaactgttttactgtgaaagtgtttgtaaaaccgtttattatattttatttgttgcataaaattataatttggtgtataagcacttaacttaacccttggtaacccacttccaaattagacttccacgactttgttttcacgaaatatatttttgcttatatattaaaaaattgtttagacgaaaatgcttatcgatattgttcatcacgttttgtcatgtttggtgatgttcatgttctcggttatattaatgtgtaaccgaaaacttacaaaagttaatgaaaatttacaattgttgtgaattacgccaaagaattttgaaaatttggagaaatcattacttgtaagtctacataattgtctttaattaacaagaagaaaagtatacaatttgttttgaaatttcttaaaacctttttgccaaatttgtatgagaaaattacaataataagtcatgacttatatcgaatttgtagtgtttttttttgtttctcgtttgtatcgggtacgatccagtggtagtgttacgatacaaagagaagaaggacaaagataaaatcataaaaggatagagataagagaagttgttgtgtatatacataaaatgttctcattcattaatgattgttaagtgtctgtatggagctgtaaaaacagattgtactataccggtcaaatccggtcctactcactatcatcatctaactccctcctttgtatttgtttcttcttctcttatcactgatttttaccactgtcctgtccttttccggtttaatctcggtttggtttagccacatttgaagtcccaactaaaattcttgttctagttttaattgtctttatggtctagagaaatcataagaatcttg

SEQ ID NO: 56703 - DNA, 473 bp, Arabidopsis thaliana landsberg
gagcatgatcgtcgtcgcgatcagctgcgccaccgtcacgcccgggcgcgaggcggcgagcccggctttgatgttcaggcgcggcgcatcgccttgcccgccggtgacgagcacgccggcgttgaccgccgttcaggaacaccatgccgaacagcgcgacgatcgtttggacccaggtgccggtgtcgtcctgtggagaagcgccgtacagcgcgtcggcgacgagcgccggcgcggtgatcagcatcagcccgagcaggacgatcgagccgaactggtgccagaagatgccgacgaggcgactgagcgcggcggggatgtcgatggggctaggggacatagagtggatcgcgacttgcacgcgacgatggttgcacaacagccaaatccccttcccggcggggagggattgaaagggtgcatgcggttgtcttcttacacgccgtcgttatgactgcctcatgacgctagag

SEQ ID NO: 56704 - DNA, 139 bp, Arabidopsis thaliana landsberg
aaaaaaaggtaaaggagaattcaacaaaagaggagagaactccggctaaagccgcccccaatttactttttagcagcaaagcaaagtaaaagagccacaagcaaagctacactctgaccaagcccgaacccgctagcac

SEQ ID NO: 56705 - DNA, 1096 bp, Arabidopsis thaliana landsberg
aaattttccttctggaagtaacttgaccaccacatcgctgaaacagaatccaaaatcagggtgctcaagcagttcatatgcactgacaatttcttccatcacctcaccaacacaacctgttgcttctttctcaacctgtattgtccattgtaccttcacagtttgttccttagcattgacagccttcacaactccccattttttgctgttgcaggtttccttttccacaacaaactgttcgggccaaaaatcatgagcattaacagcaccaacaggaagcagctgttgggaatcaactcccagactgcagctaccatcttgccacataacagcaaccttcatctttgtctttgtgataacaaatagctcatccaaacctgagttctgcatatttcttgtaaaccctttttggaatgtcttatggcattcgttgagattgtaggcagccacatttggagtttgccgctctgctatatcacagtgggaagagccagggagtatacaccagtcaccaagctgccaactcgcatgagaaacacaaggtaacaaagttaaactctcaggattctgcaaagcttgaggtgcagttaaattccgatcaccctccattacgatggaggcaacccaatcgacgtagacaagtcctgcttctacagtgcaaacagttcccataacctgggttcctctccaggtcccgcataaccatgtagttgatctgggggcatgggccagctttacctgaactctttgccctgggtaatacgaatattgagaatcctcgagtaaatttgggggaatggccacaagtttatcttgaccatctacaaggacctcatagttggtcccatcatcaagggtgacagagacacgctcaactattttgtcaacccttccaagccaaggtccgttaatcacataatcagagagtgaaatagaacgcaacttttgaagcctcttggtatcaacttccttcatgatcttcccatgagtactttcgagattgacaaacatgtctatgttgataaccctgccactctgtcctgatggttcagtggcggaccgctacaatgtcaccatacataaatcccctctcgaa

SEQ ID NO: 56706 - DNA, 341 bp, Arabidopsis thaliana landsberg
  unsure (1)..(341): unsure at all n locations
ttttgataaggaagttggcgacctggtgacggtgggatnnnnnnnnnnnnnnnnnnnnnnnnnnnnnnnnnnnnnnnnnnnnnnnnnnnnnnnnnnnnnnnnnnnnnnnnnnnnnnnnnnnnnnnnnnnnnnnnnnnnnnnnnnnnnnnnnnnnnnnnnnnnnnnnnnnnnnnnnnnnnnnnnnnnnnnnnnnnnnnnnnnnnnnnnnnnnnnnnnnnnnnnnnnnnnnnnnnnnnnnnnntccctgtgattggctttgggctttttctgcgcaccttatgttggaaggcgaataacgccccctttcgggtgggccccaaccatcaatgatataccactct

SEQ ID NO: 56707 - DNA, 530 bp, Arabidopsis thaliana landsberg
tctaaggccatcgaaggaaagccggaagagaacctcatcaagaccgcaaccatccgctctatggcaaaggctgttgtattcaacgaagaacatcggccacttcggtcttgcgttcaagtactacacgcacttcacctcgcctattcgccgctatcccgatctcatggcgcatcgcatgctgcggaagcatctcgatggttcaatgatcggaagccgcgagctcgcgaagtatgagaatctttctgtgcaatcatcggaacgtgaagtgaccgcggtcactgcagagcgcgattcgatcaagttcaagcaggtcgagtacatgcaggaccgaatcggacaggagttcgatggcgtcatcaccggggtgactgactggggcatctacgtcgaggagaaaggctcgcgctctgaaggcatggtgcggctctcaagcatcagaggtgacttcttcacccacgaaccggagaaatatcgcgtgaaaggcagccgaaccggaaagacccatacgctgggcgatcaagtgcgcgtga

SEQ ID NO: 56708 - DNA, 1613 bp, Arabidopsis thaliana landsberg
atacccattggcctctgttcagagagtctcctacgtacaccatcctcttatttcttagcctctccagcaacttcgttccattaaaccttattttttacattataagatttcaatgacgataatattgttagaaattatggtaacaacaactaatcatgtggtatatttgttggtcgttactcgttagcccttaattctttctattccgaataataacggccgggacgatgatttgcataataataataataataataataaaaacaataacggcccaaattaggcccaaccacttgaaaatcacttcttctacttctttttttatttagttaattttattattattattttttggactagttctaaggaaatggcattagaaacaagaagaaaaaaaagtcttatgattatctatctaagtttcatcaatcgactgatatagaaccgtttatatatgaattgagatacatatatatgaagaaagaagaacgggaaagtatataagcagcggagataatgcgacatgtaacatctttatagtataaatttttatactaatggccatagatagagaaaggaaagacatatgtaaaaatgtgaaagtgaaaatgacaaagaaggaaaaaaacctgggaagatcacacgtgtgaggttgccacctccagaatttgtaactcagatctttcctcccaaacttctcacaagccaactggtcagacatgaacttgcaatcttcttctttataaagagggtatgatacgttatcaaatacccatttcccttcgaacaaattacattctctgccactgtcccctccgcgatccgtaacaccgtggctttgaggattttcctttggcaaactgtttctggacaaaaacacggcagtgaatattaatccggccacaagcacggcggcgatagtatgaaagctagttctaatacccagcatcaacagttgtcgctttgccattggttatgtgtctgttattgttgctgttatgatgttttgttttgggttatattgatgtgtctttctcttacttgccttttaactccagccttcttgaagttattttgttgtttggtggtcaatcaattttctgtagctgtctatatatacatttatgaatcattttcctaatataaattctaaaactttttgtgttgacagtttgccaagcaattgcccactacttgaaaaataatatttttcctaagttgattaatgattagagaggtaagctaattattcaagacaaaatcttaaaggcttaatttgaactctgagatttaactttgaatacttattgtgctttgtttgaaacatatacaaagtaggattctaatgttttggaaaattaagttactaaacattaattattaattcttgcgaaactattgtcgtcaaagtcactctaaaacattaattaacatgctcttggataagaagaaattcactcccaaaaaaatcaaaaacaaaaagtatgtccattgtgaatgcgatatattgaagttatttcgccaatagacgtgaaaataaggtcgtgactctaggaaacaaagttatgtcaagactctatgagatagaaatccgacgctgcgtctataatctg

SEQ ID NO: 56709 - DNA, 1509 bp, Arabidopsis thaliana landsberg
  unsure (1)..(1509): unsure at all n locations
acctgtgatatgaagcatcgaaggatcaaaaccatcgctatcacgcatcttcaccaatctgcaggaagggagcgaggagggtttgaattgaaactgtccgcatctgtaaccccaacatgaaccaccgcaaaccctgggggcttcagggggcgagtaatctcatcggcgaatcccaactgcttcagcgacttcccaaggcggacaccaccgggcaatacaagatggaaagcggtatgctcaaagggaatagcatgtccctcgcctctaaccaccaacggcctaaaagctttcttagagatcccgacggtgttattcaccccaatctctctgagcgagtgaacctcttgtccaatcgccgtctctacacaaagcgtcttcgattcaggcgatagactaccgtcgcgatcagatcctgtaagatggaggagtaaaactgcacggattcgatccaatccctggtggtgtagagatcatccccaggggaagtagatctgatggcgtcgatagcagaagagccggaggcagcaccggagatgacaaagttgagattctcagggagagagaagaagcagaagtcgccgcgattgcatgattcaccggtgatggtgacaacataagcaaatctcacaacgatgataagaacaccaaagagaagcacgcgaaccattatattccgtaagaagctgggtttccccatggaagtctccatttgtatgtatctcactgctaaaactactttacaagacggagagaataaagaacgaaagaatagctcttggtttgtttgttaaattggaagcaaatatccctaaatctgaggaggagatggagcagagactaacgagaagagaaacgagcagaggtgtgattagctccgattagggttgggaattgacaagaagaattgcagatccgacaagtagttggaggataagggcaaaagaagcgcatagttcgcggaggtgttcgaaaatcaaagggagataatttttccggcgaattatacggcggaggaggaaagagacacagacatggaatttggagcgagagaaaaagaagaagaaagagagattgagaggaatcggaaaagagacggcagaagataaaaaagcagagcgtttttctctaaacgcggttgctacagaggaaagaaggtttgctttttaggacatgtttttatggtttattttcggaattgccacgctgacttatagagtaattaatctcataaatgaaatcattatcaataatcagtggggtggtatcgtaatttaggagtttcgtgtcccttttactcgtattgttcgatcctttcctttcattaattatctgaattctttaacctatctttctttttttctggagagaaatttaaagttaaagtttattggtggatccaatgcagcttanagctatagataatcaatagatgtcgaaattagacgaaatagtaaatgttattggtcatcacttgataactgatcaacaagattacgacatattatatga

SEQ ID NO: 56710 - DNA, 206 bp, Arabidopsis thaliana landsberg
ggcggatcttgactaaaataaaatagcaggaggcctatgacacttcggaggctcacaagattgctgtaaatgccatgcgcctcgtatgacatcggcgctatctttcttcatacgggacgctcaatgcaaagctctcatgtgtaatataccgcccatataccaaatccatctattcaaatcgaagaaccatacactggcctttttcg

SEQ ID NO: 56711 - DNA, 363 bp, Arabidopsis thaliana landsberg
ttactaagccgacgcggcttttagatccggtgacaaaaaaacagcttatgacgcttacttggttggtataaaggccaatatggaaaaactgaaggtctagcctgcgcttatgaacaattatattaataactccaaggtatcagtaggagaaaataatattacattagctttaatcatgaaggaaaaatatgcagcctgttttctcaatcctgtaacatgggatgacatgcggtgtatggattatcaatacaaggattttaaattgccgtatcatgccaagcttttcacttttattcgccggttaaattatccggatgatgaagtgtcaagaaatggaagtaatgttccttatggggatagaac

SEQ ID NO: 56712 - DNA, 1239 bp, Arabidopsis thaliana landsberg
tattttgaagcaaatcttatagtcggtagctaaaatcacagtctctgttgtaaactaaattttaaaatatcattcaatgaaggctactcaatccaaggaccaactattacactcagtgaagcctataaatatgcaggttctgaactagcaccatcctgaaacaaaatattggggtgcaaatcaagtaataaagaatgcaacaattacctttttggattcctggcacattgcatgtcgaccactaaacatcgctgcgagcattgagtctggctcacgaatagtcaaagtatcaatggtcgtacaaaatttctttccacctgcatgaaaacaacattagctatcacagttaattatgatcagcccaacaaagattgaagtttacaactgaaaccagagaggtcaacgaaacctaagcctcaaagtgagaaacatttgctgaactagagcattcaccatctcaatcacaggattcagaaacataactaggaaaagatgaccaagcacatcctttctcacacgattctagctaccagttttagttaatcaataattggttcaaagttaaacattgtggataaaaaaggattgatttttcacaggaatttaaacgtttaactaagtgatgagtaatgggattgcaagaaaatatataaaaggacgaaatttaccaatgttaagacgaaccatggaagacaagttagagctcgtctccatgagaaagatagaagagaactcaacaccaagctttgacctgtaagaagactatcacttgatgatgatcatgatgatgatgtaaacataacttaaggcctacacagaactagagttgacaaaatctcgaatctttgcgctctaattctattgaaaattttgaatgtttcatagcaaaaatactgcgatccagtaactcaaattcataaggtaaacgaggattactcatatttcgtaaacaaattgaatgaaaaatggttttgatttacacaagtagaaagtgtgatttttacctgcgaatatttcgtctttcttcgttcttgctgagaattttggtcgaagagactaagaaaaaatgattcttattgctttttccgaccaaggaaactaaatgggcttaaatggattggataaaagcccaattcacatattaaagcccaatacaaaagttcacatacagcttaatagatagaaacagttttgccatgagcttttggtcggcagataggacaagaagggttctttttc

SEQ ID NO: 56713 - DNA, 131 bp, Arabidopsis thaliana landsberg
  unsure (1)..(131): unsure at all n locations
ggggggggggngggggggggngggggggggggcgaaaagggggggcggggggggggcaaagggggggaggcggggggggggcgggggggggaggcgggggggggagggggggggggggcgggggggggggg

SEQ ID NO: 56714 - DNA, 433 bp, Arabidopsis thaliana landsberg
aggattatgttaaccttctgtcttgtaatcatgggagataatgggtagctttgctgctgatatttttttcttggctgatcttgagtggtcacctgatgattgttctattgtagcgtgggattcgcctcttgaatataaggtatgtatcgttttggtattgatgctatctttagatagttattggaattttgttatgtttggtttgttggagatatctctaaaatatgtaccttttgggcaggctctaatttattcttcagatggtaggtgtctgattaagtaccatgcatatgaatgtggacttggcgtccagactgtttcctggtctccgtgtggtcagtttcttgccattggtagctatgatcaaatgttgcgggtcctgaatcaccttacttggaaaacactcgttgagttcttacacctatcaacggtt

SEQ ID NO: 56715 - DNA, 1816 bp, Arabidopsis thaliana landsberg
tatacacatgggtttctaactattgggtttagagatgccactaagcctatgccaacacaaacatattcgtttaaaataaactcaacgaatcgttatctgatcttctaaatcttataattaataacctaaacattttgacttaacgtgtctaaactctctctttatagcataatgttgtccttttccgtagggtatttttgaaccatcactttcaaagtttcaatgtcggtttgtgaagattgaccacgtcaatagtaagttaacgttgttaatttaaataactaaaaaaaaactgataacaaaattattggtacgtacacattttaaggaagaatctatgcaacgatgcagattggttggttaaattataaataaggttttaaactatatgaatacggtaagatataggatgtatcaacacttaaattcttcggtttatagtactatattggttaaatcaatcaatttatcttaaactcgcatgtattaatattttgttgttagcattagatgtttggttcggtaaaacattggacgactaatacttaataataaacatgtaacttggtaaaaagtttcatgcaaattaactgtaagttaaaatcggaaaacttgtgaattgtgatgattgaatagtggcacaaattgtttgtacacaattgtaactttatttttgtttagcttgaatctatggttggaattttggatttgcttagtgctaatctaatccttccatattactttcatgaattaattttgacaatttctccccttgaacaaaacaatacattaacaaatattgcagatgacactgcaaaagatttatagtaacactaaaattcgaattctcatatgtatcaaccgtctggtttaaaggattagtgtgtggtggacaaaaacatatcagaaattgccttcaaaatcgtgatgaattatttttagcaccatatacatcatcaaagctgctagtattcgaacacatgatatgatacaatcatacaaaaaaaaaagcaataacgaaaaaagataaagaatacattcttcgatcattttcttaggacttcgaaatcattcattcccactcatttacacaccgatgcaacgcttcaatggccacgtaatcaactgacatgggagaatgtacacgtgtacggtagagatcaaaccacctagccttctccggatatagaaagcgaggatctaggacaagacaagtcaaagcacacaagacgacagaagaaaatactcaaaaggaattaggtatatggcaggtcccaccttaaaagcaatattttatcgtattagagctttgtggtctccacttataactaaatctctgccacacgtcgtcatcttggtgctcgaacgatttgatttgcgaacgcttacgcttctcctgttctccactccttgtacaaagttcgtgaatgttaacacgtggtgaccggctattgaagatcacaacaataatctccaaggtacgaaatctttcaattcaaatttactcgatacataatgggcggtgtattatttaattatagtttcagatttagtttgatatactatatgcatttttcctgagaatatacaaattattggcgattgaatcatattataactattatggcgaggcattttgtatgggaccatatagcgtatcgacatatgtctacgtgatagaatttgaacgtggcatgatcttagaggggtttcaaagttgactatcctttgcagttatgagctcgatgagtataagtcaattctcatttgacttgttcacatcattgagaaagtaaagcctgcatttccaagttcc

SEQ ID NO: 56716 - DNA, 838 bp, Arabidopsis thaliana landsberg
ttacttccgagtctaattgcttctcctttgtcgtatgcgcatactcaaaatccttccattttacctccattctgtatgctattgaaaggtaatattagtatccatgcagtaaactaagtgaaagagaactatggtgggtttgttctttttgaggcggtcatttgttttctggcagattcaacatatacaaagtctcttcaggcttttttaagcttgtgatactaatagaacacttgatgattgtcagatctcagattacatttttaatactcttcttttaacgtgctagcaacatattcctgttttccgtaatgacattaactgagtcttttcttttccagatggaatggatccttctaacgtggagaaaaaggcacaaaagttcttgaactggggacagcgtaatcaggaatctctgggtagactgtttgcaaccttttttattaaggtgctatatcgttttacctttaaacccaaacaccgattacaaaacaagctgcagtacatgcttttgtataacgaattagcatttctgtcttgcagttacaatctgtagaattcctttggagacaagggctctgcgtcagtgtgctgaatggtctttggatatctaaaaagtggaaaaaagttggcgttggatccattagtgtaagctataaaaaaactatattcagtaagattacatttgcttttttacttttttttttgtcttgtatcattttttttccgtttgtcttacaggttgaggattttaccaacgtgtactcaaaatgttgcaagacgggttaatggcgcaggagccaaaaggatatacagctccataaacagaaccgttgaa

SEQ ID NO: 56717 - DNA, 103 bp, Arabidopsis thaliana landsberg
tgagtcagctggcgagtagtcacaggggagtgagcagttacccactcgcatgacaaccgacctgtggtcttaatgggccaatatcatgagaggggcgtaggct

SEQ ID NO: 56718 - DNA, 1512 bp, Arabidopsis thaliana landsberg
gaaaagaaaaactgttatgcaggaacccagcttacatggaaaatgagctagggatgattccaaacagaaaaggggctacgtatgattcaaaaaaccgcatcaccaaaataaccatcaaattcatattttggtcaaaaaaaaatgagtaagcaaatgcttggataacgcaaagtaaacacttcaacagaggagaataaaatgatgtcaagacattaatccattcgatcacattataactgcaacaatttgaaaagaaaaaaaaaattatcgcctaccaggaataatagtgtaagtgaagtcgattacttgacttgcaagcgccaagtgttttgcctttatggacttcaaaccagatacctatagcatgaatatggccactccaaaaggtcaatattagtgcagtttcatctgttttgcataaatagaaattgaatttcttttgtgtcataaactaaattccacaagacaagtaggtaaggtcatacatttggttaagatagggatcacaggttattggttaagaaactcaatacagctaatcagcaatgaaaattacatttttttcgtttaaagtatatttatatacctgcatagcaccagcacccagaacaagttggcatgtccgagtgttaaaaaatctcaacacttcaacaacacgaagaccaatttccgaggacaaagctggcaaagaattgttcatatcaatgtattctgacaacatcttgagcaatattaatccactacagacataaaaggaattgcatcagcacaactaaaatttccagcatggatagcagccaaacattatgctatctaaacctcgcaaacagtacatatattttgagagaagactgcccatccaggcatgcaagacagacaaaatataacaatagtcatcgatcaacaacattaaaatacataacaagaaaactaaccagtttaccatgtggtaaccaactccttgatagaaaaggttagattttccgtgcgccttctgattactttgattatttgtaactgaagatacaccagccttgcttctttcaagagactcaggtgagactgtggatttcacttgtgcatcactaactgcaggaccttcactagatttagatttttcatttcgtaattcagtattttgatccccagtttcagaagtcaaagacccattgagagggaggcgattactgtggtatgttttaagatcagtatcatcaacattcctagaaatcaactgctgggatgcaaaaagagaactgattatggattggaattcttcaggaacatctatctcatcccatgtttcttgatcaagcacagcttttagttttgtcatctacagtaaaacaaaatacaaattagaataacaaccagaactcttgttaatgaaagaagatgctaaagataacagaatgtgcatctatgggatgaagtcaatttagttcatcacttacttggttaccaaaagtaagtttaaccttttttgtgccacttttcaccacctttcgtttt

SEQ ID NO: 56719 - DNA, 1660 bp, Arabidopsis thaliana landsberg
acttttgttgttgttgtttatttaatgttttccttcttctaggtttttgtagtttgtacgatctttggatcaatcaatggatcttttgtttgcttagttaatgtttttaattttggtttgctttttttttttagtctttttattttgttttgtttgtcttttacccggatcgtacttgtaatcagcttctgttgcttctagtttatgcttctgtcttttttacatttaagcttaacacaaacaattctgctgtactaacttagatagccaaatacaaaacactataattaacattttaatacaagaaaacaaaaaaataataatgcaaacattgtaaacgtataatgcagccattatagtacctttttatataatcatgaatataatgttaattaacagaattatttttggcagattaacttatccgtatcaatattttaattttttgatatattgtaacggtagatataacaatgattttagaatttttttatagatatatatgataaattatatgaatacgcaagcgttatgatcaaagttgaactttttaaaatgtttgatgtgaaatatgtccaaaattgtaaccaaataatttgagtctactgtagatctgtcaccttccaacttctgtaccaaaaagaaaaacatgtgaaaagaaaatttctaaaaaacagaaaaagagaagattctcattgttataaaattcatagatgaggccaaaattatagaactcacgacctatgtatcttcttcttttcttctgtgtcgtcacgacctatgtatctaagctaccatatgtaataattggttatagatgatatttttcgactttctttcgcgaccattttgtgtgggaaactgttgatatttattaatttcataaattcttattctcatcgaaattatgtttcttccatggagaaaaagaaagtgggccaaaagagaaactacgtatacaaaaagcttcccgtatcaaagtcagtactttgtacaataccataaagtatgagatccttcttcttccgtatgacgacttcgtttagcgttttagtcggccaccttgttgattctatgttgggctgtttccatggtttataaggcctggctatataacaatcagcccatgaaagcccataggaagtagcccagtgtaacatgctgatagtgataacacaatttgttatggctgtgttaccgacaaaatgattttaggtcttgttggagttggagttatttaagctcatgtattgtcaacttcttaagatacttttcgtcattgattttttttttataatataatttgtaaatcaaattttgtcactgatttgaaacactacattttcaccattgtagaagaaaattcgttcttaaatagttatgattacagaaaattttagaggagaaaggaaaataaatagataaattaagctaaacatactttgctttatcaatgatcaaactcgtagaggggcaatgcatctgtctatgttctctgattacatcttatgattttaatttaatagattacctctgaaaattaaaagtattgattaagaaaacataaattgcttaattaagccaatccccagcagctacttgttgctttcttcttctggcacgctttttgtataaatactctttcccaattaggaaaaac

SEQ ID NO: 56720 - DNA, 1547 bp, Arabidopsis thaliana landsberg
cggaatatagagaagtggtaccactaaagaatgcagagctgaaaacacagcaacatcagctgccaatggcgtcaatccgtttcccaagagcactgacttggtagctaactctaaattcaacttttcaagagctgcaaaccaatcctttgaatctgaagagaaaccttccgcaaaatctagccacttcaaaacctgaaataggtttttactctttaaaatgtgaaacaatgacgcattatgcaaacgaaagccaacgaatcctcatcatttagtattacacagaactcaaacatactaattcattttttctctaacgtggtagcaacgagaagggaactcaataaattcccattaagagtttggcgtttatgtctataggaaccaaattcaagaagaaacgacttacatcgttgttttgtgcagatacttcctttccagatgccttcaatacattagaataaagtgtcttgatatcactatcacctgctccgcccacaaaaggttcctaaacaaatgaatcaaatcaatttcagaaacagaaccaataaatcatcacaatgtaaaatcataaaagcccaatttctaaagttttttcctttttcatgaccagcttgatgcataagcgtaaacactgataagtccaaaacataaactttctaattgatttcagtacccaatcagataatgttcgagttttctccactaactaattcaaaaaatgatcatacacatactcagctaccaagcaaaacctcacaaaaaagcagaagcttttgagatgtcatcttcttcaatacttacaggatccaaggagaaatgtttgcagagagctgaaagaatcatctgcttcgtctttgaatccatcgtctgcttcttctcttttctctattttcgaaattttgttcttctctttggggctcttcgctgaaataaacactgcaatttcttcgatagggtttttgcttgatgtaactaacggtcttaacggacttccaataacggcgttatatcaatctctaatgggcccaacaaatattatccgcccattaatattttcttactgtgggctttaccaccgaaagcaatcattaataaaataaaataaatgaattaacttctcagattcttcaaagacctagagtgtcttcgtcttcgacgacggcaaattcgtggaagctgtttcatcgattccggcttcactgaagcggcgtcgctcgacgtttattattccgacgactaggcctttgaggcagtttctgattaacttcaggcgataatggcaaacagaacagatccgttggcaaagaatataagaggaacgaatccgcagaatctggtagagaagattgtgcgaacgaagatttatcagcacaccttttggaaggagcagtgctttggtctcacggcggagacattggtggacaaagctatggagctcgaccatctaggtggtacctttggtggtagccgcaagcctactccgttcctttgcctcatattgaagatgcttcaaatccagcctgagaaggcaattgtcgtggagttca

SEQ ID NO: 56721 - DNA, 1785 bp, Arabidopsis thaliana landsberg
cagtccattgtcgacatgatttctgaaactggagatgcccctgtctagcttatgattgttctacggttttgaatatttcggattaagtctctttaagtagaaaaggaacagccttgagtgattctgagtattggtttgtaggatcttaattgacaaagagattggaaatattaggttgtggaattttggattactacagtttgtgaaactagagatgtccctgtctagctagtgtttggtgcatttaggctagctcatgaccgatttacggttttgaatattttggatttctttaagtagaaaaggagcagtcttgagtgatcctggacatgttctagggtatagttaagattattttttctaaatttctagagggaattgagtttgtaggctcttagttgacgaagagaatgggaatagtagtttcactagatggaggctactgtagcctgataagatgatgccgaggcatccaatgattatgtgaccttggatttagcagttcaacaagagtgttaacatgcaatctttgtgatttctgaatactcgtgatgataatcagttatcacatgcattcccattttacaccaatattttacatgtctgccaagatttgtttggtgaacaccaatattttacatgtctgctgcagatgacgatgatgaatatgaggacaacagcaggggttttaaccttggattcatctttggaaatgttgataactctggggacttggacgctgattaccttgatgaggtaatctgttttacgctttcagtatgatgaccttgttgaacacattattttcattatcggtctcagtttttctgtctattctctctggacttaggatatatgtattttattaactatgagttgcaaattctccaccaagcatacctgtgccaatgctaacatttaaacttttcaggacgccaaagaacatctttctgcattggcagataagctgggttcatctctaccagatataaatgtaacgttctacacactctttaatattttatcttctaaagtttatagacgagtgaactgcgagtcttttatgtggtttttaatcctctttttcttgtactgggatgccaataatggtgtttctaaactcaacagttattggcaaaatcagaacgtacagcaagtgatccagctgagcaaggtgatgttgtctgccagggtcgtctatcttatgcagtttttattgttcatttaacttctagttttcattctaccgtttctttaaaccatactggagtagcttctaggaaacctgctagaaagtttttctcccagtgaatgtttccatcacaatggtcttgcactcttcttactttcgttgtagtcataatccaattattattggattgtttaagaaagtgtcttgcgtaatttatatgcataaacattttaactactcacgtttacaatctttaaatatgcaacattcctgcccgtagcatttacatactgacactatttacactaccaaatcctggtcatcagcgtcattgactgtggtgatatgttgtgtagattatgatagaaaagctgaggatgctgttgattatgaggatattgatgaagagtacgatgggcccgaagttcaagtagtcagtgaggaagatcatcttctgccaaaaaaggagttttttttcgcttgcagtgctttgggtagtttaaggccagatcttttgtgtttgatgattaaatattatgataggaagaagtacatgtgagtgtctagccccttcttaaatatctttttgaaac

SEQ ID NO: 56722 - DNA, 129 bp, Arabidopsis thaliana landsberg
atggcggttcttgtcgaaaataaaatttcgcaatgcctttgagaaatcgaaggctcaaaggcaagctgtaaattccatgtgccaggtctgatcttgtttcttacttgctttctccgggacgcataatgt

SEQ ID NO: 56723 - DNA, 242 bp, Arabidopsis thaliana landsberg
ctatttggacccgactgattcatagtaactactgccgggactgttctgcagattcttggacccgctaaactttggttagggattccaaggtcagatcgtcaaattctcgtgacagctggggactacatatgtatggacgcgttgccgatgttctcttcctatggatcatacatacagctaagactgagtcttattattattctaacgcgcacgtgcggccaattggatacctaagcacaccg

SEQ ID NO: 56724 - DNA, 211 bp, Arabidopsis thaliana landsberg
  unsure (1)..(211): unsure at all n locations
cccccccccccccctttttcccccccccccccccccctcccgctttcctttccctcccccctccccccctcctccccccccccccccccccccccctcccccccccccccccccccctcctctcctccctccccccccccccccccccccctcgtcccccctctctcccccnccccccccccctccccccccccctccccccccccccccc

SEQ ID NO: 56725 - DNA, 1234 bp, Arabidopsis thaliana landsberg
aatcactgttgatttgtagtattatggtaagcgagaaataaatcatatagatgtatgatactaataaaaatgatatagagtgcaatctcatcatcgataagtacttatttggccaatatttattagtattatatgtaatcaatctaaatatctacgtttaggtgaaaagtttttgataaatactttacactgaattttttttgctaaatatatacatttcattttaattataaaaacccttaacaaaaaaaaatcattttaattataagcataacaaatcagaatttgttggtttggtatattaataagtaaaaaaatgcatgtttgaacataatctttacaaatattcttgtagtcaagagaaaagtcttatagaaacgtaaaaatcaacgtttgtaagtacgtcgtccacatattattattaatagtaattgatcttaatttagtattgcattgctgaaattaaaataataataaaaaataattggtgtacagttttgtcaaccgactttaacaaggatattcgcattggcagacactaaacgtaccaagagtattacaaaatccacgtccaccaatatacttttgtgcacagttcatatcacaacattgtccttgacatctttgactacatataccagccccaccgtcgcatttcttcggcggcgcgggtggtgatggcggagattcacattcgtagtagcattggcacagcggcaccccaacactacgatcacagctgctttcgctcgatggtccgtgcttggccttgcatctctcgtcacaattgttgcaatagcctaatccatctatacatgtatctcctctagcctgattcacaactgtaacattgcatatgtcattaatataaacataaataaatattttggtttattttttatatttttgttatggtttagacatattaattcttaaatgtgttattattgaaaaaattgatcactagaaaaaatatcatatcacaatcatactaatatcttagtttttaatccaaaatcccatgggatactttatttcattcagggaataaacgatcgaatccctatactcaagatgataagctcaagtggccatgccaaaatttgtttatcctgatcatagaattatacttaagaacatttagaactgcaaggaatgtgttaatgatttttattttttttaacataccagttgaaagatatagtaggaaatataatccctgatggaaaaatgg

SEQ ID NO: 56726 - DNA, 1158 bp, Arabidopsis thaliana landsberg
atactgctacaacaaaagggggactgttaaatttttaagaaaaagggtgactatctattaacaaattatgtagtttacatttgttgattttaacttttaagtaggagtaaattatatatttcaactacaaaagatacattgaaattgtaagacaatagtgtcttcttctttttgggtcaagaacaatggtatcttttaaaaagccaaaaatagtacaaaacaacacttgttagttaagacccaaaacatttttaacacaccaaaatttttccttagttaccactcatatcaacatttaacatttttacaaaacaagcactatactaaaattacagattttgttttctttttaacaacttttcatttatttacagatgaatttgtaaccttttttataaacaatattttcgagaaaccttctcgagttcacacttccttcttctcggttagatacctcgccggcaaataaagtattccgatctaaacacctcccgacaaagcaggtaaacagcttccagccccaccaatcaccgccgtaccacaaacctctccaccgtcaacagccggcggcaacgacgctgctgacgtcaagacacttggcaaattcagaattaatcttctcttaaatatctctccgatggcaaatatgaaatcaaccgtcggagacggagaagcaacaaactcgccgcaaaacttcatatgaatcgccaaagcctcgtcgacgccaattcgtctctgtttttttccacaacggaaaatctcgtacttaactgcctcagagcagagaccacaaataaatttcccggcgtatagacaccgtacgctctctatataacccgccgtgtattcctccttcataccgcaacattcgcatcttgcaaatcctacctccgacggctttgattcagcgatcgccattaaattcacagtcatatctgtgttattacataaacatcaaaattagccatttaaaaaacagagacgaatctgattcgtagttaaaacactaaccttttgctgcgaatctgttgtgtaacgtatgtatatttatgtacacgtaaatatttatgtaaaggttttgctagctatctctctttctcccactctgcaacttgtacttcgccgtaaaagagctcgaaaaacaaaatcattttctaa

SEQ ID NO: 56727 - DNA, 534 bp, Arabidopsis thaliana landsberg
atctgttttcagtcccaccacaaggaaatccgcttcccgtgcggcttctgaaagggaggcgatgttgcctttatgcaggatatcgaagcatccattcgtaaaagcaatggatttgttgataatccgccattgcgcgatctttctttccaattcttcccagctaagaattttctgtccgatgatttccggccttttcatgattctttttatttagaatgggcaacatgagaaaacagatggtaccaaagataacaatgatgccggtttgcgcgatccagatcagcataccgagcgacaaccctttttcgggtgtaacgccatacaaaatgagtacctgctgaaccgcgtactggaaggacccgataccaccgggcgaaggaatgatcattcccaggctttcaaagctaagcgcagagaaggctgctttaatgcccgattgcgccatgtctttcatggcaaaaatgcccatataggtgctcaataaatacatggcccagatcacaaccgttttaaaaaagaagagtcccttatttt

SEQ ID NO: 56728 - DNA, 784 bp, Arabidopsis thaliana landsberg
acctcctgctttattccgggtcaagcatccagatagctttgaaaccattactatggagatctttggccaaagcacttggatccggaaaacgctcctaaacaaagtattcaaaaaaatgtcttataatgtcaatacaaaacttctaaggcgtctatgcaaaccatggtaagcactgttaataaaatccacttggaatgatctttaagaaaaaacatgccttgtcgaatgtgaaacaacggaaaccatccatgtagtcaatatccatccatatcacgtcagaaggaattttcttgtcgcgaaatgtttgagcgatctgcaatcatcagcacaatgatgaaaagcatgacagggaagctcaaaagtttaaatactgaatataaagtgacattcccctcattagctttactcaacaaccaaagccaaaatatgaacaaaaacactgacctcggctactcgcttgtcagacatataactccaacggcattggtggtagcctaaggcccacttcggaggcataaacacagttcctgataagtagaaagtataaattattcaaaacagaacaatatttacgaaggagaaacaatagagagagcaaacaatagtcaacatacaaattgcataaacagagatcctttctacaaagaaacattcaagctataaatagagaaagcaatattaagaaaatcccaatggcgtgcgagagggactccaagacagcagtaggcgaggagaatggacaaatgtgattattggatatgatgctggggagataatcttatga

SEQ ID NO: 56729 - DNA, 983 bp, Arabidopsis thaliana landsberg
taacccaaaatatgtattgggcagggcgccgcggctcttgttaagcccaaataaaaattaatatcaaaggttcacaatatatagcatataaagaaactaatagttcacaaagataaggtagaacaactggtaaaacggattgtttctactgataccgatcggaggttcgattctcagtagatcaaaaaccgactctgagattaggtattaaatatttatacatggtattgtttaattagtgaacaaattacttttcatgaaatatatttatgattcaagattacaatatattattaaggaaaaactctagagcctcccaccatgacattaagaaaaaaaataagagcttaagaaatttataatgaaaaatcccaaagctcaatccttacccttaatagtcgaaaacagcaaaagaaagaaagcttaaatttggatatctagctttatctagaataaaatctccaaggaacttaatagcatatctagatgatgatgatttggatgatttgtagatagataacgatcatctcaagctttgccatatggatgatttgggtgtgaaaacttcatctcagcatccagaggaggtccaccactacgaccaccacggccattgacggtgctcacaattcctccattaacaccaagaaagtccaaagtcaacctatccgagccacccatgctaagattgtttgcgaaatgaaggtcgaaaaggctaggggaccggccttgttgatctgttgtcgcagctagagagttcatgagtccttgaaggtttccatgatcacaatctccaaagtcattaacgaccacacttgacgaagatgaagaagttagccctctaagcaaagcagatgggccgttgttatcagcaccattggtgaacagagaaggaacacctgtctgatcagaattcttggtgtcttgaaagtatgcgaggttgaaaaagttgtggttgttgttgttgttatcacccaggctga

SEQ ID NO: 56730 - DNA, 564 bp, Arabidopsis thaliana landsberg
tttcttatgaattttgaacattttctatcgaattgtgctactcattgtgtcttggagatcgagttttatctgtttgccattctcgatttgtgtgctttgtggagatttttttttttgttttggcttcactttgtctctgtttcacactttacaagagatctaagtttaatgttaaaggcgtgatcttttgtagcgtgtcacattcgtggactaatttttactaattgtatgttgttgcttaacaaatgtccttactggagatccttccttgttttggttcaaaacaatgtacttgttggtagaacatctctttagttctgtttgagtgacactaaatgagattctttgctttgtggttggtggaagtattagtctctagatgcatctttttgtgttttgtttttagaaaaggagcgatgctttccactactcgggtttacttgattattctttcttctctagatttctcaaagaagctacatgaatattattaatccaatataatctatatccttatcttttatcatcaggactctcggcgctcttatgaagtgattgtgaaga

SEQ ID NO: 56731 - DNA, 124 bp, Arabidopsis thaliana landsberg
ttaaacagaaggtctgttcgttacacacgactgaccggttgtggactctcaggaacatccgcctatttccgtactgcatcattaaccgttgaggcttataggcgcgtgcgtcctcgtgtacccc

SEQ ID NO: 56732 - DNA, 1344 bp, Arabidopsis thaliana landsberg
tccaacttattcgaatcttcaatcttgtaggtgatactaagtcgaattgatgagaagttagatagtgaattagatgttcggaccgacccattatccgaattttttcttatctcatattttattggattatcgattccaattctcaaagtggacaaacctaaattttgttatctgcttttttcttcttaaggttctgtccaactaccactttttatccctaattccggaatagtgaaaatccccaaatctttatcatctcatgaaaatttaccaatcgtgccttttatttttgttctggggtcctcttcctttttaagaagcaacaaaaataaaagttgaaatatctccaatcatcctataaaaagttggtattttatattcataatattttcattagaaaatgatgcattatgcaattatttgttgctttttggaaagaaaaatagaaagccaaggtcacgtatctttttcaaacacattttttcttttgtctatgctatttgtgtgttcaactatctcttatttttttaggatacttaattctaattttattatatcctatttctgccagtattagctagtgagaagaaaattctgattatattatgatttaccaactgcctatttactattataagcaagctttgttttccaccattgttatatttttcttacagaaagactatattacttcgtttacaaaaaaattacttaagtgaaatcctaaatatgatgagggtggaagttatttatgttaaatgcaataacacacttcccctttagacaaaaggaaaaaaagaagaagagattaaggtcccattgaggtgtttgaaaaccctttagacttgttatcgaaaaatggcaaccacacacaaatttggtatattgaatgatgtcaaacttttcttgcatgaaagtttatcgtttgctttcccctatttcgctcctcaaccaaatatccgatgttttacacgaaagcttatgtgcatactctggttctctgtaacgaaagtccattttatatttaaatagttttttacaagcatttttttccaatgttaaattttgtaatatcaactttttttaatttaatattagcttagtttcagaaaaaaaaatatgtaagaattttagccaaaaaagataagaaaataatattaatgtaaaaatatatattcgttaattgcacattttcaaaaataaaataaaattactgtattaaaagtgggaaatgggaatgatatggattcatcatcactaatgcacttaagggtatagaaacccaccaacttgttaatcctctgcttttattggccgttacaaaagcttcctcgagaaaattga

SEQ ID NO: 56733 - DNA, 642 bp, Arabidopsis thaliana landsberg
atgctgtaaaacaggttgttacacgaccactctagaatcccattagtcctatccttcgactgataacatctcttacatttacatgggatatatgttgagtagtaactgttagttcttgtgttcttgtctaatccagctgggtgattataaacttagattaggaaatttgaagaagaaatagtcagatgctcgtcaagcattgcttgtttaacaataaaccgaaagttgatcgagaaaatgaaaaccccttacctcattgaatagctcatatacgagttaggtcatgtagcatcagaaaattgtctcagtactctgaacagtccacatttttgttttcagaatcagaaaatggagaagatggacatgtccctcttgaaaaaattatggaatgcgtcaagtcttgcatccaagtggcaactatagatgacattcttagcgcaaaagcagatttgattcatgttcttataatttccttatcacctggttttctgtggactggtacttggttcttctctcactctatcttccagtaaacttttcattaccttaatcaatctaatcttctgtggcagtaaaaatgtctggacttcatgtgtgggatagctttgctcaaggtttccgagcctatggactgactccatg

SEQ ID NO: 56734 - DNA, 1612 bp, Arabidopsis thaliana landsberg
agccacaagctcttcctctgtcggatgaaatcggaatcccggaggcattgacgattgcattatattatccatccacgatgatcctaaacgtgtttaatctggaaaattgttagagaaatgagtaagaaacaagatggagaaatggcagagaagagaatgatatgaaggaaaatgaaatgtatataaacataagcgtgtctttttggaagctattgcgaaaaccttagacaaacaaggcacaaccttaaagttttgtatttgggaccaaaaccaaagcctattacaagcttcgttatatttaattataagaaagggatcgaatggctcttgggtccaatgaaattccaaaagctgtatgttgggtaatgatagtgatgttacacacggacgcacacgataatatactatatacctataaatatacaaacacatatatatacatgtaactagatattatatccaaaagcttggatctttaagcttaaggctatcgctattatatgttgctgatgatggttattatgtatttttatgggaccacccaacaatggaggagctgttactattttaaaagaaaaaatgcaaaagcttgatagagaaagtttttggaccagaaaaaaatattaggtttaagggtttgtttcgccttctacataccgaacgatgcttataaatgaaaagattgaaactttgtataatatgtactatatataatgacataaggtagtattataagaccaaaaatatacaagcagtactgtatatatctgtaactatatgtaaaataatcgtatataaagctatgtagccgaaaagcttgacgggtggaagtcactgaggttggagtgtgttacacactctttgtcttgagttattttcctagactatctatataatataaattatattatggtgcaacaactattaatttccaagaaacaataatatcttagaaacacacatagattccgaaatccccaccatgattgatttcaattccccagtttactctaatatttgtgggtcaatctcaacaggaccacacacatgtatactattcaagatatgaaacgatacaaaacgatactatatgtaatatgtatgtatttttgaataataaaaacgtaaaacacaaacgccgatgtatcatcatctggttcgtgcatgaagtgagtacagcaacaaaacataaaaaccctaaaaggagcaatggggtgaaacttacgagctaataaagattgaacgaagggcttgttatttgctagcgattttcacaagagcgatctaaaagagagtagcaaaaggaagaaggagaggaagattgaaatctctggtggtgtggatcaaatgattgttaatatagcaaagacaaggagagtttggcttttgattagatcacatgcatatggaccagctagaaatcttagactgtatatataggtttatgcgagtatgcttaattatatatatatggtaagtgtgtgacatgtgggtgcaaaatgatgatataagaagaaggagaagaagaagaaggatatgaaggaaatatttgattgcgcgtgggatagacatcttagatttgtttttggtcggcgtctctctctctctctct

SEQ ID NO: 56735 - DNA, 1302 bp, Arabidopsis thaliana landsberg
cgttgtccgagagactttatagaagagtgggacccagtgaagtcaatgtctgaatgtattaatgtaagagagagagagaagtgaaagaccacatggctgcttctggtttgaccaggcgggataggtcatgggacctacactagtctctttattggtccatgattagattccaaaatcgtttctttcataacgattcatttttatttaagttagacgtgtattcctctgtgtatcatcgtcattatgacgttacattttgcgtcagaaatacatatatatatggtccaaatgtttttgttctttttgtttatatcacacgactcctttatgtccatattttagaattgtaaccgttaatgcctttaaccaaattgagtactagaagaagaaactagctaaagtacgatttcgctttacaaagaaaaggaatcacagttgtacttgtgcagatcttatatcaagaaaacgaatcttgtaatgtgttcaatatcttatcatatgttttgcacataaataaataaaaatgttaacatatgcaatgggtaagaacatctaacaaattttgtgacattttgtacagtaattataacaaaaatgaaaaaaataacatataacaaaaagtggatctagaatttttttagctgaaaataaatgatcttttcattaatgagatgtaaacaagtgtaataatttactaaagataacaaaatattagacaagaaacgtgattttgtattgacgtacagtacagtacgtttatttggaagcacgaatgaatagaaaataaaacgttacaaaaatacagtttattgtgaaaagtagtaatatataacaaaaacataacttatttttattgcttaaaagtgtttattcttaaaaaattaacatgtgaaaaatgtataataaagactcacacatctcattgattattttctgttaatctgctaatttatataccactttaattgtaaattaatagattgtcaaatatcttgaaatatagtaatgatgccgttctttagaattccgatcattttgaatcacttgacaaaaacatggacctataggagtagtagaaagaaatatagtttccaatattaataagaaaatgtgtgatttagtaaaaataaatgatttgtgttaatgccgttgaaagatttaattataagtttataacctatgatgaaactctctaatttcatgttattgtcgataaaataattatatgtacaaagttccaaaacaaggagttatataaagatacatagctcattacacatatataaaatctagttattaatt

SEQ ID NO: 56736 - DNA, 1294 bp, Arabidopsis thaliana landsberg
aaaagtgtatgtcaaatgtcaaaaatggttcaagtgggcaagtcaaaattatagttccttgtgtaggattcacatagatatccaatgttcaacgacaatcccttaaaagatgaaaaatttacggttccaattgaattaaatatcacaaagtacaatttttcaaatacaactctaagcacgcagctccgaatcacagcagattaaaaaggaaaggataagccggagatctctaacctggaggaagagaaattggaggtggaagagaagaaagaaacggaggcccaatcatgctttgatctaatctgatattccctgagctgttctgctagattcgatcttgttatcatcgcttcttctccaccaagtcccgatcacagtcccgattcgacgaagagctcaagaagcgtttgagaatcacgagatgtaggaaaaatctatcaccaacatataactagaatctagaaatccaaaacaatggaaaaacaaaatctgtgaattggaaaatttcgcatcaaaattttacagcgacgaaacggtgtccgattcgttaggaattcggcgaacgttgcgtggactctctcggtgtcaacaaccgggtcgggttatagatccgatctggattcttaagcccattttatgggtattgggcttttaccgttactcttttgttttgagttgtcatcatatatgaaaactttgttccgatgccatgaaatttgggcttttaagaatcatgaaaactttgttctaacagaaatagaaacatcaaagaaaaagaaataaaacagcgatgcatcgattgattctcatgtcccaccaagtaaagtgagtgctaaatattgttgaatattcctgatttgaccacaataaggcaaataaaatatcacgcccataaaactcagacgggcggtgaaaaagaagaaatcgacagaagaacaaacgcatgacgttcattacttagcactaatctgaaactttcgaattatagtatttgatccatatgtattctacgtttttcagaaaactttgttcagatatctcaaactttcgaattaattaatattattttagtttagttgtgaattctaagtgtcggctacaatttgtcggttcgctatcaccgaaaacattatccaaagaataagttaagagctgagcttcggtgtatatgacaacaagaaccaaaaagacgaataagttagtattgaaaaagataggtttgtttgatatgtgcgttgatacgtcacggttcgtgctacgtctttgttaaatttagagaccagaaattactgat

SEQ ID NO: 56737 - DNA, 120 bp, Arabidopsis thaliana landsberg
ttattttgatatggagcatgatcgacatgactggagggtactctactctgtatagtaccaagtcctatagcgcactcttcattcagcatccaccagataaccagttctcatttcaacaca

SEQ ID NO: 56738 - DNA, 231 bp, Arabidopsis thaliana landsberg
  unsure (1)..(231): unsure at all n locations
ctatttaaacccaaaaacttttattactcataagaagcagcggaggacgataagcgacatccgctgatacctgtacatcatcattaannnnnnnnnnnnnnnnnnnnnnnnnnnnnnnngtagcccccaactatacttcttgaaaactgaaaacattcttgagtaatgcttatcgtaacggtccgtactcataattacccgaatttaaccattgaataggacataacgatg

SEQ ID NO: 56739 - DNA, 918 bp, Arabidopsis thaliana landsberg
ctaaaccacctggtgccaatttctatcctcccgatatggataaaatggtattcacacatgtttgatgtgtctttaccaattccttttctgttcccattactcgtagtaagaaatgtgtatctaaaattataggagttcaccttatggctcaatggccttacggaagagcaaaagcatgctgcaacaggatttttcagtgttataaaaaggcgaagtgaagctaatttagatgcttctgatcatcttgccagcagcacaaagaagttaccagactctaattccgatctgtatagtattccttattcagagatatatcgacctttcctcaagaaagcttctgaattcttgcagaaagctggggacttggtcagttcgccaaggtatatatttcaaacagtttcttacccttaccatataaaatgtattcacccattcgattggcttagtatattgaagtattcacccacaatgctttctcatagtttgaagaagctactgcacagcaaagctgaagccttcctttcaaatgagtattatgagtcagacatcgcatggatggacttggtaactcttctctgttcatacatggtcttctagtcttctgtaattttccttccttataaaagaggatagctcttgtaagacgagctctggctattttaatggtccgtaattttctgtcacatatcagtcatgcattatagttttgagtaacttttgctttgtcttatcatcttttgtaggattcaaagttagatattaccattggtccatatgagacgtacgaggatgaaatctttgggtataaggtaagactttacataagcatgtgctttcgcaatgatttgcttatgctgatgctcatcctcgtctttacataaccttcataaattgcaaactcccttaaccattactctc

SEQ ID NO: 56740 - DNA, 966 bp, Arabidopsis thaliana landsberg
aaactcgcaaactttaaaataaaattttgaaaaatatatttaatgtaatattctggttttattagtaaagtaatattacttaatactaacaaattacaaagaaaagaactgcaggaaaaaaaataaacttttaaaattttctaaccagtgaaataaattagaatttaaacttaaaattttattaattaataatagtcataacaaaatttgacaaatgttttcaacttagatgtgcaataaacatgaatttattctactaaatcaatactgggcctatgaatggcgcaaggaatagcccattggttattctatatcttttggaccttacgtttttgaagcctgtttaggatcacactcataacaaaaaaataaataagaattacgcttctaccaccattaaactctaatgtatctgaactagaagatccgatcggagtagtaaaaattcaacaaaacaacaataagaaaactcattaattcattcgtcggattcgaagaagaaatcacttccagaaactttcttcgtatcgaagtattgcttgtgttcttcggagaaacgagatcgggatccgaatacgagtacaatggaggtttcgcaagatggatcggaaagagataaaactcctcctccttcctcttcttcttcttcttcctctcccattcctgtcgtcaccaatttctggaaaggtttgtttcagattatgtctagctatctaatcgttttcttcgactcgtagtgaagctgaggatgagcttgtttttgtagttaggagaaattcgtttgttaggattccgtttaagtagtaagacttaatgagattctcactgaatgttcggtgagattgcattggtagtttaatgtgatcggattgagaaatttcaagttattgctttaaaagttatcaacacatttttcagtactgataactagttccatctcgatcttcggcttttgtatttgtatac

SEQ ID NO: 56741 - DNA, 278 bp, Arabidopsis thaliana landsberg
tattataaacccacaaactttgatgaatcataagcggggaacagaggactataagcgacatcagctgatatccgtacatactcaaaaatgaataaaactaaaacggactatagttgacgtgttccgacctacttgcatgctaggaggctgagaacatgctcgattgctgcgttccatcactgtacataccaatacttgcaggtattgaacaactgtatcggataaaacaacgtcgccttctgtaccagcgaaacattaatccttacctcactgcttac

SEQ ID NO: 56742 - DNA, 107 bp, Arabidopsis thaliana landsberg
ggtatatgctttcaggcgatctatattaaagtcgggccagaatgcaccgatagggatttttcaaatacgtggacgtacctaagaataacgactcgtgatatcagaac

SEQ ID NO: 56743 - DNA, 277 bp, Arabidopsis thaliana landsberg
ctattctccactggcgtatcggggaagaccgaaaatcaggggggcgaatcaactggtcctcttgtgctcccacgcatatctaatatcacacttgcataaagagggcactacgtaccatgctgacgacggtatcatcccaggtcatttttgctatatggcgaggaacaatcttacaattgacgattgacgctttacactgacaaaaagagtcatcattgaacgagcacatagccacgtcatctatgaacgcttgtctgccacattccaactaaacttg

SEQ ID NO: 56744 - DNA, 764 bp, Arabidopsis thaliana landsberg
aagaaaagacaaaaagaaaaaaaaaaaaaaaaagaaaaaaaaaaaagaaaaagaaaagaaaaaagagaacaaaaaaaaaaaaaaaaaaaaaaaaaaaaaaaagaggaaaaaagaaaaagaagaagaaaaaaaaaaaagaaaaaaaaagaaaagaaaaagaaaaaaaaaaaaaaaagaaaaaaaaaaaaaaaaaaaagaaaagaaaaaaaaaaaaaaaggaaaaaaaaaaaaaaaaaaaaaaaaaaaaaaaaagaaaaaagaaaaaaaaaaaaaaaaaaaaaaaaagaaaaaaaaaagaagaaaaaaaaaaaaaaaaaagaaaaaaagaaaaaaaaaaaaaaaaaagaaaaaaaaaaaaaaaaaaaaaaaaaaaaaaagaaaaaaaaaaaaaaaaagaaaagaaaaaaaaaaaaaaaaaaagaagaaaaaaaagaaaaaaagaagaaaaaaaaagaaagaaaggagaaaaaaacagaaaagaaaaaaaaaaaacggagaaaaacgaaaaagaagagagggaagaaaaacaaaagagcaaaagaaaaaaaaaaaaaaaaaaaaaaaaaaaagaaacaaaaaaggaagaaaaaaaaaaaaaaaaaaaaaaaagaaagaaaggaaaaaaacaagaagaaaaagagaaaaataagaaaaaaagaaagaaaagaaaaaaagaaaaaaaaaaaaaaaaagaaaaaaaaaaaaaagaaaaaaagaaaacaaaaaaaaggaaaaaaagaaaaaaaaagagaaaaaaaaaaaga

SEQ ID NO: 56745 - DNA, 542 bp, Arabidopsis thaliana landsberg
ttatccatcacatcggctggcgagttgggggcggttgctggtcaccgaggaggtcgaggacgagctggaagaggcgccatgtgaggcagcagcagtcgcagtcgcagtcgctgcctcttcgctcctgtagctgaggcagccggccgcgtccagcacccccacagggctctgcggcacgggcacgggcacgggcacgggggagctcctgcgtctcgcagatttcggtggcacggtagcgtcgtcgtcaatggccgccgaggacgccatggacccgatcgcttcctggcaccgcaacacccgctcctgcagacacagcacagaccacagaggcaggcaacagcgcgcattaaataacccgccaatggagctcacacacccaaacgcacgggcataaatgcgcttcacgtacgcatctgttaccggggccggcgcgtttacgccaagcacggctagtacgagatttccagccatgaatgggtgtggatcttgaaccgaccccgtgtggccttgaccgcatttgttttactagcttaaacaaacta

SEQ ID NO: 56746 - DNA, 1642 bp, Arabidopsis thaliana landsberg
  unsure (1)..(1642): unsure at all n locations
gcgagtatcgaatcattcccacccatgtcccacattgagttcaagtttgggtctttatagtgatcatctctttccaacacgtagtcttcaacatgtgatccaatgtggcagtctctaccgtatgctcttagcttctctaactctttgcttatttgtctaataagatggtccaatgagtttactctagaagaacttacgggtaccttcacgaaaggatggacacttaactcttgaaatcttctttttcgtttcattagctcgaaggcacactcgaggattagattattgtcttcttgatagtaattgctcccatcggtggcgtcatgaaagacattttgaggaatgttgagtttgaaatgtgcctttgctgtgtctagaaataattggcttttcacaaatatcttctttaggtttatttcattttcgggtaatgtctctgttggttctcgttttcggcgttcttgtcgcttctccaacaagggtaaaccagcttctatctccccttttgtttctgaaataattgtaacttattttagttccatttttatcaaaacaaaatcttgacataatgctcgaaatgattattagtgattttttaaaaatgtgcaatgagattaataacaagacaacccaaaactttattctttgcttcttacctttatatactgtcttggataatatatctaaatttccatcagactttggtattggagcttgttggtccatcccatttgtgaacatacgcccatgatgctgcttatgaacatccaacaccgattagaactaacatatacagatggtatatatgtgaagttaacaaatagtaagcttacattttctgatggagcttgacatgggactctctctgcggcaataagaagaattgagtcatctttgatctctttcttatgctcaacacctgaaacttgagaacttttgatgcatgtatctacttctgctttcttctcattactgtcattgtaacttttgagtaacagatcatgtttcccatcttctttcttaatctctggtcgcttcattactttgcacaatgcttcatttggaatatagatgtcttggtttttcttctcacggatcttggctttatgcacctctccttcttttcccttttgtgctacctcaacgtgagaaaagcttttcttcatagctttagctttgtctatgactcctaccttcatttgtaaatcctctgaactcaaaggtttttgtgaatgatttgtcgttacaccattttctcgatgtctttctcgctgcaatttctctttcttattgctaagtttatgtaaaggcttttgtttactcctcgcgaccaccttatgtttattttctgttggagctggattcgtcgtagttgtttctccatcttttttgtatgaaaccttgcttctttttctactctttgaatcatccgtctctctatccttctgctgagacttggctttgtagtttatctcattcacggtttgagtctgcttatggattactaaatccaatgttgttgactttctttgtgcctttcgttcaacaagaatttcactagcttgcattactctacgcctngtgaaattcctctcatcatgttttaatgttgggttctttttcatcttgtggaaactcttct

SEQ ID NO: 56747 - DNA, 551 bp, Arabidopsis thaliana landsberg
  unsure (1)..(551): unsure at all n locations
tttgataaacaagcaattgggtgtataaggacgagaataaatatacacttgatgttgattacttgcatttagtagcgtaaataatgattttgtaatagtataaagccaacttcgtccgaatgtctcccactaatctcggcacaatcacggtctacggattatttcgttcttttgaacatagctatatattactttaaaaatgtttggttaatagattatactctgtacttcaaaaaagaaactagatacgctatatgtactttatcacacatcctacaattatttgagttggtcgtacttttactatatgtagttttctttgatttattcgtataaagaacttataaaaattttgcacaaaaaaaaagaacttataaaataaaagatgctcaattttaatattggttgtctagtcaaagttttaaaatttattcatattttgaccatgtaaacaaataagctttgattagtgaggttatgtaaacaatatatacagattaattntgcccccaaaaaaaaaaatttcgatcatatgagaaaaaatgaatcac

SEQ ID NO: 56748 - DNA, 262 bp, Arabidopsis thaliana landsberg
  unsure (1)..(262): unsure at all n locations
tctattgactccctcattactctggggtagtgggtagatctaagtgcctatgtcggttcaacggcatttggatgctctctcattctattgtgagacaannnnnnnnnnnnnnnnnnnnnnnnnnnnnnnnnnnnnnnnnnnnnnnnnnnnnnnnnnnntcatatatggtgatggtgccctatggcctacgatatttaagcacaatgtctacccgtgttttgctggttttaatttattgatggaatcttaccctatgatggct

SEQ ID NO: 56749 - DNA, 1123 bp, Arabidopsis thaliana landsberg
  unsure (1)..(1123): unsure at all n locations
atataattcaagtaggacattcttactgagcctcaatgagtacgtacaagtttgataatctccacagtcggatattatgagtaatctgcacaaacaacaattattacaattaatatttgaagattgttaagaaaacaaattgacaataaacctttagtaccaattggatttttaattgcctaataatatatttttcgtaaaaaatcattttaaaaataaataaataataataactacaatatttaaaaattatattatctaaataattaaaactatcaaagtattttcctttatttttcttaataattaatctttatcataatttcttaactacatagtactatttttattttattttatttattagcacagatttatttacttatttagctttttttagtatgtggaagttcaagtctaaaggctctatagtttccggaggcggatttatttccttcaataggctttctcatttaatacttgtttcatactttacctttcttacacaattaaaattatcttctcctataagtatactgactctcatgatccattcaaaacgactagcgttaaaggatttaaacatttgtttccctgttttccccgaattatacctttcttatacaattaaacttatctattttgttgtaatctagaattttacatgtactgtatatgtatacccataagtacattgacttgagattcagttcatgagccattcaaaacgaccacgnnnnnnnnnnnnnnnnnnnnnnnagatggcgcaaatgttgctacgaagggatctattgatggtcggtgtttgcttggtcgttgccggattcttgagtttggtgatctaccaaattggtgtttatccactacaactgtttctccacttctccgatgatgtcgttagtattcttctccgatcaccttatcatctttgatctatcatgtatgtatgtgtatatttgtttttgaatatctattttttctatacttttacaaatcctctttttcaacttttgcttattttttcctaccaaaaaaaaaaacttttgcttatttttttctctttctaatctcttttataaaatctttgaatttaacggaatcataggttttgttttcttacata

SEQ ID NO: 56750 - DNA, 527 bp, Arabidopsis thaliana landsberg
  unsure (1)..(527): unsure at all n locations
gtgaactatccggatcaacgaacggatggggaaccactacacgacggttcacttacagcgacctacggttggttgctaaannnnnnnnnnnnnnnnnnnnnnnnnnnnnnnnnnnnnnnnnnnnnnnnnnnnnnnnnnnnnnnnnnnnnnnnnnnnnnnnnnnnnnnnnnnnnnnnnnnntttttagcgaccgaccgtccgttgctaatattgtatatttagcgaccaactgtgggttgttgtactatagatttagcaaccaaccgtaagtcgccatactatacatttagcaaccaacagaaagtcgccctttttacagttgttattaataataatatacatttaattaagcaccacaaatcatagatttttatacacaaatcataaagacatacacagttaatcagtataccacagtcatcgatccatcacataaacacaaaagcaccacaattatatattcacagaagcatcacaattataatatcattcacactagatcactaatgtttcatatcactccaact

SEQ ID NO: 56751 - DNA, 515 bp, Arabidopsis thaliana landsberg
tttattttgtttctactcatcgatggcttagagggggtcggaggggccatcttatgtgtgcctgggcagggccatggggcggcggacgccaacgattctggcgtgggtttcggatcgaggggatatccttgaccagatcacgacggattccagagtggagggcgagccatgcggaggtggttattggggggaagaagatagagctaccccaagggacccacgcagcagtcgtgccagtgcgcgtaggagagtttgaccgagcggctgacgcgcggaccccgcgaatggctgacctgtgggcccagctatcggcgccttctccatagctgggccgcgagagttggtttgcgcgttcaggagttgggccactaaggagtttgggcccaaaccgaggtctgctgtccttttttcatttttttctattctccttctctaatctttttgagtcaaatttggattcaaatgtaaatgtgaacttgcactcaaattgaaattacaaaataaacatactagca

SEQ ID NO: 56752 - DNA, 1560 bp, Arabidopsis thaliana landsberg
tatagcactaagaaaagtaaatagtaaaaaagcaataggcaaaacaagatttaagcaattaaaaatatcatgagaccaatggcttggctcagacaaacatcatataacaatactgtggagatgtatctaatcaaggcccatgcattcactttcttggaagtgaccccgtcttctgtcttaggtgggctacggtctggatctgtcatccatttggctaatgtctatcgcaggagagatctttggaccggtgggaagggaagctgtagtggtcttggttctcccgaaaatggttggccaatgccaaatttgtttgatgcttattaagttctggatcaatcactagcttttcttagctgaatatttgttttattatatgttcaatcttgaaatgcgatctaatgatcactatgtcttgtattgaccaatcacattttggttttggtttaactcgccatttttgcaccatcttaaattgtatgtggctccatgattattctactttttgaatatataaatccaaattgtctacttaatttatgttagcatgttctgtatagagacaatttttctgattaaaagaaaatcacataactatgatgaaatgcatgccgtacgtgaaaacataagggttatatttatatcatcgaatattttgattaattttatatatactattcaaacccaattgtatttattttggtctaaaattccgttttgacgttatagaattccgtgcgtaaatcaatagtggttttgcaataaaaaaatttgaatgactatttttttaataaaagaaacttgatcgtcatgttgttaataatcatcatattataaagatgagttgacaagttactccattattaaagtatatgcatatgttcctggtcaatatgatattgtgtaactaaaacttaatttgacccgcacaaaaatttgcttttactagttttcggaggataaattaggaaatggtctactctcaccttaagatcttttgaacccgttttttctaatcaaaaatttaaatctaagacgacaaaacataaatggaatcttatgtaaaaataacaaatcaaattatagacgcaagagaaaaaaaaaaagtcaagttttatcctaattagtaaagttcaatcaaagcaaggaagcttcagcttttgaaagtcgcattagaaatattcaacgcaagagtaaagttataaaatgatttgattaatcacacgcggttacttagaatcgtttaaataaagttgtggcttgatgtttaaggtgtaaggttttgtatatacaaaatggaaatccaaatgcgtagcataatgtttcatctatttctatcccttctgattcatacgcaaatccaagccgttggttcacttgatcaagcttctgtgtcatctattgatgtaaaacgtcatcatttaacggtagaaacaatgccgttttcgggtgattttgtgcgtaggcagcttgccggtggaggtggttcttcaggtggaggagggggaggcggaggctctcgaggtggttcttcaggtggaggaagcagtggtggaggaagtc

SEQ ID NO: 56753 - DNA, 619 bp, Arabidopsis thaliana landsberg
tatttgagtaacatctctgatctgaaattgagcagttgggtttcaaaatctgattggtgggattgttagttctcctcaatgtgaatgctatgcaaaattttgaacttgtttggatgcgtattctctgcaaaatcatcaaattaaaacttttgtggcggctagggttctttggaatcgcccctggtcggtcgcggaccgtccgcctggtggacgcggaccgtccgggcctctggcgcggacagtccggccccctagcgcggaccgtccggaccctggcagagcatttcagttccattcctttttatagtggtgattggtatcaattatttatctatggatgtatgtcacattgttgcagtggttttggtggtctccgcaagaaacttgcaggtcgctttaaatccaagcgccctcgtggaaatggtgatgactatacaccaaccactgattcagaggcccaatcctcagctgggggcactgaatccatggatgctgaagatttcctcatgttcatctcgattacccattgatactaaggctggacttacccaagcggagatttctatggctgagtactctctagacggactgtgaacagtatatctgcatctgatcaaat

SEQ ID NO: 56754 - DNA, 626 bp, Arabidopsis thaliana landsberg
agtgaaatgaatgtgatcgatctctcaaatgtggcttgaagttgatcacacatgtgtcgtattgcatctcgggtctaaatatgctctttatgctatttatttggtattattggtgcttttttcattccaaattgctctagatagtttaattcaacaattttgcactactcaattacataatatgtatatgcatgcatactaactcttggagtggtcgaaatgtccatatataagcaccaactcggattcgaaattcaaaatcagaaagtggacagcaattggaaaaatgagtatcaggccgcggaccgtccgcccatggaccgcggaccgtccgcagcatcaggaactggacagtccgatcagcctcgcagaccgtctgaactcatcagggcgcggaccgtccgccgccccagcgcggaccgtccgcgacagggcagtaaaatcgggcagaggccgcagacttgtcatttgtgctcagtcgccctttctctcttgctctccactcgccaaatactctcctgtgtcgagtgtgcgcggacggagaagtgaagttgagcacggacagtccgacagcttgtggcaacattccatcaacatgtcttcatcacggtatcttcaaatcttgt

SEQ ID NO: 56755 - DNA, 848 bp, Arabidopsis thaliana landsberg
gcttgaaaactaattcatagtagagatttctcattttgatcaaaatgtattcaaagaatctcattttgatcaaaacttatagtactttcaacttgttaaatatttggatcctttgggcaaacattatttttgctaataacatctactctcatttttttctgagcaattacttttcgtttcttaaatcttcatcacttccacaatttggcatttgtgacgatttaatcacctccaggtcctccattgattccaatttggcatttttgatgtatcgctatacaatttttcattttatataacaagatggatcgttggtaaagattatcccaaaaaactaacttctatattttttacttagattttttggttaattcataatctcttcatattttttatttatttatttttgtcaaaaataccattaaattaagttagataatttctccagatcaaacatctagaatatattagtttagtctcctctccatcatcaaaattcgaattgtaactttgaattgattgcatcaatggtgtttcttttacggtaactatcagataatagttaagaaaataaagagttaattgaaaactatatctatttgtaaggcattgtaaataaattgccaccttaagtatgataaacgacaagttagacgtgaatttatgcgtaactaggagagaacccctatgctcgtgaatttgttaatatatatcaatcactcttgcattttcttgtacatatttttatttttttcgttttctttatggtaaaagtgtttctcttccatcttagtgtatttcaatcgtatcttaggaatgaaaatcaacttcaatgaacaactaaaact

SEQ ID NO: 56756 - DNA, 1071 bp, Arabidopsis thaliana landsberg
cgaatcgtaagcgcaaaaccggcgcgtgagtatcacgatcggtttctgtgaaacacatcagagcaagcctttgacgtgattcctggcttggtctctgatttcccgatttggaaacttctcgataacctctgatccaaaagacgatatgagagctcttcttgcagtctccaagtcgatcccacgagcttggaaatagaagagctggtcttcttcaagatcactgatagcagctccatgagagcatttgacatcatctgcaatgatctgaagattcggttttatgttcacggtggctcggggtttcagaaggaggctccgtgttagttgtcccgcgttggtctgttgagcgaatctgcatattaccacacagaagttaaaccgatgctaagcacaccaaaccaaactgaaaagtttacctgttaactcggacattgccatcgaaaacagcttgaccagaggaatgagcaacaatacacttgtgaagctgtcgtgaagcgcctcgtggatggtctaagataattttgctatggagatcaagagtctgctcgttgacacacatatgaaacgtggttagctctgtgagcgtatcaggcccaagctgctgcacatgaacattgtgcctcccaagtttcccaccagtactcacttccacaagctcatattcactctctgcctcctacagagttcaccacatgaacaattcagcataaaacattccgaagccataccaaaacatcctattctataaacctttatactacaaagaggagaagacaaaatcaaaactcacatgaggctgaaactaaactattcatcctcatcaacaattcaatcataaagattacaacttttccaacttcagcaatcagcagcaacaaaactaaactaagacactctcctcagacagcaataagattcctactttcgtactcaaattgatatcaaaacatccaacactaatctaagccacgagagagtactaccaaacagtaataggctaaactactgattcaacaattcaagaattctactaatacccagcctattagttactggaaagacataagagaa

SEQ ID NO: 56757 - DNA, 1599 bp, Arabidopsis thaliana landsberg
tttattactatttaacatagttgttttactttttggcaaatggaatttgttacttcaaacatgaacaaaatatcagcaaattgtacaaaaagggtccaccatgagatttatgtttgtctacaacttttcttttctactttctatcgttttatttcgtttatttcgcgaggtctcgtcattggatattttttgcatcaataagaggaatctgaatcgaacccacattgctggcttggttaataactcttcgaagccgtctactcaaatagtattagcttgatgatactaataaagggtgataaagtttatatctacaaaggtaaatataaatctatttataaatagcatggaatcgatatgcaatttgagactcggttgattactagattattcaacagaaaaaaagaaaactacatgtatagtgaaatcaattccttcaaatggaactaacacagtcaaacatgattggtttattgaggaaaaaaaagatggatggttaatgatatcaaggcaagggcaacagtgacattttgatgcattgatgttggattcataaaacccttcaaatatattgtaagttaatatgcccgatagtctagaagataggaagggagtgttgataaggacacaccgacgcgttccggagaaaaactttagaaagaagaattgaacttgacacgcgtctaatttggcggccattagaaaaaaaatgggtgtcacgctcatatcacgtgtccataccctagcatcaactccatgacttgtggggatcacggtgtctttttaaacatcaaacggctacggttgagtcttcttcggcttgaactcagttacagccgtaaatctacttctacggttgttgatagtcagctggtcaaagtctgatacattctgtatcacgtgcgtcacgtgtgttagtgtattaatatgatattttcgtttttgtatgtcgacggcggaagaagattcatataattcaattttagttggttagagaatattggatttatatgcagacttggagatatttagtggaatcagatcggttagtttcggtttatgacaagaagatgtggtccctaaataattgggtaatgtgatttgcgtaagaagcaaacgtattatgaggattatgtcagctatgactttaagtctttaaccacgtggaattgttgcgtttgccttcacgcaactagcctccttacacacgcatcctcgttccggttttctcttaaccgagaaaataacacgctcgtgtatattactctggcttagtttgagtaagcttattcattagcccattactctagctcctggactgggctgaaaactaagtattttgggtttataaaacccaatgatttatatcactctttttagtgtttttacaaaaacaattgggaacccaaagaattttgtcaaattcgtaaaacccactgaagtacagcaaaagttgaagcaaagaaaatatgttttttatactaacaaagcataatcatgatttataccttttaatccagggtgatttaggtgagtgatctaattttgaacaaaaatttagtaaatgactacgcttacaacaaactggtgaataacaaa

SEQ ID NO: 56758 - DNA, 1285 bp, Arabidopsis thaliana landsberg
  unsure (1)..(1285): unsure at all n locations
tagtatccacttgtctatacacttttgtagcataaagataaaatcatttaatttagctctttttttgtcaaaagaatttaatttagatattacaaatcttaaaaattaaaatcaaaactaatccactaatctttgatcatacattgtccctcctcataaattaaagtaaattaaacccaaaaaaaaaacgagatacaaattcctgaaaatatttggctcgcactagcaaagtaatctgcaacgaaaattcatcttcttttcctttgaggcgcattgatctcaatctcatgacacatccaaaatagggctattgaaaagtctcgtggtatattttgtcatattagtttttttttttttatggaatttgtgtgaacccttaagattcgaaatggggctgctagtcctccgtgtgaccggaaagtctccgacaatgactggctgtttctggcggcgacaacaataactaatttttcttctgatttctcgtaaataattatgtcaccaacttatgtacaagactccaaatgaaaatatactcaaattttcccgatttggtctatatccccgaaaattacaagtctacacacgatcggaccgttgaatttggccttacgggaggcaaccattattattgcaattctttatttttttaagtttttgatatttttgtaaccttatcgccttatttgacccctttgtataaaacaaaatattttagaaaaatgtcaactgtcaacactataacaaatagttcatcgatttgaaaagttcgattcgatttttggtatatgatacgttgttttgttatgtaaaataaataaaatgaaaataagaattaaagaatccgaacatttgttttattttagtctttatccgaatcgggacgatcacattcacattcacattcacatttataatcctattatccagacttcaaaattatgacgtgtatgcacaccacacaccctggtcacatatactctatgtgtttcaaataataaattggttgtttttgaatcgtagacacaaaataaacgaggatttgacttttagacatatatcttggttggtcatactccattagtcgggcgacaaatgaaagagtgactggaatcgtagcatacattttctcggctcctgcatttatgagaaataatacagtggagttttaatcagcccattaaattagctacttgacccattaaaacaggcccatcctcgagaagctnttctctattctctagtcttctaggctgcggcgatgcgtacatggactgaaaaactc

SEQ ID NO: 56759 - DNA, 1065 bp, Arabidopsis thaliana landsberg
aggtatgacatttgaccagatgcctttgaaatgataatacaacagattttgctatgtaagttttttttagtgacatttgggatgagcaaactaaatagtagaaccacttgtcgttaacgtctgcgagtgttagcatgtatcaattaatctcaagaaattcttcatctaggattgttgttttctcttccgattaatgaggggtgaaacaacctacagatgatatcacatatctggaatagatagattgagcaagcactcttacatgaaaccataccattttataattttcacgaattgagttaaatgttgcatatagcatgtctaatctggctatcttgctatttcagggtaaatttttggggttactctaccattgggttcttctcgcccatgatcagatacgcatcagcaagctctaacaattttgctggacgagccataaatgaattcaaaattcttgttaaggaggcacataaacgaggaattgaggtatcaactagtttccaaatagcgaaatatttgttgttaggtttacggatgcagttcttgacagattttaagcaggtaatcatggatgtcgtcttgaaccacacagccgaagggaatgaaaaagggcccattttctcatttagaggagttgataacagtgtctattacatgcttgctccaaaggtaatgctcatcaagcagtaatgtgtttcttttcgcgagtttcactgcttagagaacaagagacaagcaaaagttctgtggtgtatgaatctgaaatataggactcattttcttttgccaattaaaatatacagtacactcaataaactaagtcactttgctgattggaaattctggtagttggtcggtccagtaacttattatgcgtcagaaacctgtaggagccttcttttggaatttctgcatggcctttacataacttctctaggactagcaaagtagaatacattcccaacaatgatgatataaaagtcaacacccataatgcttttggttttctagttttgtagtctcctactgatgattctgatatcattctttattaatcaatct

SEQ ID NO: 56760 - DNA, 1474 bp, Arabidopsis thaliana landsberg
actataacaagataaatatacaaggtcaactagaatggaaaacagaaatttgcagaggaaaataaaactatcctgtcacattgcttgaataatataatctcttgggatcaatgactctggataatgcagataagcttaccttgcttctacatgaggaaagttaaaggttcaatctactggaatcaacattggatagatcaatcaatcaagaacaaaatattcaaacagatacttactttcccaaatggggttttaagctacagaaacaaaaagaacaaaaaataaataaacatacagttaaaaaaaaaagaagctttaggtgagtttgcttcaacatgaaacaatggatgcccaaaaaaaaagcctaacattgcttgttaaagcaaccaaattttctatgcttgttttttctaatatatttacttcaccaatcaccaccacaacttccctcactcttcttccaagtgaagttattaaccaaaattacagataggaagaagagtgctgcaatggaggagattgtggtagagagtcttctcagcggtaacagagagtctcaaatagaagcagctatagagctgactaatctaagcaggaagcagacacaatatttggcagaaagagagatcatttctcctttgctatcgatgtgacaatctcaagactgtatcacaacagaggttgctctatctgcattactcagcagtgcctttgccagtgaaaggtttgtgtttcaatctgtgtttaactattcatgtgcggtagtaacaggcaaaataataataattgtgtttattaccgaacttacaggaacaaagtccgaattgtgaaatctggcgcagtaccaacgttgctagaaattctccagtcagaaacgaagatggtagttcttgaattggccatggcatttcttctgattctctcttcctgcaacaaaaacaaggttaagatggcatcaaccaggttggttcagcttttagttggacttattgggctcgatagacttaccatccaggccaaggttgatggcatagcaacactacaaaatctatctactctccatcagattgttcccctggttatagcttcgggagcaccatatgctttgcttcaagtcatcaacttttgcgataaatcttccgaattggctgataaggcagtagctttgcttgaaaacataatttctcattcaccagaatctgtttccagcatcggtggagcaattggggttctggtggaagccattgaagaagggtcagcacagtgtaaagagcatgccgtgggaatactacttggtgtatgcaacaacgacagagagacaaaccgaggaatgatacttagagaaggagtgatgcctggattgcttcaagtgagcgtagacgggacacggagggctaaagaaatggctagagagctactgctactactaaaggactgctctggctatgtcatcaaaaacaaacagtcaaagatt

SEQ ID NO: 56761 - DNA, 626 bp, Arabidopsis thaliana landsberg
tgttggtaaattctcaagatttcatctaattctattaaatttaaattataaaaaatatctccctactcatttttatcgtttacacattttaattaacaaaatctagaaatcagtcatgaaaaatgttgaaatgagctatattagcctagtcacaaccaggaattaccttgcctttcctagttggagttaagaaaaaaggtcgatgaatgggatacatgaaaaagaaaaatcatgatatgtaaagacataaaaaaaatagaccatcggagaagttaaacatcagaagcattattgttacaataaaagtttacaacatatatatatatatatatatatatatatatatatatcagaaaattatcatagaattaattcagctgcaatacatttttaaaaaaattatatataattttctgctacaatacattataatttcaagaacgtagacacatgcatgtacgtatgcacatggtcaccgtacaccggttttgtatacatacgtacctttcactttctcaatttcagcagccgatacactttatttatttgctaatgggctatgcatgtaggtcttaatttcatagggggacttggaaaaattggtgtgaatttattgaatggaacaa

SEQ ID NO: 56762 - DNA, 1157 bp, Arabidopsis thaliana landsberg
aagtgcaatcatgaaaggtcttgtcaagaagaccacattttagcaagatcaattaatggaaccggatctggagatcttaggaattgtccaaagctcaccatgtatcctcggctcttcaaacatgctaacgatccctggaaatttataaaaaaattcattataagaaatctgaaaaaccagctaaagaacataaacagtctggctctttgtgacaataccttaaaggtgtcttttcccacagagtcataaacaacatttactcctttacccgatgtaatgtcattgactcgagaaacaaaatcctcgttcttgtacataataacatggtggcatccatcttctttggcttgagccgctttctcattggtcgagacagttccaatcacagtggctccaagcgcatttgcccattgacacaacagagacccaactccaccagctgcagcatgaacaaggattgtgtgcccaggttcgacctttccaaatacaaataggacttgagtcatatagtgaatagatctttgaaaaacgcgaccaatataacaaaactctactctgttcaacaggcaagaagacacaaatcctgctcttggtcttcttattaataacttcctagaaataggaatgaaaactaaccttgaagcaacggcgaaggagaaactgtgcagtcatacccttgagcatgattgatgctgcaacgataggatcaatagatgaaggaacaggaaccactttatccgctggaaggatttgttcctcagcatacgcacccatcggatttccagcataagcaacgagatcaccgatcattctgccagtcagtcccgtcccagcagcaaccacctctccaacagcctccatacctatgatcagaaatggaccattagttcagaaaagaaaaaaaaatattttccgttctctcattaggttctagtaatgtccagacctggtgtgaagggcatagaagctggcttgtaaacacctttcctgaagtaaacatcaataaagttaagcccgatagccttgttcttcacacgtatctcaccctcctttggttcccctacttccacatcttcccatttcagaaccttccaattaaataaactaaaccgcttaaatactgaaaaacactgatcaaacagaatgcgagaaactat

SEQ ID NO: 56763 - DNA, 505 bp, Arabidopsis thaliana landsberg
tttatggataagaccatcatgccagcctccttgatcccatgtatcatcacctcgcctgtgacagcataccgctggtactccttagcctccgttggcggcgatgacgacttcttttcgtctgatctaccgacctcagctcttcagtttacctttggcagactggacaaaccgatgttaattttgatgtctgagaaggatgagatggttccgcttacggtggataaggagttattgctggggagatgggtcaaagctattccagagggtttggcgagtgagcaatcgcagattattaccacggctgaccacgagctcagcgagaaaagagtagctaggtatttcgtagggctggttgttgaattcctaaaggagctcaacaaggaacctactggagcgcccttgaaggtctgtcaaccatgtatttgagaattcacattgttcacatcagaagcgtatacaaaaattgaagcctatgcgtcagcccttcgttgctctacttgcaaca

SEQ ID NO: 56764 - DNA, 493 bp, Arabidopsis thaliana landsberg
gtatctcgatgccgcggtcgaagaatctggcggcttcctctaaacggctctcgcgtttagcgtttctgccccatgatgggcagagcggcggcgtaatccgcggtgcaggcaaaggcgcgctcggcgatgtcttccgccaaatcgaggtgccctcgattgatgaagtacaattgcttcgcagcagccagcatcagcagcggaatcccctcgacggtcggcagtaactccagtacgattgcctcgatctcgctttcgatgcgctcgcgctcttccatacccatcccgccggacgggccggtcgcgacgaggcgcgcgaacagatacatgcaccattgcagggcaatgtcaggattgagcggatcctcctcgcgttccttgcacagttgctcgccttttgccagccactgcagataggatgccgacagcaaggtcgaagctttgttcagtcgcgtttcgagcggtttgtacgctggagcgccaagccccgtctcgg

SEQ ID NO: 56765 - DNA, 296 bp, Arabidopsis thaliana landsberg
tcacctcgccgtgactcatccgggaaggtgttctctgtattttacctgaaaaagaaaattatggctgtcacttgaaaaacctctaacaagataaacaatggaggtaaattccttcttcactaaattaaattaaagttttcaattttaggaaaacggtacatatactcaaatagctatattttccatacggttttgcaattaaataaatttttctttgctaaatattcgtttagaccaatttgtacgtcttttataaataataaatacttactgtattatatgaatattttcatata

SEQ ID NO: 56766 - DNA, 972 bp, Arabidopsis thaliana landsberg
aagttcatcatctcagtcgacacttttcccaaatcaggaagcggacttaagaagttattggtgaatagctggggaggatttcctccaatgaatccggttggattgaaagacccaaaatcatattgcctggctccctgcatgccagcaggaaatgtagaatacgagaacatagaaggacttggatcaggtgctgctgcactagacagtccactttgaggataaaggatttctccatcatctccactcaagaaccctcctccgggttgtggatacttcaacctctttgctggagggaaaggggtatgcagttgagttgcatgtgcagcaatttccacttgccatggattcaccctcttcacgttttgcagaatctcaggttcatcccatgtgatctacgcaagttaaaaacaaaggaactaatcagaggaagtagaatatattggcaaaaaaggagtatctcataagactaatcagaggaactctagtttaacaaacacaatgtacaatgcgtggccaaagaaggataatgaaaagcaactctacatcacggacgctcaacacaaacagtttcaattccatcttatagaagatgaatctgagagagaacattcattttcgtatgaattaacttatcctgtttccaatatttaccttcaaaacaacaacacagcaatcaaaacaacattcaaaacccaattgacatttgaataaccaggatgagacttaaactactcatgaaaggcttgcacacaacagatacaagatcgattctgaattgttccattaactcaacattatagagataagaagagcaaagaccatttcaaaaacatcatatacctgaagctgcttccatggagatccacgccatggaccggtctcctgataagtagaggaaacgatgccttgaaaccatgtgatccgagaagaatcttcagtctccatagccatcttgactcgagtcccaggagt

SEQ ID NO: 56767 - DNA, 547 bp, Arabidopsis thaliana landsberg
  unsure (1)..(547): unsure at all n locations
taaaacgataccaaaaaaagaaaacagttgcctttgatgggaaaatgaacaaaaactcaaatacccttttcaaaacaccaaaactcattttctctatactcgtatataacaaaacatattcagctctttaagaaacaaaaaagtagacataataatgagtaccttttcttcttcttcatcagcaacctctacaaccgtcgggaaaggaattttcataccaaagagcttaatcgcaggatctttactttccagcattattatcgttttcctaagatgtgctcttttttactcgtaagtttctgactctctgtgtctcttttcctttcttttcagggtgtttttttttgtttctcttcgaagatgttttggggggggtttgggtagtttggaaattttttggtttggaaatcgtgagatttgggattttgatacgttttaaaaagtgaagtggatgccaggtcagcattttggtttgattctagaccacaagtttatgtggcctctgatattntacttntctcccaaccccataaaacccatagcatat

SEQ ID NO: 56768 - DNA, 895 bp, Arabidopsis thaliana landsberg
cctgtctgtttcaatgttgacaggcgttatgctgatgctttattatcttgcttgtatttctggtgataaagaattcaaatggcagtaaccttgcggtcgacatatggagtcttggatgtactgttttagaaatggctacaacgaaacctccatggagccagtatgaaggggttagtaaatcatataagtactcaacaaacatgagattgaatgatgcgactcttccatccttatgtattcgagttctttacaggttcctgctatgttcaagattggaaacagcaaggagcttccagatatccctgatcatttatctgaagaggggaaggattttgtaagaaaatgcctacaaagaaaccccgcaaatcgtcctacagctgctcagcttttggatcatgcttttgtaagaaatgtgatgccgatggaaaggcctattgtgagtggcgagcctgcagaagccatgaatgtagcttcgagcaccatgagatcactggtatgaaagctcatattcctcaattctaaattctctatgcttctgattgcctgacaaatctgtttgtttcaggacattggacatgcaaggagtcttccgtgcttagactcggaagatgcaaccaattaccagcagaaaggattaaaacatggctcgggattcaggtcttagccatttcgtttctaccttcattttccaagcatcaaagcttctttgtggctaaactttcctccttttttggtcacagtatatcccaatctcctaggaacatgtcatgcccgatttcaccagtcggtagtccaatctttcactcgcattcaccacacattagcggaagaagatctccatccccaatatctagtccccacgctctctctggttcatcaacacctttaactgggt

SEQ ID NO: 56769 - DNA, 432 bp, Arabidopsis thaliana landsberg
aatcttttatacggtttaaactggaaaattcttcatagatcccggagattattcggaacttggttctctattttctggctcgaaagtttaagcattggcgaccagagtttagatatcaaatcttgtaaaatacgcatgcatggttgtcatgcaaacgtagtattatgatgtaaccagtgaatctaaattggactgaggaggtagggggtaaatagacacacaaatgtaagttcatatacatttttgcttaaatatttattggtggattcaagtcatgggggctgttttgtacttggagtaatttataatgtaaacaatcgagaagaacatgtgttaagattctggagctaggcgtagggtttctttttacgtagttttcatagcgtgtgtatttgtgtacggccctttgaaataacgcgaaaacatttattc

SEQ ID NO: 56770 - DNA, 449 bp, Arabidopsis thaliana landsberg
agagtgactgagtgaatgaacaaatcaaagtgcgaaccctctctaagactatgaatgacaggtcagcggaggcggacttgctagtgtgtttgatggatattcgcactgcgcactcgcccgacccctccgcactcgaactcatcgacgagagcacgatcgtcgtgctcaataaagctgacctcgacaatgataaaaggtcgattcgtttgctgtgttttggtatgtttgattgactcattgtctgcagtcttgccgagctgttagatgtgcgtattgggggtcactctccgttagttgtatcactcgctaccggcagtggtgataccgaccttatcgctgctttgcagtctcgcctccaccaattgtacgactgtagaaccagagggaggaatagagaaatgagagagagacacctgtcaaactgtagttgttgaatgaacacactcatt

SEQ ID NO: 56771 - DNA, 573 bp, Arabidopsis thaliana landsberg
tttaatttttgatcacaatacacaaaatgaaaagcgaagggtaagaaaatgggaattgagaaggaagatgatttgacgaaaaggaattgggtctcacgtcgtgactgaattttttggggggatttattagggtttttggcctttctcaattaaataaacttgtttgattctctcctctaacatatgactctgtgaggttgtgttagagattatttagtgtctgtgtgaatacattgattaacaatttggtcccttaaaactccgtaattaattaattgttaagaaaaatcttcaaactcaattgaagaccaaaaaagtatatttcttgttattttctaaattactccatgccacaaaatggtaaccaatctttcaaaaaacgtaaggttagatttcaaatctttaattccactcaagcatatcactctactttgaccattattattttattaccatttaatgaaaggtacgaattgtataaggtaacatgtttaaaaatgtaaataactttaagacaaagtgatataaaagaccccagcttacacatagtatatagtagttgatgatttgata

SEQ ID NO: 56772 - DNA, 557 bp, Arabidopsis thaliana landsberg
  unsure (1)..(557): unsure at all n locations
tttgattatacatttatttctagttgtaagctatgggctgagaacaaattcggttattttttaaatatatttcatgtattattgtggtaccgccaaaaatacagaatggttaatattattatatttgcatttagaacgttcaattttttctgaaacgcaataatcaaaagctcaaagcaacatttttcttgagttaaatagttgttactaaaagatactttaatttcatgagttttttttttcagtaagagaatacaagaaattttgaaactatgacacatttttgagttgtgtgacaaacgaaaatgaagacgacagagatatgtaataaatataaatttactactatatagttttttcaatcctcaaggtgtcaggattcacataatgatccatcactatacaaaggcaaaaaccaagaccattcactaatctgagtctctctgccacaagatttatctgtttttgtcatcatcatcatcttcattntaaactaatttcacaaaatcaccaaaaaatcctaatttcatactattttaaaaaaattaaacctaatc

SEQ ID NO: 56773 - DNA, 577 bp, Arabidopsis thaliana landsberg
ttccataacgcaaagcgcgacttctggctcgcggcggcgaacctgacggcggccgtctatggcggcggtgcgggttcagccccggctgcggcggagtcgtccgcgccttcgaacgaaggcggcgggcactgagaaaggacctcatgatgttatcgagaagacaaatattgggagcaggggccgcgatggtctcgagctctgcgtgggccgcgacctccaacatgggcctgcctgaagcagccctcatggacaaagcctcgacgcagggaccgctccatccgaagtctggacgtgactaccagcccgtggtcaccctcaacggctggacggctcctttccggatgaacaacggcgtcaaggagttccacctcgtcgccgaacccgtcgagcgcgagatggcggagggcatgaccgcttacctttggggctacaacggtcagtcgcccggtccgacgatcgaggcggtggaaggcgaccgtgttcgcatcttcgtcacgaacaagctacccgagcacacgacgatccactggcacggcatgatcctgccctcgggcatggatggcgtcggcgggctcag

SEQ ID NO: 56774 - DNA, 952 bp, Arabidopsis thaliana landsberg
gccttaggcatcacattctttttgtgtcacgcaatcattgattctctcatgatctaacttgttcttggggcaggatccacctccattgccatatttggctgagaaagagtctgtaaattacgatatctccttggaggtagcattcgatattggagtttcactttttggctttttgctatcaactataacagcttatggtggactgaactgaaataaacatcatgtttttacctcttataggttcaacttaaaccttctggcagagatgattcttgtgtaataacaaagagcaacttccaaaacttgtgagttcctctataatctcctacccaattcctccatataattaaacagtttggttcaaactcttttaaacttattgtgacagatattggaccataacgcagcagctagcacaccataccgttaacggttgcaatttgaggcctggtgatctccttggcacaggaaccataagcggaccggtaaactcttttcgaaccagttctctcgtctactatatcacgtgatgactacacaataactcgcaaaatctttgtttcttggttctaaacgcaggagccagattcatatgggtgcctacttgagttgacatggaatggacagaaacctctatcactcaatggaacaactcagacgtttctcgaagacggagaccaagtcaccttctcaggtgtatgcaaggtatcagctgattaacacagtttctgctttagtttaatttgctttataccccaacaactccaaatgaatttcgttgcatgacatttcggttaacgcttattaatcaaattacgtctatgattaaaccgttgtagggagatggttacaatgttgggttttggaacatgcacagggaaaattgttccttcacccgcttgatcaggttgtcgccgtaacgtacctttataacattaataaaaaaaatccc

SEQ ID NO: 56775 - DNA, 1111 bp, Arabidopsis thaliana landsberg
gtagaagacaagaaaaaggaaacctgtgaagagtagcgttagaaggatcgagcttgatggcttgagtatagagagctgcggctttaagaaagttgccagctttgaagaactcatttcctttttcctttagagatttctctgcttctccaccattcgttgccttgcctgctttctcggccattatttctagaggtttgtaagaaagccaaagaacatgaatcccctaagtgtgatttgcttttctattttagggtttacagagggacaagagacttccacttctgctctgttcctcttttagttttttctctaaatattattactttttgttcatcatttgagttctctcacttgtgcatatatttttaattaaacataactaagaatattgaacatatggaaaagcccaataacgattaagtttgaactaataccctgagcaatttcagttctagaatcattgaagaaatgaaaagcccaagaaaataaatgggcctcaaatttgtaaatacagtaaaaaagattcggccacatcccactccaccgacaaccgacggttcaaagacggtagtagctagcatcaatttgactccatttcgtttgaattatcccaaatccattatctctgtttttattccacgtagactagtaaataataatttcctttctctagtagaatagaacaagtcatctgttaacttcaaaaaaaaagtcaagatttggtttgaggttaatctatacagaaaatattatataagctcttgtaaaagagaaaacgtaagaacccataaagtattcgaatcatatttatgagagtttggtgggaattaatttggtagcacgtagcctgtatttttcaagattaggaaaacacttatctaacttcattaattacaagtgctgatggaatgagtaatcaaacattgtcacatttagtcgctaaatcatttgtatcaaaatatcaatttggaaataaacttacgcaggaataatagttttcaacattataagataaagattctgatataaatacacgcatcgcataacgcgtcctctcttatttcgatgtgctcaaaagtcgtacccttggtatcgacgcatttggtttaca

SEQ ID NO: 56776 - DNA, 147 bp, Arabidopsis thaliana landsberg
tttgattcaatcgaacatcacatttcgcgtatgggtgatagatatgcaaatctctgaaataagacattgatgaattttttttttttttagaaaaaccataccgcattggatttcatgtggaggattgttcatttatgaggagtattt

SEQ ID NO: 56777 - DNA, 1066 bp, Arabidopsis thaliana landsberg
  unsure (1)..(1066): unsure at all n locations
agttccaacctttttaacacattaagcacataaggctggagttcctcagtacgataagcaccaacaccgagattgagtttcatcccgttagtgtcagctttgaatgcttcactgactccaagaatagggtctggtggagccatagttataccctcgaaacgagaaggcttcactgcaaccgtcatagtcactatgctaaaagactgaaaccaaaatccacaaatttcagatacaaactacacttattagactaataacactctaaaacgtcattcaaaattgttcatatggttcagattcgagcactaacaaagaaaagagagtacctttgcttttaggaacgggttcgaagcagaagttccaagctttagcttatcctgttcaagtttaatcgaaaacaaaaaagtaagattttgaataaactgatgcgtaatttctaccatatactcgatagaacggcgaaaagtaccttgttaatctcgcgcggtaacagagaagtggaaccgagagataacattaaagaagccatggaatcgctatggagcacaaaattaactgcacagatctcaaatcagtgaactagtgcgaggataagcaattccaaaaataagacaatgatgtgatccacaaaatatgatcacgagactttgtgagtattttagcagagctgatttgtcacctggacttggttagaatcgcgcggtttcgataacgatcagatcgagagattgaagaaaaagattaacaaggattcaacgagagagagacacgacgatgtctacgaagttgttctcacttctcaggcttgtcttgataggggtaagatagtcatttaggattatgtttaaaagttgaaagagtggatggatggatactagtggattgtgattagtggttcatgcaacaattaattgaatatttccacttagtgacacacaatttatatattaatcaanttacaaatacaataatgaccagtgaatacctttctgtcctcacatttttcacccncaaattaaattactcaaagcatcagagatcaaactgtaaaattcaaaaaagaagc

SEQ ID NO: 56778 - DNA, 491 bp, Arabidopsis thaliana landsberg
ctatatattatgaaggaaggaaatgtgcacactccagcctgctccactcaagagtcctcaccctctcttctggactcaacagcgaagtcgagatggatagggaagtgatgaagccacacactagatacaggcctttctccagaccactcattataccacaacacactgatgccctaggagggcattgctaggtccctgagagctgagattgcgagatgagcacagaagaactgagagtagctggtatcaaacatgtcaaatcccactcaatttaaatacagctaacaaaaatctgctgattttcccctcgctgaagttatctgcccagcacattttgatgcagtgagagctaggctaccagccaacttccagctatcaccgagtgcagaatgaaccgacccatgcactccttgagaagggtgcgaaagggtgcatttaactggagtctgatagcactagaatgatgtcagtgtacagatgattattttttt

SEQ ID NO: 56779 - DNA, 533 bp, Arabidopsis thaliana landsberg
tgctccgggcagaactgggtaatatagccgctacgggacccaatgtgactagctttacggataccacagtatctcctgccacctcttattattacagggtgcaggctatgaaccgatatgggtcatcaggttatgatctggcttccttaggtgggttgagctatgcctattattcacttgcctccactccgaatgttttgccggacttcagcacgcttgccccagcctatacaggagaagttcccaatgtgacgttgtctattgcgagtggaagcagcaattacgccctaaagtttgcggggtacattgatattccaacggcgggtacatataccttttataccaagtccgacgatgggagtaacttgtatatagacgggtttgatacgacgcatttagtggtcaataataataaggcccaggctgtgacggaacagcaaggtgatgtcacactaacggtgggcaggcatttcatttacattacttatttccaggccggtggaggagtttacctgactgcctcttaccagggg

SEQ ID NO: 56780 - DNA, 1519 bp, Arabidopsis thaliana landsberg
atagtttatctacccatttctagatatttatatacatatttattggatttattctctgtactcatatcatctcatagtctaataatacataaaataaatgaacatgtatattatatagcaattgataacagctagctaattttaccggccactggtactatcttatttagtactattaaacacatcaaaggccagccttgagtaacttacttcatttaaaccgatgttcgtatgaaaaaacagttatgatatactataaagttatactagcatcttaaaaatagctcactagtaatttgtatactcgatctccttaatcactcagtactagtttattaatataaaccgccaattcccactcgatctccttaatcactcagtactagtttatacttctgtactaataagtattaataatcgatctcattaatcctagtactttgataaagaactaagcaggaaaaaaaatttgaaaaataatttaaatttgaagagtttgcagatcggcttgcaaactccgcaatggtacgacgacattatagttactattttaagaccccaatttttagcactatctattaaaattcataaaatatattaacccgctttgacacccaaattttaacaaaagaaattgaacctatttcataagttcacgaaaatattacagcactatatgaacagtttcagtgtactataagtctataacagcgttagtaacggcgcatgtatacttgcacgcaatatttcgacgtgacacgtgctatctaagattcagtgccattccaccagatttctttttttttgtctaactcatagtacctattttgtaataacataacaagtcaattatttaaataatccttatttgtcagattgttcaaattatcataatctaaattgtgatataaaatgcacgtgtggaagcattgtgattctctaacataacaaattgaaagaatcatcattataatcgttgtttattattatctattttttttttgtaattttctgagttgtaatctcagcctggggatccacaaatgcaaaacaaaaataatcgatgtcaatattttgtacaaatgggcctcgctgtttaaccctaaaccagcccatatttattgagcttttatcaactagcccgcccgtctttctctgcaggcaccaaatgccattgactttttaacacctcagttccgtttaatttctacgtacatctcaaaatatctgcagccacgactaaacataaatcatgtagctcaaaaaattatttcatttaaacacaatatacaccaaaccttgcaactatcttattattattacaagtaatgaaactcaaccgtacccattacatctttatgactttattgacattatcactcggtctattaattggtcgttttattttttagtttgctatcgttaacaaattgtatgagatagagaacaacagtaacataaaaataacacataaagttgcgtggtaaaattttacacccacataatcgatcgggggacc

SEQ ID NO: 56781 - DNA, 1503 bp, Arabidopsis thaliana landsberg
tgaaatgggttcatggaaaagaagtgagaaagtgatttgattcattgctttagattcgaatattgtcactttgctctgttaattttataatcgaaatttatgctaagtacttttcataatctttgttttcttaatgaagttgatgtgctgaatttattacagtcaaaatatttgtaacaaaagtacacatattttccattaacttacaacagttaataggatttaaatacttatatattatataataggggatttaaagtacaaatcttttaatacaccaaaaaaaagtacaaatattttttaccaagacaaaaaatgaaagaaagaagtacaaatctttgtacataatagggttatttggtttaacgaatatatttaagatttctaatggttgttcctttgtgatatgttttttactcatgcgacttagtttttacttgtggaaaaatcatcatccattgtcaagtgttttagtcacctgattagcagataaataatgcagaaatacgaagaatgaaatatactttagagttttggaatataagtaagattgataaattttgatgaaataaaaatattcgatccgaccaaggccatgtgatggaaggactattagcccattttatctgtttcgcctgtgtttcgactttttttcctttttgtcttcactttctctatacagtgaaaagtacagtccacggtactcacaatcatttacatttattttaattaatcttgattgttttcttacggattttttggtgtacttttgagatttgtttatataactaaccctaaattattgctacaacttaaaggtagtttacattattgccttgctctctcccgatctctaattctatggtctatagtatattagtaaaactatgccttttagtactaaacacaataaatatgtctacgttgatgcatgtgaagtaaaacgaatgattttatgccgtagactataacattttcctttacgatatggaattgcatgatattttttataaacaatgacaaatatcaaagataataaataacaactacgaattcgaatatatgcggcggattaagtaatttaatttagttggtgcggaaccaacatatacgggaacaatttaatatggtcaatgcgatatgattgtggtcaaaatgattactagtgagttaaaaagtatattaatataactggcatgtaagcctgtaactattctttaccagagaaaataatgtttttaaaaagttgttaaagttattgtatgcaaatctacaatgtaacctcttaaaagttaaagttaatcaagttacgtacggtcggttgcggtgacaaagcaaaactcattttcggtgcaacacaaacgtgttgagcgcgatcactaaatgtctatcatcaaggggatttggattcaaaaatttaatttttcagaattctttgcaattcggtttaagattgattggttttttgggtagatgttggaaagtattcagcttaccctgttt

SEQ ID NO: 56782 - DNA, 1053 bp, Arabidopsis thaliana landsberg
  unsure (1)..(1053): unsure at all n locations
ggcttttatagtgtagtcttccccatgtgaccaacgatacgagtctagtgtttattcatcaaatattagttattttcaaaaggaacctcactaaccaaatttaaggattttttaaaattaaacacgagtaaagattcccgagatatgtctacatgataaatggacccaatcgacttgatggctacatcgtcaaaatttaattaatatcttgtaacaacagtattagatactatttaaattgaagaataagtcatgttaatgatcatcataaatggagtagatagtctgataggttaattattaacgataagtcgattcacaatcatatagaaagaatgtataatatggtttattttttgtagattatcacaagggtgtttacaaacttataacaataaatcaataattcataacaattgagatataaaagaaataataacaaaattgttaaaacatcgtcaaaaagagggtacttagaaaaggaaaaaataaaaatgtgaataaaacatggaaaggaacagaggaaaactattatttgacccaaaacatataaaataaaaatgtaggaaaaaggaaatggacctacaagccgataggaggctctcaatggcaaaaaacgttcgataaaaaggagaaaaaggcatctttgtaaatgatgaaacggcggcgtgtgggggcgcaggtgttcatagtgcgcatgtttcttttgcaaagctttaaagcttgtgacttcgtggctcggctcggacttgcttagcaacttttaagtctttgggttcatagattctcgagtgtttccgctcccagcctacgccgacacaagagctcttggtcttgggttcagactttntcatttttctatatgttttaatttcgtattctttttgttgttaaagttttattctcaaaccaagaaaacaagaaataaaacacacctgattattgatctaaaaattatgaatgatggagtgtgaaaatctataataattttgagaattatggaaaaaaaattctgagagtgatgaagcaatataatttttgacttttatgcat

SEQ ID NO: 56783 - DNA, 1599 bp, Arabidopsis thaliana landsberg
ttgatggttaatatattggcatcacaaaaaaaataaaaaaaaatacaatgttgaatcttaacttctctcgattcaatgatttttgtatcacaagggaaaaaataaactatgaccataaaaaataataaactgatagtgaacctgtaatgagagtaatacaagtattgtatgtttcatatcgtgtcgtgtgaatggtgtggaaaaaaaaaacaaaaaaacaatcgtgtgaatggtttggatgacgtgtctatataaaattggttgaggcttttaggttgactatgtagcaccgcaagattcggaggacggagggtctctttactatttaaccgctgagatctgatctcttccgttccgttatcacatggcacgtgccaattaccataacataaggctcatattatgatgaaatatatgtttttctaatttaattggttttgtttttttataaaaattattatccaagatggaacaaatgaaatcacttttgtttgagatcacgtaataaccttacaaaagttatccttcttacttgctctgttatcccccttaattctctgtgcatcttttgaaaataccttcggtctaaagccaacatgttcgaaactttgaatattgaaattaattacaacaaaataactaaacttattgatttggttcgctgcagaagataaccattaataattaagaattgagaccaaccgtcattgatgacgtatattaatatttaatcttccactttataactttttataggcatcgtttaagtttaactaaaagccaatacaagaacaaatcgaactattgatatctctaacggtgaaatgactggatttcggtgatgattaaatttggatgaaatgacactagcgacattgtggaaaatgttcctttgatcaaaggttccctcgcgatattggacactcaccctacattagattcatctgcaacacattcctttgaaatgtcgtcgttcttcaccattatatgcgctaattaaatcggtttctttctgatgagcaagaacctgatgatactaaaccttagttcttctgcaactaacctaataaattattattacttgctctgtaatgccttcttagttccctgtaaagcttttgataataccttccgtcccaagccaacatgcttgagtattcaaatcaaaaattattaattacgctagttggagaagaaaatcatttaagaattgagactaaccgtcattggtaacggtacggactacggcccatctccatttacgtaaaccccatctgataattattctaatacatgttgatttcccaaatggccatatatttaattatgttacatcccatgttacatgttgcttattacgtgatacgtaaacattggttgactttcagtattctttctttttttcctaagagtttttgttgactaacgctggtcaagaccgtaggattcggtggcgtttcttcttctacggacacgattgaatataagatttccatagtccacatgtcacatgccataaattatgcaacacatgaaacctgatccaatttatgtatattcttagataaatactggagtatatatattaaatataatgtt

SEQ ID NO: 56784 - DNA, 395 bp, Arabidopsis thaliana landsberg
caagagcccgctggagattctaaccatccgaattttacaattcgcataacgagtggacagtgcgtgccaaagttggaagtaacttggctgtcattacactccgcacggcgcacattttgagtgtcatatataaggtttctggtttgtttgtcttttttccaagaaaaaagaaagagttgctggtttgttggaataatataatcctcgagccatctaggccaaactcctgactcatgtgaagcttgaattttttgttagctatcgattgtcaggtcacagcaagagaacggttccattgtacccgtcataagtatagataactaaaaaacagactcaatacaagagatatgctgaaaaggaaaaatatgaaccttgagtttacacttgtgagaact

SEQ ID NO: 56785 - DNA, 391 bp, Arabidopsis thaliana landsberg
  unsure (1)..(391): unsure at all n locations
tttattcaacatcatgtaacccatattagaagtgccactgagtggttggtttgcgcaagatatattctcattttggttaaggctatcttcaacaaaatatgtatataagcgtacacaatattattttgtattatttatatagtaaagtttgaaatgagaaataagataggaagaggtagtcatgcatattacacttgtggcatggcatgatccaccatgttttgccgctacgttacgtagtttcagcttcgagtgagatcgagactagttgaggtgtggggactgtacgtgggcaggtttgcttatctatgagcctacgactacgaggtcgtgtgagttgtcggctcggcttggcacgctgntcccaattgtcatcttggtttgaaaattt

SEQ ID NO: 56786 - DNA, 352 bp, Arabidopsis thaliana landsberg
  unsure (1)..(352): unsure at all n locations
gtgtgcctgtccacgacccacgagtattctgattattttcccgcagatgatgggagccctcctacgaagcccatagtgatgtcttgccatgcgccagcaggaatgggcaatggatgcaaaagaccagctggatgagtgttactgtgtttggcgtgttggcataccgagcattgacgcacaaaatcctccacaacacttnnnnnnnnnnnnnnnnnnnnnnnnnnnnnnnnnnnnnnnnnnnnnnnnnnnnnnnnnnnnnnnnnnnnnnnnnnnnnnnagtgaaaactgtggatcaatttggtttgcaacgctgaattataggccacccaaatcttgttgttgtatcgaatga

SEQ ID NO: 56787 - DNA, 1054 bp, Arabidopsis thaliana landsberg
ataacatatcgagattgagccccttttgcaaaagtgtcagctcggacattcaattttgtaggtaggtatatgtgatatcacaaattactccaaatcctcaattcaatacaaccaccgtaaataatcctgttaaaatgggtcaatataatttagctaagtttaagtctcaacaccaaacctaaacgttaaggcccaacaaaaggcccaaagaaaagagttagggttcttctttcgtctttcatatataaaaatacaattttcattcgcctgaggagtgagttcgatccaaagacatttaggtatcaatattcaatatcatctcctcttattcaattctcttgatttctccgaaatcgtctcttgttgtaatggtggatttgattttgtaacgagtagaagaaaaaaaacaaaaatcagaaagatgacaacttcacaagtagaaactggtttcttcgttgaattaaacaaaggacatgtattcatcactagacgcgatttagcttttcttcttcttcaatctcgtaatggagtatgtttctcttcgtttcacattcgattttgtttttgttttgatcaatttcagtttggcgatgaatctctctgtgcttaacacctaattcttggttttagggttttagggttcttaaagtattgaacttttgatatttgtgttgcagcattgctttgattcatgttttagggctttaattgaagtaacccatgaattgattttctaaaagctttgtgtgttttttttctttctgcagtggcgtttagcttgagaccttaagaatcaagtactccaacttctcgaattgacttatctattagctcaaaaccaaagtctgtaacaagcaaaggcatgacttttcagacagaggttcctgatgatggttctagacaagcttcttcttcgccttactctggaaaaggcaagattgttccggaatgtggtcttgttggtgatatgtatgatccttttgtagacagttttgaaccagcgtctgtgaaattagattgtgttcaggagcatgaaccagataacgacttgtgc

SEQ ID NO: 56788 - DNA, 413 bp, Arabidopsis thaliana landsberg
attgtgcaaagcatgattaatttcttctgcttaatttaccaagtaacgcgaaccatgcgcaattgattgatatttactgattttcaagaacaaaaatatgatatgtgaccaatgggtatttatgaatattatcagataaatactgaagtctctagctcaacgttttcgagtaataaaagtttaatttcaaatacattacaattaaatatatcctagaaggtgtgtgacataagtacgttttatatgcatgaaaattgatattaaattgagaaactttggtcccttttttttttgagaaactcaaaatttctaacaaatgtaaaacgtaacgataatgaatatttattaataataagaataaattgatagtggctttgggaaaaaagtacctactgaaactgaaagggtgtata

SEQ ID NO: 56789 - DNA, 406 bp, Arabidopsis thaliana landsberg
ctgtgaaattaccaacgtaatggtaagaggctttttatgcttgaactgtcccccgagcttgggatagaccctgactgctagccaaggcagcactaacgcttcgaaatatgcatggatgaaagagtccctgatgccaacgatagcgaggtggaccacgtggttgaaccagagatggtggagaaccataccacatactaacagctacaacctaagctggaaaaaagacagcggctcctctactggaagggacggtgtcaatagtggccatacgtaaacctatgacatgacgtagacgcgggcggacactaagaaggaagatgctcctctatgcaccccgcgatcgtgatcaccaaggatgagaggcgatcactcccggcacaaaagggtgaggaccaatcacgcccca

SEQ ID NO: 56790 - DNA, 460 bp, Arabidopsis thaliana landsberg
ttttttctaatttgatctaattcagggaaaagggaataactgagcaagaccttaaaatttggctggacgcctccaaattcttggggacgccaccgcatacattaccctcctctcctacgtaggtgtgcgtggaaattaaaaggtcaggtcctttacccgtacccacccgattatatgatctacgtacacatatcattcaacaatcgtgcacgtacggctggacaagcaaacgagtgcgcatgatgagtagtgctcgcagtggtactggtacacacgtccaagtcgtccgcccggccgaaaggggtggtgcacgcagacgcaggcaggagacacgaacgagaggcctggtccggaccagcagacgcatgcgcgagggcgcgcactcgcggtcggggacactgctgccatgcgaggatgcccacaaatcatggtagctgcaggctgccggacgggcattata

SEQ ID NO: 56791 - DNA, 358 bp, Arabidopsis thaliana landsberg
ctttgatcttgatcccatgagattaccacaggggggatggggaattggatttgcatatgactactattggatcacaccttgaacttctagaaactacacgatatacgacaaacccaaaaacatgaaaactaaacacttaacgctggccctatacatgaaatcaataaaactaaagcccacagtaacctcatagctcatagcgcagtgcttgtacttagacagaaggacaatcattacattacgtaatattgaacgactaaccctacaacacatcaggcgatctctagagggaactttgcggactatcaaatgaacatgattttgaaacagagcagatagatgaacgacagggaagcat

SEQ ID NO: 56792 - DNA, 503 bp, Arabidopsis thaliana landsberg
tcctcgagcgacgcgcgcacccgcgacatcgcccgcagccgcgaccgggagacgcgctattttaacagaatcggcttcgtcctctcctcgctgctcgttgtgctggccctgctcagctccatgctgttcgacgtcgaccagcgccagtacggcgtggtctacgcgctcggccaggtcaaggaggtcatcagccagcccggcctgcagttcaagctgacgccgccgctgcagaacgtgagctacatcgacaagcggctgctgacgctcgacagcgtacacaccgagccgatgctcacggcggagaagcagcgcgtggtgatcgactggttcgtgcgctggcgcatcagcgacccgttcgcctacatccgcaacgtcggcctcgacgagggcgtcggcgccaaccagcataatcgcgtggtgcgcaacgcgttccaagaagagatcaacaagttcaccgtgcgcgagctgctgtcgtccagcgcgagcagttgatgaccggactt

SEQ ID NO: 56793 - DNA, 104 bp, Arabidopsis thaliana landsberg
atcacgatcgtttaaaaacaacgggggacaaccaaacaaattgggggactcttcctaacatccccggaaaggatccccacaaaccacgacagcccccacgtgcc

SEQ ID NO: 56794 - DNA, 656 bp, Arabidopsis thaliana landsberg
actttacataatagaagaacagcgcctggaagatgtatttaaacaactgacaaaataaaccactttgtactgttagtacagaggtttaaaataaaaaatgaaatttttttaacagatgctaattaaaacgtcattgcgaacgcagtgaaacaatcccacactggaatgagattgcttacgcacgccccaaaagcgtaactcacaatgacggtaacaagtataattttgtagaaataaagtcctgacctgtactacagtgcatagttttttcgaactaacaaactgacaaaacaaaaacacaatattttatttgcaaacgatttatatccaattaaaaatgagaaaaacaatcctgttaattactttacctgttgtactttttaatgcatgcaacaacaccaaaacaaccacagacaacagtcaggatccaatcatcgcgcatattgattcaagtattgccccgggcgaaaacttcttcttattcgctaacaacaactggttcaggcaaaatcccattcctgcatcagaaaaaagcaatggtatattcaggacaatacaggatactatcaatgagtctgtgcgtaaaatatgcgactcgttccgttcagggtcacattctaaaggcaagaacaaacaaaaaattggtgattttattt

SEQ ID NO: 56795 - DNA, 1284 bp, Arabidopsis thaliana landsberg
atattttctatcttctttcttgatcgaagtcatcagccttaacaccaaagtacccgcctctcgatttcttggtcgtatctgagaattgcattgtatttttctagaaaatacctcattttcttcttcatcaaatcaatgtattatgacaggtaaacatcaccttcccaatgtagttgcctggttggcggaaccattggcgccacaactgtttcagatattgttgcctggttgaaagcagatcctgcaattcctccatggaaaaaatttcgacttgctctcattgtccttgttgagggcatcatgttatgtcggacacaaccggttaagccttcaatagaagttgttgagattgttaaaaatgtccacttcttcctcaattatcccttggggccgccacgctttctctcgcacattgcgtatgatcaaagttggcaaccatatcacatctactgcctcacttgtcaccaagcttaatcaattttcgttggctgtacacggttttcccctagctattcagttgcatgctttcaactatatatcgttgttgcttagacatctaccacatgcggatgagcattttacttttcttgaccaacacattaaaacgctttcaaagctcaaatcctaccatacctccaatatattgcaagttgaatacaatcatcttgtaagtcttacttcttcaaattttatttctttcctttctctgtcacatacaatactaattactgcttttcttttcacagctacatgttctccctcctgctccccgtacaggagataaccatttttcccccctgcaagacccaaaagttaagacgttggagcaactaattgcctctggtttcaagtttgcacatctcttctggcatgggggcgatgactctctcccaatattacatgttcgcaagctgaggccaattacagttcgccaaaaaaaatgtcattcgccatcatcctgccaacagcatattaccactcccctcctagctactccagcaactccggttgcttgcaaactaccccctaccacagctcctctaactctgttggacgatgttaggctctctcatcaacaagttctcactaccaatcgtacctcttcacagaaacgaacttccatatctcagccgctatcttccccatctgcaatgggatccaagacggtcactttaaactctcaagaaggcacgcacatgagccattgtccccttcgatgctactccagattttcctgctattatattctgtcacctccttacgccacatttctccaatgcatag

SEQ ID NO: 56796 - DNA, 580 bp, Arabidopsis thaliana landsberg
  unsure (1)..(580): unsure at all n locations
aaaatttgttccatacatacactcctaaaagatgtacctcacacaactctgataacaccaaatattatattaatgtcacaaaatgtgtctgcgtgtggatattggtgtggtgggttcagaagttttaagggtgtctcccaaattcaccccacatgacacccataatctgacttacaaaaatggaaagaatgcattgaactagacattgtacatgcgttatacagttatcaagtgttaaattcccctcaataaaatgtctccgtaagtccactgcaccgatgcccatacctatttatttggagaatgtaatcctttatatatatgtaagactatgtaccatatataatagcgtgttttagtgtcgtcagtaagacaatatttatgttgttgataatttatatatatatatatatatatataatatctgagaatatttaaacaaactatcttattctttgtgtcgatcgcaaaggttttagtcaaagtttaattagtctttggtctcttgaaatgtaatntgtaatcgacctntagttgtatatatttttggtatacaattgtataaacttttataaaacat

SEQ ID NO: 56797 - DNA, 355 bp, Arabidopsis thaliana landsberg
gtttttaagaacaggttcatttacgatcaatggggtttaatatccgtgcggtgcccagcccttccccggccataatgacccagaatggaaaaatctatccaaaagaaaggttataaccaacttctctagagacatacttgactgcatgatctcttaataccccccctacagactttaacgaacctaagggagcatgagacatatatttgtcgaacgtcctcttgccaaggatgtatgtattttttcacctacttaccttcaaccgataggaccccctaaaggttctaaccagggagcacgcatatcccaaaaacgcattgcttctcctacaaaaataactcctgcagtcggagaa

SEQ ID NO: 56798 - DNA, 837 bp, Arabidopsis thaliana landsberg
aagaaatctgcaacaaattttcctaccattcttgattttctacataccactactgataaaaaaaaaaatgtaagaaaaattgtatgaacttgcttgttcctaccattaacataaactatacccggtaggaaaatcgaacattttcttgtaatatttataaattacaaatcttggctcttttcgccttgtcattcttataatgagaaaaaggtgatattgattcaaatcaggtgtacaaagtctagggttaacaaatatagactaaaacgtgaaataccttagtgaaagcgtcgagtgtgtcttgagagattatgccccataactcaacacaatgaaactttttattgagaaaacaaactctttctcgactctttattaactcatataaaaacgtgtcacctcataaagcacttacacacatatatattacaataaaaataagaagcaaatcaaacaaagattaggctacgaatggccaaatcaacttaagaaaacaacggaaatgaaactgaaacaaaagcaaaagtagactcaaacatgccaaaagtccaagagcatgctcaaacgaggaacatagaaaatgttccgtgttagaacacaaagtctcagcaatggttctttattttctttattaaaaaggcaaagtctaagcatggatcccaaatggtggccctggtgccggtggacctttggcccttcattttaagaccccttccgtccttcatttggtttaacctcttctggattttcaatttttggtgggagcccattttctgggctttttctttttggtcaaagaggttcttctgggccttcattactattttcatatttttc

SEQ ID NO: 56799 - DNA, 1244 bp, Arabidopsis thaliana landsberg
cttaacccccttaaaaaacaaatattttttaaaatttaaaaaatggtgccaatttcaaaactttaattttttttaaattctgattgaacttcttaagaaaaatcagaatttaaagtataattatttttggaaaaacaaaacttttggtggtattttgacaacacaacttgaaagtgtaatattttgctacaatactcctctagaattcgaggctcccttaaaacaaaatattattttcgtgtcagtcatatttttttgagacatttctcaaaataccacattttcaagttttattgctaaaataccatttcatccggtattcgatcttctatcaaaagaaaattatattcatgtaggatgtctaggtttggtccagacaagttaaatggtaatctggtaacatgcgattcagttatgtttaagtgttaatcagttaatattctaaactcggaataaatgtgtgatgatccttgaatataaatttattttgtaatacttaaatatatttttaccaaaattaaccggatcatgggataaagtttataaaataatttttttttgatgataatgccatgaaaacaatttatagtacggatgagaaacaatgaggctgattattttatctccgtcagctacaaatgatctcagacattttgtttttatgttcaacttggttttttattcagaggttaaaaaatgggcacaagtttctattcagacacatacacacataaataaaatagagaattcactgttaaagttagttgacacaatagtaaatgcgatacatgctagagtcacggaagaggcaaaaacaaactccaaagagagacatataagaaaaagacaaaaaaccttaagaagcttatcacattcttaaagcacgaaaattcagaataagattcagtcatcctttagcacaaaaaaaataaaaaaaagatccagtcatccaatactagttccccagaaataaaggtgatatttttttttttttgagaagcctatccagtaccaacctcaattttctaggttagatatagtctgggtagtatatatgtttcttcactgattagtaatctctgtgtgtagtacacttactcactagtactactcttttggatctttctggggtttttgttttggttataaaaccagaagaagaagataactgtttgttattttaatacttaccattatcatcatctttgtagagagagagatatgcatcattttgtccctgactt

SEQ ID NO: 56800 - DNA, 1188 bp, Arabidopsis thaliana landsberg
ccacactatttccccggataaatcatctcatatagtatgacacagtacttcaccggacagaaattcgttacaaattttggtttgtggatctttcttgtttcagttttcaaagttggagatctaaattttaggatcaaatagtgttaaactgtaaggtcatcttggatcaaaattaagataatgtggaagttcgatgaaaaaataagtaacttaaaatactctgatccccaaatatcacgagaatattagagtatatctctaaggatatcatctaattgttgacaaaaaggatacatcttgtaattaattattttaaaaaatgattttgtaattccttttcatttacctctttaatgtccaatctataaatgtatacttggttttgagtggttaacataacaacgtcataaaacgtagagaatcaacaaaaagagattaaatttgaaactatttcttttcaacccacttgttgtgatattggaacgtagtgtgtaaatagatgcatgcatgatattggtgaagtcaatccatctttcttttgaaattaacttggttctttgagttatatcactagaccaacgaattagaccaacgataatgctcacccccaaactattttcacagtataattcacaaattcgttacacaatcatgagttagctagtgactcttttatctggcagccatcgtgcatacaagtcaaatatataacttttcttgatattgttcttcaaattccagaaatcattggcacaaaactaaatgatctaacacagttgtatacatgggactttttttggtcgaataggtatatcgaaaggataaacattacgttttgaaacaattaggaaaatatgtaaaaccaaaaaaaataaaaacttattgaaagatcattaatccaaaatcacttttgaccatattaaaagaatctaattgtgtgtgtcgatgacttgtgaacagatggcacatccacttactctatctctcggacatcaaaggacgattcccagttttacaatgtgtaataacatagtggggtccacactagacccaataaaaaaatctagttgtacaaacaaactttattaaataaacaagtgatagattatgtaaaagtgtctctgattacaaattatggtgttgcaattatcaagtaattttgcatcctaaccgctattatcaaatagt

SEQ ID NO: 56801 - DNA, 498 bp, Arabidopsis thaliana landsberg
tggcagactggccggcaaggtcgcgaagctggagcagcgcctgccggtacaggtcgaggccggttaaccactgaccgtgcaggccgacgcggaccagctcgaacaggcgctcatcaacctgttgcacaacgcggtggaagccgccttgggcacgggcggcggcgtgcgcctgcgctggcgccgcgaagccgggcgtgcactggtcgaagtggaagacgacggccccggtccgcccgccagcgacaacctgttcgtgccgttcttcaccaccaagccgggcggttccggcatcggcctggcgctggcgcggcagatcgccgaagcgcatgaaggcggcgtcagcctgggtgtgcgtgatggcgccgaaggggcgctggccacgctgtggctgcccttgccgtaggcgacaacccagtgcagcagtctggcggcggcaatccggcggcggctgggccccatcttggcggacatcttgaccatggatgtgtggtgcgtgat

SEQ ID NO: 56802 - DNA, 678 bp, Arabidopsis thaliana landsberg
aagaaaccaacaccacgcatgaaacaagtaaaaatatctttcacatcatcaacataattaagtgtaatgaaacttaaactatcttactgcgtatggcgacattaggtagtgagactgaagatgctctcatttcagagaccaggtttcttttcagaaatgaagaacggaaaggttttgaaatattgaacttcaactgctgagaaaatttggtcactggaggcataattgggggaaagacagatccttgaacccgtccaggttgctgaagagaagccatcgaattaccaccacaacaagcttgcatctttctctctactcctagactcaaaaattccaaatgtcacatgaacgcaataaacagagagaccactaattttactcggtagatatctgaacaaatattctcgtctcaaatatatatatgtcaaaattgtaaaaaaatccttgttttatcgcaaactttcccaaaagtgaacaacaaacgtgttgaactttatcagctcataccaaccaaacaatacatcaaattactaaatataatagatacagcagagggaattcgcattcaaaaacggattttgaaaggaaaatctttcggacactaaaaacccagaaagagacaagcgaggaaacgagaacagagtaacactcaccggaaaggtagaaactttgtgagct

SEQ ID NO: 56803 - DNA, 1285 bp, Arabidopsis thaliana landsberg
  unsure (1)..(1285): unsure at all n locations
tttgaataaagaaacaatacaagaacttattccacacctttttattctttcttttgggaggttttgaatttcaggcaacttaaattcatctacgttggtaaaaacaattctttatcctcagaaatgtttattggaaattgtgtagaactcatctataacttgtctaaaatattaaacacatgattttgaagaagattgactacattctcatgagagctcatttgctatggttgaaacctggacacattttaacaaatgcaagtggagtgaagaaccggttcttgtttgatactatacaaagggaaatgtcgatctaactgaagttagtttcatctctgctgttagggtcgatttagtctcggttcactgattctttttaccaaatagtttaataagctccagtgcgggcattagaaataaaaatggcgagataataaggtaatgatgttaatcaaataataataatcactccttagcctagcctgcccttttgctttttatgaaaaagtttcaaactccaaaaagctattttttagatgcttattccaatgaggcagaaagaaagaaacactaaagatatatatactcacaggggaaagttggtgttggaaatgtttctaattatcactttggcactaagtatattatctgtgagttcttgtaaatttatgtttacatgttttattttttatattgatgcgaaactatttttgtgaaaagttttgattaaagcatgagaaagtttcacttgatgttgggtttgagtgttttatccgggtttattcatccttgaaatcagtcatgcaatttggcaaatatgtggtgtaattttttacaagtgtgagagaatctactatttctacctttgtcactgctgaaaaatttcttgatgtacctaaaagtcttaagacaaacgaagaatctgctttcctatttaataaaacgaagataacaaaaaaaaagaatcagcttccctcttaaagaaggagaaaaacagagagaataagaagtaattttttagggttcttcctttttcattttgattcttctttttctttgagatagaattgtttctctttcgttctctctctgtgtatcaaacaaaaatttgattatggaataactcttaacttcttggnttcttaaaattcttctttctttctttttttcatttctatgggacagcagcaaacagagaattttatggcagcttcttcaacatctttctcaaggtactacttactaagttaaacgcatcctctttacatatatacatgttcttgaa

SEQ ID NO: 56804 - DNA, 1147 bp, Arabidopsis thaliana landsberg
gctcattggcgcgcttggatggaagacacctaaggaccggacaaattcaccaaactcgatcactccatttcgcttcacatcaaatacatcaaatatctgcatattataaaacagaactttgtttaaatttacatatgttttcaataatgtcacttattctagctaggtagttactatatgtacccgatcagcgaagagattcctccggttcctatttctgaataaagccagctgaaattcttcctgcaacatcaaacttttaaactctaattaagctatatagattacctaattgctgtctacatatggaccttttagagtgaaagaagaaaccttatgaataagaccatcatcgataattgagctgcttagcttcttgaacagttcatacaaagcctccacttcttctaccgtgactattgtccctcccattacaagtaaaataaaatttgaaaaagtttaccaaactctacaacatgctattgtaacatttaaagattatcttactaataagattttaaactaaaaactaacatggcgtgacggatgcaagaagctcgggatcctcatatcccggtggtcgcattgcattcttcttcttcttcttcgatacagagcagcccatacaaacacacccttctctcaactgttattagcctttgcttttctcacgctacaaccaaacacaaataatcttggttaatttacagatatttcattgttcctaataatatgatgattttataacacccttggaccgaatcctactttcgttttcgttggttttacttctaataaaaatggtcctagaacaaaccaattaagatcgagtgcaattaataatacgcaacttgtttagtttgtcacgttattgacttttctagtttattttttggtcatactcaaaacaaagtaaacatattttggcaaactcacgagattaccaaaatgtttctaatgaaattcaatatttaattacatatatatacatgaaatattaatgtagatgagcactaatcatgatgaccatgtacatctacgtgtatatactgtctatgtatatgtaacatttcaatttcgttaaaggcaatctagcgtcgaaatcatcaaaatctgcaagagtttgacaaacatcgatattaaaatt

SEQ ID NO: 56805 - DNA, 1133 bp, Arabidopsis thaliana landsberg
actgatgctcgtcataagactcagaatcaataaagaataatgtatcagaattttgaaaaggttttccagagagatgactaaatttactagaacatgccaaacaaatactctgctcacaaaaacgacagaatacgactttttcttctttttcttatctttttgggtaaatcacaagaatctgtagaaatgagtatataacagaaacccacaacaaagacagagatcagcttctttctcttattttcttttttggtaagccacaagatctgtacgaacgagtatctaacagtttgtcttagtaggaaaacactctacttaaaaaagccacaggataataataattttgaataaccaaactttaccaaatatcttggaataatgcctcatggccatcccacgtctggaataaaatcccaatttgtcttgccaagacaaacctcactcgataatcagagtcacttagcatcaacagaagtcgctcaatcattgtctgtattaaaacacaaacttaattcactgtacaacaagagactaaataaaataagaattccacaaggaaccaattagaatatttagctgtaaccggctaatgtgaaatttcaaaaagaaaactactagcggtaatggtaaaacaggaaaactgcctgtttacttgtttattataaacacactgtaatttttcttcattacttgaacaatttcgctacaagtaatgagtgcaagaatatatttcaatttttcatctccaaacaacaggaatagtcttatctgaacaaactgttttttttttcaactccaatggtaatttgacagggaaaaagagtcatgcaaccttgaggcacgaacatttcttgcttcatgaaaatagttcaaagagaagctcaaacataaggaggagattaatattgcatatgtcagcttatcaagtctgaagaaagagtgataaaatgtgaagtacgcacctgaccagtctgaggattaagtaagacaagatcacatatacagttgatcagcttgacacgcccaaaccatcccaagagaccaaattgagaaactttattcaccattgcgccaagttggacaaagacctgcacattacctgagcaataaataaagcagatccctggaaagaa

SEQ ID NO: 56806 - DNA, 507 bp, Arabidopsis thaliana landsberg
  unsure (1)..(507): unsure at all n locations
atgtctttcattcatcgcaantctacanaacactatgtgtataagtgtggtggaaaactatcnttttggaaattcaatccaaacaactacttttttttttcagcataaataaatgaattattttaaattaaaaatgtttgtataatatatatatatatatatagttatagagtgttgcatatagttagataaaaaatatgtaaattacatatttttatatatattttaaaatccacgcgttgtgtgagacattacctagtatatattgaagatagaactttgggttcataaaaaaaaatgaaactatagggtttggtgaaaatatgtctaatgggcatatcggcccattagtggcggcgcgcaccactctaaataaaccgtcattcttcaccacctgttagaagtaagataatcggcagacgtgacggacacgaaactgaaacccttagatttctcaatcgggaggcttttttttttttttttttgccggagacagagtaaggaaac

SEQ ID NO: 56807 - DNA, 509 bp, Arabidopsis thaliana landsberg
gatcatgttatgcatttatacgcgcatagtattttttgttagtggaaaggtttttcatttgcattgtgacgaagggttcgtatatttgctggtctttaataggaatacaattaaaaaaacttatagttatttttgggcatcagtcatcaacttgcgaatagattgtataaatatctaatagtactgacctaaggtcaatggtttggatttagacattgaaattaaacaattaaagaaagatttataagtttaaagacaacttggagattctctatattgaaatttaggtcaatggtttaagattggtcattgaatgaatgattattttattactatatcttttaatttattgttggaagaaagctcccatctctatgcattatccacgatatttgaattcaaatttaatcagcttttaaattcgcagaaaatattgattaagttgaaggaatcatagtacatgaccatgtacagcttgtagtactactaattattcttctccgtggaat

SEQ ID NO: 56808 - DNA, 466 bp, Arabidopsis thaliana landsberg
tttttttttttgcttatcgtctctcaatttctatctctgtgtgggggggacacgcttatgtcttatataagttagctacaacttgaaaggagaaggaaatttattagtgatggtgtgatgtgagatttttttttgtgacggtcaatttagacacaagttgaggtttcaacacggatttgattgatctcgttttaattcttgttttggttatgatgtcatatagtttaaagcctttgaaataaagtgaacgaaaataataaaatataatgaggcatatgtttcatgacactaacttttaaatgacggtagcaaaatttatacacattattttagtgactatataagattgttagacaaaacaagaggagtttggtgaagaaacctatttgagaatttgagtcaattacgtttcaatgtttcacaccctatacctattgttttaatagggacaaaccaaatctcatgc

SEQ ID NO: 56809 - DNA, 1032 bp, Arabidopsis thaliana landsberg
gggattaaaatctgaaacccaaaaaaacgagaagggagtcgaagaagaacctttcgcgctctgactataattcattacttacactggatttatactttttggggtcttcctctctcaattatctccttcaacgccacaagatcctaaggcctctcacggatctctcttaagatcaatcgccgcggctcatgacgcagtcgcctgttcaaccgcctccgccgctcccagctcagccgcattccgccgccggaggtgtaataagaggcgatgtacaggttaggtgcgcaggctgtcgcgtgattctgagggtgaaaaccggcgttgtggagttctcgtgtccgacttgtcaacttccccaaatgttgccgccggagcttctttctagggcacggccgcagtttccgcagtctccacaacaaccaccacagccgattcagacgcttccgccaccgattcaacagcagcttaagcctcttaatctacctaggcctccggttccggcacatggaatcgatccgacgaagatgcaattgccttgcgctaactgtcaggctatcctcaatgtgcctcatggactcactcggttctcgtgtcctcagtgccatgtcgagctcgctgttgatgtctccaagcttaatcggtctttaactgcttctcaatctcattctaatcctcctactcctgctgctcccacagtcccgcctccgcctcctcccgaagaagtcaatgaggaagctattgaagtggagagagaagaagatgaaggtggaacggctggagaaacgtttatggattatgtgagtgcctcatcttgacgatcatcttttttctgtctgttcaatgtttttgatgatactaatttgtttctttgtgaagcgtcccccaaaactttcgatcggacctcctcatcctgatccaattgtggaaacatcatctctatctgcagtgcaacccccagagcctacttatgatctcaaaatcaaggaagagcttgaaaggtcaaaggctttatcgtgtttgcagattgagaca

SEQ ID NO: 56810 - DNA, 819 bp, Arabidopsis thaliana landsberg
catagactatgtacaaagagtctctaagtccaaaataatttttttggtggcatgtttattgtgtttgattttgtgcttattttggaacaatagtaaaaaaaaaaaatagtttaataatcttgcaagttaggttggctataaggagctgaatagtgaaacgatgagatgtgatactgcacttgctcattattttttaatggcaaaacaacatagaaagttatttaaaaacaaattatgtaacctctttttatttgtcggaaacttttcttgccaaactaagtattcgttctaagaatgaaaattatattttggtaaaattaatgaaccgtgttcaataaaaatattacgggctcacatttttagaaattttttgcaaaataagtactaggagaaataacatggaattgtaggggtgaatccccttcgaccacaaatattatatgacgatagttctttaactctttcatgatataagagttcctttagatgactggaatttactagcctgtcataaatgagcatcaaacttctaatcactatgcatcaaatcattaaagtcactaacaataaaccaccaaaaataatggttcttgatttttttttgttaatagaatacaaatttaaagaaattaactattttcaacaataattatgtaatttacccaatatcagatatcatcagtatacgcagaacttcatagacacccataggatcaaagtgtataatttctaattattccccaaaatctaatcaaatatacgtactaaacattattaattttcttaaaacacaattttaatgggattacaagacccctt

SEQ ID NO: 56811 - DNA, 1157 bp, Arabidopsis thaliana landsberg
cttccggaatctatccgaaaaagttgacgaatcattctaataatttcttattacacttacttaaaaaaaccaataagttattattatcttgatatgcaatttgaatgactaatgattctttgttaacttaccaaacgagtataggtgaatgttagaaaatcgaaagtacggatactgttctagcgatcggcaaagttaaagaacttgaacatgcatgcgctatgattttttatataaatcactaaagtagttaagttagtgaatattaaatcatagtgataccaaaaaaaatacataaaaggacaccacaatcctaagaggtaataaatcttcttcttcttgttttcttcattccataattaattaatccaaaaacgagagccaccaaatcgatccataatcaaaattttccaattaaatcaatccatataactatctctgtcgaaaacgactaatctaatttcgtacattaccgtacactaatgcagtcatctaaggaaacttatcttgcgaataattactattatttcattaaaccaaccaaattttattacataacaaattacccggttatctaggtacacaagttgacacaatggtagatattaataaaatcaagaaagttccatataaactaatcattacgttactatcgtaaatcctataaattcccatctcatgtaccttcttctacaatatccttcatccttaaaacactaaccttctctgaaaaaaatccaaaaaatggtttataacacttcatgccttattcttcctttggctctcatcattcttgattttaccttaatctcatcattagcccatccgattccaagcacactcaacgtcttatcctacggagctaaaccagacggctcaaaagactcaaccaaagccttcttagccgcatgggacgttgcttgtgcatccgctaatcctacaactataatcgtaccaaaaggacggttcttggtcgggaaccttgtttttcatggcaacgagtgtaagcaagcgccaatatctattcgtatagcaggctcaatcgttgctccggaagattttagaattatcgcaagctcaaaacattggatctggttcgaggatgttactgatgtttcaatctacgggggaaaacttgacgctcaaggcactaattt

SEQ ID NO: 56812 - DNA, 446 bp, Arabidopsis thaliana landsberg
tgttttttatttactcagttttccagtcaagacgttttctagagggctatgaggtaagaaaaaattatttttttaatattaggtgcaaagttaatatgggagtcaaatatttttaatattttcaaataattattactgtcaatgaactgcaaaattagtataattctagaaagacattgaataataaaaatatgctgcaaacacgagtttggtatgtgtgcaccatataatattgacaagttgtagtgttggttgaagataaaaataacacaaaaacataaaaagaacatgaataacgcctaaaacttaacacgaataaaataaaaaaaacataaaatatattatcaaaagtcaaaatcacaaaagaaattaataccattttacaattagctgaacatttattctatcaaaatccagtcctattaaagaaaaatatgtgatttgag

SEQ ID NO: 56813 - DNA, 537 bp, Arabidopsis thaliana landsberg
  unsure (1)..(537): unsure at all n locations
ttctattatgcagtggctgattgttttctttttccctgcgatgctgaaagatgtgaaatcgttcgacgactgtccaatttggttgcctgctgcaatcatcacgccctggagcctggtcggtcgttatcaggaagtagtagcctgggtagacacggagtaggccacgtaacacggctgagaactctcgttggcgcaacctggtcgagccatgtgtggtgtggcgcccggaagagcaaaccatcaaacgaccgagcactccatggacaaacgcatagcaaaccaaatccgtcacgccctcgtgtgtaattaagcacgatcaacaattaatagaagattgatttaacttaaatagatattcaagttattatccgcgcgagtgtgggccaaagtccagcatttgtggcgtccgtctcctgggccacgtgatgggcctaatcccgcgttgccgaggcctgctccacccgccgcgctctgcgcctgccagctagctntaatgaaaaaatttaatctaattataaaaaggctgccagctagcga

SEQ ID NO: 56814 - DNA, 539 bp, Arabidopsis thaliana landsberg
tttgatttctccaggagcatttgagagacaaacaggggaggtttttggatccgcgagaagctttcggatttttccactccgagacacaagaggaaactgagaaatcaaaacaacaagtaacagttgaaaactttcaatacaactcaagaacagaggatactctgttttaatgttcttaaatttgctttttaccttatgaagacagaaactcgaagatccaacttgaactgtcagatcactagagacatcggatatcggcctgcgaaaacagataaaaaaaccatcaagattaagcgaaaggatttctgaattatgaatcaaaagatcttttgtgtacttgaattccatgactccgacgctaagattctaggataacgaaacagtgaatttatcggcaaaaatagtgttatttattcctggctttagagacatttaaagattcacaggggacatgtaaaagattatgtctacatcaagctttttcaaatgaagacagaactagaaccagatgaagtgttaatgtacggatatgttccaca

SEQ ID NO: 56815 - DNA, 904 bp, Arabidopsis thaliana landsberg
attacattacaagttacaacaaagagtttaggagacggttcaggggcggtctaatctgcaacccatttgttgttcaagaaacttggtgagtctgatatgcctagaggtccattgatcagccagtttctggtctttggcctctgcgtctcgccttaaaccaacgagctgttctctgtactctccttcgatcttctccattgcgttcttctgctcttccctaagagctttcatctttgcctcaatctcctccatcttctccctttgtctacacgtcttctctgactctagctgcagctccagccttcttagcctccatgcagcctctttcttatggtctgcccaagctcggtgcccttcctccaactctctacaacactccacaagctctgacaagaacacactctcgctactcccactacaagacggcatcatactccctaacacaagtccccctggaccgttctctgctctctcaggctgttgctgctgcagccacgggattggcggttgaggcgcagctgcagccactgtggaaggcgataatgtcaaagttaccgagggaggccttgcaacaacattgttcccattgttagaagtagctaaccaaggcgggatcactgggttaggaggctgaacttgttgttcagaatgtaaaaaccctccattcgaattagccatcacaaccgttgcagcagcggcagcagcagggacaacgttagaccgctctttgacaagcttctcagcgaaactctcgagaatccgatcgtacttactctcgtcaataggctcaactctcttgttactctctttctcttctctcggttgcttcacctaacccacctcccaccacttccctaaccgctttaaatcaaccgggaacctcagcagcaatcctcttccactt

SEQ ID NO: 56816 - DNA, 800 bp, Arabidopsis thaliana landsberg
tcttttatgattgacaaagctttcatatggtcaaagattggtcggcaaagacattttcacttgcatggagacaagcttgtaattcgtaattctaccactacattaatttatagcagttcatcaactactatgtcaagactgtaatacggatttggaattttctgagacaaaaaaaaaacaaagaaaattcggatacaaacaaaaaatgaaatactgttaattattctttgacaatagctagctaaccaagtgaatttgcaagctagtgtaaaatcgaggaacaaaaactattgacaataactttctaattatttggacatggaaatgaaatcgatgtcgacgagtctgtattgaggagaacgtccaccagttttatagaagagtaaaatttgtttttttattttattttttgttgtatatatattattatttggtgatatgggtaatagctagaacagagttcaaaaactataatgttttttatttatttataggaaactataatattaaataattggttgttcagaaaaaaaactcaccaaaataattataaaattgaattataaactctaaaagaataaattggtcatgttaaattcattgcgttccaagaaatattgaaccatatcccatgcactacttttaggttaaggtattttcacctgtacgtgtgtggaaaagaagagttggtgttctgaactttatgtagtgaagagaatcagacacactggtcgataccaaaaatggaacacaaaacagaaatggttggagcgttacgaacatatatttcttagatggtt

SEQ ID NO: 56817 - DNA, 128 bp, Arabidopsis thaliana landsberg
aacctcacggcgagtactcctgccaatctaagtccgccttttactttcttggcgcctcccagactccattcgcgggggaattttgccaacatacatccacaaccatctggcattaccatggaggatgc

SEQ ID NO: 56818 - DNA, 1514 bp, Arabidopsis thaliana landsberg
acactcctttagcttcttgactgtagtggcgtcaaggaaagtagtacccacgacgagttcagtgggaagactgttagcaaagagtgcgaagtcgagaatctgcagacccggattagcgctgttgaaagtgacaacggctgaagcagaggattttcccgcgttgatctggaaatgaagcaagccctgtgggaaaaccatgacctgtcctggtttgagtgtctgcacgtagacagcgtttgccgaggagacaaacccagcggtaatggagccagtaaggacaaagagaacctcagaggcaccagggtgagtgtgcattgggatcacacctttaggagctaagtcaagtctagctgtagagaggcctagaccgttcagacccgggaactgagctgcgaaacgtggtgtgacagcggcgttgatgatgtttgtagtgtttccaggagtgcctaagccagagaagacaaagtctgtagctttgacatgaatgggacgaatgcaagggtaacccgcagggtttcagcgcgtttcaggtttgcgacacagaaatcttgaacagaggcattggatagagcaaagagaagagataagaggaagatagtacgcaacattttgaatggttggtttaagaggaagatagtactctacttttcttttctttttccctactcttctcactcctctcgggtctcgggtgtttatatagagaggtgtgggataaactgtgtggtgaacattcgaaagacggagataagcttttagaaaccattatggacgtccaagaagaaggaccactcttagaaacaaacaaaacgcctcttttctttgcctgcctgttctgcatcatttagatcgctggtgatcttaatgttgatgtagacactgatatttactatttgttgaagaagatttccaatttttatcatagatgaagccgttgatttcggactgcagactgcggggtcaagggttttgagaagaacagagagcagacaaattaaaagacatcaagctcaattttcttttctttcttgcggatttaacttgttgcttaagtaagtagaagagagcattccacgtccataagacagacacgtctaactacattgggttgggtagttaaagacttattagagttattatgagtgaagaagagccaaagataagattttgtcacaagttgggttaaagttgacgtagagtatacgaggacaaggtgtgaatacgaatgtgttgttacgtagtgtaggccagtggcacatgtgacgaaccattaaaagacactatttgacagccagaagaagcttaacaaagatgtcgacaaaaatacaagtttaagaaagattcttacaaagatcctttttttttcttatcttttgttcaacctacaacaatagtatctttctatgtttaaaccattgacaataatgggctaaaagatcaaatattgacccaaaacttataataaataggctttggcccataagtgaggctctggcgggaaagattagttattt

SEQ ID NO: 56819 - DNA, 522 bp, Arabidopsis thaliana landsberg
  unsure (1)..(522): unsure at all n locations
taacacattcccagttatagagatctatgcccaaaagtggccacatggaccgtacttggtggttggagggcgggagggagagcaggctgccgctgactccgagcaggcgcagaactcttgttctctctctagatctctacatgtgaccactgtcagtttggtctggcatattatcagctgaagccagctgtcctttagaaaacggctgttactagcccagacctccctgctgacatcctaggagctggcctctcttaggtcctaattgtagcaagagctatctatactctgtatctgtgaattgactgtatgggtgaaaagcttaaaggcagtccagagacttgagtgttcagtcaggcaggtttgactcacaaacagcagaagccaactcttaatgaacagcctctgctctaagcccagcactgttctaagcaggttctaacctggtaactactgttctaactctgttgacttatttaggcttcatgacagncctgtgatgatgatggtgatggtggtgat

SEQ ID NO: 56820 - DNA, 118 bp, Arabidopsis thaliana landsberg
gaactattggttctaagccatctctggcgctgaatcaacaattcgaagtgcttttcttgcgtattcttgataaaccagcgtttatatatagatgtaggaggatccgtttggaagttag

SEQ ID NO: 56821 - DNA, 553 bp, Arabidopsis thaliana landsberg
aggaatgaaataggattaaatatgccggaaaatcctgatgattttcgcagatcaatagcgtttgtcaaccggtatcaaaaaggttctgtcaggctcctaaattgtgaattctaacccgcatatttggctttgccggcggactaaaaacatccgatcatcggtaccggggtttcattattgaaagcggtatcaaaaaagttttatcgagccctcaattttgtaaattataactcggataatttgactttgccgactgactaaaaacatccattattagtatcggagttacatcattgaaagcgtgatcaaaaaggttttatcgagccctcaattgtaaattctaacccgcataatttgtctttgccggcggactaaaaacaatccatcatcggtaccggagttacatcattgaaagcgcgatcaaaaaggttttgtcaggcccctaaattgtaaattctaacccgcatatttgtgtttgccggcggactaaaaacatcccatcatccgtaccggagttacattattgaaagcggcatcaaaaaggttttatcga

SEQ ID NO: 56822 - DNA, 635 bp, Arabidopsis thaliana landsberg
attacgttttaggaacaaatgtttgatttctgcgtgttgtgattagtgaatgtggccacgtcataagctttacatttaaaatttgttaaatattgaattaaaacatgccaaaaaaaaacaaaaaaaactaagaaaaaagcaaattacaaatacattttttatgtaaacatgatcacattatcgttaaaaaaaacataatattattattcaaaactgaaacatgttgacacaaaattattttactgatcaatttatttatcctttaaaataaacatatgaagtcttcaaatcctaatcatcaaagagtatattaaatgtttgatgattctgattactaacaatctacactaaagtttgtagttaacaacttaacatgctgcctcttatactcttttattcaagtgtagtgatctcgagttttaaggagttatgaaattggaggaaaacaaaaaaagttgtgatgttttggtttcaacatacagtgtagtgatctcgatttttggttgtttgtggatgatgcagcatcatcaaaatatctttatatgatttcagatgttacagaaccaaaacccaaccaacaatgaataaagaatcattctgggtcaattctcactaacttaatcggaacacaagaa

SEQ ID NO: 56823 - DNA, 156 bp, Arabidopsis thaliana landsberg
tagccgaaaagctattgaaatggacgaccaatggtggaaggactgagttaaggtaatatctttatcttttttcacgggaaaaaacccgaaaaaccgtcacttgagttaaatcatgccgcctactatctcttgatttaaatttggaagacacagtcc

SEQ ID NO: 56824 - DNA, 727 bp, Arabidopsis thaliana landsberg
ttattattattattattattattattatgccaaactgtgttattattaaaatattaaaatatttaaaatgttatttatttatcgagtattaatttattgaagttatactatatgtagctagaatgccttttggctaacatgtttctcaagtatttgtcaacttccgttttcactgtattctctaggttcattatcggtccaagaaattgattttaagccctcttcacttctctttctaggaatctactggttttttagaatacatctatctcggaaactgactcgtcggtaaaggctatttctgcagctaaggaatggaagtccgctcagttagtagttaaagctatccctgtacccagactctctacattacctcgttctgaggcactaccacctcccttaccttttgttgaggagttttctcatctattacctcgtgttgaggcttctaatttgttacctccgactgatgttatttcctgttttacagatgcggcctggaatgcatcttctggctcttgcggtatggaatggatatttaaagctcaagatcaaagggttattcatcggggttcaacaactcgcctccatactccctcggctttggcaacagaagccctaaaataaaggataaactatttgggccaattaatcgatggattccggcgtgttatatgtcaacgcgtgttgaaaatatcaatgggtgcaaaaggatgataggaaatga

SEQ ID NO: 56825 - DNA, 514 bp, Arabidopsis thaliana landsberg
  unsure (1)..(514): unsure at all n locations
taatttttgtctaactgccagctctccttcagttcaaccgggatggggccggccgacgagtgcatacatgcattactactgttgttttaacacaacaatttacaacatcctccatctgtccaaatatagctgacgacgcttttgacttttagatatcatatttgattatttatttatttattgcaaatagtaaaacaaacaaacaaactattattaaaatacatgtactgataaaataagtcgtagcaaaacaaacaatatttacattaaaaaagtttgactagaacaaccaaataaacaagatgatgtctaaaaaccaaaagcatgagggagtaaataaataaatacacaataatgcagcttcgttcatgtgtccatttccccattgtttaaatattactgcaccagcatgacgcgggagaatgtagccatcacaactgaagaagaactgganaccaacttctttactactgttgttgtttaaagaaagaaaaaatgcgagcgcgggcgtgac

SEQ ID NO: 56826 - DNA, 929 bp, Arabidopsis thaliana landsberg
tatatcgccttttgtattacaaaattagtttggtttcatgttgatgaatttatataactcataagaattaatcttgattaactcttattttcagttatttcataaaattaagaaaaatctatcatatataaaacaaaatacttacttgtatccaaaatcgaatcacacctaaattcgaccctaaataaattttggatatagtttgggtaacaatagatatgaaaccgattttcgaagctagtaaattatttttttttacataacaaatacattagtggtaacaactaaaccattttactatatctcagctagatttattatgattttacataatgtttaacacaaatacgaaaaaattcaatttggaaaaaaacgaaattgtaaaatataatttaggaaaaacgaatcttaaaataaatcatttttattgatttaaatttctggataatggtttgtttatttaaaattgattttattgatattaggtgttattttactttgtactaaaaggtgagagtttagaaaactaaagaaaaaagtttaggtttttcccattttgcccaatattttcaaaaagaaaaaaaaatatttttaatgatacggtaattcattaaaatgtaaaatttgtttgatatttgaatcttgctattgttttgactattgataataaaaataaataaatagtacatacatatttgatgatcattatttacttgtttgttgtattcggctttaatatatgtaaatggaagcatccgttgaaaaagcttttatcacgctagtcataaacttggatcatatgttaataaccgttatagctaagtttgaaaacaacatacaatcagaaattatacagaatgagaaaacgagtctaatccaatggagcctgagcacagccaaaaggatactcaaggactttttctgacaga

SEQ ID NO: 56827 - DNA, 803 bp, Arabidopsis thaliana landsberg
catatcttcaaaatgaggccaactcgtcttgcttctctcatcagcttgctctcctgcacaaaaatgtattacatcaaatcttggttgctaacttaagagctttttatcttgtaatcatgaacttcaaatctacggctacagattcatatgttcagagacgaacctcgtatttctgaataagtgatgcccagagagatttgcattgtcccgggcttcgattgattccttcagctgatagatttgaagagatctcttcccacaatgccattctacctttcaccacttgaaatctactgtgcagctctcctcgcattctgattaccttctttatctcctccggtttccatttgttcttcctcacacgttttggtgatgacttggtttcagaatctgaagcatcagctaattcatcgtcgtctctgctgttttccttaccctctgctttaggctccgtatcagctaccttattcatattttctgtttcactcggtgaaggtgacgatgatggattgatgaatgatttccaaaaatcgtctgactcttctgaagaactcccaacgggcgtatcaacttcttccgtgtatgttgatgccgcagtttcttcttcagccagtagtcttgcactatcaatgatatcatctgcatgactgaaacatgttagattacatcccgaatatagacctacaaatgtgaaagtaagaccagaccttccaaagtgcgatctacttctttgggggcagcttcttgtgaaggtgctttcttcgcccgacttcttttgtcatttccttcaacaactttccttc

SEQ ID NO: 56828 - DNA, 1083 bp, Arabidopsis thaliana landsberg
cacttgtatgttgatactttttagtggctcattggacgaagaataacactgccctacattgtttagtttactctttaaaaccaaggtagcaatttcacgaaatccaaatcgtccttcctctttttgccacatttgacatatgtataccatattttttctgtgttgtagattttatagtgaagcatgactagctgaagattccacaacaattagtcctcataagaatggaggaaatctcacgttagaggatgaagtgttttcgaaaactatttcctcatactgatgattaaagtaaagttatgaatatatgttattcttgacaaagagtgctctttttgaggatttaattaacatacatattggaatataaaacaaatcctaaaatactactgaaaccgcttagacagagggaagaaggaaaaagacaagatatcataactacttagacaacatccatgtccggtgtttcagtccgatccagatttcctgtttggtcgctgtttggtttgagtatcccaccagctcgattacctgatgcacccatttcaagagcttctatgtacaacactttaaccaagttcatgaatctgcgtcgaaacgttggtattctagacattgatgctaccattccttgcagccttcaaaggaaagaagagaactagcttcagtgatcatatttttagaacagaatcaataaaccactaaaagcctcaccccaaactttgcaaaaagcctcactttctataaagaaatggtctaaatcaagacatgagaaccattcacaacatgagatgcagagaagatataatttctgctgatgtttgataacataccttctgattatggcttgcaattgtgcttttcttactgtatcacttgacgggaacccggtgttgtcccagtcctcggttctttcatttttgcataccattaccaatttcctcagacaaaactcttcatcctcagtaagcttcaggttttttatctgctccttcattatcagtaagggtccaactagccacacaaatactttatctcttgggctgtttagttctgtaagctccacgccatcagctgccagaa

SEQ ID NO: 56829 - DNA, 517 bp, Arabidopsis thaliana landsberg
ctttgatcgtgtttttgacgaaatctctttgttggttttactacagttctgaagatgttgattatgctgttattgttgttgttcgtcatggtgaaacatcttggaatgccgagagaaaaatccaggtaaatttaacaataatggagtttgtatctgtatctttggaatcgaaacttgacttagaaatcgtaaattttgaatctttatcttgtatttagtaatgattagcatctttgtgaatgtatagttattgggaattttgattagagatgttgaaatgtggttataatttggtgttacagggtcatttggatgttgagttaaatgatgcaggaagacaacaagcacaaagagtatgtgttatcttttgattgtgttgtaaccttaatcatcatgatgccttttaaaacttttctttcatttgaaatgaaggttgcagagcggttatcgaaggagcagaagatatctcatgtatactcttctgactcgaagagagcctatgagactgctcagatca

SEQ ID NO: 56830 - DNA, 812 bp, Arabidopsis thaliana landsberg
taccactaaaatacatattcatgatcaaaaagaagataattaagtggattctcatgaacgccgattttatatccgattgagccaaaatcgcggcggtccacgcagaaatagcgcttttttcgacgcctagtcgaccgattagtccgatgtttagaagcgtttgttttagagaataattatgccttcatttttgtcaagtttgtttggtttggtgagtagtagttacacaattgttcttattgctttgcatatgtttatggatgtctcaagaaactttatgaatttgcagggcattcaagcctcttttagaataggtttggttcttccccgagtagtagcatctacagagagacagatttcctctacggttttaaaaagagcttctgaaagtgtctctttttcattcgctccgtacataaatggtaagtgttacagtgtgattacaatttttcttagaccttgttagaaaattaattagaataacgagtaatctcacccttttattcatgtttagggtttggttttagttcgttatcaaattggtctcgtagttatgaatctttccctactgaaacatccataaggtaaaccattcgcctagacttttctgtcatttctctcttaaatttcatcctcagagcactcactatgtgaatgtttgctggcttgggttgtgtttcttctcgaacaggtattttcatgcgagtcgagaaacattggcgaaaagaaaagaggatgctgatcgactgctgagtcaccgtgaacgcaagaaacagactgtgaaaacgaaaggaaagttctccaaacgggag

SEQ ID NO: 56831 - DNA, 616 bp, Arabidopsis thaliana landsberg
gatggcattaccggcagcgtgcgagagggaaggacggacaccattcccaacatcgacaccatcgcggaattgaatgtgtttgcctcgaactaccaggcagaatatgggaagcagacgggcggcgcggtcatcaatatcattaccaagagcggtacgagccagttccatgggtcgctgtactactacatgcagaatgaagctcttaacgcgaacgattggttcaataactacaatggctccaggcgtccgaagtcgcgtaagaataccgtaggcggcaatatcggcggaccgatttattggccgggtcacttcaataccgggaagaacaagctcttcttcttctactcgcaggagtttctaccaaataagagggcatatggattggcgaagtacacggtgccgacggcgcttgagcgggtgggagacttttcccagagctacgcgcagggaaagataaaccccacggcggatgacctcatcaatatcaaaaagccgggcgccgcgtataccacatgccccgtgactggcacgacaggcgaccacagcggttgttacaacagcaccaacgatcccagcaccaacagaattcccgcgggcttgatcaatccttccattc

SEQ ID NO: 56832 - DNA, 1097 bp, Arabidopsis thaliana landsberg
ttgacaaaagatcgtttcccagaaaccaaaaagctccatttcgtttctttatggcttggcatggcgaaaagtgttgaaactagacaagaatcacgaggacgaccttcgaacatcttctcaaaatgggcaatgaatcaaaagcaagaacctttgttctgtcttcagataggatccaagcttttaacccagacgaagcttaaaatcgatcccatttgctgaaatctgaaacaagaaaagtcaaaatcttttaactttcttgcaactacaatataagaacaagaaaaaaagaatgagaattgtaattgaagaagaagaagttttaatatttgtatatatttgagagattaattaaactaattttctctctgtgtttttctttacatttgtctatctctcatattataccttaaggtttaagctcctttgcaaatcagaagaagcaaatggactttgtagacaaaactaatctcagtgttgtgttctttttttttttaattaattaatttcttatgtgttttattcttgtactgtgttttactgttttaggcaaaagctaaagaataattaattaaaaataaagagagattagtgaaagtgaaaaagcataagagacgtttcaagttctttgcttcagactaaacacgagcgtgtaatccgataccttgaatctaaccattctattgcttcaatcctacaatattgattttaagtacaattttcatcatacattttttttaatacattatcatcaaaaatagtttataaattgagattgtactcttttctttcttgggacatgttggtgcctggaatgtggatgattttttgaaaatttaattgctgtaaaaaaaaggattaaaattggataaggacgaataaagtgtaattttatccaatggttgtgatattctccccggtggttctacgacggagccgccaagatttgcggtaagctaaagagccgatttgacacgtgttataaccccatccacaagcctgacttggtcagttttaaacttttatctttacgtacgacaaaacttttttatctttacttttgtttgactctattggttaagaacacaggctgtaatagc

SEQ ID NO: 56833 - DNA, 458 bp, Arabidopsis thaliana landsberg
  unsure (1)..(458): unsure at all n locations
aatacctctaaaaagtaaaaacaattcataattgtcatccctgatctcctgctaatagtgtaaaataagacaatacgttattaaagtttgaattttaaaaaatgaaattttaagttgtacttgatgaatgatgatgagtagttaaagacctgactagtaatattgtgtagatagccgttaagtctattgcatgtcgaaacgtgtaacaaaagaaagagatgagcaagaacgaaacgcttctacttaattggcattttctctacatatcgatgcacagccaaacgcttcacccaacggctataaatctcttgtctactttcaccataaatacacatacaagcaagcacccaaaccacaccaaattaatgagagttaagctataagagagtagaaagttggtgttaattaaagtnttggttcggatattgatggtttttgtcaaaatgactgatgtttac

SEQ ID NO: 56834 - DNA, 401 bp, Arabidopsis thaliana landsberg
aagtgtcttttattagggttccgatctggtttttaagaaatggaaggtgatatgagtgaaatcagtgtgattgcttgaataattttatgtgggttttttctggtatgcgaaggtgtatcgttaaatcaagggaagggctaattttgttaaagtaacgaactttgtgattttaagcttgtgtgattgtttgagtaagttatagagaagaaactgagttcttattcatttgaattggtttctatgcttaaatttgggttcttttagcttgtgtagatatctttagagtgggtgaaatgatatgttaagttaggaagtttggcctcaggagaggatttacgtttgtttatctaaagtcaactgtgtgtgcctgacatgtttttagtgtaacttctgacatgtta

SEQ ID NO: 56835 - DNA, 485 bp, Arabidopsis thaliana landsberg
ttattggcgatatgatctaagaggtcgcatgatacatgccaaaaattttgattgatttttaaacaattttatcttatgaaaaattaaaaaaaaaacgaggaaacatggtgacacatgagcgagacgcggcgacactaggagcgtaagatccattgtatttgctgcgacttgtttcgacaactgttcggttgcatgtttagcactaggagccaagacatgtgtgaaatatttccaacatgggcttatttaaaccaagcccaataacttatattgtgtttactagaaagcccatcaaatatctaataacccataacgtgagcccaaagttcattttcaaaacggaaaatgtgacaccgtcccatttacttcaatagaggtttgagcttaaaccctaaacccctttctccacgatcttactttttctttctctgcgacttgtagcaaagacttcaggtacgattctcgccattttgattatgaatttt

SEQ ID NO: 56836 - DNA, 577 bp, Arabidopsis thaliana landsberg
aagtgctgctatgtaactcgttaatcaagacttaaaagtatgaaatccaagtttttctttaattttttactagtgaatctgtactggataactaatgttgttgcatcgttccatctacatcgaaatgcttagtacatgagacatcatcctttttcagcagtatcacaattcatttttggaacgtttaaggccttttgaaaagtgtattataatctgatgcttaacgttcacgtttcaaaactaaacttcctaacagtttagatagcgtgtaaaaatttatatgtgaacttgtgtttaattaacatgtaattattaaacgtaaactattattgtcgtgcggttaaaatagcaaaaaataatctttttatgcgaaatgcatatcaattcaatacttcatttttatgaaagcctatatcctgtggtctaattttaaaataacgcaacgtaccattttaaaattttgaattattggcctaaagacgaactatcatatgctattttatttactcacatatggttttttatagggcataaccaagtcaatgacctaaaatactttaaataaatttacatttga

SEQ ID NO: 56837 - DNA, 1081 bp, Arabidopsis thaliana landsberg
ggttcatgttaatgaaatggtttttttctcagtgcgtagtagtgagtttttcttcttcttttcaaaagaattatataaacgaatatattaatctttcaatttgaccggtaattttaatcaatatataaacacacgtcatttggtgtgaatttctaatgaaggacagcttttagtctaattagatcatgtaagacagttccatgcatgcactgatctagtaacatattcgaacatagttgaattgaccttttcatcaaaggaaaatgaaacttactaaacacatatatatactcacccatatgggcagacgacctagtttgaagaagagctagatgaaaatgacacccctaaaatagaaaaataaatatatataatttttttttgacaaaaatgtttgaaaacatatttggtttagtacgtacgacacgttaagtattatggtttggacttcgaaatctccattatgttatgatttggtcacgatatcaaaaataacaataataataataataataataaatctaggcctgtcaccatataggttaatagatattagccaattcatatgcatacatgtattatgtaccatgatatactttttcttttttggttgatatgctactactatatttttttcgtagttgagcggtgtctacccataaacatatgatcaatgacccaatcacataactgtttcaaactatttgtaaattgtaatcataaaacttcgaaattctataggcgagatgttagaagattttgttaaatattataggcgaaattctcttagctaatttttccctttttccgaactgtggaactatttgaatatatgctaaaagatgggggttttccaatcgttcgaacataaatacataatgagtcaccacgtactaaaatcaactaagaaaacaaatgaaattacaggtatttttgtgggtaaatcatttaagagatgaatgattcgaatttcgattcttagggaaaaacacaactactaccgtactacgtatgagatgcaaaacactacaaaaaaggttaaacacgactgcgcacaataatgactgtccatagcgatatg

SEQ ID NO: 56838 - DNA, 1586 bp, Arabidopsis thaliana landsberg
aatgttatcttcttcattgtctgtttggacacttgttgctctaagccaacatcaagattggcatatcaaagcaagagacgagatttctcaggccttcggtaacaacgaacccgatttcgaagggctaagccacctgaaagtcgtaagtatacattttcaaaagtgactaaaccacattataactaaaaaaagggttgttttttttaacaacttctttggctattatcattaggtaacaatgatcctccatgaagttctacgactctattcaccagcttacttcacatgtcggataactaaacaagaagtgaagctagagagattctctttacctgaaggagttgtagtaacaataccaatgctcttggtgcaccatgattctgatctttggggagacgatgtgaaagagtttaagcccgagagattcgccaatggcgtggcgggtgcaaccaaaggaagactctccttgttgccatttagctcgggccctcggacttgtatcggtcagaacttttcaatgttgcaagctaaactcttcttggcaatggtacttcaaaggttcagtgttgaactctctccatcgtatactcatgctcctttcccagctgcaactacatttccacaacatggagctcatttgatcatccgaaaactgtaggaggtagaagaatgaggaaaaaaatgtaaaggtgcttcctttttttttgttcatcaacaaaacagaaccttgaaggtgtgtagtggtaaatgcagtttgaatccggtcaagaaatcttatttgggtgtttttgtatatatgaaacaaattaaaatctagaaatttcataagatttttttattttcatagcatatttttcaccaccacctgatttagtttatgtgtttaacataatgagtttcatttgtatattttaattccactttagtcatcacacacataagagaggcttttcttatttgtttgcctaatttcaacttcactacaaaaaaatcttgtgccatgttaaaagaaaatgccacgtgaaatagtaatcttatatatgttgaatctcgacaaaatgattaagaaaacatgcttttagctcatttactaatttagtctaatacatgaggcaatgaatcaaagaagataaacaataattataacaaaaaaagagtcaaagaagatagaaaagaacagatggttgaagagacgcatcaagatcagctgtttttgcatttatatttctaatttgtttgttttgtttaggtaattcggtccagacaaacattctcgaattgaaaccacaaatgtattaatttattcggttccagaaaattttatgtttcattttgagttagttaaagaatctcaatcaataccaaacttaaatccaactaaatagcaagcttatagatattaccattttttgtcccaaaaataaataaatcaatatgaccatttacaaaacttcgatttaatttgtttactgtctatgtgaaatttgttgttttcacttttcaataccaagatgtatagaattttaacacagatcaatttatatttgggtctagtaccattcacaagtatctaaaaaattgagtta

SEQ ID NO: 56839 - DNA, 848 bp, Arabidopsis thaliana landsberg
aaaatgtattttctgcatacaccacatgaaatggtattatatagagtctaaatcctacaaatcatacggatgtggacatatgttcatacgtacccgtgggaaatgagggatttgcgcttccttgttgctgaccacaacagcctctagcagtgcagctctttcttttctgttgttaaacattacctaccaagttcaccagtaaagcttaatttaggaccatacgttcacatttattcaacgaaaaactcttagaatatagtataatagaaactctagttaaatcaatcattggtagacaagtatagtgacgaaaaaaacatatgttacctagaaaataaatacgagatgtagttgagagtagttgaacaaattaagctaacctttgacaaaataaaatatttttaatagctaacctaccagaaatgtagatttatctagaatctatttttcgttacttacttctattgtatataattttaatttttaggcaacaaattggaattttaattttaaagttccaattcattttcagttgatcgaatagaggtaagtatacttcgcaagtcccacctaactcacacaatcactctttcttggaaacgtgatccatatgaatatgtccttgcgacagtaaaatatactaataatgtgaatttgtggaaaaataaaaaaaaaagaaagaaaaactaacatgctttcttactccaaaatgtaatcatttgctacggaattgttattttcactaaaggaaaagaaaataaataaattaactttgagtagtaataatcacctcgatgtagtctttgaacaatcgtttaaggaaccacaagggtttatgcacagcaatg

SEQ ID NO: 56840 - DNA, 311 bp, Arabidopsis thaliana landsberg
tctaatttttgattggtgctgcaacggctaagcgcgaatgggataaacacatacgtttgtatgtcgaaacataacgaccaccctctaatcatttatgaacaatctaggattcccacctatatataggaagaagagctgacacacttgctcacaccccttataagagagtcaaagttataaggaaattacgcacgtatcaatggtgccattcgtcctcacttacatgaagtgaacaagcgtcatcgaccatttatgatgctgcacttctttatgactaaagatgattaaacataccataatctgacatcagc

SEQ ID NO: 56841 - DNA, 538 bp, Arabidopsis thaliana landsberg
gcgctccgtctgcagcaaccagttgctcaaacgcaatgaacgttcggtcgattacgctcctgcggtcgaatggattaaaaatagcgatttcgaagcctgcaggttcggcaaggtgggtgtccggcttgatgtcgatagagcatctggccgacaacacatggaagtactacaacccaaacggaaatcgggagatctacagcgagtacggctacatactctcggtcaaggatcgctatggcgttggctggacgttccagtacaacggcgatccctatacgacgcatctgtatagaatcacgcacagctcgggccgacatgtcgacattcaatggtccggacttcgagttgcttcagttgccgatcccgccggccaactgtatcagtacgggtacgacggaaatgatgtgctgtcgagcgtgagttacccggacggatcgacgcgcgcatatcatcatgagcttggctatacgctcactaccgtactgaccgtgatttcgattagcggcgtccgctatagcaactacgaatattactcgga

SEQ ID NO: 56842 - DNA, 567 bp, Arabidopsis thaliana landsberg
  unsure (1)..(567): unsure at all n locations
caagcgcagtagcacgccgattccgcgcgagcggcgcaggcacttggctagcatcaggcccaccgtattcaccacgcagatcagcaggaaaccgaacgccagcccggcctgcaagcgcacgtcattcggcaccacatgttcgctgcgcatccatgccatcaaaccggacaaggccgtgtcggaatgctggtagcgccccagtgcgacctgctctttcgcataattttcgaggaacaaccggtaggccgagacatcggcggcatgccgcagttgtacccacaggcccagccagatcgccggggccgtttccaagtgttgtacatcgaatgccccgccataacccaacaccatattcggcatcaggccgtcggcacgcgcagcctgcaacggcagaaacatcgcctggcctttgccgtagtcgcgtccgccaagatgtattgcgtagaagcgcggctgtggcgcccacggccgcagcacgccaatgatgcggaactcgtgatccgcaatgcgaatcatncggcccacgctattcgcgccgccgaacaacttgtcgttgaggaatccggc

SEQ ID NO: 56843 - DNA, 1020 bp, Arabidopsis thaliana landsberg
caaaggtgccaaaaatccaactatcaatctaaaaggaattctggtaaaattttattttgtataactcactcatttatgattcaattattgaagactaaacttaataaataaatatgaaagatggggaatcctcttgtcgatgactacaatgacaacaaaggaatgcgtgactactggtggaatcacgggcttatatcggacgaaagctacaatgacctgaccaaatggtgtctcaacgactccatcctatttccaaaactaaactgcaacgctgctctgaaccaagccttgtctgagtttggtgacattgacccttacaacatcaatagccctgcatgcaccacgcatgcatcatcaaatgagtggatgcaagcatggcggtatagagggaacgatgagtgtgttgtgggatacacacgcaagtatatgaacgatcccaatgtgcacaaatccttccatgcccgtctcaacggcagtactccttggacaccttgcagtcgtgtgataagaaagaattggaaagactcacctaagtccatgcttcctatcatcaagaatcttcttcaagctcatctccgcatttggatcttcaggtataatcactaaatatatgtgtgtttttgtatgttaaacttcataagcttcctactcaaaatcaattggcagactcgtatattttacatcttactttagatgtgaggtttgtaatagaaatatttgtgttgaattatttgtatagtggggactcggacgcggtgttgcctctaagcgggacgaggcattcgattaatgcaatgaaattgaagagtagcaaaaggtggtatccatggtaccattcacacggcctagtaggaggttggagtcaggtttatgaggatggcttgctaacgtacacgacggttagagcagcagggcatgaggtgccattgtctcagcctcgtctcgctcttttcctcttcacccacttcctagccaaccactctcttccctcctctccctcttaattttttttccacttat

SEQ ID NO: 56844 - DNA, 592 bp, Arabidopsis thaliana landsberg
  unsure (1)..(592): unsure at all n locations
aacaaaaaaaaaaaaaaaaaacgcaaggggtaaaaaaaaaaaccaaaaaaacccaaccccaaaaaanaaaaaaaaaaaaaaaaaaaaaaaaaaaacaaaaaaaacaaaaaaaaaaaaaaaaaaaaaaaaaacaaaaaaaaaaaaaaaaacaaaaaaaaaaaaaaaaaaaaaaaaaaaaaaaaaaaaaaaaaaaaaaaaaaacaaaaaacaaaaaaaaaaaaaaaaaaacaaaaaaaaaaaaaaaaaaaaaaaaaacaaaaccaaaaaaacaaaaaaaaacacaaacaaaaaaaaaaacaaacaaaaaaaaaaaaaaaaaaaaaaaaacaataaccaaaaaaaaaaaaaaaacaaaaaaaaaacaacaccaaaccaaaaaaaaaaaaaacacacaaaaaaaacaaccaaaaaaaaaaaaaaaaaaaataaaaaaacaaaaaaaaaaaaaaaaaaaaaaaaaaaaaacaacaaaaaaaaaaaaaaaaaaaacaaaaaaaaaaaaaaaaaaaaaaaaaaaaaataaaaaaaaaataaaaaaaaaaaaacacaaaaaacacaaaaaaaaaaaaaaacaaaaacaacaaaacacaaa

SEQ ID NO: 56845 - DNA, 1546 bp, Arabidopsis thaliana landsberg
cgcgggaaagctatatatttggttccgacgaactggtggacgcagagcatccgttaacgccgctttggacaattcgaagatttttcgttgaatcgtggtcttctgtgatacccatctcttctcctgggtaatggaaatcaaatcctcttactttcaggaaaaaatatgtcctttcttagaattctctgtgaatgttgctagtagaattgctcataggatagataaaattggatcattacatggaaactgattatatcttagtgaatgctagttgcaattagtgatcatctgagcaagaaaaaacttgacttttaaaccgaaagtgttaggttttgagaattgtcattactttggttttgggttggggattgatcaggttgaggatgaggagaggcttatcgagattattaagcaagcggcaaaggaaggggcaatgtgtttctacactttagcaaatccttctatggcaaaatccgcaaagcaagcttgtgatcagttgggtgtgctttcggttgatattctaggaccaatcatcgaagggattgcgtctcacttaggtgtttctccgtcaggtcttacacgtggagcacctggtagggtcaagactctcaatgatgcatatttcaaaaggattgaagccattgagtttaccattaagcaagatgatgggactttacctgagaacttaagcaaggctgatatagttcttgtcggggtttcccggacagggaagacgcccttgtccacttacattgctcaaaaagggtacaaagttgctaatgtgccgtttgtgatgggcgtggaaccacccaggacgctctttcaggttgaaccgagaaaagtttttggtttgaagatccagctcgttgtactgcaagcgattagaagaacatgggttaaaacgctaggcgtagatacagaggcagagaacaattactcggggattgatcttgttcggaaagaactagatttcgcgtcaaggatctatgagcgaaaccccggatgggcagtgataggtaaacaaaacttaaacaccattctcatttgctactcaaaatgctgtttttttctttccttttaatgctagtaagaaaaaaagttaacaagtaggcagagtattctcatgtgttattcttggggttgtggctgtttcagatgtgacgaataaggcgattgaagaaaccgcggctgtgattctgcggctgtaccatgacggtagagacactagtactacggtaccgcgtatctcaaaacgctactaagcacactcctttgaccgtagagaggatgaaacaccagtgtcgataaagtatcaagtgaataaagtaatatatgtctataataataagttgaataacaaatccaaccgaggcatgatgaatcatatgttttaatcaacgaatgtaagaggatgaaggataacgaaaactaataattgtggctactctgaattcttttattactagtctataaaacaaaagaatatctgtcattagcatttaattgcaacgttgcaatttgggtgtgtttagcaagttcaagaaaa

SEQ ID NO: 56846 - DNA, 585 bp, Arabidopsis thaliana landsberg
gaaggccgaggccgcccagaaggtctgggcattgatgacgaagaggaagaggcccagcgtgagcacggtctccggcagtgtcagcaccaccagcaccggccgcaccaccgcgttgagcagtccgatcaccagcgccgcgagcatggcggaggggaaggaacggacctcgacgccgctgtagagccaggcgacgaacagcagcgccgaggcgctgagcagccacttcgcgatcagcttgagcatgggcggggagcatagcaccccgccccgggcgtcattcgaaggcgaggaagagggcggcgcccaggcccatgagggcgcccggcgcccactggccgcggccgaccgggggctcctgcttcggccggcgcacgtcgacgacgcgtgccgtgccgtgctccgccatcaggttgcgcgtgagctccggcaacggcccgcgtgccaggatgggcgtgacggtgtcgccgcgcgccgtcagtggcggcaccacctggtcgaacagccggtcggcccactaggcccgccagttctcgcagcgccgatggctgacccacttgctgatgcgatgggtcatgcgcggcgcgc

SEQ ID NO: 56847 - DNA, 1609 bp, Arabidopsis thaliana landsberg
aggtaagtatccatttgatccttatttttagagcttatttcagaaaagtaattataactgaaatcaaagaaagtaaactgtcaagatcctcaaaaattgcataacttccaaacgtgaactagccaatgactcccactaatataatttttctagggtaataaaaacagagcaaattaatatccaaccttatagaaacttaattgttatagaagactaaaataaaatatcataccacacattcaaatcccgacacatacaaagtaaaagttggatataagtttactgttagagaaattgtgctgtgcactgatactttctgttatatgagaataaacatgaagctgaatcgcacaaggaacactcattgaagattcctttggtactttgccttttaataactggaataaataaagaaaatatcatcatcatcataaacaaaagcaagatgggcaaaagaagttattttagtttcttttatgtataaaaagaaggaaatcttggtaacttatccgtaaagaaagaagccaacgcgctaaatttgtttagaatatttcaatatgtatgtacttttttgcttttaccaacagaaataggaagtgaaatctttacttactatttgcttataatttcttcatgtcaaatttgaaacaagtttctgacataactcgtcctacaattagtcttgtaacatttttaagctatttgaatgatctcaactaaaatcagctgaatctctagactctaggaatgtaactcatcaaatggacgaatatagtccaaattcacatatcattcatcacagtttgaaagtaattcacttttggaaataagaaccagaagacaagcatcaattgacacacatattataatctctcaaatcagcagaaacacacacaaataattaacacgtataatatatctatgagcaaacaaatcacctatacctatatatttatctcctctataaacccaaactcttcaatcttttgggacgattcacaccggaaaaaaaaaagctgaaaatcgagtaggagctaggaaagaggtgaagaatgtaaatgtgatcatgcgagatgtaaaggaggaccaacttctcggtttctgagtgaaccagcaatctcgtcggcgatggataaacatgttaaaatccagccgctcagagcaaaccaaaccgttttcgtcaaaagcatcgccatttccaaaggcatcgccataatctctcactctctcagttttgtgagctcaattcatttggctgaagagaagaaaaatcactggaaaaattgggagatccaatggtggaatttttacggtaaaggagatgaaatatgaaagaataatcaggcacgtgggacacgagaggatctttccagcaataagacatcgccacgtgtgggttctgttcaccagccgtgtctctttctggccagttaggacagggttaggggacacgtcactgttcgaccaataaaaagagaagatcgcaacccaaactttatcaacccgacccagtggttgattacttggtactatatgttatgcaaattttgatggtgggttattttggttttaaataccaaaataaatgtcatttacgagctagctgaca

SEQ ID NO: 56848 - DNA, 638 bp, Arabidopsis thaliana landsberg
  unsure (1)..(638): unsure at all n locations
gcaaaaaatgttgatgattttagacttatcgtctttggctaaagatattaatacatatctatatatcttatttttttatatggatataatgtctgatcttgcatcaacaattatccaagataattgattaacactaaaattaacagcggttgaaaaactgtatatgttgcaaaccaaattcataaccgagccaactggttgtgatccaatgttagtaggatcattatgaaatcggaggataaaaattcctagtcattcaaagtataataagtgatattatagtttgatactcgaagattgtcttttcgtgtgaatcagatcaagtatatattaatttaataagtgaatctcggacattccttgtttctggtgaaagaaacgaaacgaccataattaaaagcattctttacatattcatataagatgaatgatctaaccaaacttattaaagaagtcgaaaaaattccgaccaaacctatctacgtcggtaatatgcatggcaaatacctacaatttaacctacatattntctcaataagaagtgaatgctaactgaatctatttcggtttctatagttttttatgtcggcacacatataaagaagaatagatgagctatcttttataatgaaatttgt

SEQ ID NO: 56849 - DNA, 525 bp, Arabidopsis thaliana landsberg
gtaactaaacttagaaaaagtagattggtcttacctgagtttgtgaacccatgcttcagttcctcttgttgtacagataacatcaagctgcgtatataaaccacatgtcaatttatctcattctttagattcatatttcaagatgcaattatgcaaatgatttcttatctttgatattaatcaactatataattggtcttcttataaataatgatggtcttacttgtccattatagatggtcacatctacccccgtggcaagaagctcatcgacctgccaaaaaaaaacaatttattttgtattaacgaatcaaactaatttaaatagttccttttttataattaaactaattcaaacggtttatatatttttttaaaaagaattattacgtctttaattacaggtttcataaaagcagacttcattgctgtaaacacatcatgggaattgtctccccatctgttaatttttacagaaccaaaatatgacacatttaacaactaaactttgattatatcaaagtt

SEQ ID NO: 56850 - DNA, 759 bp, Arabidopsis thaliana landsberg
tagatagtaaatttagcaaagaccattgcagcaatgtgtgcaaccttatgtagaactatttagtgatgcggtaagaagatgacaataaaaagaggtgtcaatagttggtggtacaaaacacaaacactagtgacagaaagagtattgtactgccatcattttgaaatttcaatattaatttttctaattaaactctttcaagtgaaactaataaccatgtgttgcatgaaaattcttttcaacgtccgttttcgtttctaaaacgcaggtataaacttttttttttcctttatcctttaattaaactatttgatatttatgtttccgatttgtgttgtttcaaaaaaattcattaatttgtaagtataatataatatacatgttttcaaaatgtatacattttataattttagaaaaagtaattatttcccatgtccgaaatgtaaagcttctacgtatctgtttttgtttccctgcaacataggttgtgccatctcttaccaatcaaaactaatggaatcaccatttttttatgtcaaatcacaaatctgttttttattaatataaattattagcagtaaattttctcatttcaaaaattaataatagcagctgttaaaaataaataaaaatacattctacttttgtagaaataatagataattatttcctcatatttatttttcgacattttttaaaacactaaataatttaaacataacatccaaagaaaagccatatggtattgggtctaatgct

SEQ ID NO: 56851 - DNA, 1107 bp, Arabidopsis thaliana landsberg
tgagtagcatcttcagtgcccctacatctttcaatgtagcttcaaacaagcgaataaatatctagaccattgtttatcactttattcacatcaaaagacatgtgtgttgtttctatttgaatcacaacaaaactttctgtgttagatattttggcataactattatattatatatctcctgatacttttatagtcctacggttaagatcttgaaatcgctcagacgtcgaccattttccagtgcagttgtctgtttatatatgttttagtttgttgtgaaataacacttctcttatatttaaatcctaataatcaaccaattattgtagaaggaaattcatatcttagactcgtttatttgtatttatatcagaaacattgtggtggtggaagcataagtatttttgactggatcaatattaatataattatatatcatgacaatttaaaccctttaattaggcttagttttgtttttaaaataaaatgaaaaaaaaaaaatttggttcgataaacattttgcatttttgaatatatgagttgccttatcatccattcctaaatattggtgataaatatggtaagacatgcttttcttgacaaaatagttatgtgtataaaagcataattttattttcaacattagtttattgttgtgtctactgaaagattcttttaggtgaaagatatatcaaacaattttcatcattatagacattaaaacatttaataagaacaaaaaaaaatcaaaagcagttgtgatttgtgagaactttatatttttaggaagagaaagctaaggaagaatgaagactcctttaaagattctgcatagccatatcaaaagcaaacgaaacaaaaaaacaaacgattaaagggaaaaaaatatcataaaaggtgaaagcatatgaaatatctttaaagatggggtcaaagtcaaacttactaaataagcatgcaaacaaaattttatagaggtcaattgatcctcgtctgagagtttcgacaaacaagagtaattagaattctaattaacttaacgaagccgtatgtggttttactatagtctcgaatgcaaatgcacgttcagctaacgaaccaatacag

SEQ ID NO: 56852 - DNA, 1159 bp, Arabidopsis thaliana landsberg
atatcactgcagctccatgtagatggtctgatcctaggctgaatgagacagaggaaaaacacatcaatatgggaatctcaaaaaaatgtccgaagagttaaagtggggaataaacacctcttggcttccagacatagttgaacttcgagggtcctaataaaaatcaaaacttcactcttgtacctttttacaggctaactccaactaacacacctacaagatcaatatcattataaagcagagaaaaaggcaaaagaagaattcaaattcaaatggatttcagatgaaacaaacataaatcccacaaggtatctatctaactagaccctaatagacgcaagtaaacagtgaatccagagaccaacaaggcccctatagaaaggaagaacaatcaagaagaaaaaaatgaagtcaacgataagattacaaaaaaagtaaatcagaaagtaatatggttagtggagaaaaatctgaaaaagtatccaaaaaaggattgaatccaatacgtaaaaacaagatcgaagctagttacgtaagactcacagagcagagagaagagtaatcaaagaattagaggttcgcaaatctaccgacaaaaacaaaataagtgtgaaagagaataagaaatccagatttagggaagaaagagaaaggtgttaggggagagagaagaatctaccaaaagaaggaagagtgatggagaggtttgagtgataatggatgatgaggatgatgatgcagtttccaggaaaattaaataaaaagtacagtttagatatgaaatatatgaagagaaggctacacagagaaagagagagatgctaaactttgacaagggccacacaactctgcagcagcaactttgcctctttataacacagtttgactcatccaccctttttttttttacacggctttttcaagaattatttataaatattcggatttataaaatcgattcagcgaattataataaaaatttgtataagactgtagtttttcagaatttttgaaaatcattattacatggttatatgtctatatgtttaaatttagtgttctcatttaagttttgctgactaaacagttgtggtccttgtctcaaaacaaaattcattcatttttttgataattatgatgtttttttgttttttttgtc

SEQ ID NO: 56853 - DNA, 841 bp, Arabidopsis thaliana landsberg
acataattgccttttgtgttggtccaattaatttcccctttgagaatttgtttcacctgtgttctgttgtatgtccgatgacgacaatgctacatttttcttgtttattactttcagcggtttcttggataacgtgccaagattaaaatagaaatagttggttgagcacctctcatttcaccaattcaagcaataaattcaaaattagcgattatactgttgatcgactgatcaaaatcagcctcttcaagtcctccatattaatattttactgtcattaaagtaaactaatctagtcttcccaataattaattaccatttctacaagataagcagtgtcaaatagccataggaggtgactgaaccaaatccttgaattgaatatttgatgaatcatctccctgttacaatagcaaacaacataaatattcatggtaaaaatgagataataaatgtatttgagactcaactaactacaacatagccagcacatacaaacgtagatcttgattataaataaaacggttaattcaactaactaaaacaaaagtaaatataaaaagcataatatcatagctagattctgaccaaatctaaggtattataaagattgagtatggccctaattattctaaactagtgtggttgagtgatccaaattttaatgagaccccactagctcaaatctaggcgggtttttaaaactaaaattactgttaatgggttttgcgggtggatccaacatgaccatatttatagaactgacaaaagaaaagaaattaaatatgtgatttttatttttgatatagtttaatatgtgaatgaagcggttggtaagttc

SEQ ID NO: 56854 - DNA, 529 bp, Arabidopsis thaliana landsberg
tttaattagtttgaactggtaagatgccctagtgtgtaggcgctatttaggtaaaagcgggaaaattaccgccaaaactctgatggagtccagtaaaaaataatatgttaagacacaatacatattaatttaaatcggggataagtggatatgtctttgtggatattgattatcatttaaaaataaacgtggactttatattgctacttaattagtaattttatgctacaccctccctgataaccagaatatgtttatctattatgcttagtccattagctatgtagttgtcttaaattttttgatttcccgactatgcataaactacaatataaattagaataaatatcaatgaaaaaacatatatatatatatatatatattaaaagaatacaatatatagtgaaaatatgcgatatggttattgaaaacactgcctaccagaccacatggagttaaactgcaatgttggaaagccacatataacgtcatgatgtattttgcagaaaaaataattagactatatata

SEQ ID NO: 56855 - DNA, 576 bp, Arabidopsis thaliana landsberg
cctgacctgaatcttggccaacgtttgcagttggtggtaacctgattggagctgtccgaagcatgtgatctttgtagttagttcttcattctaattatttgttttctcgtttttgtttgcgtactaaaagtccaagggctctgagatttgtgtacattgcaggagcattttttggtatgtacattggagatgttccggtgtcagagcagacaaaggaggagattggtagaaaagtggtgggaatcataaagagatgctgaaatcaattacttgttagatttccaattgcctctgagttttagaagaaggcaattgggttagatttacgcggtcatgtctagatattgtcaatcaaaatactttgtaagcagcttggaggaagttatgtcttaagttgtattagatagtcttgatttttatgttcttgttcgttatgattgtccaatatgcaaattgtgaaactggttgacaagaaatgagatccaacatttaatattaaaaaatataaaacaaaatttcaaattcaattaatgattacatatgaaacgtttgagaaaatagacatgatttctatga

SEQ ID NO: 56856 - DNA, 571 bp, Arabidopsis thaliana landsberg
  unsure (1)..(571): unsure at all n locations
taggaaggaccaccacagtgatgggcatttaaactaaaaccacacaacaagtaacatccaactcttcagtaccaactctcgtctccatccttccatcaaaaccttaatattattgctcacttttcaaatagtttcaatttttgtctacatcatctcaattttgactattcaagctaattaataacaataaaggcaatgaaatagctttctctcaagggtttctgggtacaattacattattgccttattaaggtgggtggtactagcacaatatagggggtcaaaccagtagaaagattaaaaaaaaatacatatatattaaagagtgaatagtaaaatattatcaccaagagaaaggactagctccttgcaagaacacttcattctccacatcttttaccctttggcacacctgattgcatatctttatcgccatcgcctaccatatgatttcnnnnnnnnnnnnnnnnnnnnnncgtgtatttcttcgatttaagctatatatatatgacttcatcagaaagttntaaagaatctctcaccttgtctgcnnnnnnnnnnnnnnnnnnat

SEQ ID NO: 56857 - DNA, 1189 bp, Arabidopsis thaliana landsberg
atagagttcaaaatctggtgtgacccaacatagaagagctgcaagttatcacaatcaacttttagtcagttccgcagcgagaagattctcatctttcgtgtcaaacatgtgtgcaaattcgaacttactgtagttttcatctcttctatattgagtcttgtggggtcccaatccttttacatgcattgaagcataaagtttctggtatgctcgatatagactgcaacacaactactacatcagtacttttccattccaaatactaatcacttggtttcccatggagtttcatgaattttaccttttctgttgtctgtgactagttactgggggtgagaattccgaggaaatgtattgatctaagtatatactacggtacatgaaatgccaaagtccaaagatacctccggttcccacagatatgtcgggaccaggtgagtcttgttcttgattagtagtagatgatcgacgcctgcggtctattggtacatcttcaacacgcattccaccttccgcgattgatctttgaaccacacttagaatatttgacttgagaagaacagcctcaaggcgtaccctaaccatgtacaagtttatagaactcaataacatgcttattttaagcattttctcatgtaaaaaacacgagtaccttcaagtatgatatagcttttattacctgcaatctttgagatgatggaacgcatctgaacgtgtggtaagcaatattacatatgtatcatcctacaccatcgagtaagttaatatttcacattgtgcactgtggatgaatttaagaagctctttacaagtatttgactcacatcaaagaagtggacataggcatgcaaaaaggcctgagcgttgtatcttggtaggcagattggtgagaaagattctgatgtcctgttagcagtgagaacaagttacacaaacagatgtatggttcccggtgggtaaatggacaaaatatttagcacttgcctgaatgattctgatgacatgacaaaatttgagagtagaagcaagtcatcgggatggagagacgctttctgtgcaccagcaagactgacaacctgcgagtaaacatacctacagtcattacctatgatggatttccaggctgagaaactttgaacttttcggcacgggttttttaccttgtgtctgcacattagtagtgaggata

SEQ ID NO: 56858 - DNA, 595 bp, Arabidopsis thaliana landsberg
tagaatcgataccaataggatttatttgatggggcaatcgcttggtggcggtggaacacttagcgcatttactgattttgcaattaattatcaaatcgcagcagccgtgccgcttgcaccggggtaccgcacttcttctcaagaccctaggcttggaacaaacaatactattacatcagcagagtatgatatgatagctagaagtggtttgccgatttggattgcggtagccgagaatgatggttcaacaggtggcggtggaattgacgaatcggataattttattagacaaataatgattcgtaatccattatgtccaccaaaatattttcgattcgtagatggtggtcacgcaggttcgtggaatcgttcattatattcttccaattggggtgataattatgcttcttcttataacggaaattatcgttatgcgccagcggcaggttcaaatgtaccttggataaatgtttttgattgggtattacaattttctaccgtaggtgatagaaggaagaattacatcaatccgtacgtatttaaagaagtgtaataaacaaataaaaccaattaaatggaagcattattattttta

SEQ ID NO: 56859 - DNA, 833 bp, Arabidopsis thaliana landsberg
aaaggagaaaaaactaaatctcttaaaatgtgtgattttatttaaactatcttatattttgaaacaaataaaagatttggtattttgaaaacaaagtgcagaaaaacttttacattccccgttttttaagaattaattgcgaattttttaattaaattgcttcggtatttacagaattaaactgataaaatatacagattttgttatcacatttcccgaaacctatggcattaaattctaatggaaattttctatatatgtacagtatatcctcacacccaaaatataactcgtttttgatttttccacgaggccaaaacacagcttcactaggtccacatgtgatccgcgacctaaccacattaattcctaactaataactttctctatatatacactcccactaaagccctaaaaaagaccacttcaaattaagcttcccattattgtgacaaaaacaaagctttcgtttttttggttttatcttaaagctttcattttattcttttcgttggtaactaaaatggctaccacaaatgtcctcgccacgagccacgccttcaaattgaatggtgtcagctacttctcctctttttcccgcaaacctaaccactacatgcctcgtcgtcgtttatcacatactactcgtagagtccaaacttcgtgtttttatggtgagacgtcttttgaagctgtaacgtcgttagttacgcctaagacagaaacaagtcgtaacagtgacggaattggaatcgtccgtttcttagaagggaaaagctatcttgttactggtgcaacagggtttctgccaaaggtaagaaataccctaaact

SEQ ID NO: 56860 - DNA, 737 bp, Arabidopsis thaliana landsberg
tcagagtccgatcctttcgccaaaacatcttcacatcggattatattagtgctgtgacttatgagcattttcttgctggctctgcaaccactgctttcacactatcctctgttctttacttagtctctggtcatcttgatgttgagaaacgtctgcttcaagaaattgacgggtttgggaaccgtgatctgatcccgactgctcatgacttacaacacaagtttccatacctcgatcaggtgcttcattagtaacaaacaaaaaccgagaagttgagtttctgtgagagattagaatctttatgaatgttttttatttgcctcctttgtaggtcattaaagaggctatgagattctacatggtttctcctttggttgcaagggaaactgctaaagaagtggagataggaggttatttactcccaaaggtatattcaaacccatcaagcggattagtccatttacagtcagcacttgtaatctattacttaccttgtggttgttgcttaggggacatgggtttggttagcactaggagttctagcaaaggaccctaaaaactttccagaaccggagaagttcaagccggaaagatttgatccgaacggagaagaggagaaacatagacatccatacgctttcatcccattcggtatcggtccacgagcctgtgttggacagagatttgccctgcaagagatcaaactcacattactgcatctctaccgaaattacatt

SEQ ID NO: 56861 - DNA, 433 bp, Arabidopsis thaliana landsberg
taaaattacagttgtgatgattcaagcaacagacttcaaaagaaatggcatactaaattccaacgataaactactgtaactgttataatgatatacaatgttctctagcgggtcaaaggaaaattgtcagttgtggtgagtcctagtaaacactgaaccattaacatgaaatctccaagaaaattcaattggtacagaggtactacaagtactatatcttctcctttctttattccctttaccattcgaataatttgaaatctctaacatgaaatcacaaacaaaagttcaactggcacagagatactccaagtgattcatataatttgcagtgattagatatagaaagatgtttcagtttggtaccagaagtttagcagttatttgattcattccgatgactggcgtaattctcctaaagagctaagtagtg

SEQ ID NO: 56862 - DNA, 848 bp, Arabidopsis thaliana landsberg
aattgccatacttttggagatgcttttcccagtaaagctgttgccaatcagctggtgattccacacggtcaacaaaatcaggccaccgcagcttaaacaacaacttccaagagctaccaagtacatcatttctgcagatgaatttaagttaaatctttctcagtctgtcttctcaattcgaataacaaaacagaaatcaaaagaagaattcatcaaaccttgcacgttttctcccagtaatcaagcagcaatcatctccagattcataactatccaagcaatgaaacggcctataccaatagaaaaatgtaaatgaaataagagttgtatcatcttcatccatataattcgtaaccctaactaaacctttcaatttgtattcaaaacttaaatgaaaccaaagagtgtactgacatgttggtctgaaacttctgcaaagcaagagcaggcaagtgagcgacaatgccatcaagtaactccgatggaagctcgtataaatctggaattggattatcgcctggaattacacaaaacccaaactcaaattcagcatattttggaatcaaattggcgcaacaaaagctttgttagaattactttctagaagctgaattttgagggattggatgcagagaaacgcaagagaaggagctttcgtcatccaaacaaagagaagagagtgccaatcgcaacgcaaccaaaacttcccgctgcagctgctctcggctcgctgtttttttctttccaaagagggaagagcaaataattcgttatgaggtgtctttcataatggagcagctagtatggccaattcataattattcatagataattaaatcttgttgtga

SEQ ID NO: 56863 - DNA, 1023 bp, Arabidopsis thaliana landsberg
  unsure (1)..(1023): unsure at all n locations
acaaaatccaaaatcgaaccaaatcaatcgcagtttcactgattttcaaaataaactaaaatcagagacgaaaaaacacagatcgtaagcataatcacacgaatcatccaaaaactcaatcaaaacaacacaaaaccactcaaaatcaaacgaatctaagccgatctacaatcatcgacttcaacaaaaaaaaacaattcaagataaaaaaaaaatcctcaaatcgcatgagaagaattgaaacaaaacgaaaagaaactgaacatgaacatgaacatgacggacctcttttttcagatcgatcgcaggcaacaagggtaatctaaaagcaaaagctgaccagaaaaaacggaggaaaaggagaagataagatttgcttatagagaaaaccctaagccggcgatgacgacgaagaagaaacagaatcgaagagtcatttatatataatcggcgatattggagagatgatgaagaagaaattcttaagtcggcggttcctgagtttttttcctctttctctaaccaaaaatttgcttggacgaaaagcaaatcatgtgggctttattaaagctacaagtcggtcagtcaacgtcgaaatcttattgggtggtgacttaattgaagaggcggtcaatacacgcagatagatatggtcgaatacaataatggaataatatcatcatgaggagaacaaaaatattacaaataaatgtaacgagggcaacaattataaaattgttgaaattagaaaagtgtgtannnnnnnnnnnnnnnnnnnnnnattgtgaatcgatgaatagactaggggggccattggaatggagatagctatcgacattgaaaaatattttctttattgcgtacaaggtctaacaaagttttagttgtattgcaagtggcaaataaaattttattagttgaggatagtttagaagtttttgaaaaccccatttcccaaagttataagaatatttaataaatatttaaaaattttctccagaaaaatgtttgttaacaaaaaat

SEQ ID NO: 56864 - DNA, 1181 bp, Arabidopsis thaliana landsberg
ccagaaggcattacttccaatggaacactaacactctccaccttaccactcccatcctctgtgataacagcctggtttacagtattgagtttggctccatcatatgcaccgctagttacctgtaaaaaaacgagaagcaagagtttgtggtgcccaatcatcatttcaagatttaagagtacagcctctttaggttcaagatctggagctaacaaaggttgttcagagtaaactaccttaccagttttgcaaaattccctgcggttagaggtgctgaatatccatctataacgatctgaatccaccatataagcaaaagcagcattccgtgaaaaagcagcttaagtaatcggggcgtaaaaggcaacaacagctgcatatataagatcagatttagctctgatacctgtactgtagcactctttctttgatcacctccagcttcagctgaaaaagttgaaccatcagctttctcaatggtgatttccacagttcctcttcctgctaacctacaattccacaaaatatctgtaaattttgcagctaataagaggggattaactcagagagacagaaaaactggattcacctgggatagtttaagtactgctgaggaagtagaaatgacaacccagatgcctgcaataacattctttaacgtcagcaactaattcttgcgcttatgtgtttcatttccctacccataagagatgagtagtgatgtatacctgtaataactccagatccgcaacagtatctagtgatgctgccagcccaagggacactttatcaggatcttgtttcttaatagacgttataagtgcttgtagtccaccctatcaaacaaaggaacataaggtttatacgcgcctatgacaaaaccaaatgaatctaaaacttaaaaccacctgttgtaatcagttgcaaactaagaaaactttacatttaacaaaaccagatcatctttcaccaaacttaaagaaaatattacaggtattacagcccatcaacttgagaacagagttgcggtttaattcccacgtacctttccatcaatcagagttgtatacagttctgagcccttgtcttttaagtctactggtatactagccaagatcttatccttatcatctatagccacctgaaacaatttcgtcaaagcatactatgcttccactatt

SEQ ID NO: 56865 - DNA, 1045 bp, Arabidopsis thaliana landsberg
cggccgaagatgatgatgatgacgatgacgatgaaggagaaaaaggcggtggatgattagcagataccggggtaaaggtttctcctgaagctcggttctcagtcgctgagtttcctctgttcctgccttcttcttcttggtttctatcaccagaccgatgagagcttatgttactctcaataggtggattattatcattttcatcatcacttatcattatcgcatctgcacacaaagatagattcaaaagaaatgtcattgtaaactaaacaacacttgggtacagagatgtctatgtatacctgtcacagcattgttcacattctgattagcctcgttctctccttgaccaataagattatcagtctctccaacccctgagattacagcactttgagtaaccgaagctactacttcagcatcatagagtgacttcaagtaagcacattccttttcaacaacatcaaacttctcagctaactcaaaatacttattctccatcttcactaactcttcttcctctttcttcttccccaacaaaagctcctgattcttcgacttcaactcatcgacaatagcagttctctcactctccattgccttcttcatctcctcaaaagtcttcctaaccttagccttctcccttctctctttcatacattcctcaagcaagcgtttgttactcacttcaagctccttagctttgttctcgtgatgtatcttaatagcctcataagcttcctcagcatgcttaatcctctcctgaagactctcataatctttcaacagagtctcatgattctccttcagaatttcatgctccaaagtcatcgttttctctaaaccaaacatcatcttcttctctgatttgtcctaaacccaaacctgaaacaacatcaaccaatttctacagattattaccaaactcataagcttaatcaaaaattctgcaaaaaccctaaatatccaagctttatgttctctttatgactgaaatgcaacgaagatgagaattaaaccagatttatgagctcagattgtggaa

SEQ ID NO: 56866 - DNA, 329 bp, Arabidopsis thaliana landsberg
ctattataccctataagatactttactaggttgtggaacccattattacaatcttcccagcatcactaaaatcaaacaacccaccaaactttcctttattgttgaactgcaaaaacacaacaaatagactctcagaaggtaatgcagacaaatgttctacacgagacactttcaacaaacacaacttgacactattgttctctgtgttgcctttcacgacttgcttatatatcaacataaaatgacagtacgcctccatatatacatttacattcacaaattattacatcatatgagtatcatagcgtactctatagctactatacaca

SEQ ID NO: 56867 - DNA, 1499 bp, Arabidopsis thaliana landsberg
  unsure (1)..(1499): unsure at all n locations
aatggtactagttgaatttggctgttttgaaaataataatgaattataagtcttgtaaaaatagttaaattagttaaataatttaattataaagttatattttgaatttgaaaatttaaaatattattaaactacgataactacaaaatatggcaaaaaaaacttacaactcatacaaaattaaaggtgaattttgaaagtcttttaaaattatttattcttttttttggaaaatgtaaattctcttataaattaaatgttcaggtaaatttataaatatagaaaatttaaaacaaaacaataattgttgcatggattataacaagagtaatatatgataattaaaaataaaaataaaaaataagagtaatattacacgcaaagccaaaaaataaaaaataaataattcaaaaaaaaccttaaagagagagagggtttatctttagattgagacactgttcgggatccctttcccagtaagcccaccttctctcgtataatccgtagtattcgggtacaacaatgtgtacggtatgttaaccggtccggttcggttcttgaacctcttgtcattgtttcttcgtataatattgttctctatcagctcaagttctttcccaaaccgcttaaacgcctccaaaggctcatcatccgccgtccaattcggtgaatctctctgccctaagtagatctcgtccgttgaatgcatagacaatatctctatgatggagataccaagtagagtctgtaactgcggcgtgatcgtcttcaagaacgctacgtcagcatcttcctccagctcagcgtactcatccgtacccggttcaggcataaaccggcggctgacggtaggacggttagggagaaaaccggcgtaagggtactgtccgaaatttactgctgcgtgaagagcagaggcgatccagatgatgatcgtgcaggtttcgattaggtcgtcgcgggtttgcatggaaggccaccatgactcgtgttgtttgtcgccgtggcctttggttcggagctcggtccaccatgattggatctctgtatccgtttggacggttttgtcattcttgtagtagattgtgcagtactctgtgacccatgttttgatcgctgaccaaatctctaaaccgtcgaccgcaaacgggtaatcttcgatcagaagcttaacgccgttgtcactgtttggatcttcaacagcaactcctctgcaaaaacatgggattgtaaggttacttgttccacaagattcaatgttacttgtgacccaagatacttgatgtataccgtttgaggaggtcttttgggagagcctgctcggtgaaaacccaattcttgtaaattgaagaagacatttccatggcgtatcgactagggaagactgttctctcaagaactccgtctgagtttatgagtacatgacgcgctaatgcgttgatgttcatcagtgtcacggaaatgangatgtacgaagtttaatggatcggggatggacc

SEQ ID NO: 56868 - DNA, 1567 bp, Arabidopsis thaliana landsberg
ttttagacccaaaaagatgataagccagcaacattagtaactacgttcagattttaaccatacagaaacatgcgaccggcatggccccttcttctacgcaattctctttcacctatatcccaaacatacgaacaccattctttgttatcttcttattttttttagttttgtttatttttaacttcttataatccatagaggaaggtattaggagtaacatgtgaccggcatgacccttttatcaaacttaatcacacaaagttgttttatagtcttagttgtttattcttgcaagcatgtcaaacctctgaattttaactaaacaaactgatgtcattggttgtaattataaacaaattaatccacgtcagcctctgaggtactttcaaagattctcactttgtccttcttacaaattaaactcctccttttggttcaatttgctttaaacatgtcactttgtacttataaagattctcactttaggctacatgttgaaatcgcatactagttcttaaatgatcagtgttttcttccaagcatgtcaacttaagtaaatttctcttgtaggttgttagcggacgtgtttcttgtaaagcgagtacacgtggcgagctacgaactaacaaaagattctcattggttagaaactaatttacgtcagcctctgaggttccttataaattaaagactcacttggttcctctaacaaactaaactctttccttggattgtgcttactcccaaaaacacacatttaaacatcttagagagatgtcgatctccgcagctgtgcttagtgggttgggtccttcgttcttgatcagtggaggcaagagaagcggcgttggcggtggagctatgaaagttggccggaagaatgtgatcattgcacctcagcgcaagaagtcatgggtctcagccgccgtgaaaggtgctggtaactcaccgaacgaccccaaatggcttgatgatgcctcgtaagtctttttgtttggacatacttgagatctacatagacatcggtcgaataaaacttttaacatatactctaagatgataaacaattcataaacgatgatatgatttagtttttacgtgatttttagtatagaaatttgatacactatggtttagtaataggttccgcatcacttctaagaaaatttaaacttgttttcatgagattgttttggtatacttatgaaatataacttataaatttggttttgaaactaaacactaaaggatgtaatattccttcttttataagcttaagatgaagttgtttacacaattgtatatgagattaaagttttactaaatacccattttgtattcattgtaataattttgtgtaattgtcacacaaacacacaaataatagagagaaagcttcggggtacgtgaaagagaagggaagtgaagtgggaaacgtgtctgctcaaaagggacaagagcttcaaaatcagatggagagagcaaaagactacatttttgggaaagctggtgaagcgatggactcggtggctgaaaatgcaaacagagcttcggattttgtgaccga

SEQ ID NO: 56869 - DNA, 1016 bp, Arabidopsis thaliana landsberg
caccatccaccatcacaagatttaaatactactaagcccctaaccccccaaaaaataaacatgttaaagctaattctgagtgaaaggctcccaacaaaagactgtagtgcataaaaaactaagtggctaaaaacgcctaacgctgctttttaggatgcatacataacccaaaagcatagagagaaagagagagagagagagaagtggtgttttagttgtggaggtaattgcaggatgctcctttccgacaatgtccattttcgcggaagaacttgcatactctttgtcccttgaagttgttctgctgcccacctgactgcctgttccaaccatacccagaatctccattctggctctgttgttggtttccccagtaaccggcttggttccctcctgaccctccgcttgggatcgctgtctgattttgagttccccaattttgattactgtttccagactgaatcccttgacctggttgcatccatcccgagcccgtagtacccgcttgagcttgaacttgagactgggattgagattgagagtggcctgttgggccccatcctggatttggataagcttgtgtttgtccttggacaggcgcgacccagccagaatgagtgattccttgcacagttgagggaacagaagatccaccccaatttacattcactccagtttgagcaggaccaacccatcccatgtttggatttacagtcccttgaccccagctgctgttctggtttgctggagcctgaggttgtgctgagttttggttgttgttcaccatgttcataccccactgggcctgagcctgagcattcgattggcttggaactgcaaccttccaagaatcagatggaggaaatcctggttgactctgtgaggggagaacactaggagatggggtgccataagacgtagagttattctgagaagagggagtgttgcttcctccatgatctgtctgcatgctcccccagcatttgctttccacctgctggtgttggagaatgaag

SEQ ID NO: 56870 - DNA, 1129 bp, Arabidopsis thaliana landsberg
attttttagaattacgatcaacaaaacgacgtcgttctttagcgtttgttgagattggctaaacgaactcaaggtgtagaggattcgccattcgagcgagggagcttcggacacatctttctcttgttggaggagttcagtatgtgacacgtgtagataagacaagaagatggctcttgaatctgaattttctgtttttttttcaaacttcaaatttttactaacccacatcttgtgtaattgtgtagagtcatagttttttagcggaatagcgtctatgagaaaatctaaccaatccgacactaagaaaataaagcttaggaacataattaattgggatgttaacttctttgttactctatcggtttctcgaaaatcaaaacaacttaagttaagcttcttcaaatgtgataaagagtttgtaaccaacgagtctcgatcattttgtgacacttatgcactgagatggattactccatttcttaagatttaagagtctgattggtaacacaaaactttagctgttagctagagcgataagttgttagctgacgcggtaaactgttataaaataatgcaaaactgtaaaaaaaactgtataaaaaaactgaaaataaaaaaaaattgttacgttttttaaattttttttgtaaatgataattgtcaaaactgtataaactgtaccgttttgataatgagttgccattccaagctttaatcataaaaatgtttttcacgtccaaaaacgttgattgtttgaagagattcagttgtaacatttgattggtaacaatatgaattgatatttggtaccaaagataaaatatatttttactttgaaactgaagcataagtaaaatactaattaacgaatctgacatcatgtgtgaactgggtaataccataaatgattagatccacgagttctcacacagacttacatgtgatggatcacagagtaaactaattatgattaaggaaactaattatattagtgagctatacacagtaggctcacatgggtgcaagctcaactttattaatggtctcacatggacactgtctccttcgattctcttgtcttgtcatactctatcttgtcttccacttggctctggttatatataat

SEQ ID NO: 56871 - DNA, 561 bp, Arabidopsis thaliana landsberg
atccaaaagggggtccctcttcgacgccgatcgggggtcccttttgaacgccgtttgacatttaaggttgctctcagcgaacgcattatcatggcagttcccgcgcctgcccattgagtgcttgagattgtgggcatggaggagccaggttcattcgcgggagataaactgtgagccctgatggagtggatcagaactacgttcttcggctttctgcgccacaccgctatcagcagtgcctggcagaccagatcagcggtctgccgactttgtatctgccaaccaaccaccgtcgtgaatagagatcgatcaccactgagaggtaagcgaagccctcatgcgttctgatgaaggtggtgtctgttacccatgctgcgtcggacgctgacactgcatactggcgatccaacgtattgtcgatcacaactgatggcgtgccacaatagctgtctggacgccgcttatagccaacttgagcttttgatcccgcttgccatgcaaggcgagccacacggttgggacagctctgctcaccctgatcaagcagacatcatgcagatg

SEQ ID NO: 56872 - DNA, 746 bp, Arabidopsis thaliana landsberg
gcaaatccacacatctatttcacaataataattgtatttacattttttttttgtttcaaaaatatattattttaaagggttggtgtaaaaaagcagcttatatcaacccaaaacaaattcattatgcattattaatataccaactatgatgtcataccgaacttcaaacatttttgtgtgaatatgattgattatgcgactaatttctagacacattgacttgtcattgagttgcttgtttaacgatttcctagcatttttgttggtgtctgaccccaaacctagtacttagatccaactgaagattgtcatgtaagcataaggtccgaaggaagatgaatgaacggaaaattaatgacgaaccgaagtccatgctcttactccagcgaggtgaggagttcggtaaagtcaacaacggttcgaaagtgaacaatgggccgagcttcggaaagcgcatgaaaatgataaaagagttcaaataaagacgttaaagcattgaatagaaaatcaaatagacacatttaaaagtattaattgtattcaatagccaataaatgtgaatcatattgtataaatatgaggttgaaaagcacctaaagagagggggcatattttgtatcaagagctaatactatactcttttgttatccacatttacttacatttttaatactatttgctatttgaatttatcttgtattttgatcttgagagttttatcctacaaataattaaatacttaagtg

SEQ ID NO: 56873 - DNA, 1015 bp, Arabidopsis thaliana landsberg
ccatttaataccaaccggagtgatcaccagggtcacactccatggagcacatctccagatagtgaatacagaaccttcctgtcgcaattggtagacatctaaagtcgtccacttctttaggtaacacaggaaggtaagcacaacggagacaaaataaaaaacagaggattgatttatgcagaagtccaatatctctatcacaacaagagcatctaaaaaccaactgagtgatcacacatccataacaacttctccagatataactaccaatcctaaaacaccaaaagtccaaagccaagaaacaaaactaatagatggtgaaagaaacaaaacacagaacccagaaacccttgaatctgattaacaaaaaactaacctgacagtagctgagccatctatctgccaagggaaagtggggttctgatcagagaaagcaccttcaatcaaagggtaatcactaagccagttcgtattctccggagacaccattctcctgattccccggcggctactaaaaatcgtttcttttgaaaacaaagggtcaaatctgaaaaagggaaaggtagagacaatgtgtggaaaaacggaagaaaaaagagatatggtatagtgctaggcatggattctctttctctctcaatcggtttctattatataattttgatctttcattttcatggatgttgtacattattggcccaccaatcatcatcaatccttcagatctcttttaatatatgtcatagttgctcaattatacacctctcatgatgtcattcccagtagctttcccaaatttaactcaaaagtccattctttatgtcaaccaatcaaaaatcccaagtctttagtgatttataagactaagaatttcatcatcataactcgaaaacctagaaaagttaaaatcttgattccataagaaattgaaagcatatgaacattcaattcaattcaaaaaacacagaagatagattctttcttcaccatagatctaatctaaattactcttaaa

SEQ ID NO: 56874 - DNA, 131 bp, Arabidopsis thaliana landsberg
gggccgaccttgaataactcgcgaaagctatttaatattacattacatcttttaacatgcctttgtaagagtacctttgtttattttattaatctgaccttgagtggacccttcttcactgcgtccaatct

SEQ ID NO: 56875 - DNA, 517 bp, Arabidopsis thaliana landsberg
tgaatttcggcccatattgaagctcacacgaatggtttggtttgactttttgacctgtatatgtaatgtgaacgtacaagtacaacaattaaactaaacagcgtgaataaaaaactttatgacaacaactaagaagagaagatagacaaaggggtcttgattctcgaagaagaagagaagacatggcagtatagtattagaaaggaaagagaatcagctaatgagtctgcctccacagacgaaagtgacgatacatgactcatccacaaagactgtatagttatgaattggtttggctagcaatggcggaagccggaccagaaggtcgcacacgcactcgttgtccatttgcttcaaccacttgcagcactcttgttgcgcaaacgtctcttctctgtgtcgatgatggtggcggtggtggtggcggtggtgtcgacggcggtgttgatcgtggctgatgtcgtcattgtcgtggtggtcggcgtcatgattatggtcgtgattgtagtcattgtga

SEQ ID NO: 56876 - DNA, 922 bp, Arabidopsis thaliana landsberg
agctcaaaagtcacacgttgtcaataacagagtgtgctcaaggacgtctatcatcaagcacattagttcaacattagcgtatcttgagaacaaaaattccaatatcttcaaaccaacatgaagttcatgaacattgtgaattgcttgaagaagagagatcatgaaactcaaagattgtttcgcaagaaaaatcttacactaaaaaaaacgaatttagttttgatctgcaatgatttgacgactagagtcttatgaatatggttttgaatatatgaacaagtgaggttacaattagagaacaaagaacgtgaacttagtatgagaggatcagtgtaaagataatccaaacactagactctgcaatcttcttcacagatagagcattgcgtttcaacttaattatagaagggcttttggaacttcccatgaacccaaactcggtacatgtccttaccctttctccggtttactgctttgacacaacaatattcaagctcaacctatacacgagaatcaaaatatcataagatttgttattcattcaatcacaacaaagaatagaaaaactgaaaaaagaaagtttacctcaatgaatccagcatcagtaaatagtttcctggcagtgtcgagacaaaagaaataggaaagggttccatcagaccgcacatattccctaaatcctacacgtttctctggctcaaaccgtagcatagtcatgtcatataatcctgtcaaggtgtttagcctattagtttctctttatttgtaaacatatgtgatacagctcttaatagtgaccttaccataatctctaaataagagcagaccaccaggtttcagcacagcaaagcattccttgatagctctcggcattctttctttaagcactgccgacaatgtaaatatctgacataacataaaa

SEQ ID NO: 56877 - DNA, 290 bp, Arabidopsis thaliana landsberg
ttttttgggaggattgatttttttcaataaaagaatggttggtgcgtgtaactatatttcatttattggtgttcaaataccatggttagcggtagtgattctaatcaaattgagataaagtgcatgcagtggaaatggctggaatacacgatttgtggtggatacacattgatttagtcgtctttataaaaaagtagacacattgaacaaaatttcgtgccggattgatccggattatttggtaggaatggctgggctcacaacttgtgattatatcagattgtttaagc

SEQ ID NO: 56878 - DNA, 728 bp, Arabidopsis thaliana landsberg
attagggtttacatacagatcactacaagcatccggctttgctgctagtggacggtgtttcgtccatctgcgcgcttgatttccgaatggatgagtggggagtggacgtggccttgactggctctcagaaagccttatctcttccaacaggacttggtattgtctgcgccagtcctaaagctttggaagctaccaaaacttctaaatctctcaaagtattctttgactggaatgactaccttaagttttacaagctaggaacctattggccatacacaccttccattcaacttctctacggtcttagagctgctcttgatcttatctttgaggaaggacttgagaacatcatcgcccgccatgctcgtttgggaaaggccaccaggtaaatgaatcatataaaatgaatacacttagtcctcttcgtaatcttgattcttactagtacattgactttggaaaacattatagctagagtttgattgttaatgatcatgtacataggcttgcggtggaagcatgggggctgaaaaactgcacacagaaggaggaatggataagtaacacagtgacagcagttatggtgcctccgcatatagacggttcggagattgtgagaagggcatggcagaggtacaacttaagtcttggtcttggtctcaacaaagtggctggaaaggttttcagaattggacacctaggaaatgtgaatgaggtacatatcgaga

SEQ ID NO: 56879 - DNA, 155 bp, Arabidopsis thaliana landsberg
ttactttcttacaggaatcgaatgcctccgtcaggggaacggggacttcacactaacaatacgtgcacctgaatcatgaccttcttctcatacctttaatgctgatttaccggggatcaccatgtagagttaccatacatcatgcggagtactgt

SEQ ID NO: 56880 - DNA, 1161 bp, Arabidopsis thaliana landsberg
tgcctctctatgccattgtaactcaggtaattaagtccatatatgtaacaccattttaaattaaatcgttttacattagtatacaaattagtattgttagtgtaacctagctagtgatctgaatttgattttggatgcatgtgtgtatagatggggtcaagctacaagagagcaatcttagaagaacaactagcaaatgtgttaaggcactggcaaggtatggttaaagaaaagaggaagactaaccaaacgccagaaacctacaacaacagtaacaataacaatggtgatattgattctggcgaaagtccagttcagacagaagttgcttctgagtttagattttcgggtagacaatcgccgattttacaagagatacagatacaagagaaaactgaaaggtgatcagattgatggaaaatgagaaagagattgttagtattattgttaagaatgtttagagttacctttactaattatcgacgaatcaaatgacaaaatactaactttaaccagaagtgtaagtgttatattggcatgatggtatctcgataacttgtcacgcaatatgattaatattgatattgtttctagaggaaagtaacagaagttctgaaacatcaaagaattgcttgaagctatttttcttattgtgaggttattaaggacactgtgaattatatatacttgtacagaatgataatgtcattggcaaagcagaaaacagacttatctctattcttctttgaaaagctcgcgaccgatgacaatccttctgatctcgcttgtccctgcaccgatttcatatagctttgcatctcttagaaggcgtcctgttgcatattcgtttatgtatccatttccgcctaaacattgtatcgcctgcaacatcaaaccaaatcttttagtcttaaaggaaaggtaactaggtgatcaatatgtgtagttatgatcccttcggaggtttgctttgctggtaaccattagaaagacaagaggcaacgcttaaaactggtttcgggtttgatctagctttatgagctagtgtcacagtaactttaagtatgaaggaaaataagggtacttgacctgtaaagcgacctgcgttgctctttcggccgcacaaaaatagttccggggcagtcctagacaataagcaaa

SEQ ID NO: 56881 - DNA, 1058 bp, Arabidopsis thaliana landsberg
gcaaatgcatccatgcttgatgacaaaatatcaaaattatatatataaaaaatagtttccttccttcacaattatccactatagggtttatatatactatatactctttaattaattcacagatagttgtaccatttgaaaagggtttaattttatgatagttacgttaacttagtcgtttttattctatgcattaatttttagaaaattgatctccaatgcagtacatgattacatcgtaatttaatattttcccatagcttctaataatattacaacggagggtttaaattcaaaattttaaagattttaatcgtcgacatgtgaaaatgtagtattaggagtgtgtttatatatcccatgtacacatcacgagttctcgtatgagtatgtgttggttcttacattaatcaatttatcacgatcacgcattaagaaggcgacacattattatattgtagacattgaatacttgtaacgtcctttttaaaaatatattgacaaatatgtcaccaaacccaaaagcaacctacatatgttgtgtagttgagcaaaactatcattggtgagtttgttcacctataccctaacaatctcaaatctaaaaccctaattactcatccctatactctattgtatcacaaaaataggattctataattttatacacgcacatatactttgtcaaagcgtatcataaaaaaatgaaataaaaatcaacgaaataacgtgatatggctagtaatatagtacgtagtcttacgacaatagtttaacttatacgtgaaaaagtgggataacatgagttttcatatttttgtcatcaaatgatatgaaatagaataaccgaacatatatcattttttcactaattgagaagaagagaattagagactatcgactcgtacgagtggtgaaacccctgtcattttgccgttatacaatctactgaccatgtccatgactaataatacatctatcaacaaccatcatgtcccttgaaccgacaccgaattacaaaacccttaacttaatatctttcaaaacatgcaattaat

SEQ ID NO: 56882 - DNA, 199 bp, Arabidopsis thaliana landsberg
  unsure (1)..(199): unsure at all n locations
caacaacccagggggacgcgcaccaaaaacaccacaaagcggcaacccaccaccgcgaaagcccaccngacaccgccacgcagcaccccacgaaaacagccacacacgaggccacccaaagcccgcacaccacacagaagggagccncccaaggagacaaccaccgaaccaaagacccgacaaaaagccgagacggccc

SEQ ID NO: 56883 - DNA, 534 bp, Arabidopsis thaliana landsberg
  unsure (1)..(534): unsure at all n locations
gcttgccgtgaagtatacgtttttgcagatagatctagttttgttttgttttagttgggcacttgggctagagtgggtgggctacaactaattggaaagtcagagaataaagaatcaaacgttccaattttatttttatttttataataattccaaaaacatccatttcaatttctggaagtatgaacactgtctttacgtactgaaagaaaagaatcagaatattggataaggctgctttgtttattttttttctaaatataatatttgaaaaaacagactttaaagtagttgtatagtgtatatattatgaacgttttaatctttgccacaattgttggttattgtaagattctttaccttaaagcatcgaactttgtggcttatgtgttcccatatgtcaacaacggacctctatcgtncacaatacacacaaatgcagcataagttatttgaattatcgccggaataaagctctataattatttgatttgtttttttttttgggaatttctcgcagggatacattttaaa

SEQ ID NO: 56884 - DNA, 465 bp, Arabidopsis thaliana landsberg
gaacacctaatgaatgtgacactgctctgagatcgaagtttacttcccaacccataatgttaaggctgggccggacccgactcagtccttcgtccgctcctcctttcacttcagctatcctcaactttttcctgaattctccaactttactcccaaatcgtttctcgtaactctcaactttatttccatcaccggagccgagagattccgaaacagctgtgcaaaagcatctccggcgagaattggccggaaaagcatcgaagggagggagaacacggcggcgtagaggacggaagagagaataagaagggttagaaatggtgaagaatgataagaagcggagagtagagttttgagttagacggagagatgtcgccggcagaaacgtggccgccattgtaatcgaatcgttcactgttttaggattgcgcgagtcttcttcttatattggaacatccacccgac

SEQ ID NO: 56885 - DNA, 452 bp, Arabidopsis thaliana landsberg
  unsure (1)..(452): unsure at all n locations
aaaaaagaaaaanaaaaaaaaaaaaaaaaaaaaatcagaaaaaaaaaaaaaaaaaaaaaaaaaaaaaaaaaaaaaaaaaaaaaaacaaaaaaacaaaaaaaaaaaaaaaaaaaacaaaaaaaaaaacaaaaaaaacaaaaaccaaaaaacaaaaaacaaaaaaaaaacactaaaaaaaaaacaaaaaaaacaaaaaaaaaaaaaaacaaaaaaaaaaaaaaaaaaaaaaaccaaacacaacaaaaaaaaaaaaacaaaaaacaacaaaaacccaaacaaaaaaaaaaaactcaatcaaaaaacaaaaaaaaaaccaaaaaaaaacaaaaaaaaataaaacaaacacacaaaaaacacaaaaaaaaaaaaacaaaccaaaaaaaaaaaaaacaaatataaaaaacaactaatacaaaaaaacaaaaaacaaacaccaaaaaacaacacaaaaa

SEQ ID NO: 56886 - DNA, 633 bp, Arabidopsis thaliana landsberg
  unsure (1)..(633): unsure at all n locations
ataacctgccgggttaacaagtatggtttggtaccaattaattaattgattaaaagtttcaaattcaataaaaataggacatgtggctgattatcgaatttgattcataaatagaggaatattttaaaacgattattgaatagaggagattggtcactttaactcctcatagtagtaataattttctgatttcactgaatccaagtaaatgcctagaggaacaacannnnnnnnnnnnnnnnnnnnnnnnnnnnnnccgaagcacgaggcactgtaacggtccaaaaattccagctggattgcataactactcttaaaggcgcactctaacctactcctacttcactctactgttaacctacgcctctgtcagcgtactctagcatgacagttataatttcatcggcggcgaggttttattcgattttatctgcctttcgatcagttataacagaaacgcgactcgcaatattttaattggaattaaacaaatcgacatgcgatgcgacgaataaaaattaagattgcgattgctagaagtcggcggttttccggtgagaagtccggcgacggggaagtgatttcgtcgtgaagctttccgtctcttgtaggtttcgtacactactacggatg

SEQ ID NO: 56887 - DNA, 149 bp, Arabidopsis thaliana landsberg
tcaacaagaagataaaagaatattgcaatgagtatattagccgccaactgttaacctttacctaacaacatgtaccatcctgagataaaaactataacacacatttcctgaatctgtagtcaaaaaaaaaatcaagcggaaaacatcag

SEQ ID NO: 56888 - DNA, 1407 bp, Arabidopsis thaliana landsberg
agaatgagttcagtactctgtgcgtgcgtgtctgtttgtgttttttcagagagtcatgccaagctcatggttcctcctcttgcgattttgggtgagtcaatcaggaaaatccatagtcagaaaaataaagtcattacgcaccaatatgtgatcttcattgactgttttgacgtttcgattttcatcttccactcatttgctttttaatagctgagagttgatggtgtgcttatgagattgagagagacgagaatgcattataggtttggcgaagatgaggcaccaactgttcttcgtgaaaactgttggagagaagcaacatttcagtctctatctgcggttagttttcttcacttttaggacagattactagatattgttaccatttccaatctttgttcttattcaaatccgtctctttcccatcagcaagcaaataaccacaatctttttgttacaagacgatgacatattgcaatgtttctatgttagtgaatacagaaggtcccgtgatttaactcttgaatatgtatatatatgcagaaagggtatccagttgacttagcagtctggagcgacccgagctccatcagtcagaggcttccagtgattaagcatacgacacagaaactgaagatccctcgtaaagtttaagctgtttataaagttgcaaattatatctaaaagagcgtaccgatgagctttctttacagccaaacaaactacttactattgaatttgttaatgtaaggagttactccactgacttattgtggtggtttcatatgaacattcaaacccttttcacgttgttcttacactcttattgttccctaccttgttcccaccataattccccctcactgttgaatttctataattagtgtatacacaataacgcagtgactcgtatgcataagttcaaatgttgtagttatttaaaagcctgcggccaattatcacactttggaagagacggtgactctcgaactcttttcactataagaaagttttctttaaattcctttcaggaaacccgaagggagttcataacattataaatacaacgatgaaacaatggttcttcaagaatttgctgaatctaccctcaagtatttaaaaccattgggctaaacaacaagaaatatgaagagaaatccagtgatattctaaaactggaaattgacaaaagcgaaggaagatcgataataatgtatatagtttttggttcctaatggaacacaaaacaaccaatgagttcttcttggtacaccccttttctcaagtctccaactgcttcaagataactgatgcatccactttgtgcattcaagtacctgccatcatcaagtcacaggtaaagctttgagaacaaaaaacagatcttcagaccaaacttgtacagac

SEQ ID NO: 56889 - DNA, 271 bp, Arabidopsis thaliana landsberg
  unsure (1)..(271): unsure at all n locations
ccacagacccggaccacaccctcntgaccattccctctcaatactcttggaatagccgacttctgaactacgtcccctctgactgtaatgatacactttgaaaccccaaatcttcaaacaatcgacttgatgaaagcaacaacagcaccttgcgtgatcttgaccacatacctagcctnnnnnnnnnnnnnnnnnttgtccatagcgactaaaaggaaacagtaccctcccacttccttgttgaattgtcccaggaaatccaccccccata

SEQ ID NO: 56890 - DNA, 416 bp, Arabidopsis thaliana landsberg
tattcatatctataaagctactcggttataaactactaacatgttcgttttttcacttttttttgtaataagatatttaaaccgaagttaaataaaacggaaatttctgtactcttgaacttattataatgaaagaagagtgaagttagataattcatattttaggaggtcttatttatgtattttgataaaaggacaaaagacatctaataaaaatgcatcaaaattgttaatgttttctctagaagatggtaaagtagattttaggttggcgattataaaagccgtacgttctcccgccataattatctatagtaattttctggtgtagttaattagtactcagtgttatcattaagactcaattgatctgtaagaaacgaatgcctagggctagaagcatatatacacttaac

SEQ ID NO: 56891 - DNA, 489 bp, Arabidopsis thaliana landsberg
tctccctcatctaatcccgcaccgtggcgccgcgaagttagccgcgcccgtaccttcggctgcgtcagcgactttgccaagctgtgggaagccgggttcgcgcggggagcgtcgttcgagaactcggtggtgttcgacgagacccatttgctgaatgccgaagggttgcgctacgccgactaatgcgcccgccacaaggtgctcgacgtgatcggcgatctggcgctggccgggttaccgctggttgcctcgttccgctcggtacgcggtggccacaagctcaatcatgcggtgctgaccgcgctgctggctgaccgcagcgcatggcgattggtcgaagcagagcgcgcgcgtcgttccagtgtcgcggatgccgtggacggcatggtcggtggtatggttgccccggcctatgggccggatgtgacctgataccgagatttttcgactcaagttcttctcggatcgactgtctctgacaggatccat

SEQ ID NO: 56892 - DNA, 462 bp, Arabidopsis thaliana landsberg
tataaacgtgttatataaagtaatttctgaacaattttgtgataataaaacaaaaattgtatatttgtcgctttagaaacataataataactgtggaataagttttttcataggcattttcaatcgttaaagttagagacgcagtaattggaatatgatgatgaagtatttttacaaatatcagacgacaataatgaataattttgataaataagtattggttttttttggaattgggttagaaaaatcgagaattcttgattttttttttaagacataaacgtttaggattgcaagaaattatataaatgaatagatataaattatttttttttaaagacatttttacatatgaaatattttatgactatgtttaatagaatataacttgttggagtaaccattttgaaataaaaagtattaaagccagtgggttattataacaaaaagaaaaaggaaaaa

SEQ ID NO: 56893 - DNA, 589 bp, Arabidopsis thaliana landsberg
ttcctttgatatttccaataagttctttgctactgctattgagttttgcaaaaaaaaaaaagatttcaacttcataacctattgaatcgaaagtcaaaacatattatatgggtgaaatctcagttcaaaacagatattctacaggtgaaatctctcataagttaaagctacataagagtcccaaaaccccctttttttttaatatgtatctgtattaaaagcacaaagcggaagctatcaatagatcagttttttaacaatggaaactaatctctctctgtgctgcctcatttctctgctgaatgtatcaagtttcaaagccaagaaaatatctatctgtgtatgtcttcactcttcaccaaccctactcttgtggcggtgttagaactgtacaacaaacaaatatttaatcagtccacggattgataaaaaagttaatggcatagagaagcactatttaaaagacagtcaacatcaaaagtaagatgatcagtaagacgaagatgggaggcagacagatgaggaaacattgatggacagatgcaaacgcaaattctatgatatatgtgcagatggcaaaaggatattt

SEQ ID NO: 56894 - DNA, 252 bp, Arabidopsis thaliana landsberg
  unsure (1)..(252): unsure at all n locations
ccgcggaccacaccggaaagcacaacaggaacggcacaagnnggccaacccgcaacccggnngnaagaacacaggacacnagcaacangcccancaaccacacagcncnngaacggnggnagaaacgnancagccacaaaccgnnggnnnaccnaanccaacanaacacaaaaaacagaangaaacaaagaaangcacncagcgngacaaaaaacaaaagnnacaaaacanncaaagaanccaaaaaaaaaa

SEQ ID NO: 56895 - DNA, 1225 bp, Arabidopsis thaliana landsberg
ttttgcgtgggtttcttatcactccaggaactatttccgtctcagatggagattttgaaagctatgataggaccataaaagaaatatttatcagactgcgacgatcattacaaaatcatattatttgacatttcaaaagattttaaacaaaagaggaaatagagaacgccgtatcaataaagttaataaacagagatgtggttaggatttattctcagtaatgaattcaaagacttcttgaagtaataccaaatccaaactagatcaagtaacttacaaccacaatgtcaccagcatttcttttggttggctcctcgtcatcaccacgtgatgcatttagatccttgcttcttgatgataaaccaaataaaaaaagattacgagcatctctcttcttctgcaaatgtaccgtctcttcagcagccgcaatttccattactcccctgcgagatttgttaagacggaaaagcctagcctcatattcctggaatgattttttgatacatgatgatgtgacagctaatattaatatcgatttaagttcatataagtgcagaagcaaaaaagagcaaacctggaatagttcatctagctcgcaatgaatacacggggggccatcactattcttattgcaatacttgcagttgctaatacgctcaatatcctccaactttggtttctccatagtctgatcaatttctagaatcctatctatcgctttctttctagatctctccagcatatccatacacgtctgcagatgaaatttcatgccatgtatagttctaaatctggaataaggaatttgcaagttagttcataacgtactcaagttatgtgctcctagaatactgtctgcttacaaatcaggaaacatctgagattagattgaatataatgatctattgctaagactttcactacatatgatactgaaattatagggtaatcaatctagtcttttaatgaagctaaccagtctcttaggtcacttcttctaataactttgcggacacatgtagaaaatatgccccatatcacagacaaatttgtgactaaaagctgagaaagtactctggcaaaaacaaagctcacaaaactgcaaatttttaagcactaaccgataactctctctggaggagcttgaattgtttaagtttccatggagggcctcttcaatctttcttgtcaactcgctagagaagtctttattctgttcagtaag

SEQ ID NO: 56896 - DNA, 1587 bp, Arabidopsis thaliana landsberg
taaacagtcttctcccaatgaacttagcagagctaatcgactcaggactacataaaacattccaaggactacgaagattcaactttaatggttcttcctttctccatcgctttgactgacattttctcgattcaagaaactgtgcatcttcatcagacgtaacatttgactctgcaggtagattgttcaaccgctgattgaactcatcaaaactttcggtgttaagaaacttaggcatcaagtcccttgtccttttacgcggtggagccatcagattatgttccctgcacaatgcaaaacagagagatattagaaaaaaaaaaatcaccaaacttgaaaaagacaccgaagaagaaggaattaaaaattgtcaataaagtttgaaacttgcacatacaccaaatcaattttgttttagcttgttgctcaagtcatacactaaatgttggattaagagtcttcttacacaaaaaaatcaacagatccaccttaaaactaatcgatcgctttcacaatctaagcttattcaacactctgcgatctccaaaatccaaatttttaagttcttcaaaaatttaaaaattttgatttttccaacgaaatccccaaaattgattgcatcacgatcgcgaaaaaccataatttcgtgatgatactcgacaaacgaagcatgacgaaaccctaattagctacgtcagctacaattcaacacctgatcttaaagacaattacacgaattgctcgacgaagaacccaaaatcaaaaccctaatcgagtaaagaagaagcagacaggacgaagaagaaaagtgaaacctttttccttctatgcgtcagacaaaagaaagatagttgaaagagaaagcctctgacttcgttgctctctgttgtttaccttaattagggtttgagagatttatttaatggtcagatttaggattgctcttagatatatagcatttttttcgtaataatgtaataatactcaaggctttttattttgtaatgttaatataaaaaaagagttttctatttaggtgattttttctgtttattctgttaattttaatatttgattcggtaaaaccgttataacacgaatttgcgcgggtattaataagatatatagttcgttattcgtaataaaaaaataaatctcaaattttttatggaactaaatttatagataagaattataataaataatttcgactgaatttaccaattataagttgatatatatgcgaaataaatatatgcttatgttataatttgttatcgaaagttctgtatactaactttgtaatctcgatttgatatcaatagatttagctagaaaaaaaaaaattattcttttccaaattatctgttttaagtttattaaatggatacgaagtgtttcgataatttatggtgtgaagcataaatggagctcgaagcataaatgaagtttgaattatgttacttattagtagtcgatttccataatccataccaaatggtggatatgaaaacatggagagacaagattgcagattaattaggaacatattaccaaaacgtagttattattactggacatataacg

SEQ ID NO: 56897 - DNA, 590 bp, Arabidopsis thaliana landsberg
aacaaggcatgcttggcctctatacaagttgtaaacaattgttttttaagacctgagggcttgattctctgttgttttctttcttaatttgtctattactgaaagtgaaggagtttgaaattttgggttttaatctgtccaatcgttgttctcatatctatcagttctagtcaatagatatctggtttctatgttagtaatattgattctttaaagtcggaaaattaaatcctagacgctgaagcgttggagcaaacattcgagattgtttggactgcttaagaactgcggctaatgcttaattgatatcttaacaaggcttgagcctcagggtagtggtgtattgagcgtattaccaagtttgatcctttgtttctcgctgttacgcgagatagtaaaattgtaacccttgagatggctttgttcagaaacgggttaactagactagttggcccaatatacatatttacctcagcttgattaaatgcccgtgaactgaacttgaagatctgagaacttaacactataagacccgatggcatgaaacattatcagcttttggattattttgtcataaattaaagcaacat

SEQ ID NO: 56898 - DNA, 1321 bp, Arabidopsis thaliana landsberg
  unsure (1)..(1321): unsure at all n locations
gacggacatataaataaccgttaatgcaattacaaccatcaattaaaataatcaagatacataatcagtatcacaacccccacaaatacatctattttctagtaaaatacacaaatacacccacctaatctcctttaaaaagtcatcataatttctaaaaaattagtaagatgactttattttggagaatttttaatagataaatgatgataaattaatagggtttctggccgatgtagttaccgggaggatcatagttacaagtcatgaagatcccaccattgtcgcacaccacacgtgcacatccgaccctcctagtgctcttccacacaatctgtgtgtaatgaccacacatctgaccagcgtcgcacgtgttggagccgtaatgataaaacctcttctcgctggcccatgcaaccaccgcgtcggccggagaccagttggcgccgtatccccagtagatgttctcgccgagattaaactctccgtttgagacagagtgtctcaaagcacaatctccccttctttgattagcccacccttgggcgtagttctggagtctgcggtcccatatcaaaggaggttcgaatcttgcggcacggaccaggttgtgtcggaacaagaactgcaaggagtcgtggtcacatcccggacacaaattcttacagattcggaacacctgaccaagtgttgcggatttggttattaatgagttggttattgataaagaaacggcgacattaagggcacctaagagtaatattactcgtaaataggatgagctcatcctctctcttttctgagattatattgttttgtaggtgctaatggattcggaggttcaagtgtgttatttaaatatacagagaaaaagaaggaaacgataaactgtgtaattggaaatgtatggatacaaatttgagggtttttttagcggctctgtctaattatttagcggctctggcagattgtaaattttagaaagaaaaagaaaaggagattgatgataattatggattgtattattttattggagagatatgatatgattgtgtaatgtgtctatgatatgattgctttatgtgttgacccgtgaaaccctaatgttggacgtattagataggcggatatttgataatggtgggtcgtcacggaaaacgccaataagtcagcatgcttgccaacccatattggcactcacaactcacaacattatggccatcaatttactccatgcaatgatataaaatactatggaagataaatcanatagttagggatgagattaagaaagaagaaggacgannaaaacgaatgaatt

SEQ ID NO: 56899 - DNA, 550 bp, Arabidopsis thaliana landsberg
cagttatcgattccgtcgagctgactgcctttatcgagactttgcccgacggccttgataccattgtctctttacgcggcgcgagcctttccggcgggcagaagcagcgcattatgctggcccgcgcattggccatgaacccgaaagtactcttgctcgacgattttacggcgcgggtcgacaataccactgaaaagaagatcctggcgaacgtggaacggaactatccgggtatcacattgatttcggtgacgcagaaaatcgcggtcatcgagcattacgaccagattgtagtgctgatggagggcgagctgatcggctgcggcacacacgacgagctgatgctcacaagtccggaatacgtgcagattttcaactcgcaacaaagtacgagcaactatgaactacgatcttaacaaaatttcggaagagcagcagaagaccttcacgttgaaggcgctcaggaagttgctgaaattgatcgcgcatgagcggtgcaacctggccctggcgttgggtgctattacattgaatacggccgttaacctgt

SEQ ID NO: 56900 - DNA, 184 bp, Arabidopsis thaliana landsberg
aaaacactgaaccaaatactaataccctataaatctattataacacgacaactagcatgctttatcgactttgaacaccgacgaatcgttacacacttatcaaactgcttctaacactaatcgtctctcactatattgatgccaaacaacacatagggcaaatcaaaagaaatggcggtagaaa

SEQ ID NO: 56901 - DNA, 564 bp, Arabidopsis thaliana landsberg
ttacgctataactcttataccctcccccaacactttattttattttttttgtttctcatatcttctttttagtagagagattcgaaaaaaattcttacttttttccttttgattcatagattttttttataaattgcttcttcttctgagaaagttttgagacaagcttggcgacaagaagatgtgggtttgaggtaacaaaaataaaaatctcatttttataaactctgttttaatttcaatttcatctgcttaattctccctagattaaagcttggttttttttgtaaatttctatttggtacaatcttgtcctaagatttttgcagattctttgttatctaactctagatttccaactttgattactcaagatcctattttgactcgtcggcgttagaactcatcttgtttgagtcaaaaccccttagctttatatatagatagtgttatcacttttacaaattgctttgtgtctgactctttgatgaatctgaagctactctcacaatgggttttaactagatagagctcatggagcttaagtttctttttttatggagg

SEQ ID NO: 56902 - DNA, 465 bp, Arabidopsis thaliana landsberg
  unsure (1)..(465): unsure at all n locations
tgtttgcctttacatttcttacatctgaccatttatttgatctggtagcctgatgttgcaacttannnnnnnnnnnnnnnnnnnnnnnnnnnnnnncctaccgatgattggttcacccatggcaaactctcccccaagtgagtctatttcttgatgctcttcttcaaacaaatttgtttataatatcctcaaagactgaaactgtttgatttagtgcaaggtaactggccgctgaacagtcccgtggaaggtagtccgcttcaaagtgtacttagcaagtcacctgtttttggcttaagtcctacaaggaacggccacttgtctggtttggcttctgctctaaattcacaaggaccaagctcgaagcttgcacccattggcaggggtcaaattggtagcaacggcttccaacagtcatcacatttattccaagagcctaagatggataataagtacacaggaaat

SEQ ID NO: 56903 - DNA, 501 bp, Arabidopsis thaliana landsberg
ggagatacctgggatgggccacttattattgggaggggggagcatataccagtggggagcttctgcacctgctttcagctttttcagatataacagagcagttgagcaaagaaaacaggtggacacgccaggaacagcaggtggagctgggtgcagggaatgtgggcgtttcattaccaggttgaggtgttacagcttactgagtcaacctatatacaattgggggtaaacttgagaacgcttaaaggtagtctcttttcactctttaggacagcacccaagcgctttcatttcagtctgtggtgcccctacaggatctaaaccacagtccacgccttgcccctgagcaatgccaccctggacacctttccagggaacggcatcatttgggataactgcaagcagaaagcctatggcaggattaggagtggcaaacctgttgggacatgagaaaggaggacttggcatactaatccacttttttagaagaaaacattactg

SEQ ID NO: 56904 - DNA, 355 bp, Arabidopsis thaliana landsberg
  unsure (1)..(355): unsure at all n locations
tatttctatttttggttatgagttttattacatggtttggttggtggcataacatgatttttggggaaacttttcccaaaaaaaaaaaaaaaaaactcggtgtaacgcgacaagatccgactcatattccaaaccatactacacgatttattggaatcaaaattcttatagggaaagccatttagatgaagtgttaattacatggctaaaggaaattaatcagcttaattntattgactagcacaatattataaaagagattacttgaaattaggtagctagttattgtatcgtattaacccatcacgaacgaacccatggtataaaaaataaccttaatcctttatccgaaaaa

SEQ ID NO: 56905 - DNA, 170 bp, Arabidopsis thaliana landsberg
  unsure (1)..(170): unsure at all n locations
caaaaaccccgagggcgatcaaacgaatcactcaccaacaaccccggtttaacctcgaaccaccggaacaaacgccgaccagggggacatgagccgcccgaccacgcgcacaccggagcggaagaacaancaagaacccaagcacaaaccncaacgcgggcacgcaaccc

SEQ ID NO: 56906 - DNA, 597 bp, Arabidopsis thaliana landsberg
ctggattgtggattacacgcacgcattcgaatcaaaacttgcttataatcaaatagttacaatctccaactcctaacaagatacgaacaaacaccatgcgagattgaataagaagaaaaacgaaaagtcaaactattcacaaagaaaaagtaaaactcgatcggggaagatgacaaatttcgcgaaaggatcaaagaaacttacatcaacaaaacaacaaatcagagagattttgattttagctctcgcttcgaattcgaactgttgcttacacgcattcacttaaaacggaatttttttaattaaaagatctcaaaagggagagcaaaaacggattacgaactaataacgttttttgggcaaagcgtattttatcttgaagcagtaaacgccgtttaagttacagtcacgatgactcggtggctgattaaaaccaatactggtaaaccggcttttaactattcccgggtcatttattggggaagctaaatgacacgtgtcagtaaattgttggatttgtttgtcgacataacgtgacagcacgattgaacggagtggtttgctaacgtcattaagacaactcccgcgcgaattgga

SEQ ID NO: 56907 - DNA, 316 bp, Arabidopsis thaliana landsberg
  unsure (1)..(316): unsure at all n locations
ggggcccacccgccanggggggaggcccaagcgaggcccccgagccncgacgcacgaaaaanaaacgaaaacaacgcccgaaagagnaaacangggacacgcaaaaggcaccaaacacgcaaaggcgggaaaaaacaccaacagggcaaaagacgaacgaggcaaaaagcaaacagaaaaggcgcacagagcagcagcaancaacggagggcacccngagggccangcgaaaaggaaacacaagccaagaagggccacacggaaaagaaggcaaagagacaaaaagacaaaaccgaacaaacaaaaaagaacaaga

SEQ ID NO: 56908 - DNA, 979 bp, Arabidopsis thaliana landsberg
  unsure (1)..(979): unsure at all n locations
caaaatagggacatctgtagcttgcctctacttagtctatttttccgtaacttgcaagcatttcttcttaacatgtcaaagggggccggggcctattttgttttttactttttcaatcctcttttacagcttgtttttttaggaaatgataatccatgttgttgaattgctactaataataaagttactatttttatgttttccaattcaatgactttgacttgttgatttatgttgcattctgaaaattaagcattttgttatcatgacaccccggatttactaaaataggcgaacaatttttgaataagttgaaaaatcgagtcctcaatgcgataattcggatctaaatagatagttgacaaattcataaatactttttacttaaagaaatgttctttatgatttaataaaacaaattcataaataattcaaacagtttacgtgaatatttttcatgtatacataacaaacctgtataaacaatagaaaaaaaaaatattctttcaaaaaaatattaataacatatttaatcaggttgttggatacttgaagaaacaaaacttaaattagtccacgaaaataattaaataaattttacttcgctgatataagtttgtgtgtgtttctacttcctttgatgaatattattcacaatgtatttcttttgaaattatgtaaaaccttttcactttttattttatgaatcatcagcttctttagttaacttgttaaaaaaaaaaaagaaaaaaaaaattgttttataaccagcataacccgtggattgaactcgtatggccaatagatataagcgtaggaggggagtctaatggtcagaccactttcagtagattaatactactaaattattcatctccagattattaaaagaaaacaagagtagacgaaatggttgaaattcgattttaggaccctactagctcaggctttagcttaattntgacccctttgacctttt

SEQ ID NO: 56909 - DNA, 341 bp, Arabidopsis thaliana landsberg
  unsure (1)..(341): unsure at all n locations
agagggaagacgccaagtcaccatacatcgcacccggaccaaagaccaaggagacgaggacacacaaccaacggaccgaccaggacaacgccgacaancaccaaaaacggagaaaccgagcgaagaagacgaagacacccaaagaaaaccacaaaccagagcccggaaccaagcaagcaaaggacaaaaaggaacgaacccaacaggggaagaaaggaccacgcgacaagggnagcacggccccaacgccgagacccaacaaaaaaaccacgcgcgaccgagcaggaaaggaacggcaacggaaaaacaggggcccaagaggggaacgcaaacccaaagaa

SEQ ID NO: 56910 - DNA, 226 bp, Arabidopsis thaliana landsberg
  unsure (1)..(226): unsure at all n locations
cagaggcccggccgcgaagcaggcgcaggaaagaaagaaaacccaagccccaagaacaaggggaccggggaagngcngagacgcaaacccacgcgggggaggcggcaggaaggacccacaggaaacgaaccaaggaacgaaacgcaggcagaggggaacaggaggaacggaccgaccaaggagccgcggcggaagacacacccgacacggaggaacaacaacggcg

SEQ ID NO: 56911 - DNA, 1419 bp, Arabidopsis thaliana landsberg
aggtctgggaggtctacctccagctcttgctgtaagttcatataaacattagcttgatttgaggtctttacttgttttttgatgaacctacatgttatgacttttgttaggctagaggccaccgtgtgatgacaatttgtcctcggtatgaccaatataaagatgcttgggacacttgtgttgtggttcaggtataattctctcaagtttcttttgctctgtatggaccttgatgaattttggatgcttaggtaagtcatcttggaatgttatttgatgcagatcaaagttggggataaagttgagaatgttcgtttcttccattgctacaaacgaggagttgatcgtgtctttgttgaccatccaatctttcttgctaaggtctgtttatattggttagataatcacaagggtgtattgtactttgagctaatgaggaatggtaataatgcaggttgtgggcaaaacaggatccaaaatctatggtcctataactggagtagactacaatgacaaccaactccggttcagtttgttgtgtcaggtaacactctttcctcttacttctgtagttacagttgtgttgtttctgaatcgtgggttctcatttgattgaaacatgtagcctacagagattaaattcataaataatgcagaatctgtgtttgaatagcgtacaagcatgagcaataacttgatttactttgatcgttggtaggctgctcttgaggcaccacaggttctgaacctgaacagcagcaagtacttctctggaccatatggtaagaaaatgatttctcaattcttaattaaaatggtttctaaaaaataaaacttcaatttttgaaaagtaacaaagcctatctctctgatgttataggtgaagatgtagtctttgttgccaatgactggcacactgctctacttccatgttacctcaaatctatgtatcaatcccgcggagtctacatgaatgcaaaggtatagatataatttttgttccttcatcatgttaattagctattcatcttaaagtagcaaacattaccaaatcttgaactgaaactctagctttgatactttttacaatgaatatcaaaatattttacttttttttaggtggtcttctgcattcacaacatagcctaccagggaagatttgcctttgatgactattcccttctcaacttgcccatcagctttaaaagttctttcgacttcatggacgggtactggtttctctgaagaacagatcattacaccattttgtctcatgtttcaatcttaatttactgtaacttcttgttccattttcaggtatgaaaagccagtaaaaggacggaaaattaactggatgaaggctgcaattctggaagctcaccgtgtcttaacagttagtccatactacgctcaagaact

SEQ ID NO: 56912 - DNA, 1645 bp, Arabidopsis thaliana landsberg
  unsure (1)..(1645): unsure at all n locations
actcattatacgcttacgtcgataaacaagaaagaaaactaaagagattagtttttttaaggtcaccaatcaaatgatcaccatggatcattactgtttattttttcgaaatagttcaactagagtgattaaagcaattatctgatagaatcaaaatatactaggaacctgaccttgctgttaaactttcctctctggattacaccaaaccnnnnnnnnnnnnnnnnnnnnnnnnnnnnnnnnnnngagtactctatcttttcagctatcagactgtgagttccaattataaacgatatagctccactttgaagatcctgttatcaattatcagctataaggaatacaagcctcttgtatcatttaaaacgacatattagctgcatgacttgcctggcgaatcatacgtgactgctttgccggggttgaacctgtgagcaacccaatggttggcttggatgttaccccttccatattctccaacagatcacgacactgttcataatgctggatggcaagtaattctgtgggggccatgaaagctgcctacaggtgagaaaagagtaactcaaaaaacaaattcaactacatgaaaagaatgagttattagaggatttattgagaaattaacttcacatggtgcaatttataaaagtcgtagagagatttttattaaccaacctggtaaccagatcctatgacctccatacacgctaagaaagcaaccactgttttgccacatccaacatcaccctacatgataaaccgatctattaaggaactttttggttaataaacaaatttggcaacagttaaatctgattctgaaagtttcacccaataaaaaaaatctgattctgattgtctggtaagattggctaaaagccaacaaagaaagaactaaactataaccgagaaaaaaaagaaataccagccagctcagctgacaaacttacctgcaaaagccgattcattggaaccggacgctttagatcccatattatttctgagacagcgcttacctggctaggagtaagggaatatggtagagctttcagaaaactcttcgtgagagtggaccattcttcaatataaacggaattaagtgctggctttctaaacttttccagcaatacatctttctctatttttgtgccaaggctttgaagcatttggtacaagcgtgccaactgtatgaaaaccaaagacaacggattaatcgcttcttcactaacaaattaatacttagagttctgtttatgagaagacaattattgaagaagctagttacctgtaggtaaaagaattcgtcaaatattagccttttgcgagctaaatcagcctcatctaaagtcttgggctcgtgaatgccaacgtaggcctacatttacagcaaggaaggaaactgagaatgaaaacaattgagaacataaaattttgttatggattaaagaagaagtgaagcaaagagcatgcttcaaagagaagcaagacttacatcattaagagatggtaggccaaacactctagtaatttccttaagaatcggatccatattggcggggagaacccccagagccctaagagataaaaagtgggtgaggtgtgattaacaagcagaccaatcattcgaatgttgtaatgc

SEQ ID NO: 56913 - DNA, 127 bp, Arabidopsis thaliana landsberg
  unsure (1)..(127): unsure at all n locations
ccagagagacgaacacgccgacgaaggcccaaagaaacaagacgagggaagacccaagaacacggcggacacgcacagaaaaccggagcaaccggacaccgaagcagagaaacgaagcancaccaac

SEQ ID NO: 56914 - DNA, 321 bp, Arabidopsis thaliana landsberg
  unsure (1)..(321): unsure at all n locations
cgctaacaccatgcgccctcgttagtttttcnnnnnnnnnnnnnnnnnnnnnnnnnnnnnnnnnnnnnnnnnnnnnnnccgctgatatataccaccagcggggtaatctgaacactaaataccacgggatgaagggaagggcnnnnnnnnnnnnnnnnnnnnnnnnnnnnnnnnnnacctctaatactcaaaaaaacaatccaatttccaagtgttttcctacaagacagtctaacgaattccaacttacacactgcttgggtaagtatactggagatcgacctgcaggttgaaccccacgtgcagggtagggatatagga

SEQ ID NO: 56915 - DNA, 654 bp, Arabidopsis thaliana landsberg
gcccccccccccccccccttgatttgcagtgctctaaagcggtagcgcgggtaagtcgtcttgccgttgcgcatcgaagtattcctccagcgttggatgaaacccgatccatgcgtgcatggacgcttgccggcgcggccggccgtcgacgtgaaatgctctggtcgtgctgttctccctctcccctccggggagagggttggggtgaggggcggctcttgcggcagcctcgcccgcgaaaggttttcgcgagcacccacccctcacctcagtcctctcccccaagggaagaggaagtcagttctaggtttgcgtcggagtggcgattcactcggtgcttttgcggtttttgctcgcgagcacaatgtcctgcgccttcgccgccgccacgcgcacccaggtcacctcgccgtagcgatcgtggccgtgtgcccagccttcgccattggcgcgttccagtgcatcgaggctgtcgagtgcgggcagtgcatggccgtgatcggtaacgttcgccgcctgtgcgccgtggatcttcaacagatagaacttcagcgccggcgcgtaactgccgcggctggcggcgatggtgacgctgtaccgaatcgccttcgcgctgcgtgctcagttgctggctgaagtactggccgtgctcgt

SEQ ID NO: 56916 - DNA, 315 bp, Arabidopsis thaliana landsberg
attatctcgtttctatccaaaagaaagaaaaaaaaaaaagggtgcgtaatccgacactttaattaaacaaatcttcgtttcagacaaagacaacctcgtggattgtgttaagaactgcccggatctttaaacattctgacgtcatctccatgaaatcttaagaaccaggtattttttttacgttatttgatctcttacgaataggaacatgtaaagtaggtttgattatccttatacagctctagatttttcttttggatcgtttttattattacaagatcggctcatactcatactttgtgatcacgacgattc

SEQ ID NO: 56917 - DNA, 1184 bp, Arabidopsis thaliana landsberg
ggcactatcatctttgccgttaagatatgaattagatataattcatcaattataaggtaatactttcgaatatggttggattttagtagagctggccggcagctttggtgcacaacaattgtctctcttctttacaaaatttatatatattattatgttgctaattaagtttatctgctcagacgtataagatatttgtactcacatattgcatatcgtactgtatatgataatggaatgtgctaaggatatatatatttaaaacgttttcataaatctcatcaaggacttgatctttttataaaagcattttcgtgcctttctaggtgtatggacgtatttaaacgaaggtttatctagtccttcctcaactttattaaactgtatgcaaattaatcagttagttgtttattttgtagaccaaatataatccgagtctatattcatttgctgattcaaaaagaaaaagtatatatatatatattttaaaaattaaattcaattaggtttaataaaattatacaccggactaaaataaaaaaccaatttgaattattcatccttcaaataattcttggtaagttaaacgaaaccaaatcaaacataatcacgaattttccttactcactcgttttatgcaagatgaaaattacaaatcgaataaatataccaaaatatcaaattaaaagtcacatacatatagtaacgaaatcgaaatttgagaaggaaaaattgatttttattttcctctcgcttggttggtgcatgcacgatgaaaatgttttatcttttttttttttctctcaaaaaccgacttgacattgtatctatcggagtgttgtaaattatgtaacctcttttgataaagacgagactctttttcatcgcaacaatgacatatcctaattcttagaaatccttatttggctgctatagaagaacaacatatttttttctttttccaccagccattctcccatctactcgttggtgcaatattcacatggaaaacagttggatttaaaggagattacaaaacttaattcataaaatcgaactctatatatggaaattaagggtgacatattaaatgcaattcaacccaactaaaaatgttgcaaccgaaacaaatcaatcaaactaaaataacatgcaagtccaaatatatcataatactaataaaa

SEQ ID NO: 56918 - DNA, 1350 bp, Arabidopsis thaliana landsberg
caattctggtcacctgtgagagagatcaaaggagttgagattacaggctaaggccttatctttttggtcttttgtgtaggaacagtagaagatcttttctcgtagatgaaaaacccaagtatgacgattgttgcaggcgaaaatgctaatacccctaatgctccctatatcagaaaaaacaaaacagaaaaacgagatttcaagtttctaatctcgatatctaaagggaacacgtcctgaaaacgtgactaaaaaggtgtaaaggctcaacctgaggtccaagttggtgaacgaagactccactagttgcgtatccaaccaaagcgccagcagatgaacaaaccatacaaaggctctgtatatcaggagccaaagatcggatattgatgctgtttgttgctatacacgcatcaatcaccacatctgcaatggccatagctgcagagacacctaagaggcagctcaaagccaaagcagcgggcaacttaccaagaacaacaatagcaatcgcagataccaaaccaagaacaccagaaactacaaaatacggctttcttttgtaacctttgatagggaatacatcggtgaagagaccccaaatgggtctcatgacccatggaatgtaatataaccccatgtaaagctgcacaaccgatggctgcacttgctggacatctttccagtaatagtctgtgacgactttgaatatcgaaccagagaacccttggtttacaccgtacacaaggaccacacctagcacgaagctcaggtttagcctagaactcagcatttgtaaccattggaagggctgaattagaactgagacgacagcgtttcttcttgcttttgtcttgatctcagaatgatctaaaattggttttggcagaggtttatcgtctgagaagaatttctcagtttctagtgtttccatggtgttgactgtttaggagatgaacattggatctgaaatcaaaatatcgagagcaagagcctttaatcgttattttcaatgtaaaggaaatgccttttagactttcaaaaaggtttagacattcacacacgaggaaaaacaaaagatatattataaagtttcccacttgacaatgacatttaccttgttgactttgtaagcaatgacgtctttcttcaactaccagtctgaaattctacaaaaacgaaaccaaatcgctttattagccaaaattcacaaactcgatagtatgattgacagatcttgaaagcaaaaagagaaagtcaaatgtttcatcttcccaccgaaactcaaaaatcctaatcaacatcaacaaacacctaaacaattacttcaaaatccaattaaaaatagagaag

SEQ ID NO: 56919 - DNA, 415 bp, Arabidopsis thaliana landsberg
aaagatgacgttgtttaggaattttaatggtggatgaaaaaaagaagaagaagaagataagataaattatgttgggaatagaaggagagggcatgtggtgtcctttctcgagtgacctgtcggtttatgggtcattgataatacgtgaaagcgaaagctctggagagagaagagaagagactctctcatgtcaaaaataaaaataaaaagagaagatgtgttttcttttgttctgttcccacactagttttcgcttacgtggcctctctcacgtgcttggactctttgggcttctctattttaattattttttattcttactggatggcgatttcgattaagacgcggcccattctttattcgacaagtgtcccctctctatttatttatttctattttcttgcgagatactttt

SEQ ID NO: 56920 - DNA, 893 bp, Arabidopsis thaliana landsberg
aacttggattagatgattttacctcttgcatctcatcagctaatcttattcaatagttaatcagtaagataagacattcttgccatgtagaactatcagggatgtgcatataggaaccatttggcggtagaactaacgtgaaatgccgtttcaggatttccacagcctgcaaaggttccaagattctgacatatactctacagtggtcatatgtcttctcaagttgaccgaggaagccctggaaactctctgcacttccaaaatcaagatctcttctactctccaatgtatctaacaaattcataatatattgtttgtagacatcttgacaggaaatgagacccttggacgaattttccatggataagccacgtagagtttctaccattttggccaaagcttccaagttcatctcattgatgtgcgcatggacttcattgttgaagctgtcaaaattcaaacctcccaattctgaaatatttttgaaatccaaatctttgataaatgacactctactgcactcttgcttaaggacgttataccaatttgataacccagcaaaggaagaattcggttgaaccaacaatgatgcttccttgctttctgccaaatgacaatagcattcagaaaggaggctatatatgtaagcaaggcgttgtttgttaagaccactagctgctgggtacacgattgtgcttatggtttgtatggtgtctgaagcaaaggtgagtatttcttccttgacttgtaaaatttcggccggatggccctaattggtcaaaatttaaaaccaaaggttgaagctaaattcctttattatcacttgccaagagaacaaggccaggtttatagtagttgcaattgaggaaagggtaaacgtaatgaattatata

SEQ ID NO: 56921 - DNA, 1901 bp, Arabidopsis thaliana landsberg
gacccgtcccgttggaaacttgaacgttgttttaccatacggccagaaatttgatcggaactttgagacagagtcgaagtaattattgtttccggcttcaaacagagaatctccaaacgcaaacaaggcggcttggttcgttttaagatcttctttgcaagaaatggagacgatcgataagcttatagtgcagatgaataagatgatgatgatggaattaaatctaggacttgccatgttttagttgcactatctttttcttactataacaaaaactattctgcgatccgttttatatacatgtaggtgttttatttatttagtatttttagtttaaagatgtgtaacgtggtcaacttggcgactttgaatatatatacaaaattttcattacggtttttttttatacggctgcggagtttgacgaagacagcgtcaataatcaatagtagtagactgtacaaaaatcttctaacggcccattatttttctataaacctttatgattgtgccttctagtttgttgacttccaatgtttttctcttgaaatttttgaccaagaaaatatatctgcttttgaaaaaacaaaaagtaaattccaattgttgaggaaagttatacattcaaaaagctttacgttggatttgtcaagtaaatggaaaattcaacgttgcttacgaagaaaataattgtggatgatgagtgggctttcattatccacgactgtagagcaacaagaattattctagctgaaatgggcttttaataacacagatatagagataccgtatgaaattagatagctgattgctaaaaaaaaaaaaaattgcttccaaaacaagtgattacggtgacgactcagactgtcatagatcggaaaactagttttggtttctctgttatccatagtaaaatgttgtcttatgataatgggaatttcacggtgtatttgggatgagaatcagtcgcaaactcgttgattgaacaatgaaatcttcatctatacagccttaagcctttagttaccctacagaatcattttgatgatttccaatattttcttgtaagcaatgtggccatgtgggtgtattattatttttgtattttcatcaaatggttcacgagaaagtttacaggacaaaactcaattctgtctcatttttccttattaccaggcacgttctttgtctggttcggtcttgtttcctgaagcttttttaaatctattgttttcgaggtgtacgaagaatctttctaattgcttttaaagtgaaagttgtttgaattattcaaaactaatgaataaataaggcatatttctcaaaatcgatcaagcaaagttaggcatagaagattcattgaacagatagagaagttccaaagagactttattataatgctaaacaagtttgggggtacaaaacattacactttcgagggtgatgatacgctataacaaagatcaaaaagagagctcagaagactaataaactgtcttttaaatagaaaagaaatacaaaaatgaaagaacaaaacaagacttaatagatagatattattatacctctatttacttcatcacaccttttttatttcgacaaaattaaaagagaaactctctgtggaagagaggctcatgagataccaatgcatagagcttgaggtgtgacttgtaccatcccccaacagcaaaatcctgaaacaaccaaaaaagaacgacagaagattaatcctgaaaccaacacttaggttgtttgtctttacgattcaacaagaagagcttgtaactgtaactcaccaacacagctttatttacaaactaaggaaccatcgatcacttcaaaagtctccttccagcatgaaattgatctcatctaagctccatagctccactgggttt

SEQ ID NO: 56922 - DNA, 482 bp, Arabidopsis thaliana landsberg
  unsure (1)..(482): unsure at all n locations
tatttccactaccaggcaaaaatcactgatttcgttcagtgcactgggcactatcacctaaacatctcttaatctgccatggttcgatataggtaaactactttgactacttcattggatccaccataagctatataaaaactccacttactctaagtcccacaactcttaagtgaatcaaactttgtccaggtaagaagaacactactttctccagctaagacagagaaagcaaaatcaatgactcattcaatcaaggacacttaacacctaaactaaagacacatctaaatcttccatgactcgataaagataccctgaacaacatcttcagcttcagaaatttcaagctacatactttatccaccataagctataatgctatatacaaaccccaacttgttcgtccactataaacaaaccaggggaatccaccataagctctatacgacatctntagtttcagaactatcaagctacac

SEQ ID NO: 56923 - DNA, 189 bp, Arabidopsis thaliana landsberg
taacttaacactaccccctccttgaatcccttggaagccaaaccatatgcaaaccccttataacattgataacaatgtgtgagtccggatggatacttctcctcgctccccttcacctagagaatctaccccactgcacttgtgcatacagcaaaacctctctaacatcctgtggcagaccacaccacc

SEQ ID NO: 56924 - DNA, 476 bp, Arabidopsis thaliana landsberg
atcttatttaaagaaaccaagaaatttaggtaaaagggaatgtaccatcatcaaaacgcaagtggataaaggcaccatagtcctcaacagaacctactcttccgttaaacacatccccaacattaacgttttgtgaatactttggccataatgctaacttctcagataaaatcaactttctattttcctcatcagcttgaacaacctaatataaagatttacctcaaattataaacaatatagagatcacaaaacaagccaaaggagaaaactttacctttacaggaagtttagaaccaaccaaagtcttagctatctcatgaatacttttctgaggctcttcataaagcaaaacacaaaccattgatcaatgtaaaaatcgatactttaaggacataaacatagaaccttgtgaagaagagagagttttggttacctttacaagaacgggaaggacttaattgtggataaggaag

SEQ ID NO: 56925 - DNA, 391 bp, Arabidopsis thaliana landsberg
gttgtttatatgttgacaaaaatatactttttataagaattatggaaagtggtttacataggataacatattaacacatgcttcctttatgcgtgttaacactgattaacatgttaaaatttgagctgacacaataacaatattaacacggtaaatgaacatcagtacatggaattaacggagaattcttttgtttaatccttaccacattttcgtaacctattacgtacgtcatttttgtgacatccttaacgtttgaatattcaatatacagaagaaaataaccaaatggataagttttatcacgtcgtgatgtgattgtctgattatacgtgacatcaaagaagataattaaacactctttcatggtatactctctttataaataaaa

SEQ ID NO: 56926 - DNA, 565 bp, Arabidopsis thaliana landsberg
  unsure (1)..(565): unsure at all n locations
aaaaaaaaaaaaataaaccaaaaaataaataaaaaaaaaatagaaaaaaaaagaaaataaaaaaaaaaaaaaaaaaaaaaaaaaaaaaaaaaaaaaataaaaaaaaaaaaaaaaaaaaaaaaaaaaaaaaaaaaaaaaaaaaaaaaaaaaaaaaaaaaaaaaaaaaaaaaaaaaaaaaaaaaaaaaaaaaaaaaaaaaaaaaaaaaaaaaaaaaaaaaagaaaaaaaaaaaaaaaaaaaaaaaaaggaaagataaaaataaaaaaaaaaaaaaaaaataaaaataaaaaaaaaaaaaaaaaaaaaaaaaaaataataaaaaaaaaataaanaaaataataaaaaataaaaaaaagaaataaaataaaaaaataagaaaaaaaaaaaaaaaaaaaaagaaaaggaattaaaaataaaaaaataaaaagaaataacaaaaaaaaaaaaaaaaaataataaaaaaagaaaaaaaaaaaaattaaaaagaaaaaaaaaaataataaaaaaaaaaagaagaaaaacaaaaaataaaaaaagaaaaaaaaatcaaaatgaaaaaaaaaaaa

SEQ ID NO: 56927 - DNA, 1120 bp, Arabidopsis thaliana landsberg
ttatcaacaatataacataagattttgtgatcaaaatatatttcaatcatgtgagggttttagcctattggcttatctttttacctcctttgcaacctgcgcctcgatcaccataggcgagttctggaggaatcttcaatgttcgtttcccacctgaagaaagaaaccaaatcaaaactcattagaccaacagaattatatgatgtaaacatgacaatgtttctattgagttcaaattcttttaaacactatgtagacttaaactatatacctgtaacatgaatatctaagtattatggtaaaaagttatagaaattaggaaactgatgaccactatctagttacatacaaaagattctttcagtgtttctaaggtcttatggtctaagcatagtgatgaccactatctagttacatgcaattaaagtttcatgtttcctctgtttatgctatgttaatttttttttaaaaaaaattgagcatatacataccagtaagcataggaggaattccatcagagccaaggattccttgatcccaaccttttatcacctgtatagtatgttttctcacataatgttaaaagtttaaacaaatgtgaggttttggcataagtaatgtttatccttaattacctcaccaacaccaattcgaaaagtaagaggcttccctcgattatagctactatcaaagactttcccattctccaacttccctacataatgtgcctgcaatgaacattcaagaatcatcaaacattcataaagaaattgcaaaaagtcattgtaatttgagatatacttaaaaatcaccttgattagttgccctttaacagcttcaggaccataaccaacaactttatcacagaaagcaagaccagaaggagacacagagaattcacaagaagttgtttcggctaatgcagaaacattatcaagcaagccaatagagaaaccaaaaccaataattgcttctcttctaccgcatgaggataattggacaagacttaactcaggatcagaagaaactttttgcttgtttctcaagttaatagcctctgctttgtttaagctattattcacaagaaatctgcattttcttttctcacttggaggagaac

SEQ ID NO: 56928 - DNA, 706 bp, Arabidopsis thaliana landsberg
cacaggcggtatcgtatctctaaaaaaacctttcatgtaaaaaaaaaaaacaaatcttgcatgcagctagctacatctatatcagttcatactaaaagcgaatccataatttattaaaaaaatatattgaaaaagcaaagttgattaagtatattgatacaaacaatttaaattagactactaacaccacacacacacaacaattcttcagaaaccaaagacgagagaattgatacacatacgagagaattgatacacatacaatggccataacgattcttttcacacactagccaatatagatgaactgtatccatttttatcatcccagaatttagaccaaagcattacacctccatacttcctagacttctttaaagtcggaagaatctgtgaagtcagtacatctggtgggatatagccacttccggcagcttcaggagctgccggtagacccaagaagaatttttgggctgcgattgaagtggtccacttgttccatgaatcgaagaggttttgagtattacctgaactgtatgaacacggtggattattgtagaattgaatccaaacatagtcaaaacgtttagtgttgagagcacttgccattaatctgtctggaaatggacattgaggagctcctgttagatatatttttcttcctctgtgggtaaactttgagagagtcctgtccacattttttttt

SEQ ID NO: 56929 - DNA, 290 bp, Arabidopsis thaliana landsberg
aacaatacttataaactacacacatttcttatcttctactaaacgatacttacacacagtaatctacaacaacaaataatttatcaacactacaatccaacactaccttcactacattactattgacactcctccaaagcaacaccctacatctctctcactaaaagatcactacaatataaccaagaccaaaactccatttgcacacaaactccacataaacgatcctgccctatacaacatccatcaaaatctattattacttacacaccgctttgcaccaaaacaat

SEQ ID NO: 56930 - DNA, 1896 bp, Arabidopsis thaliana landsberg
gtccgtacttatgatcatatatgaaagtattaacttatgaacgcttttgaaagtaagtttattccctactaataataaacctaatattcgaatcttacaaaaaatcaaaaacattgtgcaaggttattatataatcactttagatttgttacatcactttctctaaaaagacttgtcattctcaaacataagtttcccaaagtgagtttcttatatgaaaaagtgagaatgggaagtaaccaagaaagtgttattggaaaataaaccaaaaccaaaaaattatgataaaaaagattcgttgtataatggtaaaaaaaggagtaaaatgagaaaagaagaaagaggagggggacaaagggagaaagggaccacatgggagaatcggggagctttgcatgaagatccgcgtgtgcttcctctttgggatgttctcccacgtgtttctgtttcccttttctctttctttattactctccctttcttcttcttatcatacaacatcaaaatgtcaaagactctacttccttgtatagatttgtcctcaatctgagcaaacccacacagagcatacccttgaactatgtgtggcagcttgatcctgtcacatagagaacaagaacatacactctatctggctgtaccaacttaggtctcctaagaatcaagtgttcaaatagcttcataagttatcaataacataagggcctagagggcaactaggtagaaccttagcacttagcattagagaatgactaagtagatactctggttcctataaactaagctctgattcaacatacaaaagaaacagttcaaaccgagaagcacgcttgtgtaagaacttaacaccatcaattcaatgttctatagttaatacaaatcttcacaatgcaaacagttatactcacctttaactgggaagacatttcagagctcccatgatgccacagcaaaacaccaattccagctgtgttaccaaactcggtgttattctaaggcacattaccaaattttttgagatgtggtcaaatggaaagctcattcaaagctatagaaacagtagagaactccaaggacacacaagaaacaagctgctctaaatcaagtcaaaaacttgacatgtgcaggtcaagacttgttgatacttattagtacaaaacaaaacaagttgctcttttggattcaggtagatgcctagctaagttaaacaagaaaacaacttttgcttaattcgttctttagttataaagctaccaattcatagattcatcccttttcacttttcagtatatataaaagaaaaagcagataggtggcattcaaatatttggtaccccatagatttttgttgggcgtaagtgttgaccgttcagcttgctcttaaattacctgcaagaggaataaggattaagcagatataatatgtggtaatcaagataagccgttatgtacatatgcatagtgatgtgtgatcatactctcacaaggtcaaaatcttaagaggaattacgtgcatggaaaaattccacaaaaccgcgaaacatagcgagaaccaataaaaacgagtctgattaagagaaaatggaaaatacggattcaaacatagtgaaagcgtttgtgtgtccatgaggaacactgtttaagttttacaaatgaaaacgttcccaaaagttaaaaacagaaacgatagttgttaaatcagaacagtgtatttgggatatcataaaaagagttgagaaaacaagtaggggaaaactaaaacttcttgaaaggtttgaagagtcatgtattttcaagacacgaaagagtaacatttcatccaaaaactaaacaactccatttgcatcagctccttaataacttcagaagattcaccaggccaattaaaaaagtact

SEQ ID NO: 56931 - DNA, 541 bp, Arabidopsis thaliana landsberg
  unsure (1)..(541): unsure at all n locations
tttatttctagtctgtaacaaaaaaaatgttttataagtgatggggaaaaaatacaaatttgtctttcgatctgaaataaaataataagtaattaatttatacgggaaaaagttatcctccatttgattacgtggaataaactaatatcgctttctctatattaaagaagtatttatctcattgtggcaaaaaattaaaatagtatcctaataaaaaacaatgttaattaaaaaacgatcttagtacaaatctccgcagtatcaacaaagtagcaaactgtagttttttctccacaacgacagaccaaatgattttttttttttttggtaaacgatagaccaaatatccccacaaaaaaaaaaaaaaaaatacttcagtattagtattggtattatatatgcacgcataacgtttaaatcattaatccacagtacaaactacaaacatttaaacctttacacgctatatatattttctgattcgatgacagatgttaaattngtatcacccgtatattattgtcattcttacaaaaataac

SEQ ID NO: 56932 - DNA, 1497 bp, Arabidopsis thaliana landsberg
cccctacattttatctcgtcgcagatcagacacctcgatggagagacacagcattggcaaacatgcaactatacagagcggaaaaacaattgacttttatgttaatccagacatgatatactttagagttactctcactacttcccaagcgagctgcaaaccagtcaatagtggtcagtgggtcaagaagttacagaaacagaagaatgatgcacaatgtttggatgttgatcttgatttttccggcggaaaatactgtgcttccttgagattgtctttagggaaaagaggcatactggaggtcgtgattttatcttatcatctgtttccttcttggttgctttctcttaacaaatatctttctggttggtacaggcagctgttttcacatcgtacattcttaaaaacgactcagactgcaccttgtttttctttccccctgatcagaagcctctatccaggtatttgacaagaaatcaaaatatcctttaaattggtgatggctatttacatttacagtaaacaatgcagagaggatatggagaaacttgatcacattgtcccacctgagtttggattgtatttacccccaaagacagaggggtcgtggtttttaaggtatgctatccgtgctcagtacatagttattttcacccaatatcttttcagaaattattcagcatcttgtttggccagatctcgcaaggttggtgtcatattggctgatggtcatggggcaactgaagcagtgttggatttggatgctttatcaggacttaccgaaattagtttgggaacaaaagatgagtctgggtttcggtatgtaacaaggtttggtttgtcagttagatcaatctcaagtaaaatgctagttccatcacggattgtgacttttgttccgagacatcttgtaatcaatgaatcagaagagactatcaacatccgtcagcactattttcaggttcgttttgtgtcctttatttatttgctttcctctcataaacatgatttatttacttttctttctatcacttttctgttttattgggaaggatgactctgtgggcataatcaccatcaaaagcaagcagagagcagccttgcggttgcaggaagaaaccattcagaagaaagaactccatctgttcgaaaactttatcaaaaagcacggaagtgacagtgcaaattcattgatattcattcagttccggttgaacaaagcaaactggagttggtcaggcccattatgcatcacttcaattgggtgttttttcattaagttcagaaagcagtcaggtgaagcaggcagaggcgcaattgaatttgcatctgttaatgttactgaagaaagttcaactcttgctgtgcacttccaaaaaccaccaaataccccaccaccatatcgcattgagaatttcttgcattctgcatttctcacgtactaccaaaaggttggtcagctcctacttactgtcttcgctacatatgtgtttatga

SEQ ID NO: 56933 - DNA, 513 bp, Arabidopsis thaliana landsberg
  unsure (1)..(513): unsure at all n locations
tttaatatacaatatatttcacctaaatattaaatgctgggcagtggctagctattgtcagacaaaagtaggctaaattaacaaccatttaactgaaatatcgatggttcaacatgcatcttatacatgaatgaataatgaaaaagatcgaacaatgcttctatatcattgtagatgatttaagtaggctaaaccactcattttttaatgaaacatcaaaactgtaaaaaatcttaatctcaaccttttgtgatcaaaaccactttgttgaagtattattatatttatataaaatatatttgttaattttatttttacctaataataaattaataaacgagctagaagatgtgcagttgcagtttgaccggcgtggaccacactgtctcaccgggtcagcggttgccatatcacgattctctcgcctacctcacctcacggaccatgtcgacgcctncgcgcagcaccaacagaaaacaaatcgggcgaccgatagatagtcgtgatggagac

SEQ ID NO: 56934 - DNA, 460 bp, Arabidopsis thaliana landsberg
  unsure (1)..(460): unsure at all n locations
ttcactttctaatggtactaggtaactatattacagggggaacggggatgtgagctctaaatctctaattatgtggggatttactgaccgatcctatgtaaaaatctccagtgtttatgtagttgatctcatattactgcaagtaccgagtatcctttctgtaccataaaactagaggttaacttatgcacagtagactaatattttctttaagccacttcaattttatgagctattctaatttttagacagccaaactatctcaaaatttatctaatttaaataagaaaataataatatttataatactaaatgagtattattagattttttattgatgacattatttcttagtatatntatttgatgctttttagttaaaattgagatgaagcatcttcacgaaaaacgtggacggaaggggaaaaagagggaagtaaactgttctctgtctttgttg

SEQ ID NO: 56935 - DNA, 448 bp, Arabidopsis thaliana landsberg
tttcttttaaatttgtatatttcattatgtctcttactgcagggggctcgtgatggtgttgaaccccgattcattgacgtttacatggagggaaaccgaggtccacatccagagcatccagaaagtttatgtgacaacagcgcgacagaaaagctggtaggtgtaaaaaataactatctattcttaattaacttgtgactcatacataccccttttaaatactctttcacaatacttaggatgaggtagagcacaacaacatctcaataagtatacattatacaatattattccaaagtatataaacattttgaaataatatggtccattggtcatatacatgcaaattctgttagcacttaatttacatctcaatcctcttttatgtccaatgtaaactgtaacactagtacacttaattctagtcctatggtatatttatcatttc

SEQ ID NO: 56936 - DNA, 607 bp, Arabidopsis thaliana landsberg
aaaaaaaaaaaaaaaaataaaaaaaaaaaaaaaaataaaaaaaaaaaaaaataaaaaaaaaaaaaaaaaaaaaaaaaaaaaaaaaaaaaaagaaaaaaaaaaaaataaaaaaaaaaaaaaaaaaaaaaaaaaaaaaaaaaagaaagaaaaaaaaaaaaaaacaaaaaaaaaaaaaaaaaaaaaaataaaaaaaaaaaaaaaaaataaaagaaataaaaaaaataaaaaagaaagagaaaaaaataaaaaaaataaaaaaataaaataataaaaaaaaaaaaaaataaaaaaagaaaagaaaaaaataaaaagaaagagaacaaaaaaaaaaaaaaaaaataaaaaataaaaaaaaagaaaaaacataaaacaaaaaaaaaacataaaaaaaaaataataaaaaaaaaaaaaaaaataaaggagaatcaaaaaagaaaaaataaaaatcataatataaaaccatataaaaaaaaaatatagaaaaatcaaaaaaataaaactaaaaaaaaaaaaaaaaaataaaaaaaaaaaaaaaaaaaaacaaaaaaacaaaaaaaacaaaaaaaaaaaaaaaaataaaaataaaaaaaaaaaaataaaaaaaaaa

SEQ ID NO: 56937 - DNA, 1243 bp, Arabidopsis thaliana landsberg
tgtctgatgttttaaagtttaaactttgtttgggagtagtttcaccttttcagccccgataaagaaagatatatgggttctcagactcacctataactcgcgttcaaagcttcgagacattttgtggaaaaaaattatattcccaaaataagctgttataatttattttattttttaactcaattagttttattttccagttttcaattttgaaagtggattgttgaatttgaaagattaatctactttatattattattatttattgttaaataactttctttgctagatataaaattctaagttaaagagagaacaccggggcgacgatttaggctacaaatacgggtcaaacaagaatacatacaagtgcaaaactttctttgagtctaagcaatcttcttctttctattcgattttaaattgaaatactaaatgttctaacgtataataccaccctctttttttcacaacacactttgatatatcaccgctctgcatcttgcattcttcctcacatccgaattgtaaaatttattttttctaaatagagggaaagaaagaagagatgttgatagttcgtgtgttcttggttcatgttttgagtagggctataaggaagactattttggtactatctacaaaaacggacctagagacggtatatgggcctaaaattgatagctggataacagtcaaaataaattctatttcttttgttgataagaatgtaaatatcattaaaatgagagtacataggcttacacaatgctaaacctaaaattatattcatcagatttggtatttgttgaattctcctttattttatggtttattttctttgacgaagatcctttgcatcttccttcttctatttatgaattatcgatacgtagaacatatacaaaatacatacctaactatacatgcatacgtacatatagtctatttcgtacacaaatataataattaaatatgattattttaactcattttcaaaataacaacacatatgtatataatgatcaaatataaaatgagtccttatatacaagagatgatgagttttcttgattttgacaagaaactaacatgtcaaaatcatcaaactatccaatctcattctctcttttttttttttttaataacgaaaagaatacgtctaacaatatcttctctaaatccttcaccaactttttactatgataaaccttaaaaactatttattctttgaaactactca

SEQ ID NO: 56938 - DNA, 1037 bp, Arabidopsis thaliana landsberg
tttaaattttagttactttgacacatatatagatgcaatttcaattatatcgacttttttgaaattgatttgccattatcgaagcctttagtcattggctttcaacaaaactctatttctctaccacgaaaaaattcggatttcagtttatagatcaatcatatatataccaaaatcgtaatgcaacttcaagttaaaaacaaaatcgtgtcagttttttttttttttttttgttgaaagtaattgtgtaagttttatgtccatattcagtcttaaatatatgaattgcaaaagcactataacacttattggctttcgtattgcgtcagaaaaacatttactggtttactacagggaaaaaaaattgataactcaagaataaatacatgagctggaatctgaatgataaaaatttaaatcataatatatatgtcacaatctttatttaattcgaattccattcattattttttccaataatagaaattaatttaagattttaaatctaaaccaaaaaagctgatcatatatttattgaaatttaatgtcaaaaaaaaaaaagatgattgaaattttgtcctagaaaagctggtaaagaccgttgtgaaataaggaaaatgtgacaattatatgttagttaattgttaactaccatataaaaagagggaaaaaaacgtgcccaaacaaaaactcaccttcatttttagttacaaaggcaatctagtcattcgttatctccattgtcccaacggaataaattttgtagcccaatgataatgtcctttatcgaataacgatggtccttacacgagacatgtcgattttttggatttccttttctagattgttggctttatatctatatatacaatatataggtatatattaaggtttttaaattggtaaagttgtgtttgaccaacaaagataaatggtaatattaatttgtgattcacaacttgtgaatgatgtcgatgttctcacagcaaaaactagattaaacttaaaggcacgagctgttgcaacaagtgtcacta

SEQ ID NO: 56939 - DNA, 239 bp, Arabidopsis thaliana landsberg
aatttggaaacaatcaatattaaaactatttaagttttatgtcatgtatttttaaagtgtgtgccatgtatataactaattttattatttgcaataattactatgttttcttaattataaatgtttttgaaaataaaatcttaagaaccccaagtaagaacctaccattggacacataaaacttttaaattcattacaccatctcttaagtctaagtgtttcagttttaatattaaatc

SEQ ID NO: 56940 - DNA, 173 bp, Arabidopsis thaliana landsberg
ccgaacaggaaccagacacaagacaagacaagcccagaaaacacgaaggggaggcagaaagacaacgaagaaagaacaggagaagaagaggaagaacaagcacaggaaggggagcccaaggaagcaaaccaagacacacaaagcaagcaaggcaacggacgaggaagaggaca

SEQ ID NO: 56941 - DNA, 563 bp, Arabidopsis thaliana landsberg
  unsure (1)..(563): unsure at all n locations
gtatacaaagtcttcatgctcagagtatcaggtcagagttcgaaacctgatctttcttactagtctattgttatgagattggttttttggagtgaaaatgagcttcgtggaactctcatcaacctcgtgagaacataacttcgtgattgtgttctttgacaagaaaagttgagctgtagtttttttttaacaaggttttgggatgaccagtagtaaatcaattgttgtaataatttggttggtaaatataacatttgttttctactaaacatccaaaaatggaggtacgtgaatgaacacatggtgtgttgtaacaattaatctcaatatggccaaaccaatccttgtctctacaacgaagctattgcgctatttgttttggttgtgcagnacgcttccttcttcttattgcctttcttcttaggcgtcatatgactctcttgcatccttaaaaactatgctgataatttatgccacaccaccatttctcattgaaagctaaatcgaaattcaaataaagtcccaaaaacatgcaaaagttaattgaccaaaagctgaaaagc

SEQ ID NO: 56942 - DNA, 879 bp, Arabidopsis thaliana landsberg
tacatcgtgccgtttttgaaaaagaaccgttaaataaaccttgcctttaaaccaatgacattgaaacgtcaacatagacgatgagcgtcgtctcaagcttccatcaatcatggaagagtttgattctcgcaagccaacgttgcaacacagtgaaagcaaatcaaatcaacacattctctattcatcatccatggcctccatcgaaacacttacgcaattagcaaacttctcacagcttttctccatcttcccaatttaaacaaacactttcactacgcttcctctatattcgattcgattgagattcgtaactcattcgtttacgatactatgataagaatgtgctccagaagctctcagcctcacctgggtttacgatattttctattaatggtgaaggaagaagaagaagatatagctcctagttatctcacgtttcatttcttgattgttgcgtgtttaaaagcttgtttcttctctgtgggtaagcaaattcattgttgggtggttaaaaatggtgtctttttatcggatagtcatgtacagactggagttttgaggatttatgtggaagataaattgttgttaaatgcacgcaaggtgttcgatgaaattccacaaccagatgttgtgaaatgggatgttttgatgaatgggtatgttagatgtggtttaggttctgaggggttggaggtgtttaaggagatgttggttagaggaatagagcctgatgagttttcggttactacagcattaacggcttgtgcacaagttggggctttagctcaggggacgtggattcatgagtttgttaagaagtaaaaatggattgagtctgatgtgtttgtaggaacggctttggttgacatgtatgctagt

SEQ ID NO: 56943 - DNA, 296 bp, Arabidopsis thaliana landsberg
tttatctgaacaccatgacggcggacatggaagaggatagccagataagcttgagaagaaaggtatacctgcctgaataacagtattcgctagaacaacgaaatggctgcttatagcagcgatgacactataactcaagacgcatgcggcggagatcctgcgcctgtgaacacgggggatggaccagtgcactgtgtaaaacctaccgcactagtccacacagggcgttcgaccgtgcaaatcgtggtggatgaagctcatagttcaatgataactgatagaggctaataggggaa

SEQ ID NO: 56944 - DNA, 196 bp, Arabidopsis thaliana landsberg
  unsure (1)..(196): unsure at all n locations
agaaaagggcacacacccacaaggagagggtcaacaaaaaaaacgcaccccgaccagagacaccaacaacaaaaccccagcacgaccngaggccgcaaaacaaacaccacacgccaaaaccaccacaacaacaacaaaagcaggaacacacaaaaccacagcgccccacagaaacaaccgacaacaaaacaaccac

SEQ ID NO: 56945 - DNA, 411 bp, Arabidopsis thaliana landsberg
  unsure (1)..(411): unsure at all n locations
aaaaaaaaagctcgggtgaaaaacgtcataacacatcnaaaccgaagataaaattgaagcgaccccaaacgacagagagcaagagttcagactagacaagcccaaccacacagcgcnaagaaaangggagagcagaggaggggcaccacggacaaaggccgaaacacaaaaacaaaangangaaggaagaaagacagacaaaacagacccaagccgaagaaaaaaagaaagaaagggaacagccacaaaccgncaaccccagcacagcagggagaaaacaacgccacagcaggaggacgccccngacaagaccaaacccgcaaagagacggacaaacgaaagagccgaaaaaaacaaaaaaacggaacaagcaacaacggcgagacgacaggggaaaaccacacacacacc

SEQ ID NO: 56946 - DNA, 372 bp, Arabidopsis thaliana landsberg
  unsure (1)..(372): unsure at all n locations
ccgagccccccgccgagacagcgcccagatcaggacgcctggcgggcggtacggttctcacccgacaaggaanaacgcaaccgaaggaccggaagagggacggccgccgaccaccggggcgacggacgccggcgccccgggcaacaggccaccaacagccagaaccacccggcaccgggcaggcggcagcccccacacaagggcncacgaccaagcggagaccagagacaaagggaaacagacgcccgggcctggacactgcgacccccagagggaggaggcacccncgctcccagaagccacggggctagaaagccgaggaccccagagagaagcgacacgcgccccaagggattctctaccgacccaccc

SEQ ID NO: 56947 - DNA, 1054 bp, Arabidopsis thaliana landsberg
ctttcctttttttggctccgatcaccggaaagtctaaagaaaaaaaattcgacgtagtaaagagagtgtgatatgtgtggtgtatgaaatgtacactaacgtacatatttttatagtagcattgaaaaaaaagtttttttttctttaaactaattcttcatgtgtggattttattcgctttcaacttttttttctcctggtctgaaataaagatgagtaataatgttactagttaaattaaaattaaaatatagaatataagtttagtgtaatatgtgtggattgttaacaaaataataatctatgatttattcacaaaatgtattgtagtattatacattgtatatatataatgtaattaaataatttgatatgtttttgtgtcaacaataatgtttttcaatcataacattgttatatataatgtatttaattaaataatactacaaataatgtatttggctcaaggcttgttataccacttggagttcctagtccctactatcaaaaacatgatttaatggtttccgaacttttgttgagctgtatcatattctctttatttatacgaaaaatgtaattcatcattttaagttttctgttatttttgggtgatagtgctcctagtggagtgtaaaaccaaaaccaaatctcatcttctaagattaaaaaaatctatatgttcacgataagttatgtttttgaaccctacctcctgaaatatctaactatgatatttataaatccgatgtcgttttgcattgtcaaaacattccaacttggatatgatgtttactaaaaactaaaatatatatatttttaatttaaatctaaaacatcatatatagatgtcaaaaatctaaatacaaaaaaaaaacattaaaatctctgtttttgaagtaatctttaacatgtctagctaatgaccaatataattgtctaaattttctattagtgaaaatattgttaaacacttgttgtttttacttatattgttgaatacttaaagtctgattgactaaaatcacattattactactgaaaagtgactgat

SEQ ID NO: 56948 - DNA, 599 bp, Arabidopsis thaliana landsberg
  unsure (1)..(599): unsure at all n locations
tattaaattctaaataattaatgcatttccaaaagggcattggctttataagttaatatattcaaaataagaatactctaatacaaaaagtttatttagttattacagcatccaaaacggagcttaaaaataataatttcgtattttctttgagaaaatcatgatcaagcaattttctatatttaaaaatcgttcaaattcaattgattttcaaccataaaatataatttatttttgaataagtctaaaaacttcaaaaatataaatgtaacagaaatttcggagatatacaaaatatattcaaaatctatgaatctctaatattccgaataacaaaaataatatttgcgatctttcttttcatattctactaactacttgctaaatttttaggaaactattttttgaggtttcgaatcaaaccatataatagtaagattaatagttggtttagttaaaaattcgaaataatatttgcataaatttgcaggagaacttacaaaanaatctaaaaacacttatcgaaccatatatggtaaaaaatgatcattttttatcatttattttgaatatttatattatttataattaatataaaa

SEQ ID NO: 56949 - DNA, 579 bp, Arabidopsis thaliana landsberg
tacctaatatatacatgaatcacacaattctggaaaaacaatcttcttgctttttaaaaaatctggagttctcattgaaaagggacatggttcataataatctactaaaacaagattaaactcttgtgcttaagagttaaaatttcgaagacacttgtcaacggaaaaatcagtagtgatcaacatgtcaatatagtctccatcgaattgaacaaaaatatttaataatctcgttcttacatgagacccacaaacatatgaatatgggtcccatgatttgttcttcaaactgcccagaaaaatgcagaatccttttgaaacctcttcaaaaatataccgacaaaaaaccccaacaaacataaagatagaagagacagaagcccaaacaacagcttttcttgtctctctgcttcgtcaataatctcttcaggtactgtcttactcttgatcatagatgattcatcatgatgaaactagagtttttcttttgttatgcctttgtatgcgatagtacatgtctgcttaagaaaaggtaacatcatagaaacacgactttgcataaagttatattcatttttc

SEQ ID NO: 56950 - DNA, 301 bp, Arabidopsis thaliana landsberg
  unsure (1)..(301): unsure at all n locations
aaagcccggggaataaaattggcaccaaacgacacagacagagcagcaccggtccaagaacacgaccaaaccgcacaccacgaacaggangggacacgaaaacacccaggccccgcaccaaacggggacccccaaggcggcgcggaaacaaccagaagaaagcaggaggaggaaaacgaaacaaaccaaaagagacggaaggacaacaagacaaaagaagggaagagcacccaaagcagcgacgagagcggcgacaggaagcccagcagaaggcacggaccgcaacaaagacggcgaaaac

SEQ ID NO: 56951 - DNA, 565 bp, Arabidopsis thaliana landsberg
cacgagccatgtatttgcttgcatattacataaatctggaataatgcaaattcttgataaggcaactggctcattagaaacaagtaactgcaggagctaatcagattatcacgataggccgaatatgagatccaggaatcaggtatgtaccttcacaaaattacttgatggaatactcaaaatccccaaagctggttccattttttcttcacttgcaaaacatacttcaggctgaaaccaagcacatgtcacgtgaacccacagtgtctccacatcaagtggcttcaatgcacctcctatttatcagtacacaataattggcaaatttagttgatgggcaagaatgcgaaatttttcaataaaactcaaaaatcggagggaatggataactaaatatgctctttaagtaatatgtgccacaaggaaaatcaatcactacggtgaagaacaccttttactgattgctgcagttgtcagaaaaataagacaagaccatattaaatgtgcttcactaaataagaaacgtaacaaaagacatgccttttacaggacagaggcaacactc

SEQ ID NO: 56952 - DNA, 559 bp, Arabidopsis thaliana landsberg
  unsure (1)..(559): unsure at all n locations
aaaaccagtgcaaaccaaatatgtttaacctaacagagagaagctacatttattctcancaaagccacatggcgtaanacattctgaaatatatcataatcagaatctttactattgngggntgaacaaatcttaatttataagcgcaaactatttttatgtagggttaatggtaagacaaaagccaaatcttaatattagctgtcttcaatgacaatgacttaacacaaacttacgtctgaatttcagaaattcctaattaagattagacattaattataaattagtttccatcgaaaaaatttaaaactgccagactaattggtggaatagtttgcagcttctttcagaaaaagaacgaatctgagtatcaccaacacatgtagttaggactgtgtatactgtctttaggcatgaagacagctttcagaaatgttctaccaattagatactgccggactcataaaattttagatcttctaaatggaatctatttttttataaatcatttgcaatttaacgtacgaccacatcgaacctttaaacttactttcttcgt

SEQ ID NO: 56953 - DNA, 988 bp, Arabidopsis thaliana landsberg
tgcaaaaggcatgtgcaatcttgtcgtcgtcgtttatggcctaactgatagaaaaagtaaaagcttagaatcaatctaaaataataatccaattacatgtttacacataacacatgtggatgatgtaactttatatagtacattactttcaaagtgtatcttcttaataaaaaatattaattaagagactccaagacgtgcaacgaacatgcctcatccccaaaccccagcgatgtattaccactcatattggatttatttggagacttcattttcatcaaagcatattcttttattcccgtcactatataattagttgtgattgttttcgtttaggcttggcctaaacatgttccaaacttttaactttctttcattagtgtcttgtgtgaaaatttgcaataggttttgtaacaagctaaaaaacttgaagcaagttacatccaaaaactcgacaaggttgataaatttcaaaatttgttaaatattagaagttataaactagtaaatttaatcttttcaagattccgtatttatgcaaattgaaatgattattatagactaacatatatatttttaaacaattacgtctattgatcgttatttaacatttaaaaacgactagttagccttgtcaacaatgaatattgtggatataacttttcttacatataccatttctttgatttcgaccaccatatattcgtccaatcaactcataaaataacatctaaagtgacgcattggatacaaatacgtaagcatagactttacgtgccaatggtaaacacatcatctaaatatgtcttttgttaagtctctgtcactaacgatgtcttcttcttcttctttcttttttggttaattagcacaagtatccgggttaaatccaattaatacaatcgtgaagaaataatgtatagggtttagtttgtatttggcctcaagtctatgtaattacaactatatatatatcatctttgttcga

SEQ ID NO: 56954 - DNA, 594 bp, Arabidopsis thaliana landsberg
gatttggacgaaactcattagcaataatcaagagaggtgtgatcaaacatttccttttttaccatggaatttgtagtccccgggtctgagtagactaaacttgtagcaattgattcataatttcttgcagaagggattggtggttggaaatgagaatctctctgttcttgcttctcatgacttccaatgttatctggacaagaacacaccaaacttaacaagagagcaccaccaaaagaatcattaacagcaaaccaaatgaactataaaacaagcttaggtaaaaatctatcttctgaaagcagaatcaacttgaaataaaatataagcataaaaggaataaggaagagagagagcaaaaccagaaagctcatggattgaagaagtcatgactcatgagcttaatgtccgaagcagaattctgaaaagttccaaagaacagagtcagtacatgatcctggtaaacctattttaaataaactcaagaaccagaactatcaaatccccacaaaatcattaacctcatatttaaactaaacaagtcaagctacttagaataatcacagaaccaaatcagaacatcccaactttcat

SEQ ID NO: 56955 - DNA, 530 bp, Arabidopsis thaliana landsberg
  unsure (1)..(530): unsure at all n locations
tatcttttgcaaagtgtgtagaattgcactggatatatggacaatattttagccaaattttgttttattttagggcctataaatagtttgagatgaccaatgataatcaagagggaggcagataaaatgtatgttaataaactgaccattcgacctagaggaaggctgataaaataaacaaaaaaatctggtgcacaaatgatagtggaacatccgtatgatgaatctcttagaacatggtcccaacaaacttctctccaagtagtctttttgtaataaggatccctagactctatcacttctagacactcatcagtcgtcaccgagagatagacataggctccacacaacgcaaggaaagagacttaaccagagagagataagcaaaactccaaattaccagccccatctaaccatctttcagaagatttcttttattatcttcattaagaaagctgacgataatacataataggcttaaaacagaaaattgtgtatgggtattattaatacanatattctaaaaatta

SEQ ID NO: 56956 - DNA, 929 bp, Arabidopsis thaliana landsberg
ggactcgcggttggactctagtttttagacggtcacgcacccccaattactccctatatggcacccgactataaatcacatgtgtaaatcaaaatataggctcttccaccacattaaaatgtgtatataaataaaataaaattgtaaaaactctatgtttaaattaggccattatttttaattttctttatttaattaggcaataattttgctgtttataatcactttttatataattaggcaatgattttgttatataattttatttttgttttgtacaaaaaataaaaatccaattccattcatcatttgtttaaagattttaaattatgaaaaaatgaaaataattataatatttaaaactttaagtatacacgagaagatgcctagagtgaagatgagagcaaggaaactacaatgatgttggtttatctacatttctttgtttccagtttctcctctgccttctttatgattagcttgtaatagtgtatacaaagaccaaactgcacaatgggtttaaatctccatctcctgtcgggtcgagtttcgattccagtcatgactaatggtgttagaacaattactgaagacaatgatgaacaagagtgtttatcaccataaagagttgcttctatgtcaccaacaaaaaagcttcagaaagcaaagaaatgagagtttttgaaggcttactcactttttaaggccttgaatcacctcttgcttttatctccatgttctgtgagagctaaagagttactggcactcttcactcatccaattccaaacttggagtaacagttggcaatgttgtcagaaacgaatcgcctctcatatctttagccaaaccgtcgattacatcataaatctcactagaatgaggatgctcttgatctctagacacaaaacagttgacgtaacctgcaatt

SEQ ID NO: 56957 - DNA, 1156 bp, Arabidopsis thaliana landsberg
agcaacctctcgaccaaattctacggagaagtcactcaacaaatgctcatacatgttgatttcccgggtagcaacaacggtgctggtgttttccaaaccattgttggattgaagatcagagatctctatgagcagctcattgccaacaaagccactgctcgtgcagaagctaaagcctaaaacaaacgaagcgaagccaaatagaacgcgtcgataaatccatccgcagtttcttctttttcttatttctttctttctttatgcgttgtttaccgcgaattttcatggcgaaaaggacggtcttgcttgtttgtaatttgtgtggagataaaaagaaaaagcctgtaatgtagagaagtgaatagcagagcaataacagttcagtttatagaacgccttcaaaatttgttctttacagcatcaaagtagattcaaaccacaaatcaactaagcaaaagaaagaacagttttatcctattgatcatactcatgttgaatacttgaatgtcaaatagcttttggattacaaattgcacagttcaaacttccttatagattccatataagaaagcaaagaaattatacatacaagtaacaatcccattttcttgcaatcaccaagtactactttgggtaccaaaacatgcctttgatgccttctggatcagcctcaaaccccaagttctgatagaaatccacaactacaaaaaaggaacacagattcaacaactaagtaagaacaaatccaaatattttgaccacaaaaattgcagattaaacagtgattcgatgttttaccttgactatctgcaaacagagatatgttaccaatatctctttgaagaagagcccttacaagtttttcaacaagagctttacctagcccttgaccctgtaacgtgaaaacatacacaatacaccaattaacatcaaacacaaagcatttatattggcaagcaaaaactaaatgcaaaaaccatatcatttgttttgattaacctgatattcatgatcaacaagaacatcccaaattgtagcattaaaggcatgatccgacgtcgcacgtgccataccaataagcttcttctgctgctgcttctacccatccacgccttctgtgtgaaataacttctgcaaaatccgctaagatgttcat

SEQ ID NO: 56958 - DNA, 1155 bp, Arabidopsis thaliana landsberg
actacgatgcccgcagcgttccccaaactcagccatcacttatttatatagggtttggatttttaatgcgtttgccaaaagatgacagtgtgttggctgtcataaatattgcatcgtgtttaatgcacgcatccagggtactgcttcagtgcaactatttatttgtctaataactttatcctccaattcccagtaaccgagagtctaccatatgtctctgcaaacctctgatctgtttgcttctttgtatctaggggcacgatcttgttttacatgttctctaccatctgcattcaatggccattctggacacagatgaatcctctttctatgctactgtttatgaaaattttctcatatcagtggtgagtgtttattcaacttttttccaattcttgtttatgaatctcgcttattaagatgcttactgtaggcaagatcatttctggatgcgcttcctgcttctgacaagtcttttagtagactttttggagaagctccacatttacctgattctgccataaacctactggatgaactctgctccactcgtcatgacccagttggaaaagaagtttgtgatagtgagcgtgttacccaagggcttggtgctgtttggagcttaattttagtgcgtccaaatgagcgaaaagcatgcttagctatagcattgaaggttacttatctttcttacaaaatcctgtcacattgcagttatgtaattatgttatattctcagtgatggagaatatgagaattccaataatataagttttggattttggttgattgaagaatgtatagcaaattgcaattacagaagcagtgtgttctgatctctaggacccagaaaggaatgctgtgctcgaaactttctttaaatctacatgtttcatggccatatggtcctttagatttttccgtgttcctaacgcatgttttattcctgttatcgcagtgttctgttcattctgaagaagaggtccgcgcaaaagccatccgacttgtgaggaaattagtcccgtatagcactatggtttttatttactgctggtacagcaaccctaattgatgtttctcaaatgcatgcacaggtcacgaacaaactatatcacctaacatacatagcagagcatggtagcaatttcaacagat

SEQ ID NO: 56959 - DNA, 423 bp, Arabidopsis thaliana landsberg
gccggcgggtcgatctcggccaggttctcggccatgggctgccggtgacggtcatcacgtcgccgtgcagcagtccggcgtcgagcagcgccttcatgagcacggggatgcccccgcggcggtcgacgtcgttcatcacgtacttgccgaacggcttcaggtcgccgatgtgcggcaccttcgagccgatgcggttgaagtcgtcgatggtcagctcgaccccggcctcgtgggcgatggccagcaggtgcagcacgatgttggtcgagccgccgagggccatgccgaccgcgatggcgttctcgaacgcctccttggtcaggatctggcgcgcggtgatgcccttctcgagcagcttcaccaccgccttgccggagcggtgcgcgtacatgtcgcgtcgcccgtccgcggctgcgggggatg

SEQ ID NO: 56960 - DNA, 1127 bp, Arabidopsis thaliana landsberg
acacgatactaatataatactgctctattttagactatatgttatttaactacttaagttttgaaacgagacaaataaaatttccaccttactctcattaatatattccatcatttcttatattgattaaagatattagagtaatagatatataaaacgagatattttggcactaaaataaatataacgatattctgaaacaaaattaaagatataaaacaaaatttaatatgaagcggatggaattaatcatgtttttttcacctttttcacaatattcgtgtatgggtttgattatggagttatggcctataaatataaggttataattatgtcaaaaaaaattgtaagaccttaaagttaagtaaattgaaaaatccaaaataggattatccatccatcatccttacttacacatcattaaaatccacaaccccatcattgcccatcactaatcaataaaggtcattactaaacccaaaaacagattatcgaaacatacgtgggtccccacttcccccaagtccttttccattttcataaagtatgtttctttcccattatcacacatagccttacgtgtttcacttaaccaccgtcgattcagatcttaaataatcaaacagtaagcataagagcagcgtaggtacactcgcgtcgcagaagatcaaagtcaacgatagtcagagtaaggaaacctcgccatgaagtgaaagttaataaacaccgtagctcccgaggtacaagaaacaggaaaacaaatatatttatgtctgaaaacttgaataaaataataatatttatatatttaaaaatggtgggaatattattaatttattaacaagaacacagtaacgcaatcacagactccacagtccaaggagttttgcatactcaccaagccacaatcatttctctcttctctatctctctggttttgaatcggcgacgactgagtcaactcggtgttgttactggtttcgtcgtatgtgttgtaactgattaagttgatggatccgagtgggatgatgaacgaaggaggaccgtttaatctagcggagatctggcagtttccgttgaacggagttcccaccgccggagattcttctagaagaagctttgttgga

SEQ ID NO: 56961 - DNA, 1089 bp, Arabidopsis thaliana landsberg
  unsure (1)..(1089): unsure at all n locations
gtaaaaagactctcagcggcttgctcagctatctttacattacggtggatcttgcaggcatttagcaatgcacaccatatgccagcatcggnnnnnnnnnnnnnnnnnnggatgagttctaatgcttcttcgagctttccttttcttccaagaagatctaccatacaagagtaatggtctagtccagggctgatgttgtatacttgtttcatgatgtggaaatactcccaacctttctccagagaacccgaatgagcacaagcttgaaggacggcaaggaatgttatgtggtttggtttataatccaaatctatcatcttgctaaaaagtttcaaagcttcgagaaagataccgttcaaagcatatccagctatcattgtagtccatgtgacaacagttttctcaggcgtgttatcgaatatgtctcgagcttcatgtatacttccacattttgagtacatatcaataagagcattgcaaatcatgacattatctctcttgcacccatatatatctgctctagcatctatccattttccagtctcaagtgaaccaaattttccacaacctgaaatgagggagagtaaggtaactagatctggtttctctcctgatttgatcatggcatgaaataaggccaaagcttcatccatgtcgcccttctcagcatacccgcttatcatcacagtccaagaaacacatgttctggaagtcattatgtcaaacaaaagcctcgctgaacaggtatcctcggatttcgaatacatagaaataaaggtattgatcgcttctatatcttgatctgtaccgagatggattgcatgagaatgaatcaatcttccttgtgttagtgtttcagggttctgacacgatgcagccaagttaataaacgtactcaaatccggcttaaactcttcacgcagcataaacagtaaagaccaaaagcatcaaatgcttcaccaaaaactgaatatgctttgaacatagaatccaagacancacagttctgtcactctgtcaatagcttcgaaaactactttgctgaatcaaatcccacatttccataagtagaatcaagtatggcactgt

SEQ ID NO: 56962 - DNA, 519 bp, Arabidopsis thaliana landsberg
tatatttgggagatgtgatgattggaaactgaatgtgggacaaaggtttaggatcttcaaaatcgcgattgagttaattggggacgtgaagctcgtataagtattcttgataaactcatctttaacagaaaaataataatgaaaaactcttctgttttggatctgtctcacatattggagagatgctcacgttagcaaaaaatcacatgtcgagaagattaatctcaaattagtttcaccacaatgaagttgaggagatgctataaaaatatatcgaaaccgttaagtgaatatggatttatggaaaatggccagatacatcaagatcaaaccatccttctctaagagaccacttaggacctctaaagaaaacaaaaatgataaggaaaggacaaaaaaaaaatccataaaagacaatctagatgataagtaactataaaaacaaaagttaatgtctctgtaaattaccaaaacctaaactcattaacaaaaaccaatttagaattgaaacatgttaac

SEQ ID NO: 56963 - DNA, 908 bp, Arabidopsis thaliana landsberg
tttctccgttttgattttgtaactcatctcttatcctcctgcgacatcattgaaacatatcacagacaatttcgaaagacataacctaagaacagagaaataaggtagctgtttctctgaccctttttcaagattcaggtccaaccgttgtcctgctgtgactttatcgatctcgtgtctgcaatgttattgcgatagtcagtgcaactgatcgagtctatagcaaatcaaaacttaaggttttattagggagctgaccttatatcagagcggattcgctctatgtcattgcggagtttctcattctcgtgttgcagcaaagagaaatggtggtcctatacataatacacttctttcaacaatctttcggaatcatggtgtcactataaaaggtcaaaagagtagcaacgctattcgttctatcggctttccaacaatttgacgtttgaaaacacaacttaccagtgaactattaatttcacttttgaacttggataagtttgattcctgcgtcatttcagcctaccagaagcaagaaaaccaaagttagactgctgctataaccgcatcctactctttggaatagatgaagcaacaaagacttgtcacaacagaaacttactttctgcatctctcccttggagacaactaactgtgaaacaactcctaagctatcgttaagaacttcagttatagcaccggttattgcctcggcttgctttgaaggcaggccttgtgcttctaagctcctaacctgaacatcacataccaaattctactttgaactatactgttaagactatatctaatagattagcatcctattgaattttatcaatccggtctagaataaaatcattctattgtctcatttcaaaaagcaagaagcttcttgaatcactaccttg

SEQ ID NO: 56964 - DNA, 140 bp, Arabidopsis thaliana landsberg
  unsure (1)..(140): unsure at all n locations
aaagcgacagagcaacaacagacaaaacacaaaacaccccccagaaaaccaaacgagaacagaaaaaacaaaggaggcaagggacgcgggcccnccacgcagaaggaagaaagggaccaaacacacccggaacaaaacga

SEQ ID NO: 56965 - DNA, 719 bp, Arabidopsis thaliana landsberg
aaatggcgaaacggagtaagggcctaactaatttttacctgaattgatcagtgagtacgagtttatttgattgtaaatctgtctctagtaagggttgatggtagtcaattccagaagtaaaccgtgcattgcgtttcttataagcagccacaagaaccttgaaaactccagagaagacacttccttcgggtttgacaaagacataataccgagtacccacaaaaagcagaagaagcgcaaacaaattgagaacggtcgggattgcgaatccaatgccccaactgatgttgttctgcacgtacaacactagtgtcattgaaactaactggacgattgtatgagtggtatagtaccagctaaagaagcttctacttccttctcttccttcttcagtcgaatcatcgaactgatcgagactgaaaggaacactgcatgacctgattcctcctgttccaactgataacaagaaaagtcctgagagtaaaacgtataactgtgaatagctatagggaatacattgtccagcgatttggtcggcagtgcaaggtggtggtcgtagattagggatcagagacgtgaaagtcaacaccaacatgccctgttgaagttttaattctttgtcacgttacttaacattggtaccgaaaataaaatataacctcttgtaacgttccaaacactgcaaacaaaagtatggcctcatttggatcaaactttaa

SEQ ID NO: 56966 - DNA, 616 bp, Arabidopsis thaliana landsberg
  unsure (1)..(616): unsure at all n locations
ttgtttgttttattnnnnnnnnnnnnnnnnnnnnnnnnngtggtgaatagaagctaaaatttgatgcttttgtaagcaaatatatgaaaaaatcgattgcatatgtttgttttgtttaaggttataatctataaaatattttcaagtgacataactttaaactaggagttaggagaagaagatttggggataaaacataggtacacaaaccaacttttcttgtcaatttcaatttctctgtactccttgcttaatatttatttatttatttcttgtacattaaaaaatttgtgatgttgtgaatgctgttgtgatgtaggtttacatccatgtgatacaagaatacgtcatcagtgatattatacaacattaaaaatcacatggttagtcgaatttgtgaaagtgatgaagtaagcatagactttatatccaatgatattatgttttctttttcttgttcctgtgttgatgatgaaggagaagaagtttcataagttggaggcctaaagagtgtgaagctttcacacagttatatgtacaagagtagtatgaaactttcttttattnngatttactggtaatatataggcattttgatcatgttcataaaatgaat

SEQ ID NO: 56967 - DNA, 1290 bp, Arabidopsis thaliana landsberg
aaataattttgcattaaaagacattatatgaaattttcaatactaatcttttactcttttaccaaaaagattaagcattgttccataataataataaatgaaatggatggagagaacagtaaggtccctagagtgagggtgtgtaacgccaaatttcaagtatggccgtctttcaaggaatcacgtgtggtggtggagaaagagtacatacaatctgcttctctcataaacttacaaaaattagattatgcaaagtgtcatgtgattctaccgtatgttcaaaccagcattaatctttattttactttacgaataaaaatgtagattatgataaattaaaccattccatctaaagttgtccagattcaaaattagcatcaagaatcttgccaactcctcccttcggttctagccaatggagcacattcgatctacctaccgtggctctaacatcaaccactagccactatcataacattagtccaccacatttagaaaaagcaaatttcaagatggttttttccaacacaacatcaatctgtatcgccactaatcgtcgaatagacttcttttctttgactacagatcaaaactctacttctctcattaaattctacctttgttggatttattttatcttctgatttttagattgttgtctaatttaaatttcagtgtggtctcatattttgtaatgtataaaactagttgaattttatctgccgaagtacactagaacttcatgaaaaaaaactttagctgataattatcttgcttaatattcaccaatttttttttttatcttgcttaatagtttaagctgaaactcaaaattgtctgcataaaaacacttagcaagtcgatatatgatgatttatttctttgactacagaagaaaggaaaaaaatggacaattgatgaatggacatgagagagaagtaccgaccagagaaagggaaatcacgtggaagcttctttttaataaagagactttcgaattgtttacaaaaaaagtcgactcatatgactgactcactcgtttcatcttttgttgctttcttgtttggcttctaatcagaccataacacctcaaagatgctctttgattcaccttttttatttaacttttgtatctctgatgtctcaacttaattgatacttctgttggcacgggttaaattttccaattttctttagaccaattattttactatctgtatatttcccttgaaaacttaatgcttgtggtagtgggcttactgggccaatcactatgatcgtttataacgg

SEQ ID NO: 56968 - DNA, 762 bp, Arabidopsis thaliana landsberg
agaagagaaagtgagattgagaagagagatattaaatttgggtagactagtgtgggttttggttagtgggtcagtctagcgaaacaaaattagaatgaaaaatggaatgtttcaaagagagggaaacagttgagagcagatttgttggtgtttttggtataacaaacacatatagcattgaatgcaaccattgtggactcttttggaaggagtaaatgcaagtccacatctttgaatcaatagttgaaagaaaagattacaagaaagataaaaactagtaacgttccaaattgagataagatacattacacagagcttgttttgtccttgaatactcctctccatcagaaagctgagctctttttctttctccctctctaaaacaatgatggggaagaaataaatgtgaggagtttctaaagcagttagctttataatggaatagtggtcttaaattgctatgaagatgttgaagagaaattgggaaaattgaaaatgagatatgagaaagaaaggaaagaaaacaaagatgagaacagatgtttgtttgaggactgaagatgagttggtgagagagctgagcagagcaagaagaggagagagagagcgagtctctgacagaagcaaggtccctcagagaaacattattggctgtggcagttttgtctcgcagcgaagacagacaattccggggacttctgttaacacacggaagatgatatgaagaagaagaagtagaagagaagagagtttccattggtt

SEQ ID NO: 56969 - DNA, 663 bp, Arabidopsis thaliana landsberg
ttttatcgtaacgtaaagaataacttatattataatgagtcgtgattcttcgaaatgataatcctctttacatttggtggatatttatcattttgtcaatttttgtttagaaatacgaattatgatcattttgaaactggataatttgaccttttacagttttaccaaataaaaaagtccttcaaatgctgattatatgccttttacttttcggtacatcttttaacacacgtaaaaagcgaaaggtaacaaattaatactattaaaatactatttgattaaaaaagctagttgtagtaattattcagctcaattttttgcaacatgctttcttaacgggagacacagtttcatcttcccattattttagtttctgaaataatttacaaaaataatatcctctgaaaaggagaggacacgagatgtagtatctattatacgtatgagttagattataattaagatatttgaactgtcaatatatcaatcattttgacaccaatttttttttgtcaaggtatcatttctatccaatggaagtaacattattgtaatacgtttagcaaaaaaacaattattgtaataccatgtaagttgataacttcactcggctttgaaaaaggaaaaggaaataagaaacgagtcaaggcccatcaaaaccga

SEQ ID NO: 56970 - DNA, 339 bp, Arabidopsis thaliana landsberg
aaaaaaaaataaaaaaacacactacaaaaaaaacaaaaaaaaaaaaacacccaaacaacaaaaaaaaaaaataacaaaaaaaaacaaaaaaaaaaaaaacaaaaaaaaaaaaaaaacaaaaacaaaaaaaaaaaataaaaaaaaaaaaaaaaaaaaaaaaaaacaacaaacaaaaaaaaaaaacaaaaacacacaaatattaaaaaacaaaaacaaaaatcaaacaaaaacaaaaaacaaaaacaaaaaaaaaaaataaaaaaaaaatactcaaaaaaacataaaaaaaaaaaaaacaaaaactataaaataacaacaaaaaaaataaaaaaaaacaaa

SEQ ID NO: 56971 - DNA, 836 bp, Arabidopsis thaliana landsberg
gatttcatgcttcaactctatgattgatcaacttgcattattactgtaccataaatactttgccaacgaatgttagttgtgggggaaacaacaattccgctggtaattttgactgaattaaaaaattagagatagaatgcaaggagacacgtacgaacgagttcatacacgagaagcagttgaccagagtcaacaaacctgtaaaaagctaaagaaccaccgtccactcgcagtctactatatacgactaactaagattcatgcaggctcaagtttttgtacttgtatgacacgtggctagatcgtaacggccgtttagactgatgtctcttcgtctctccgagtctttgtcctgtctttttctcattgcatgagacataccgaagattccagtggattaattgtcggtccatttcttttttcctttttactactgacttcgagttagattctctaaagtagtacacgtgaaccataggattcaatatatgattacataaaacctttgttagtagtgtttgttcatttcttaattctggttatacatttgaaacatatgcaaatttatcactcgacttattaatcctaagttcgtaactaagttctttttggttaattagcttatatacttctcaagatttctgattctgacttatgctataaagtatatcttcgataagttgagtcgcatctctctcctcggaaaatattcttgtattttggacaaatttctcgtgtattgttttgatatttttgtggtcatgttgttttgtgaattagtatataagtagataaactacgtagttttcattcgtacaactatataaccaatcgta

SEQ ID NO: 56972 - DNA, 1136 bp, Arabidopsis thaliana landsberg
aaaactcgaagatcccataactaaaactccgaataaaaatgtgttgttccataagttgcgttgaggttgagatagtaacaaactaaataaatatatataaaattttcgttattatcgaaactgtatcacactttgcggttttgtcactattcagagtcaaaacatctttacaaactcttgggattcaaatcattcataccttcataaatttaaaagaggcacatttaaagctcaatcacttctttaaatataggtagatagaatcataattgatacagataaacttagtggccaaactactattagtaaccaaactcatcttttcattgaattattttgggtaaaactaaagatttcaaaattggatgcatgtatttttttttgtttggaaagtgtaaatgtgcattgacaggtcccatcgtcatgtcatttggactatggacgttactctcttgaccactcttttgagattttgaccaaaataaatacatacaaaaaaactttggggctactctgtgaaaatacactatttattggtacgagagcgtaataaaataaaaataaaaagaaacggcacgcagtttgcgttcccaaaaatatgggacgactagtcaaaatatctgcttacgtccgtcaactttaatgttgactgaaccagaataatattaaatatataaagttgtctttttcccattgtacccttcactcttttagatcttttcgggagaagaagataagctttgaataactttcaactcttagatttgaatctaacggctgagaaccatcctgcaaagcattcccaaccgtccagatcaaagcgggcccgtcgctccctttagtttcccgaaaaggaaaaaataatacaatctcgaacattagcctggcctatttctgtaattatattattcccttgttagttttattattcaaactaattcgtatttcattaagtaaaatttctaattgtactggaaaaagtcaaggaatcatgcagaaaaatagaaatagccaatttatgagatggaaaatacgtattaaaaatgggaatatgaaagaaaaaaaagttgagaatattggaataaaaaagtaaatagtgacgttggcggaatacccctatgccctttacacacata

SEQ ID NO: 56973 - DNA, 497 bp, Arabidopsis thaliana landsberg
  unsure (1)..(497): unsure at all n locations
ttcgngtgcaatttacgtaacacaccacagactttttgtttaagcatcaaaatttttcgaggttgtactaacacggctcaataactgagttttctaagtgattatctttctctcaggcatatcatcgaacaacttacaggcatccaccaaagtctaccaaagaagagcttcttcttgggtatcctctacagaagatgagttcttatgagattgggcatataaatctgatctgggcacaagccgacttcgaagttcatggcctacagagaaagaagaaataaccaaaaattgacatttttgtctgttcggataattatggctctttttggtggttgagtcaacatcaacaaggtatattttttatgtggtgagacattgacattgtcatcatcatcatcagcagctccttcacattggatatagtcatacagttacgtgttctgtctggaaaccaaagacatgaaagaaaaatttagacttgatgaaaaaaaaatatg

SEQ ID NO: 56974 - DNA, 827 bp, Arabidopsis thaliana landsberg
tatggataacgtttttttctcccttttttgacattctaaagactcgtagagatttaacaaagagcaaatatgacttcatgtgttacaattgtcaaaagacgaatcttcttttctttttctatacccgtcgaactacaaagtctaggcgtgacgagttttattataaagtaattcgttttcttttccattgcggtgaaaagtagttcattcaaaccggtaagaaatgtttgaccaaatttggtcaactatataatgccttaacattaactatcgttagactggtaaatagatgttcccaagttccgaagagttgataatgataattataaaatagattagttttagattaatccgtttgttgtacaaattgtatgaaaagtcacctaaatttttaatttataagtcagattaacgaaaatttaaaaattaaagaacgaaaaaaagggacagcttcgagggaatatgtacagctaaaacagactaacacgtggccctgatcttcgaccgtagaaaacgttcaaaagtaatcgaacgccgctggtttgttactacttctaccactaaacgtcgccgatttcatcggcttcttgacgacggaagaaggaatctccggcggagtaagcgtacgaatgagcgcaaagtttagacctttgaaaaaaggatgcactttaacctccgccgcacctcgccgtgacccaagtcttttagtcggatctttgttaagcaacccggaaatcaaattccgcgcatgaagctcaaacatagtcgccggcgaatcagtcgggaaactcaactgtcttttcacaatgttacggagaatgacgtca

SEQ ID NO: 56975 - DNA, 511 bp, Arabidopsis thaliana landsberg
ttttcattttgtgttatttttcacaatctcatatcttttttgtttgtctaactgcttctgtttctatttcaactgatttcttgcagctacctaattttgacaaatcaaagcacttatgaacttgtgagacgaagacgtattccatacatgaggtaattcaatttctatcacctagtaataatatcaggtttgtttgcatgatactaaagctattggggtttgcaggaatattccgggacgagtgcatccgtttagcagaggaattcggaggaacctatacaacgtctgttgcggaaactataatctagactcacttcccacagcgtttgaactcgaggatagatcaagaccctacacctgcatcgatatgttgaaatgtcgctgctgctaagtttttcatttatagctttatacatgcaattgtttcagtgtccatatatatgtgaaggtaacatgtttcctctaaaatttggatgatattgcatacatacaaggattcccaattatgagt

SEQ ID NO: 56976 - DNA, 577 bp, Arabidopsis thaliana landsberg
ctttaccatatctctatattccgtgctcagaaattccacttgagcatcataaaggaggtatgaattcgtaacccatttataagtctactgagaaatatactagagttagctagtcaagcaccaatgacaattttcctttttttttgcttcagtggatggaagtacacttgctttatcccttgagttagagaaggctctaaaggtgtgtattttataccaagtgagccatggttttttagtcttgactcttgacaatgagctgcgtttatgtatctggcttttttttttttttttttttttttgggggttctgcgtgttcccatagatgtgttacaatcaatattgatacttgatttgggcttgtagcttaagggaaatgctgcttcaaaaaggcaacatatccatgattgtgagattgtaagagcaaagaagttttatgggtaccactcaacagaggaggcttttgtgaagatttatctgtatcctgtatatttaattttcgagcaataccattttcttgagcagtttatcatttaatcaccttaacagtatagttgctaccatccacccgatgtgg

SEQ ID NO: 56977 - DNA, 475 bp, Arabidopsis thaliana landsberg
gttttatgtatagcatattgaccgtgctctgcgaaggtggggggaagtcatctggaatcgtacccagcaaggttctattaattggtaaactacttagtagccgtagccaacccctgattataggcaagccctgctcttgtatatcgataaagaaagggagagtttactgacggcacatttgcgtccagcggaatcgatcatcgttcccccacgaccaagacccaattcaatatcttaataggaagaatgtcttgatccgcctcgtatatctatcatttgtgttgatctggaatcgagattggaatgccttgctctgcctaatcgtgaatagtatatgcctcattccgctagccagatctctaccgtcttattgatcgaaagctagggatacttatttatttttttgatgattgaaaagctagtttgaattcgttgatctgccgataccgggccccatttcactggccagcgagct

SEQ ID NO: 56978 - DNA, 894 bp, Arabidopsis thaliana landsberg
tctcttccttcggggtttcaattgaaagaaataacaaaatcgatgtgttgctacatctaactcttatagcttcattgctcggttaatggactaatcgcttttgtttccatgtttgtttttatcttcttctttttttgtttttgccataagaccaattccataggttatgctcttcagtaaaacctaaacaattttattatcttcaatgagtgtatacaccccaaaaaaaacctgaaatgtataaattgaattaaactgaaaatgtaaatcaattggcttcattcaataaaaactaaactaaactaaatttagtagagtaacagaacaaattaaagtttttccaactagttgaaacatgtgtaatcatattatatagcattaactaaatatatttaaccgaagttgcatcatatcgaaccgaattacatatggtttgaactggttttagtctccataaaactgctaaaactaaaaccagaaaaagaatcaaaccgaactaaaccgtaattgaattgccacccaaaaaaaaaaaaagatacacatttgttaatctcagtctcctctaaacacaaggcgtaatctcgttatcccttaaacacagcattgattaactctttcagattcttgcatccgattatctcaatctctttcaaactcaacgccttaagtgattcctccactgatttaggaactacacatttgttaaacccaagctttgccactgtactcacccttttctccattcttggtacctgtaccattatccttcagtcatattcatctaactgctagataacaattatctgattcttttattgcttaccgtgcgaacctcgcccccaagaccaatctcgccaatgaatgctacaccgtaggaattgaaacctgagagca

SEQ ID NO: 56979 - DNA, 173 bp, Arabidopsis thaliana landsberg
  unsure (1)..(173): unsure at all n locations
cttgnnnnnnnnnnnnnnnnnnnnnnnnnnnnnnnnccgggtgtgcgtaatcatgctatccaacaaaacactcccatacaacctagggcagacgatgtgtcacacctccatcctcacccaggggcggctgctggacagacggactcccatgaaaagacgggtgccactgaaca

SEQ ID NO: 56980 - DNA, 404 bp, Arabidopsis thaliana landsberg
  unsure (1)..(404): unsure at all n locations
aacccaaacgcccggcccacagagagacaacgggccgagaagggccacgactcaaactcaggaccnggccccnaccaaacacggcgggtcaactcaaacccccaagcgcccagcccgcccggaagagcgcggaacagagcagaccacgaagacgcgaaagagcgcccggccgagcgacggcgacggngccgagcgacgacacccgaccagggggncgagcaacgcggaagagcgaacagccgagcgaggccaggcggcgcggcgaagcgacacccgaccaggggagccagaggcgccaccgagcggcccgagccgaggacacccgacccgggggacgagaagacgggaagaaaggcnccaaagacacccgaccagggggccgagaacggagccggaagcacaca

SEQ ID NO: 56981 - DNA, 1046 bp, Arabidopsis thaliana landsberg
taaatttaaatttactatatatttcgacttatttaggttcaattatgataaattgagtttcggttcaaattcgagtttgatatgtaatagttcgatttcaactcaaaatttcaggtttaaattagttaattttttcctaattacgaaaaataatgtttgatactatgtgacaattagagcgatcaaatgcaaacatataagcttatgagagatacaaaagggcataaatgagggcacagattttataacgggatttacccggttgaccaggaccgtaaaaccggcaatacccggttaatccgcagtagtttctaacggagctgtcccacaaaataccggcagcaaactcccacaaagccttttctaaaaccctaagctaacactatcttccgtttcccggtacacacaaataacggcgttcacttagaatttctcgcggtattttgaaatgcttttggtcaatgtatcgtggcgacaagaaatggggaccattacagctggactcgatagtgattggttgacacgtgtacttggtgttacattactagtttggtgccttcacgtagtttattttcatgcgacttttttgctgaatttgtttaattttgatcatccatgaaattcaaatgagtatatattttcaacattttgtttcgtgtgaacacatattttaataattttctaacgtttttatttaaacaaacccaaaaaagtataaaatcatattaagtgataaggacgaaaatttatttgtttttaaaatttatttgagtcttttggataaacaattttttctgtttgaataatggcaagtcttagattgtaaactcgatatttcattgtttgttactactgaattataacatcggggatagtaatatttgagctcaaagtttagtctatagctgttaaccagaattagatacgagaacaagatggtaatatatagcaaagatatgattgccgtcaaagggtcatctgctttccaatttatattcttggctatctaggtaaattctcatttctcagggtttaatttcgaatgc

SEQ ID NO: 56982 - DNA, 1313 bp, Arabidopsis thaliana landsberg
taactcgcttttcctgctttcagattatctcgagcttttgcttgtgagcaagccaattagtccgaaattcggacaaacgccatataaacattgcctgattcttggtggacctaatctctcaagtgtctcatacacttccatatggaagattgcatagctcagactcaatagggcctgaaaaatcgtaatgtcattcttgttcagacatactagtgttcccagattctgataaagcagcatggcgtcccaagagaacaaggtcaagaagcttcctcctcgcatcgtaaacaggatttggatcaatcaaacgtcctctttcataagcctctctgagaaagacagtgtgtcttttccctttagttgacacataaaacatgcccgggtgatccaagaacaaatctcttatgttcaaatcaatcccaaaacattttctgaaatggctgatcttttctacctccaccatcttctctacagtcaaattcaggaactcgtgagcaatcgcaaccgctcttttctctattcccatcacaccggatctactcttcttcttaccaaccatgtcctcgtatggccctacgtaaggcagcctctgccattccttaactttagctttaaaggtcttgctcagtctcattcctggtgggtaactatgtatgaaactaaactgaacctcggttctatcgacactgcaatcctccttagaacactcaaccaccctccatttctcaaccgcggcctcaaattccagtcttttctcttcttcctgaaccagctctaagatatgggtgttgggttcatgaccatcactaagcttaaaaagatgagggttctttgaaatcacagagtcctcaaaatcatctgggagcccaagttctctccaaaccttaaaaaccgcacgaagcggaatggactttgatatggacatagacaagagcctaaccaaccggtcaacaacaagagacaaagtagcagtgatagccaaagcctcttggcgagaaatctccatggctacatcagttaacctgcaaaagggctcagctttcacaggatcatacaagacatgaaagatgtgaggatactttcgcaggaaagaagcagcgccacgattaaggtggagcttctgggagagcctggagagaaactcaatggatagagagggaggatcagctgttggattggcgagggtaaggtcttgtatggcaatgaccttgagaaggttcttgtatttgtccatgagcttctcgaaaacagggtctcttgatctggaagctacataatgagcagacgtagtcgttgatcggacattgatgatg

SEQ ID NO: 56983 - DNA, 837 bp, Arabidopsis thaliana landsberg
agccacaagagagacacggccattggaagtgaaagaaacctaaatgtaatgagctttctactcatcatgcattgtatttatcagccattttgaatgcaaatgtgatgtttgtcctattgattttgtaacacagttctaattgtgttagaacatgctttaaccagtgcatagattgttagaaccatgcatggtcccaacaacaaaaaacacttatgcatcggtttgcttcaagcaacgagatgaataagaaactagccttacaaatacgagttaatcccaaaaactacagagatccttctctatcaactaatcatgcattgccaaacgacgagactgcacttacagtgctcataccgaaacaataaaagtgaacctaacaaatctgacattactctagaaagtcttctgcagaaacctaattgattaaactgagaccgaggcagaaacaaagaacagattcatttgactttctttatgatgtcctcgatgacttcttccatatcaagtgccttcattggtgcaaatggacgtttcatctcctacaaaatgagataaacataatctacatctttaggtctaagttaagattgaaaggcaaaaacatattcatgatttctactcacaataacacatttctcgtaatgaataaggatcaagttgattttcattctcatatgcatatagagcaagtggtgttatgagaattagtaataacaataaaccttactcaaactgaacaaatcatatgcagaagcgagacaaattgagatttgtttttattagaatgaaagtttttaccaaaagactgatgaatgtttggccaccttcctcccggat

SEQ ID NO: 56984 - DNA, 612 bp, Arabidopsis thaliana landsberg
ggattctctatctttgtattttcactaaatttcattttacttttttcatacagtaactacttacaaatttgtttattttttctctcaaattttagcattaaatttatccttaagataagcatagaaacaactaatacatttagaaaagatattctcacacaaagacacacatgcacacgcgcacgcgcatacacacacacacacacacacacacacacacacacacacacagagcatgcacatgcaccctttctcctgaaactaccacagctttaccataattaagttcgcatacttgaaagcaaacaagtagtcaatactccctcagattttatcttaccatagatatttcaatagttctgattccctactgaatgaataccaagacggccttgatagatccaaacactatggtcagaatattacatagattacaaatccacgagttctcaaaatgttaagcctttcatagagtagcacatactttaaagaaaccacgcagtcccctagaagctgtaaagatttccttgctttctttaacaaagggaagaatttacatgaagaatcagcttggttctttttagtggttttccaaaacatggtggaactgat

SEQ ID NO: 56985 - DNA, 323 bp, Arabidopsis thaliana landsberg
tgctacaatttgagaattagatttttttttaagaatatatatttgtgcagggtctaatgttttaatgagccggacctgctgttagtaatccacgaaaccaggcacgtgacaatgactcaagacaaaataaatgtaattagtaaattgatatcttctttggcgtaagtagtaaattaatttcaatgataaggaaaaaagttataggaacaaaaaaaaacactacaaaagcaagcttctagcaatggcttgattagtcttgaaatcagtagtttcatagactggaagttcttttaagtaccgccccataccgatccggtaactat

SEQ ID NO: 56986 - DNA, 222 bp, Arabidopsis thaliana landsberg
gaggacgggggcgggaaaaaaaacatggacggacccaaccgcccggaagggggagggaaggcaaacaacccgaagcgaagacagagacacggggcgggacaggggccggacacgaccgggaacgaaagcacagaggcgcaccgagacgagggaacgaacgaacggcccgacggagaggacgcagcaccagacgacaagacgaacgccgaaaacaaccgaaga

SEQ ID NO: 56987 - DNA, 358 bp, Arabidopsis thaliana landsberg
  unsure (1)..(358): unsure at all n locations
gaaaagaataggaaggaagaacacggaacacaaaaaggaccacccgcatcacacaaaagaatgtaccaataagcggaccaccaccgcacangcgggcacgagcaaaactaaaaacgccaaacacaagnccaaagacaaaangaagngcaaaggcccacaacacgcacgnggcacgaccggagaagacaaaaaaagcccgcacaaggcagagccaccgcacccacagcaaaacgccaggcaaccaccaggcgcagcaaaaaggaacaaaacccacaggacncacagccgaaaaaacacacgaacacnggaaggccgaaagagagngaccncnacacaaagaacccncncgccaggcagc

SEQ ID NO: 56988 - DNA, 1211 bp, Arabidopsis thaliana landsberg
atgctcgctcatgagtgagtaaatggcctttgagtttgagttgcggatttgatattcaaactataatatataaaatgagaaaaaaaaaacattatattatacgaaatgatggtgagaaattgacgtcctagataaaaacatcattgctttaatcatgccaagcaccactccttataagaagaatctatcatggatataaccaaaacaaaatagtataaagtaagcacaactatatgatatatcactttcacatcattctcgttattttattatgatgtttcgctttcatgccactatttatacgtatgcatctctcatgtctagatgaatatgaaaaaaaacaaaaattcgaaatctaaacattacattttataatcaagctcaaattaaagattagcaagtacattagctccaaactagttctaggtttatagaatgtaatgaaaacgaaaaaaaaaaactaagtatataattgacaattaccactaacatacaaaaagaaatttacgtacgaaaatgattaaaacacacaaaaatgattaatacatttaaaatttatttcttgagaaaaaataaaaatcagaccaaggttcgtcttccatgatcgacgacaaaaccaacctgtgataaccactcaaacgttctcttcctcgccatcgccgatttctcttctttcttcgccgtcttcttctccatcatcctctgtttctcctccgtctcaccggaggacactttaatcttcacaggtgccatcttcgtctccgtcgacaccgaacatttacaatccgagaacataaagcttctcctcctattcctcgatctcgattcacctgatcctattttcttcgaattcgaactcgtgcttgtactactgcagctactattccgactcactgacaatttcgcgtttccggcggtggttcggagttctatctccggtgtacggacgagtcctagcctgagaaaatcccaaatcgaggatgatttagggtttctgattgaattcacacgagccgtcatgctcgatgatcttcgaatctgtggttgtggacttggttgactataatcgatgaaattgtttttgattttccggtccgatctaataattccggttcgtctgaattcaaccgactcggatcttgtaatcaaccgggtcggctcgttaagtccggcgtctaaactgacggagtgacgtaacggcaaaattcggc

SEQ ID NO: 56989 - DNA, 428 bp, Arabidopsis thaliana landsberg
  unsure (1)..(428): unsure at all n locations
ctctgttatggtggagaccaagaaagattgaagaacatttctctaaacaaggaattcgaggtcctccttatcatttcttcatcggaaatgttaaagaacttgttggaatgatgcttaaagcttcttctcatcctatgcctttctctcacaatattcttcctagagttctctctttttaccatcactggagaaaaatctacggttagttctttttctcaatttcctctgtttttttatttttcagattcagactcttcttatggttttactctgtttctaatcagtcagatttttgttattggaaaacctcttttgtaaaagttgaaacagaaaactttttgtatatataaagaacacaaactcttgtgtctttnttttttttttgttatttttcatgattttggttgagatttgctntcataattatg

SEQ ID NO: 56990 - DNA, 364 bp, Arabidopsis thaliana landsberg
ttatttccatgaaaatgacaaatctggtcattcgatggtgtaaacatcagaggcatctgtatcgacaaatgcactctgtaccataggaccaacactatcatagtgttactactcaaccgacaccatacgagaataaacacaaccaagcacagagggaggacaatcatatgagtacagtatggcaactattattgcacgtgaaagcaacgtccatggcctacatggcgacaccttaagctagtataatcgttatgactttcgaaccaaaacagaagctgcagattatcaaaactacttataaaacagagaagtgatactcacactttagtagcagcgccgaaacggtcattaatgtcatgggttg

SEQ ID NO: 56991 - DNA, 469 bp, Arabidopsis thaliana landsberg
ttatttgtgatcagtcaaaaaaattgaaaaagataatgggactcttacactatagtcacaaaaacatataaatgaagaattggttacttggtcaaatcaattatcgattactatatatatatatgctctcgtagatcgaaattctttagtcacatcagttggaaaatttgacaaaaaagtaaagcgaaacaaaccacagaacaattcacactaaacacacaaatgacaaatcgaactgtgtaagatatacataattacaaatacggtcaaaaattcaaaaacggatataaaaataccccggacataaataattgtttgaaaaaaaattcaagacttatgtatatatgttgcacaaattaattatttatatggataattggttaattaaagaaagaacctataaatttcagcttcagaagttgaagaatttaaccttagtttcttctactaggacgtggcattcctcttc

SEQ ID NO: 56992 - DNA, 333 bp, Arabidopsis thaliana landsberg
  unsure (1)..(333): unsure at all n locations
cccgcgctcgcacggccccggctcggatccgaccgacactttcccctccgccgagnacgacggaagaccaagggggaactgaaagangaaaaacccganaacccaacgcccggcgnaagagaggagaccggacagccagcgcacgcaggccccaagcacgcgcaacgaacaacccaccacccacccgacgcagccaagccacgggcgacgccacgcccgacgacgagccccggggcccgcgccacgcacccaaaccgaaggaaacgccgaggnggacacaccnnagcccgcggcnacaccaccgaggggaagacgagggcacaaacaacggcg

SEQ ID NO: 56993 - DNA, 776 bp, Arabidopsis thaliana landsberg
cgaagttagaacatcagctactgctgcgtcatctgcgaagaaaccccataaagagcatcagctggtggcagcacttgcaaagtattcttcgtcttttcctgaaaaggtcagttggcttaatgtaacatgccttggctctttctttgcgttaacttgtaactatttgtttcccaaagatttcaagtgcgttctgtgagtctgcaatattgaaaagattacgctggtatataaagttaattcaatgtttcttactttaagctggttgctggcgataatttcaataatttacttagagaaattctactgaacttctaacattttagtacattcttgtgtaataccatcagcctagatgctatccttttagagaatcctctgctcaaacgcatctgtttctttggagtaccattgaaattgttttatctctacattccaataattgatagttttggcatagattaggccatacagacctttggtttattccgcagtggccttttatccgcctttccaatgatagctgtataattttccctatggttctttagatttagcaatatgcatagcaggttttctagatttcagttaaagttggttcttatgattatcttgaattatgttgtagtaaattttctaaatttttttgaatcctatatacataactatcaaaatgtgagccgtcatttgtaggttagcgatgatttctgtttgcattatcactgcgttgttacgtttcagtgtcctctgtttatatgatgggtaatcagaagaattca

SEQ ID NO: 56994 - DNA, 1238 bp, Arabidopsis thaliana landsberg
acgccagcaccttacaaaggacaacggattatgtttacgtttcagttttatacaagttactccataaaccttcgagcttccagcaactttggcttctctgttgtgaattattgcttattatatcctcaacacgaaatcaaaatgccaagaccaaggttacgattttgactaagaaatctccattttctcacatgagtaatgatgtgatttaagattttttgttgttgtttgtatttctctagagtttcagagttgtctcagaggcaagctccaaggctgaggtcatcgtcatctacttctgattccaatcattccaaccgtctgatcactacggatcaaagttttaagcccggtgttgaccgtaaatctcctcgaagcggtggacctaacagtgatccgcttggtcagaagaaacttgggggacgaatatcggatctagagtcgcagttaggacaagcgcaagaggaactgagattgctcaaggagcagttggctaatgctgaagctgtgaagaaacaagctcaagatgagcttcataagaagtccaagaaaccaaacccgctggctcgagtggaggaatctgcaactgaggctgagaggattgatagagacgaaatccctggtgatgtgcagaaagagactgatgtgtttgaggttcccgttgaaaagattgcagtagaagaagaagaactgagaagcggcaatgacgaagctgagaaattggttgcaaaggaagatgagataaagatgctgaaagctagactctatgacatggagaaagagcatgaatcactaggcaaagaaaacgagagcttgaagaatcagttgagcgattcagcttcagagatttctaatgtgaaagctaatgaagatgagatggtttcaaaggtgagtaggattggggaagagttagaagaaagcagagcaaagacggctcacctgaaggagaagcttgagtccatggaagaagcaaaagatgctttagaggctgagatgaagaagctcagggttcaaaccgagcagtggaggaaggcagcggatgctgcagcagcagttctttctggagagtttgagatgaatggtcgggatcgatctgggtcaactgagaagtattatgcaggtgggttctttgacccgtcagctgggttcatggatccaccgggaatggctgatgattatgatgatggactgagaaaatggcaagaggaagagttctgggatgaagatgttggtgagtt

SEQ ID NO: 56995 - DNA, 950 bp, Arabidopsis thaliana landsberg
tgtggtgtgcctcatcagtcgtttcatggccaatccgacacaattacacttcgctgctgtgaaaaggatcatgcgatacttgaaaggtactatggagtatgggatttggtataggaaagagggaagaacagggctcatcggttacacggatagtgattatgcgggcgacattgatgatagcaagagcacttcagggtatgtgttcttgttgggtggaggagccgttgcatggtcgtcacgaaagcaacccattgtgacgttgtcgaccactgaggcagagtacgttgcagcagcaacttgcgcttgtcaagctgtttggatgggaagagttctaaaagaaattggatacgatcaaggaggagaaatggtgttgttatgtgacaatacttctaccatcaagctgtccaagaatgctgttttacatgggagatccaaacacatcaaggttcgttatcattttctaagagacttggttaaagaaggagtcattaagctcgtttactgtaacacggaggagcagctcgcggatatcatgacgaagccgttgaagatggtaacgtttcagagaatccgtgaagcttttggaatgagaattttgaactgagttcttgagagagttcagttcaggggagggattgttgggtttgttgtgtcgtgtctttgtttccgcaagtttaggaataatagagacgtgctctctttagtttgtttcagtcaattttgtttttgtgttaatctagcttagtggttgagctagtggagttgtgtccttggttttagtttgcttctgttattagcttcagtggttgtaaaactctaaaacgcattgagacgtgatgaataaagtcagatcatttcagtgcaatattgtgtcttctctgaaattacaatcacaatattcacatgcaattttacgcttgataatatttagaaaaaataaatccattcat

SEQ ID NO: 56996 - DNA, 1363 bp, Arabidopsis thaliana landsberg
ttgtattgattccgaaaacaagattatcaacgacaataaggggtacaagaagaggcttacaggtctacttccataaggattcatcagccgcagcaaaattgagaaatttacaaaccaaggagcatgatacaagatcctgtaatgacattcaaacaatttagtttaaaagcaatcctcaaacatcaataaagtacgagtttgaactatatagtatatacctccgaagataagaacttgagaatatgacgaaacagctcaataggaacattggtgaaaactccactctctattctctttgcatcagttttatctttgttaccattttccttttgatcttcatccttctctagagcctttgtttcgcctttctcaatacgttgccgttttgcctcaggttctttcgtttcttctttatcctctacctacaaaaaccaaagcatcaataaataatctaacctttcacaggacaacgctgaacaagagcaaaatcacaatggacattaatctaagaacatgaacaaaaattatgtgatttttcaaaaatttcaaatgtatgcatataacatcaaatttacagatcaaggaactgaagttatcaaaaatgaaaaaaaaaaactaggggaacgggaaaatctcgactgaatttcagattcagctacaaaattcaaagattgatggagaagaaattactaaaccctaaatgaaatcgaaaatttgaataaacggagaaatttttataccgatgagacttctgattcgaggaatcgagcgaaacactcatcttcctcatcggaaacagacatacttttcagtcggtgaagatcaaagctcctacgacgatggttgcgtttatgcggccaaggaaaggattggagagagacaagactcgagagggttggcgtttggaatcggtggcgtgagattggagacgacctcgggccgaataattttgataaatgggctaataacctaaatgggccatatattaataaataagcccataacactaaccctcctccttgtcgttagcgtcattaatacaaattagctttctaaacgtgattaaataacaacatttttctgaattattattacgagttaacgacgttcgaactactactataattaaattttcttaaaacagaacatttgttattggatcagcaactactttttaaggagttttttcatttaaggaaatgttatattactagatccactaatcgacataaataaaggcatattttaccaacttcagtattacactgtaaaaaactaaaaattatattacaccattttttgtggaaaattttcatatttttaagtaggatatatgagcatatttaacaaatgtgttaatctg

SEQ ID NO: 56997 - DNA, 391 bp, Arabidopsis thaliana landsberg
  unsure (1)..(391): unsure at all n locations
gaagagacacnagaagaacgcgccgagaagacaggaggaccgcagcccgaccccgagaagggacaaggagaaagcaaagacggggaggcaaacgaaagcaaggcgacacaaagccccaacgaagccaacaacncccgaaccgaaagcccgacaacaccacgacaaccgagacagcgcacagaaaagacccaccgaaaccggaaagcaaggcccccccacaaaaaangggaagaaagacaaagcgggcaaggcaacagcaaaagncgcacgcggggagaccacnacggcgacaccggcgccgcgagcaaaaccagaacacgccccgccaggaanggaccgacgaacccccaacccaaaacnaggggngggaccagaccaaaaaggaaagaac

SEQ ID NO: 56998 - DNA, 1102 bp, Arabidopsis thaliana landsberg
ttggttctggtatgctgtgctcttctttaatcatgtgcacttattgtgtgatcaggtatataatggcggtgacagtctccgactcaactggtgaaacttggttatctgcattcaatgatgaagcagagaagattatcggctgcacagctgatgatctcaatgatctaaaatcagaggtaagaaaactcaaaacatatatatcaactggaacacagtccttattctccatgttctgatttaagatacgatgttatgttggttttctccaggaaggtgaagtgaatgagtttcagacaaaactgaaagaagctacttggtcatctcatctcttccggattagtgtttctcagcaagagtataacagtgagaagagacagaggataactgtaagaggtgtttctccaattgactttgctgctgaaacaagattattgctccaagacatttccaagaacaagacatctcagtaattctaacttttagcatgttttgtctggttttgtcaaagagtcccaaagttgtgagtttttctgcagtcggttatagtagttcatgtcattagagaattgacttttaaatctttgtaagtgttccaacaatcaattcagagagccatttggaaaaagtagaagcaatatattatgaaatcgaagaaaatggaaacatccatgggtttgtaaaaaaaaatcctaagagaacataaactagcataagaaagaaaagaacaaattcaattggagaatcactgttgctgaggcaaaggagacttcaattcctggtaattgtgtagacttccagtgaaatcagtgaacaaaccatcaacaccgatcttattgagccaataatcatactctaggtaagggtcctgattaaactctaaatgcagaaactggttctcattacggtatgtgtatggatggacctagcaaaaacattattcaacgtgaagtttaatgaaacaaatcagtgatgatagtaagagagtggagacaggagttcaagtcctacacacaaacctgaagattacgcgaatgtgctctcgcaactaaatctgttggtatcatgagacggttattgttcacaggaacaattgtgtctttcc

SEQ ID NO: 56999 - DNA, 496 bp, Arabidopsis thaliana landsberg
  unsure (1)..(496): unsure at all n locations
ttttgttcatacttctcaatcggtctaattaggcgattacgcttaaaattaaaaataatgtaattctttcttctttctttcaaaacaattacattagtttagtaacaaaaatattcactgcagtgaagacgacaaaacgccatcgttttgggaaggggcggcgttgaagacaggtgcgcatgtttccgcgttattctaagctgtaatcaggacaaaatgtatgtaatagtcatcgacggaccatcttttattctattttatttttattttatttatataattattctctctctttcatcttcgtggtttgccatagctcttcttgaatcaaggtcgtcttcttgaaatcagatctcttcgtgacttctcctgtaaccaacaaagaaccatggagctcctctctagagctcttttcttctttcttctactctcaagtctttcttctttctcttcttcaagnttcatttcaggtacacacatacatacacactttcgt

SEQ ID NO: 57000 - DNA, 337 bp, Arabidopsis thaliana landsberg
ttatatcctttataaaggattttgctttttcaccaacaaaccctaaattcggtgtctcagcaagaatcacgtgattctcgttcctcttcctcacgaaacccatcatcttctatctcatttgtaagcagcgatctcaatccaaatacctttaattttatttgattccataccctaatttttgtatattccatgtcaatgaacgtttcaggagaaatgggtcaaaagttttgggagaatcaagaagatcgagcgatggttgaatccaccataggctctgaagcttgcgactttttcatctcaacagcttcagcttccaacactgccttgtccaagcttg

SEQ ID NO: 57001 - DNA, 1095 bp, Arabidopsis thaliana landsberg
ctaatgacgcattgtttatcctggagacattggttaaaatgagaattttgacaactcctcactccctgaatgtgattcttgatatgctcagtaaaggttgtaaagtgaaggaggaattagcaatgcttgggaaaatcaataagcttggtttagttccttctgtggtgacatacacaacattggttgatgggttgattcgatcaggtgatattactggttccttcaggatcctagaactgatgaagttaagtgggtgtttgccgaatgtctatccatacacaatcatcataaatggtctttgtcaatttggaagagtcgaggaagcacagaagcttctttctgctatgcaagattcaggagtttcaccaaaccatgtcacttataccgttatggtgaaaggatatgtcaacaatggaaaactagaccgtgctcttgaaacagtaagagcaatggttgaaagaggatatgaactaaatgaccgtatctattcttcattgttacagggatttgtcttatctcaaaagggtattgataattcagaagagagtacagtttccgatattgctcttagagaaaccgatcctgaatgtatcaacgaactcatatctgtggttgaacaacttggtgggtgtatcagcgggttatgtattttcttggtcacacggttatgcaaagagggaagaacggatgagtccaacgatctagtccaaaatgtactcgagagaggtgtttttcttgagaaggccatggacatcattatggaatcttattgcagcaagaagaaacacaccaagtgtatggagctgataacacttgttctcaaatccggatttgtcccgagtttcaaatccttctgcctagtgattcaaggtttgaagaaggaaggagatgcagagcgggcgcgggagcttgtaatggagcttcttacctcaaatggagttgtagagaaaagtggagtgttgacttatgttgagtgtctcatggaaggagatgaaactggtgattgcagtgaagtcatagatttggttgatcaattgcactgcagagaaagacccaccttctaaaattattattacacatatgattttgtgtagc

SEQ ID NO: 57002 - DNA, 1125 bp, Arabidopsis thaliana landsberg
taactctacttcactagaaacctgtacaaccaatctagggattagctagtattgtcagtcagtttcgtgttggcctaaaataaaataattttgaaacactatttcaaataaaagaatgaaataataatggagaagtacggttgctagatttgtaatagggtagctaagacgtagtcagtgtttgaaatagtagagaaaggtatgggacttagaccaactttagatttcaactgttgttcctgacattaccaagactcttctattttagtttactttctgttcgtgtacttcttctcataatattgggacaataagagtcattttactccatactcattgaaatgtttttaatttaatttccataaaagataactattacaaggtatcaggtctaataatcatatattctgacctttgtcatgttaaccaagaaataaattttgaaagcaaattttaattaatttgtaactcaatagatcacatactatttggtctgttgtatatatgtccattaatcttttgtaatttgtatgccaagtagacttatggctctgaatttcatttattagatttccttttacaaaagtggatgaaaaatggtaaaaccgtataagtgttgggaagaggttgcattgaatgaagaactctaattaactctatggaaaaagcttagataagagattgaaatggcaagaacggtgattgatatatggactgtgtgcattcgtgtgtctacacaaaatatggtaacatatatgcatttgaagtagcttaaattgaggaagattttgcaataaagattgaatagtcgcaatgttgtgacataattataatcggtcactatatttagactggggcctgtcatattttctcctaacaaaaaaactataaaattatataaagttttgagtcttgacataacatagaaaaggctttaccttaccatatcactttgtattattattttctctttgcccactttctccgttctttcttattcattgaacataggtgacatgcacccttgcatccaaggcatttgaagaaacaaatgaatctatctttatttgttatataatccttttatttcctttgttttcggccatattataaaaaaatattaaa

SEQ ID NO: 57003 - DNA, 474 bp, Arabidopsis thaliana landsberg
  unsure (1)..(474): unsure at all n locations
gtacttgtgctgcttgaaaaagtattggtctttgggacaacatacgttgatgtcgaatttgactcgctaattcggttggcaccattctcaacagaaacacatgaaagatgagatacgggtttcatggcttcatcaagctgactctgggttagggccataacctacaaggtaatatgaaaaggcttcagatatttgcataggcgtgattcataactagtagagcatgagtcataaactattttgattattatccactatgactntctctgtcctcaattcttactgctttctgttntcagtaaaccattctatcaattcatataaagtgactatgagatgcggcttaaaacacaaccgttttagatgacattggaaaggtaagcaagaatcttgcagatacattttttgggatgtccgttttcgattttttagaaacttgaccaagtcaaaaaaccttgacaatatatatatact

SEQ ID NO: 57004 - DNA, 381 bp, Arabidopsis thaliana landsberg
aatagaatctaaaatcacgccccttcgtcacacaacgaagcgagcgacaacatattaacaagatgcgaaattaaataaatcgtcgtgcgacgaagcgtgcgatgcaccacacaaataaattcttgaaattaaactcattcgtcacgcgacgaagcacgcgacgcagcacattcattaaactaaatttaaactaatcaaactaaaattcaaacgttgtttactagagctacccgcgcgaccaaggatgcggcagggcgcgacggccagggcacagcagccggggacggcggcgcgggcatggccagggagggcgcaaggcgcgcggccaaggagggagtggggcgcgcagccaggggagggcacgtggtaggggagaggatg

SEQ ID NO: 57005 - DNA, 892 bp, Arabidopsis thaliana landsberg
agatcctcagtatttggtgttttgtgaaacatataacatgttctttatacttttcttccttttttttagaaaataataatttgatttagttgatttttttcgaaaagcatagaattgggttttggattgcactagtcaatcagtttataagtggaaaggcaagttctatatatacatactaaataacattataagttttccttaaatatttttataccatgtcaaggattataactaatctaacatctatccgtcaaaagttacttaagggttgggaaacgcatatgtttcgtatttgtttaggctagtaagaagtaagaacatacgaaaaaaaaagacaaagtattagcaaagaaattaagaaacaaaagtatccaattagcaaagaaaaacaatgcaaatgtggggtttcaagcaataaacgtgagtcatgacagagagatttgcctcctggcgtcagacacgctttgatatcctcttcttaattttttcttccttttctgtttgtttatttattattcccaaatcaaatgattagttgttatcctcattgattattttttggttatcccaattcaggacaataatattaataatgatgacaatgatttgtttcatgaacaaaatattaggtatgtgtgcacttcaattttttctatctttttttttttttttggttatagacaaatctttctgaatattctgtcaaaaacattgatatatgttagatatcaaacttatgaattattaaacggagccgtacattgcatgcgaaacaaagaacaacaatatggaataattagagtactaattaagttatatacacaacatcctctcttttttttttccttacaattttcacgtttttagtatttcattattgtcgagtgat

SEQ ID NO: 57006 - DNA, 1031 bp, Arabidopsis thaliana landsberg
tagagtctttagtatataaaactgttcaagaattaaatgaaagagaatatgtttgagtaaagagggggatagtttcgttgttccacaccacgataagaatacaaaggggaaagcaaatatgttgaagaagatacagaaagagcagcggggctcttactcaaatttgtgcattggtttcctagtttgagtagaatggtttctactccacctcgcttaagatagggacaatgagagggttcatctgcgcaatgtatacaattgcccacctgccaatgcgaagaaacaaaaacgatgtaatgatatgtaagacaatgaatgaattgcatataaggaaaggatttgcacagcgtttagtagaagaccaataatgttcatgttgtagaaactttctcttaacatgaatactaattcattgactagagataagttccacagataaatgagaagtgtcaagatattacgttatcctatcaacaacaaaaatggaagtagtaaaggctagaaggatctatatcttgatagtttgatggttaatgttgatcagcaacaatcaaacaagagagggttggataaacaaataacgggctggatacaaattcccatggttgtgaatgcaaagcagtggctagcaagtagaggaaacatagtgcatgaaacataaacttacatcatccaacagcagacagttgcggtgatgaccaatgtaagatgtaacctgtttcatagaaacaagacaaacaagtacataagaagtcaatgataaaaaaagggaaaaagatcaacactttttccagcacaagagttagaactgtgacggtactagttgcttacattgaaaaaaacccatcacaggaaggaacaaattcaaaaacaaattagcaaaagtcaatgagcaaatataaagtcatcaaccaataatagtttctaagctcagagagataaataatgatctcaattgataccgaagaacactttattaactttgacgaagcaatggatcaaagacagcaaaatgatgactaaatcaaagg

SEQ ID NO: 57007 - DNA, 1460 bp, Arabidopsis thaliana landsberg
  unsure (1)..(1460): unsure at all n locations
ctccttatcctcatcttcaccatcaccaccaaagttttcatcagataaagctttctctttcccttttgctttctcacgacgcctgtaggaaccactaggtccagcctcatcctccggcaaatattcccctttaccttcacatgctacaacagcaagagttgcgaggttgttctcatccattgattctaaacgatcaactctattatgcgccttatccccttcttctttatctccacggttactcggtccttcttgagatccagcactttccatcctcaacaagtctctggtttctccttccatagctttcggactatctactcgaaccaaaacaagcacaaaagacgaagaaaccagctcaaaatccatagttgtcattaatggaagagacgcaaacattattaacttgatataaccatttttcacctgaagatcttttggaacatcctgcttcttcattctttatatcatcattggtttcaaccttatcctcaaccatttcaggtttcatatcctcaacagaaccaccaatcactgcaaacacacaagaactctcattatcaaaaaagataacttatcatatagcaacctgaaaatggtctattcatttcattacttgcttggttcacttgatctcgttttctcaattcgacatctacgctagcatcttcttcgtcttcaatacttgtgctattggaatgaatcgccatgttggttagtcctatatcaaagaagttaggagagagtaattttgcctttcccgtgaaactgatatctgcacatcttaagcttagaccgttgctaggagaccacactaattctgttatagcatcaacagcagcaaacttcattcttgcttctgcatttgcagcaccagtacccgaagaacaacgaagactcgaagacgaaactcctcctaactctttactttgctcatctccatctcccatacctcctgaaaccaatcaccctgagacataaagaaccagaatccatacactattgacctcaaccacaaaaatgaatatcacttagcttacaaaacaagtaacacaaacccatcaaaaatatgcaaaacagagtaatcaaaaccctagatttattttctaagatcataaactcatagaacaacttagagaagtaatttgaaattttgagatttggaatattagggataaaggaaattgataacctatatctcaagcaatcactcaatcttcagaataaagttttgcaattactgaaaaccctaaaatccataaaaacttgagaatcaaaaacccagaaatctcataacataaaaaatcaaactttcaaagaattaaaaccaaattagaaaccataaattacctccatggatattcaattatctacttgagcaaatccttcacttactgagaaaacgaangagagagatgaagaagaagaagaagaaggaagaagacgaagacgacacagcg

SEQ ID NO: 57008 - DNA, 802 bp, Arabidopsis thaliana landsberg
gcaattacttcatcgctgaagagtaccttctctatgtgcttctctaacgccatcgtcttcctcctacttacctccacaacgaagctttttgatttgggtttttagggtttgattctaattgctattgtaaaaaaacgcgggagcttaaccgaaactaaccgaaactatttaccgtcttctgttaaacagacccggtacaaaataatttggaattgccaaattttttgaagtatatcaaattggcgctagaacgaaattgaaaacacaaaatcgaaatccctagagagcagacgacgaagacgaagaaggagaaggagaaaaaatggcgagtactctcttcatcgctctccaatgttacgagtgttcaactatgcaggtattaaactctctcgctccctcctcttctatctctgtcaatttatatattggttagtttttagggattttgttttggggttcgaattcgcaggtgaagcagaagaagaaaagtagtaacaagtgggtttgtgtgatatgcaatcagaagcaatcagtgaaaaaggtgtttgctcaaggttataaggctaaggagcttcgtttctttgtccaatcgtttaatatgtctcgcaaagttgccgatgaagaggcacatgctgttggagattcgtttccagaggtttatgttgaaggagaggttaatgaggaggttaatggaacgaagaagcgatctgattggagtcaatacctcgaaatcgattcagtaaatgatcgccggagattagctggagaagaagacggtgagtctaattcgagaatcaagcat

SEQ ID NO: 57009 - DNA, 1300 bp, Arabidopsis thaliana landsberg
gaccaccataggatacaagtgaatgacaattacctgaaacattgttccggatttgcatctagccgttttttgaacttaagataagtcctatctgcattcagggctttgtcatattcatatttctcatcctcccacttttcttcggattcactctcatcattgttgccggttcttttatccttaatagacagagacgaataattctgtgagaatcgatcaacttcttttgaggggatctcttcctttgtataaatgtagaagcacggaaccaccgcaccagtctcaagtttaatatgatcctcaactcttgtttcagatttcaaaggtgaaggctttgctttagtccctgaactagcattgccacttggtttactcttttgtttcttcgtaatggaagccgcagcagaagaagcctctgccagcgccttagctaaactcgcaaaatcaaaatcttcatcatcatcatcatcatcatcaccgtctaaccgatgtgttttaggaaaggccacaggcaaatccgctattttagttgatcctttctcttttgctatagctttctgaatgctaaaagctctccaactgacacagtaaggagcaaatttcagaccgtgagatcattctctcatataagtgattgagagtgatcaaagaatcataagtaacaaaaaaagaagacaatacctttgttcagaggttccacatttaggcatcaagcaaccaaatatatagagggtacgctcttggatgtctaaaatttcagttgagattggggcatacacctaaatgcagagaacgaaagagaccaaattgttctaattattcagcttcttaaactcttgaaacctaagaagagtgaagctttggatttgaacaaaaacctgagctacgagagaaagtttacttccacatgaacaacaattgagtagttctggtttcagtgcatcatcgggtattggcggccaatcctaaaaacgcactttgatcaaaaatcagaacgaaagaattgagctttctatgaaaggaaggaacagagagagctaggaaggagttattaccggaagaccaccgattttggttgtgtagtgatcagaaggctcaagctcatcttctgcccacttcccaggcaaccccagaagaattccgaccattgttacagtttcccgatcaaagtagaacagagctctttggtgaaaatagctgctacaaggtttcgaaactttcgttgtatcgaatgccatgttgttgatgatgaagagaagagaagagtagaccccggctagtgctttgagatatagaccta

SEQ ID NO: 57010 - DNA, 261 bp, Arabidopsis thaliana landsberg
  unsure (1)..(261): unsure at all n locations
caagaaaacgaaaagagcaaccagacccaaaaaaaaacctcancctcccggcacagaaacnaagcaaacgagacaggggtgagacgcagaaacgaggccgcaagccacaaaggcgacaggagcaccaaacaaccaacgagggagagaagcccacacgcacgcagggcaagaacgagacacgaaaaagacaggacaccccaggacaagaaaaaggcaaaggaaccacggaagaaaaccagaaaaggaacgcaaccaaaaggg

SEQ ID NO: 57011 - DNA, 487 bp, Arabidopsis thaliana landsberg
  unsure (1)..(487): unsure at all n locations
aggaacacaagcgcccacgacacccgcacaagaggagaaaccggcccaaaagctaaacctcccggaacgacagcacaacagcgggacgggggacgaacagaacacacccgcccagcaacaccacaacaggggaacgaaacaaccacccgcccgacaccagcagcaagcgaccccgccccacaggcaccccgagcaaaggagacaacacgggaagaagcaccaacgccgcacagacacgggcaagaagcccacagaacgcacgccgaaagacaaagaacaagccgacaaccacaaacccccgggcggaaaaacaaacacaaccggcggagacngacgcccaacaccaccagggagaaccaaagggagccgcaaacaaaaaacccaagcgccacccaccaccccgcgaacgaggaacacccgcaaaggccccacaccgaccaagcacaagcggccaacgggcgaggcagacccacaccaaaaagacaac

SEQ ID NO: 57012 - DNA, 451 bp, Arabidopsis thaliana landsberg
  unsure (1)..(451): unsure at all n locations
ctcgtgctctcgtcaaaaatctacgacgcctcgtgctctaaatggtggtagggtctgatgaggagacactaacatatgaaaagagggtttgtttggtagccacagaaaactaagtgtgatcattaaggttgaaacaaggtatgtccttgtttgatctacaggagataaccatgtgaactctcataatataaaagttttttttggtgggcattgntcttcatgtaccatcctactctgtgtgcctctacttttgcagcatacattacaccaaagaaaacaacacataccaatcccataattctcataaatgatgcctaagaaccaatccaacaatgacaacacttaccaatcccaaaattcatgacacaaactcataaccggttggttctggtatctggtttatttggttaacaccaaaaaccgggaacaatatggtgaatggaaacattta

SEQ ID NO: 57013 - DNA, 260 bp, Arabidopsis thaliana landsberg
  unsure (1)..(260): unsure at all n locations
gcgcgagagccaaggggggcgaagagaggaaaataagacggggcaccccagggacccaccgccacagagcgcgaaaaggaaccaggcccgaggaaacagaagaggcacgcacagagaggacaaaaaaaaaacggagcgaggagaaaaacaaacacggggaccaaaagcagaacgcaaaaacccggagcgcgaccaggccgaaaggacgcangggagaaaaccaagccacaagccagccagacgcaagaagccgcaaccag

SEQ ID NO: 57014 - DNA, 529 bp, Arabidopsis thaliana landsberg
aaaaaaaaaaaaaagaaaacccaatagaaaataaaaataaaaaaaaaaaataaaaaaaaaaattaaaaaaaaaaaaaaagaaagaaaaaaaaaaaaaaaaaaaaaaaaaaaagaaaaaaaaaaaaaaaaaaaaaaaaaaaaatagaaaaaaaaaaaaaagaaaagaaaataaaaataaaaaaaaaaaaaagaataaaaaaaaaaacaaaaaaaaaaaaaaaaagaaaaaaataaaaaaaaaaaatgaaaaaaaaaaaaaaaaaactaaaaaaaaaagaaaaaaaaaaaaaaaacaaaaaaaaaaaaataggaaaataaaaaaaaataaaaaaaaaaaaaaagaaaaataaaaaaaaaaaaaaaaagaaaaaaaaaaaataaaaaataaaaaaaaaaaaaaaaaaaaaaaaaaaagaaaaaaaaaaaaaaaaaaaaaaaaataaaaaataaaaaaaaaaaagaaaaaaaaaaaataaagaaaacaaaaaaaactttaaaaaagaagaaaaaagaccacaaacccaaaaca

SEQ ID NO: 57015 - DNA, 101 bp, Arabidopsis thaliana landsberg
tttgatttttcttacaaagccacggcaaacactggggcgatgtgttaggacaggacaccaaaccttgctcttaccaatcatcctcatgtgacatcagacga

SEQ ID NO: 57016 - DNA, 272 bp, Arabidopsis thaliana landsberg
  unsure (1)..(272): unsure at all n locations
tgttcacgnnnnnnnnnnnnnnnnnnnnnnnnnaaaggggggttgtataacgtgcttattgcaattgccagactctaaagagcctgaactggtcattgattgttacatacactccaggtcatgattgggcaaatcagacacctgatcgcttacgtggatgcgggagccagtacttatactgcgcgtcatcatatgaactcnnnnnnnnnnnnnnnnnnnnnnnnnnnnnnnnggctctatactaccatcgaaggttatcatggcgaaccttt

SEQ ID NO: 57017 - DNA, 126 bp, Arabidopsis thaliana landsberg
accaccgggtagcgagccacagcaaaaaacgcacgcttgacaaaagcaaaaagagcttaacagagtaaaaaagacaaatcctgctggacaagaaacatgcccagcggaggaaaagacaactgacga

SEQ ID NO: 57018 - DNA, 125 bp, Arabidopsis thaliana landsberg
cccatgagatgttactcggctaaccatctgggtaagcacgaggcgagccctatacgatcatagccggtgcgaactatgacacggaacctaatccacaatgaaccttgtttaacaactcagatacg

SEQ ID NO: 57019 - DNA, 992 bp, Arabidopsis thaliana landsberg
gaaaaccaacgaacaagatttatcacttgttattttaacatcattatttctacgatttatcatattttggattcttttccttctttgtatagaagtcgttttggtgcgaaattagttacaactacatcaactgtaaatttgactcgatgtaatatctactttactttatggcaaaatcagatataatatcaggcgatggttttaatttttaaagcaattattattggcgaagaatttatacatgcataagtataaaccttatttttcattataattgatttttaacctgttttatagttgactcattgactaatttacaggaaagggattaaagcatttgaatgggcctctttaagggccaccacaccaaccatcatgaatcttgggtctcgatctgttaaatggctcgttatgattggttaatggttaagcccgagtggatgggtttttccacaatggacttgggccgtaacattccagtatacaacaaaattaatagatggttatttcttaaatacaaaaagaaaaatattttacggtatgcgtctgagaaatcccctgagaaaaccagaatcagaatgaaccaagaggcaagagcctaacctatcgaacatgaagtgttcggtgttcctagtgataacgttcctttttagcagattaatcaatattgcgctccttatgtatcttcttcatctccgtttgatttctttaattccatttttctctgtttgtctatatcattatgtctcgtgcatgtcatgaattattggaagttactattgaactgatgattagccatgcacgagcgggtgatggtagcagacgtaaaatgatgaaaagaacaagggtacaaatgtaagtcaaacaatgtttctcactgggcctctcttcgctgtcttttcgaatgattctcaatttctcatctccttattccgttcaagactctcatcattgttgtaccaaaaggacatatatatcttcctcgttaatga

SEQ ID NO: 57020 - DNA, 545 bp, Arabidopsis thaliana landsberg
gacgtttccgatgacggcaccgcggcctcacacgcaatccgcacacgccaccgcaggtttggcccgataggtgggcccgccgcacgaggaggccgaccagcaccggcgagcagcgcggcgagcacgccgccggacgcgaacagaccgtagtcggagacccgcccgccggcaagggcggcgagggcgacggacagcgtgcgggcacgctggccggaagcgaagagcagcgcatagacgaactcgacccagccgagcaagaaggcgacgagcgccggggtggcaacaaggggcatggcaagcggcagggcgaggatgcgcaaaggagagaagagcccggccccgacgatcatcgacgactgctcgatctcgcgcggaatgccgacgaagccggatctcatcagacaggtcgagaagggtgcgaggatgctgagatagacgagcgcgaggccgaagacagaagagaggaggccgagccaggccagcgccatgcagagcggcacggcaagcgcgaccggcagcagcatggatgagcgaacacagagaca

SEQ ID NO: 57021 - DNA, 1035 bp, Arabidopsis thaliana landsberg
ttttgcttgtggcttttacattcttaggttcggggggggctagatgagagaatggtccagcttctaccagcagctgctttttccctatgtgctggtttcaaggtttcacttccattgcctaaggaacatcttccaacaccatctcaatgggatgtgtgtgaacaggtgagtgatgtggtgaaggtgctggttatgtttgataatttttcatcttatgaaagaatcaagactgttactggaatttgtttttctttcttctgcagatagatgatgttgatcgagaaagaaattttggactctttgaatgctctgtggaggctctaacaagaatttgctcaaattctagcaaggtggaggatccttgatttcttttccgccttttcctgactcatttctccgctgacagtttttttgtttccttgtagttcagatctctggctgccaagttcctgacgtagtacaactacctctggtgttaagagatccattgcttcatgacatggatatctattttcttagcattataccggaggtcaaggagaaaggaccattgtctgacatctttatgggatgtgctctgttgtgtcattttatgcatggttcttacatcacaaggtttgttaacttgtcaacgagtaatattgttattgtcttatcagactttctctatcgaaagtgttcactcctttagaatgtgtatatagtttataacaagattttcatagatatcttgatggacggtgagcaccacttgtagatgcgtctttgttctgtttgtagtgtaatcatgttctttgcatgtagctgtcagagacaaagttgtgatttttttgggaatcttttttttttcacttttcagaggtttaagacaaaaatgattgatggttgtgaatatggctacaccctcgatgaactagcttaaattgtatctctttgagtgaacttttctttcagtcaactggattttcgttttcatttctcaggaagggtaaaggaagcagttcgttcttcttaaaggcatgccagtttttgtta

SEQ ID NO: 57022 - DNA, 1437 bp, Arabidopsis thaliana landsberg
gaacaaacttgtagttgataaccagatgaggtctggtgaagaaaatggtgatgttcattatgattcagataattctgactctggctacttcaggaatggaccaaagaagttggactcagatgtttctgttgatgggttctttaggaacaaaacaataatgggatctggatccggattcaacagctccccaacaaaacaagatagggacatgaacagattcaggaaggaatggtataaggaaggagggtcagggtcaggatcaggatcaggatcaggtcgttcttctacaaagtatgatctgaggaaaagcaaaagaggttttccttctcatggtcgtaagaaaatcaagtatgagttcactgaatctgtctatgacagtggtgagcatagcttggaaactgactcttgtgcggacacaaacagaactatcaagattcatagtaagtctccaatggttaagaaagcaaacggtgcaaagaagaaaagcaaaggtcacgagtgtccgatttgcttcagggtgttcaaatcaggacaagctttaggaggtcacaagagatcacatttcattgggaatcaagaacacaggactttggtgattcaacatcaagtagctcatgagatgcatacactcatcgatctcaatcttcctgctcctattgatgaatgatcttactaaaaccgaaaccgcggttttcttctctttattgtttcctttctgtttattgattcttttgcttcagattcaagaatgcttttggtttgcaaggcaaatcaaagtcatcttttatttgttcataatcatataaaagcttggtgcttttgtggcagagttcaatgatacttcaactggaaatagaatagtaaaacaattatgagaaagcaaaaggaccccatgtcacctctaagaagaaactcttgtcaaaagtgttcttctctattttggtcaatctttttctttttgaaacaaaagtcaaatcatttttaagcaaactataagtgtttttttcgcaacatatgtaccgaccctgtggtctaatttggcgtagataacatgtgtaacactcaaccagttaaatgttatgacctaattaaagatgacgttgtagaatcaaattatctttaatggacaatcgttttatacttggctctcaattaagaagaaatctatctgttttataaccaaccaggctataatacaaagcaaatcatgttttggtccatcttacagaagataaaagatatacaaaacgaaaagagacataaatcacctcccaaataggtgaaaacaattaacaacatcagtctactgtataaaaaaaataatttggtataatctctctgttttatacccccctctatagaatttccaagtttggtaaattccgattatttcctgaaactattatgttaagatcaccggtgggggattactacctg

SEQ ID NO: 57023 - DNA, 550 bp, Arabidopsis thaliana landsberg
  unsure (1)..(550): unsure at all n locations
tctctctttttttttgcctttcttgatagaattataaggttcacttggaaaatttgtgagcttttagatatgttatagtattgatggaaatctggtttcatgaacggatgtttcgggtgacctgagtcactctttttttcttctttctttccgagatttgtttgttggttggtgagaaaatgattatttggcaacaagtttacttcctttcctagcaaatttgaggtttcacacaatttttgacgaggaattttatggccacgaccaaatattacttttctcaaaaagagaacagagattgagcttaccaaacaccttggtgatttatttggttacacactaatcaaacttaagatattaaccaattaaatcgagttattagttattnnnnnnnnnnnnnnnnnnnnnnnnnnnnnnggtaagccgtggagaaaaggatatttctttttgctgntcattaaataaaataaaacaataaaatggaatatcctttgtttgaaaaggtcaaatctagcagatacgtatgttttaaaatagatggatacaaaac

SEQ ID NO: 57024 - DNA, 1288 bp, Arabidopsis thaliana landsberg
caagtatcaactaactactcaaaaaacaacaagatatcaaattgaaatccttcaatgaatcaaatactgcaaatgccaaatgtctcatggatttctctggatacacctttatatatttatcccctatctagttagtctctatgcacaaatctgttaagtcctaacaatgatgctagcaagattgctctcaaattgaagctactatgaagttcttttctaaatgggttctctaacaatatgtttactagtgcatcctcaatctaaaatgtttgcaaaacagaaactatacactaatgcaattgttgtatgaatagaagctcaaagaaaactacctggagatcacagttgaggtcaaacccgacagagcgctcttccatcatattctcctggttttggtgcaaatgcaataaacgaacatgaattctaacttagcatcgcattaaaatgctttgtttcagataataccaattattaagtaaaataatcacctcctcaatctggtccatatcgattggaacattcatatccggcaaaatcatttcagcaggaggttgcacaccctgaacagaaagatttagcacatgaaaacataatttttttgatttcacgagtaagattgcgaaaaggagctaacctgatgggtgacacagtgcggtccaaaagggacacgatcaatcaggaaatcataagttcctgagttctttacggcctggaagatatcacaacgccggatggtctcacgagtgcatgattgagtatgcatccaagctcgtaatgttacctctagaatgaagtattcacaggctttcgaaaacaaagcaggaacatcacagcttatcttctgaaaattcacatatatcttaggaaaaaattgttataacaaacatatttcttcaaatgtttgatgtcacatatatcttgtctataagtattgatatcaaccttagaaagatatcaaaggaacagtaaaaataaacaacactaaaacattctaacagtaaaactcaacagactaacaaatttgatcataatggcaatttcagaaactctagaccagccaacataattcaagttaacctcacataccttgacttcaggatcacatttcaaaatctttctgaccctagatagcggcaaatgagtttggcctgtaggtaaccaaaacaagtcgaagaattagcatttaggtgtcaatgcactcttttttcctatttaggtactctaaacatctcttaatatcagtcacctgcaaagtttcctagctgctccctttgattattccaaaaca

SEQ ID NO: 57025 - DNA, 590 bp, Arabidopsis thaliana landsberg
cctgttactgacgccgaaatagcgttcgtatattacattacccttatagccaccagctacttcctttctaccctgcccgtacctgggtctcataataggcatcaagttcatgtattattctttgatgctcagctccgagcgtgtcataatttagtgaatcagcgttcggcgccgcaggtgcatcgtgaaagcggggtggtgtgcgggcagcaaccttgtcggtctttgagtgacaggcaattaatatgacaacggataagaaggtagctacttgatgtgctgatataattctactcatgataaactcttacaatcgatttttgcaaatatagccctggctcagacaccattacctgtttaactcaactttagcaaaggtaatgacatcgcctataaattcataatagcattgtgccagctggtagtagtgagttacaaataattcatatgccctatctattgagggcatatgccttgcgcgacgtgctaagccattgagttgcgcgttgcatacccatcatagagcgatagttgtatagccagttatgctccttcatatgagggaaatatgctgcgaatacaggcgggag

SEQ ID NO: 57026 - DNA, 1356 bp, Arabidopsis thaliana landsberg
  unsure (1)..(1356): unsure at all n locations
tttgttatgtcttaaaagttaagacaaagagcgcgcgcgaaaatgttcagttgaaagttaaagatataggaaaaagagaatagaagagaagagaatagagagctaaaagagaatcaaaaggaagtaagaagaagagaaagaagaaagacaaagctagcgagagaagaggcgagcctagcgagtgcagaaccttgcggctgtatgattcccaccggtgagagaaacgcggctactcttcaaattagaccaaagagacatcaactgcctcatcctctgaatctccattgtggttatcagctattacctctttcttgctctcaatctgctatttcatcattaacgcgcacacacaaagatatatgtttttgtttttaatatatgtatgataatcaaatggatcctcagatgttgcttcccattctttcggaagagataaactcaaggaagcaacatatgggaatgaaaaagagagagagagcagaaagaggttttgttgaattgattttttgtgggtttgatttcttgaggcttaagttttctttgtttctcgcaatagatgagagagagttagattgaaaatataaagggctttgctgttttgtttgagcctttgtttacgccatgcctctctctattttaagacattttcctctaaatacatgggggcttttaacttcttttccaagtaacctcaccattatcctttattagggtatgtccacatcagtgctaactcatttcagttcttaattgttttgactctgttttagggttgatgaaacaagaaactcgttgcacatttagttaaatcatttcctgtaatcatgctgccacaataatatcatagctttgacatagttcatctcaaaccgatgatatatctctggtctacatcttcctttagcaaatttgattataaatcatgactttatcatcggaaactcatataaggcatgagttgatctttctaatacaacaaaataccaaagtattcttcatccattatgatatatataagcaccacatccatcaattaggctccataaactttatatactagcttagaagtatcctatcgacgatagtccacaaaattttgcttcttcgacataccataagcttattaatccacaaatctgtgactgttagggttaatagttattagccattgtttttatttttttgctaaagatttattagcgattgttggtgcccatttagttagtgctcatatgtaacgattcatattttaaccatagatgcaaaagcttaacaacataaattttcgtggctaaattatgtttttttatgaactggacctaaaccccgattacttngcacgttntatattatttt

SEQ ID NO: 57027 - DNA, 619 bp, Arabidopsis thaliana landsberg
gatagcacattattagactgaagatcatgctatatttcattttcaattagaatgttatcagatactaggctctcatggcataatcagattgcgtcgttgagactatctctggaagatagactgtcagtctactcgaaatgatcttagaaacaatcttgtataagactgagcataaattgatcggttgaatatctgtcattctctaaggattcaaaatttttggaatgagacatacgtgtgtatgattccactgttcaggaagaacaccgatttaaagaatcccaatacctcctcaataacttgaaccttcacaactgaccagtatttctgaaagaaaagtgctgtaaacccatctggaccaagagcactttcaccattaattgaaaaaatagcattataaatctcctctttagttacttccttagttaaccgttgattcattgaagcagacactctagattgaaatccaactaaataaggtgaaagcaaagcatgagaagatgatttaaacacatcattaaaaaaaatagagaagcaagacgttctctctctctatttaatgtttgttcaacacctttctcatccagcacgaaattcaaggaattttaactcgagtgga

SEQ ID NO: 57028 - DNA, 478 bp, Arabidopsis thaliana landsberg
  unsure (1)..(478): unsure at all n locations
gattaggtgtttttgggagggcgtttcagtctggaagtctatgctggtgtagagatgttactcggttctgcaaaaccgactacccattagtacactatgcacggatgttcaagttgacgagctgtttcgcggtctgcttaaagagcacatatacaggggatgatgagtacgttcttgaattctttcttcctccagccatcacagacaagagtgagcaagattgtctattgggttctctgcttcagacaatgaagcagcactattcgagtctcaaggttgtctctgaaactgaactctgtgaaaacaacatgtctcttgaagtcgtggaagcttcggaggacggaatggtttactcgaaacttgaaccaatcaggatacatcatccagcacaaatctctaaggattaccttgagctcaacgcacccgaacagaaggtgagcttaaactctgactntatggagaataatgaagttgatga

SEQ ID NO: 57029 - DNA, 1181 bp, Arabidopsis thaliana landsberg
gttttggttctttgtatgttcttcgaatttcggtttgatatggtttaatttcgcatttagacttttctttcaaataagttacgaaatgttatgtgatttctattgtttgatccggttacggttcacttttaagccaaaaaatctaccgttatgactcgaataatttgtaaccatcatcctcggctaagctttttagttacatttgaagtcattcagtgaagggcgtttgcattgtaccatagcatccatattagattatgtttgaataagggcattgaccaggaaaaaaacaattgaacgggcctgactttattagcccatatatcaaatttaccgtccgttattgttcttttacttttctagttacgtgttggtccaaaagaaaggattgagaaacaagaaacttgtatacatatctagaagttagaacccatttcgtttcaagcctaattaacctctaccgttatgacttgaattcgaagccgtgtctatgcaaaagttgaccaaaacattgatttttcttttcttatattcaagattcaagctatgtcatagaagctaccctaaagctacatgcctacattatgcagttttcgtccattgatgattgatctgtaacgtttaattatcaggttataagcatacacacattttttcctcgtctatgatacggtgaaagcattaatataagctataagattatatatctcatagtcgaatgtataagtatttttttgtttttactgaacgatgtatatattatacttggattaatatgggcttatagagggatctaattaagaattagacgtatcttgtggtcaggtaaagtcagtagatacgttcacgaaattcatgtaaaatatataactaaataaactacttgattggtccacctgcacgcatatactctatcaactacatatatgtatatatatgtccatgcatgttacgtatagtttattattgtaagccggcattttcttcatcacagaaataaatcaatatagacgccaagaaaaacaacaccaactagaagaagtcatttactatctgaatcttttacgagacaaacagaattataagtttctcgaaactatctaacagaaattctctccgaccaatgaagaatcatcaatctttttgggtatttgctctggtctttcacgagcaaatgaaac

SEQ ID NO: 57030 - DNA, 785 bp, Arabidopsis thaliana landsberg
  unsure (1)..(785): unsure at all n locations
gatccaaccatcaacatgtaaaaaacattctcacccttttcacctttccagacccaatctataaggggagaaatcatcatggcgatgatgaacatggaaaaccccaagttcatcctcactctgtagctcatccttgtgttccaagtcatcatcaaaaccaaaacaagaaccgaacagctcatgtaagccacagtgaaagtcttctctacatgcttgtccgggtacaagtagccaaagtaatcaacggcagtgatcaaagcgttccatggtattaaactaccagcacccaacaagaaatggatcacgtacgcaactctataagcgtctcttgtctcaacttcatcaacaatcactttctcatcaaccattgtaactccccttttttctctcttgatctcactactttgcgttcttgaaatctttccgatgttggtttcattataaagcaagtgagtgtgatagggatttgattagatggttgtgagattnnnnnnnnnnnnnnnnnnnnnnnnnnnnnnnnnagcattatatattcgggattacgattctttgatatggctctagagatcatagctagtagtacaaagacacacaagactgtatgttttttggtgggacacaaaacagatgggttaggattaaagttactactttaatttgttcatgaaattggtcgggactcttcttttcagtacccttatattccattgactactttcattttttcttatgatcaatgcgttactcaagggttttcccactcaaaacttagaacatacaattct

SEQ ID NO: 57031 - DNA, 795 bp, Arabidopsis thaliana landsberg
aatgtgtttgaagatcatataatttctgttgttgtttttgatcattcaagtcttattgtgatttcgtttattttttctgagagttctgatcattcaagtcttaaaagttcgaaaatttagagttttgtctttttggagttatcttgttggattcgtcttgtcggatcattgattccgaatgcttcttctacatttatggaagttaaagatcatattttttttcattgtgtgatattgttctgattctgattgctctttgtcggatttaaagtttgacattgtctttttgtctttggaatgtggattcttatgatttgagtttggtttttcttgttatttagatatataatgttcttggtgttatgattttgtagataccttcaggaggatgaaagttaatgaagacaatatggagcaatctagtccatatcctgatcgtcctggtgagcgagattgccagttctttctgagaactggtcagtgtggctatggaaactcttgtcgatacaatcatcctcttactaatcttccacaggtgagaaacttagtttatatggctgaatcttctcttcatctttcctgatactcgagcttacagtttgtaacattttgcagggtattatttattacagagaccaattgcctgagagagttggacagcctgactgtgaggtgcactgcttacattatgctggaaaacataccttgtcttgagtctttccttatttggaaagggctaatacagtagtgtggatagttgatgcaccgtattgctttacttttctctgaagatgt

SEQ ID NO: 57032 - DNA, 328 bp, Arabidopsis thaliana landsberg
aacaacggcacccggacactcacacacaagacggcggaacgaaacacaagaacgaaggaacagcaacgacatccaacagacagagccgcacaacaaaaaagcgagaaaacacacaaagccaggaaggactcaccttcgtctgagaccgtgatacccgggcggagcacggtagtgagatcataacagaaacacgtgactgcttaaaaaacgtatatgaaagtggttgaacataaactccgagtgggtctattagaaaagagttgaaaacggtgaagaggatgtaacaagagtacctagtcagccctgagagtatcaaagcgcacatgaa

SEQ ID NO: 57033 - DNA, 239 bp, Arabidopsis thaliana landsberg
aaactccatcactagcgcaaacgcactcaatttattaaaataaaccaaaaaatcaccatctacatcatttcatactctaaatactactcatttttcaaacaatttctacacaccaacttgctacccaaacaagcattacatacctactttcttaaacatcttacactgcacaattaacacaaatagaatcctcacatgtgtttatttatccataagccttacccatccacctacatata

SEQ ID NO: 57034 - DNA, 957 bp, Arabidopsis thaliana landsberg
tctaacgcttataccacttgaaatgtttcttccccgtaaacgaataaatactcgatatcacaacacgtttttgttgcgaatttgtaacttgaaacgattctctgattccgccgaagcgaaacagagaatcaaaagtatggaaagatcagttacaaagaaaaaattatttttcagattttttttttgtttttctctcaatcaagagagaaaaacaaataattattttgtcctgttatttcttcgattgttgttacgtttcgttttggttataaatttttaacattgttggttaaaaattgcttgctaattgtgaaaggttaaatgattggcgcttctgtcttccggatttaaattctataattagaacttttaaactctgctattcgttatgtccttcaatatttttattgtttatacgaattatagaatttaaactctgctttccaaaggttcaaaagctaagttgttaaatcgtacggtgaataactgaccaattagtggaatcattaccgagtaatcattgtctattggagaaacaagtaaccccaacgagaacaacacattaacacaagttagcatatatctccaaacaagaatttgttgttctaaactgagaaagaccatagacagattagatttcagttctttacaaaacaataacgggcctagcctatcaattgggcttaacccatcaatttgtttcatacggcctaatatttctttgactttatttgccgtaggaaaaatagggaaatcccaaaaatctgaattctgtatgttgacaaaaagaaaaaagcaaatctgaaatattgatgtagatagaaacccatatatattacccaaaactagaacataacaaagttaatcattgtaccttataatctccaggaccaatgaatcttcttttctttgacatatttcctatctcaaaagtatgattttaaattcacaaattca

SEQ ID NO: 57035 - DNA, 349 bp, Arabidopsis thaliana landsberg
ccaatgtctttcttcgaacaatggaatttttgattgagtggggtggtgtgttgagctatcatgtgacaaatctttggagaaaaacagcaacgagtcatcttgcattagagactgagcgtaaaaaaaaattgctaaccactctcttgtttctgactgatcactagcctgtcgtcactatgcagatagcataagcgaatctgtgcagaataaaaattatgtataaactatgagaaccgatctcagggatatttgtctaaaaaaaagtagacagagtggttagttcagccagttattagagaaagccgattgcatatgttatcgaagggggaaaaaataactgacattaaaa

SEQ ID NO: 57036 - DNA, 544 bp, Arabidopsis thaliana landsberg
aaaaaaaaaaataaaaaaaaaaaaaaagaaaaaaataaaaaaaaataagaaaaaaaaaaaaaaaaaaaataaaaaaaaaaaaaaaaaaaaaaaaaaaaaaaaaaaaaaaaaaagaaaaaaaaaaataaaaaaaaaaaaaaaaaaaaaaaaaaaaaaaaagaaataaaaagaaaaaaaaaaaaaaaaaaaaaaataaaaaggaaaaaaaaaaaaaaaaaaaaaaaaaaaaaaaaaaaaaaaagaaaaaaaaaaaaaaaaaaaaaaaaaaaaaaaaaaaaagaaaaaaaaaaaaaaaaaagaaaaaaataaaaaaaaaaaaaaaaaaataaaaaaaaaaaaaaaaaaaaaaaaaaaaataaaaaaaaaaaaaaaaagaaaaaaaaaaaaaaaaaaaaaaaaaaaaaaaaaaaaaaaaaaaaaaaaaagaaatagaaataagaaaaaaaaaaaataaaaaaaaaaataaaaaataaagaaaaaaagaaaaaaaagaaaaaaaaaatgaaaaataaaaaaaaaaaaataaaagttaaaaaaagaaaaa

SEQ ID NO: 57037 - DNA, 1737 bp, Arabidopsis thaliana landsberg
agaaaccgcaactatatgagaacacatagtaaatgatgatcaatgaatctgaaatttttttgattgaccaaatcgagataaggtaagagtttgtggttgaatgttaggaaattgttgtgtcaaacaaattagtgtgtgcaatcatgaatgatggttttgtgctctagggttttaacttttaattgacctagaaggatccgatagactatggaaacaaaaatcttactaataatattccgagtgtatcttataagataaccttacatttgtagaagatgttctcatactaatcaatttttttaatatcttttattagcttacacaaaataaatataatcatttattatttaaaatcgtttttaatgtaataaatacaaatataaattttattttaacataaataaaaatatataaaataaaatatttactattaagctattaattacgtatttagcatggtaaatcatatattttgcgtgggttagaagtcatcaataatatactgtagatgtttaaccgatgggctgcactacttgatattatatccaaaaccgatgaaagatttacaaatggaccaaatagtaatcaggcccaatgggctaaatcgtatatagtctgatattatgatctgtcatgccacgtcataggcatgatccataacgaattgataaaactctatggttgtccaagttcgaacaaaaatctgaaacacacttccatggcttcgcttcctgttcaattcacgaggaatcaaatctcttcaccgtttttctctgtaaacctccgccgtgagcctagatctttagtaacagtacactgctccggtaaatgtcatcttttttctctctgctttaattggtttttcaagatctctctgctacttcttcttgggtgtacggttcttcgaaatttctaagtattttcaagaatctttagctttaccttcaatgaattcatctttatagatgggtttatgaatattgttatgtcaaaatcttgcttttaaagtgaagctaaagtagtgtatgtgatcttgatttgcattatgttctcagcaggagaaaacagagaaaatggtgaaggtgtaaagaagagtctctttcctcttaaggagcttggatctatcgcttgcgcagctctctgtgcttgcactcttacaatagcttctcctgttattgctgctaaccaggtctgtcacattatatggccctttctcttttctatgtttgtgtctgaagatggctatgttttagaatttaaagaaatggataaatggattgtttttttcagagacttcctccgttatcaacagaaccagaccggtgtgaaaaagcatttgttggtaacacgataggtcaagcaaatggtgtctatgacaaaccactggatcttaggttctgtgattacacaaatgatcaaactaatctcaaaggcaagactctctctgcagccttgatggttggggctaagtttgatggtgcagatatgactgaagttgttatgtcaaaagcttatgctgtagaagcaagctttaaaggtatatagacttaaatcttgaaatttgaaagcatatggtaaaattatggaccaaaatgttaattaatgttttagtgtgaattcttttctaggggtgaatttcactaatgctgttatcgatcgggtgaatttcgggaaatcgaatctgaaaggtgcggtgtttaggaacacggtattatccgagtcgacatttgaggaggc

SEQ ID NO: 57038 - DNA, 164 bp, Arabidopsis thaliana landsberg
  unsure (1)..(164): unsure at all n locations
gggggaaggagggngaagaagaaaagagagagggaaaaaagagggtatggaagattagggggagnaaaaagaggagggagaanggggagagaagaaggaggaaaaggggagggaaaaggggaaaaaaaaaaaaggaggaaaaaaggaaaaggaagaaggggaaa

SEQ ID NO: 57039 - DNA, 632 bp, Arabidopsis thaliana landsberg
  unsure (1)..(632): unsure at all n locations
aaaaaaagggaaagaaaaaaaaaaaaaaaaatatttaatttaaaaaaaaaaaaaaaaaaaaaanaaaggaaaggaaaaaataaaaaaaaaggaaaggaaaaaaaaaaaaaaaaaaaaaaaaataaaaaaaaaaaaaagaaaataaaagaaaaaaaaaaaaagttaaaaaaaaaaaaaaaaaaattaaaaaaaaaaaaagaaagtaaaaaaaaaaaaaaaaaaataaaaaaaaaaaaaaaagaagaaaaaatataaaataaaaaaaaaaaaaggaataaatataaaaaaaataaaaaaaaaaaaaaataaaaaaaaaaaaaataaaaataaaaaaaaagaaaaaaaaagtaataaaaaaataaaaaaataaaataaatataaaaaaaaaaaaattagaaaatgaaataaaaaaaaaaaaaaaaattaaaaaataaaaaaaaaaaaataaagaaaaaaaagaaaaaaaataataaaaaaaaaaaagaataaatataaaaaaaaggaaaaaaaaaaaaaaaaaataaaataaaaatataaaagaaataataagaaaaatataaaaaaaaaaaataaaaaaaggaaaaaaagaaaataaaaattaaaaagaaaaaaaaatataaaaaagatgtaaa

SEQ ID NO: 57040 - DNA, 149 bp, Arabidopsis thaliana landsberg
caaagaagcaacaggcccggagcgaaacgtttcacccccttaggaggcccaccaaaaggcgggccgccacggagagcagccacaccaaacacggagggaaaagaggagaacagacaggccgggcggaaaggaccaccaagccgaggaaa

SEQ ID NO: 57041 - DNA, 1837 bp, Arabidopsis thaliana landsberg
ttttgcagttcagaatgcaaatgaaatcattccacatctcctataagttgttaagctaaattatatagatgatttattttggatttgttgacatatgtggatcctcctttttttttaaattgtgtttagttaagtcttaatctctcatgcaggactagtatgagtggccctccactactaagtttttggccactaattctcaactcttaatttggtacaaaatcttatgtaatcttttgttattaattttacttacaaaacttatctcgttaatatctcttgttactagtggtcaatataggcaaatattctctcatacaaaacctgttatttgtagagacttttttaactgagtgagaataaaatctgtatgtaaatcatatagttaatttttgtcaaggaaacaaataacaaagatctgttttcttttgatttgatagttttctacttagttcaacaaaagtattctcacgagtcacaacactcagtttgttatagcattttcataatgataatttgtttttattaaatttgtgtctagaatatgttaatcatagtagttgacattcaaactccgatatggtttggtgtttttgtctaaggaattttcggttatatgtgttgacattcaacttcaactgttctttcatgtgttgtgacatgtttggttgttgaaaatttgccttaaataataacattatattattaaatagaagattaacatatatatgtaaaatatttagaaactataatatgagaacttttcatccaaaagaaaagaaaaatttacttgataaactataaacatctcgataattgcaaacataaatatgtgaagaaaattaacatatataatttaagttttcttatgaaaagaataaattatagtagttaatatacttttacatgtgtttgtaatacaattttatttcattaaaaatagtaaagaagatgataggatatatcatttattgtttgaataggttaaaaaggtgaaagagaaaagaagaaaataggatatataagatgattaagaaattagaactaaatctgaaatattttttttaatagaccttttataatttaattggattatattgttctgtttttgtgcaaaaataaagttggattgtctatgttttgttgggacatgtggatagtttggtttatgaagaagtttaatagagtaaataatatatttttgtgttaaataaaaaatatttcagataattaagagtataaactataccaaagtaatctagcaagaaacttgggagagtcttatcactgcaacgccttttgtgagaaaacacaaattctcccgaagttaagatggttttacatattatgataagtatccaaacaatttatttgttatggtgtattaacaaatcttttgaaatcttatttcaaaagattttcttttgatgctaagagatatcaaaataataaataaataaatgaatatccaaacaaaatcttcatttgtttttatcttgtaatctttaaataaaatcttgatttatttgtcataaattacaatgcccacgagaagataaatagcagttaatccacctatttagcatttactattcccttaagcacgatcgattgtgacgtgtttgcttcaaaaccaaaacgtgaactcaactttatgcttaaaaacaccgaaaaccacgttttgcgttttcataaattaggaaactgaatcaatcataaatataccctttgaatctacccaaaggaaatatatatctaaacattattataacaaaaaaaaaaaaggtaaatttacaacaaactaataatagtctttgcttcacataattaccataaa

SEQ ID NO: 57042 - DNA, 1104 bp, Arabidopsis thaliana landsberg
agattagcaaagatctagcatacatggaatgaggggatagaaaaagaagaggatagtgctccttttaggggttgtttgattttaatgtggatttgatgtggtgacccactctgatattaatggttttgttgaactttatcaagtggatttttgcgacttttttttggttgatggtttgatcaaagcctttttgaaaattcttctctttacttttcagtctctatctccatttgttcatactggctgctcatccactgaactagaatttatccttttttggtgatgtaatgaagtataaaatttcaacttagttttaacacatttttacttcaagtcacttcaaatatctgcttctagtgaactagaaatttgttataatgaatgtttttctattatttaatgaagtataagtttattgttcctatgattatgagttttgaccaccaatacatgcttattcggtggcaaatatattcaacgaatattaattttatgtaaatgacatcatatgtgaatgttaaggtttagtaaatatgataaagttcaagaatcaaaattatgatagacaagttaaagactgtaatttttaaacatatatactttgtactagtcttcaaaatatgtgagaaaaagaagtactccactaaccaaatcacatgtacataagttaagaccccatcagttctttcaagaaccgaaaactatttgcatgtattttacttggtcagaaattacatatataaaattctggtggcaataaaggtgcaaattaaaaccggtcagaagtacttgccttggtctatctatacaataaaacacaatgactccagaatttattgctcaacaactactttctttttctttgagtcccggagatatttcttacattattattgttcatgcaaagctatatttgtttgcatccacagagaaaacgcataaccggtcacatcaaatacattatgcattccggtctgatgagacatgactttaactgctgttccgtttaggatatactacacggattcttggttaaccattctattctctttgtttagaatcataccgaacttcataatatacccactgataacaaaaaaagat

SEQ ID NO: 57043 - DNA, 1278 bp, Arabidopsis thaliana landsberg
  unsure (1)..(1278): unsure at all n locations
aataatactttgtttggttttagctcagttcttgtacttattgaaattgcaattgttagattttctgattattagtctaatccttaatttgattgcaagtttatttgtcaattttgaatctttatctgggtggaatcgtacgactgtaaaatcctgataaaatcctacaagacactttgaaattagtttcagttcgtgttagaattggttcttaatttgttttgaatgttgagtgatgaactcaaggataaatctttgattgtgttgataaatcttgaatcctgaatcagaaatctattgcaggaaatggcagaagcagcatacacagtagcatcagacagtgaaaacactggagaggagaaatcatcatcatctccttcattacccgaaatcgcccttggtatcgacattggtacttctcaatgcagtatagctgtttggaacggttctcaagttcacatcttgaggaacacaaganaccagaagctcatcaaatcatttgtcactttcaaagatgaagttcctgctggtggtgttagcaaccagctcgcacatgagcaggaaatgctaaccggagccgctatcttcaacatgaagcggctcgttggtcgtgtagacactgatcctgtggttcacgctagcaagaaccttcctttcttggttcaaactcttgatattggagttagaccgtttattgcagctttggtgaacaatgcttggagatcaacaacaccagaggaagttttagctatatttctggtggagttacgtctgatggctgaagctcagttgaaacgtcctgtgagaaatgtagtgcttacggttccggtttcgttctctaggttccagctcacacggttcgaaagagcttgcgctatggctggacttcatgttcttcgtttgatgccggaaccaactgctattgcgttgctttatgcgcaacagcagcagatgactacgcatgataacatgggaagcggaagcgagaggcttgcggttatattcaatatgggagctggttactgcgatgttgcggttactgctactgctggtggtgtttcacagataaaagctttagctggtagccccattgggggtgaagacattttgcagaacacaattcgccatatcgctccacctaatgaagaagcttcggggttgcttcgtgtagcggcacaggacgcgattcacaggctaacggatcaagaaaatgtccaaattgaagtggatttgggaaatggtaacaagatatccaggttcttgataggttagagtttg

SEQ ID NO: 57044 - DNA, 388 bp, Arabidopsis thaliana landsberg
cggattaacccttgggttatcggcgcattggatgctcaccgggggatgcattactcaagccgccatacacactgccgtttcttccaccgccgatggcgcggttgcttctcactaaagagggaacgctccccttacgatgcatatggaccttccacaaggtaccgtcgaccgcatagtccagtacatcttcggcgctagagcgctcgaccaatgaactataacgcactctttcatgggtggctgttactacgcaaacctcctgcctgattatgcacgcatacctccttgatcactagagcggccatttactggccttagctggcgattcgggctgttaacctcttgacgatgaaactaaattcccaccagacttactggtcgagcttga

SEQ ID NO: 57045 - DNA, 525 bp, Arabidopsis thaliana landsberg
tcgaaacctttagattcttttatgtgtaacactccttagaatcgataccgacaataacaagacgaaaaccgcgtcttcctcaggaagaaattccacggcttgatgcttccagtcgatcagagcagttgctttttcagttggatcttcttctgttgatctaacaactgttacaaaaccctcgtcgtcttcttcatcttctcctttatattgcattctccgtccagttaatagccgaacctatttcatcaaagatgtcaagtaccagtttgaaagaacgcgaaaagaacttgaaatcttgatagtcgtaccagcgaaccggggtttcttgaatataaacgaagttctgagatagttcctaatgagtcccaacggatgcacaattcatcaccagtagaaaattcccatgctgcctcccaatcctccattggttccttaggcgtcacggttccaaccaccttcgctgtactagacgagaaaacacaatgatcggtacacaaaacagaacacaaaacagagtttcttctt

SEQ ID NO: 57046 - DNA, 920 bp, Arabidopsis thaliana landsberg
tcggtgtaggcattaaagcgggcacctgaacctagaagtttctcacgtttcttgctcccaaggagagcaacatgttctatcatatgagcaatcccttgctcatcttcttcctcatcaatcgatcctacatgaacttccatgtgtgcctcaaatctagcattgaaaacatttcaaaacagaaataagatatagcaggaagaccttaaaggattccaccatatggttaagctataaccattttgcttactggttttcaaggaatgatatattgtcattaagagtatcacaagtagaccaacttcgagcattctactcaatttacctgttcggtggaactttgttcggcaaaataagatatcgaagcccatttttcaattgcccccggtgcaacttgggatgagaaggaagttcacaaccaagaaacgcttctagctctgcactatcaatctcaggaggcaataagtcgagatcttgtctctccgcaaccataccatcaggccaagctgtaccagcagcatgtggctcatctggtccaacagttgcattcacactctgagaatgtttcctctgcacatgttgagtcagttaaacagagataatccaaacaagcacaagacaagaacatagaaagtaaatgatgtagcttacttaccagagaagatgtcaaactcgacctcgacaaactaaatgcagttctatccacaaaggcactaggtaatgctcttctgattccagcttgattccttttacaagtaagacagaaattacgtcctcgagaaagtgatatcccggtagcttcttttcccgaaacaatgttcctctttaaacgtcccttattcgaatttggctgcgccgccctttaacaccacaaaattcaacacaaaatttaacaaatcgatttaactgaactcaacgaaatt

SEQ ID NO: 57047 - DNA, 1322 bp, Arabidopsis thaliana landsberg
atttacgatcgtgacactggaaagtcaagaagattcggatttgttactttcgaggaggaaaaatctatgacagatgccattatgattatggacgtggaagagtctcgaagtaaatgtgttaatgttggatccatcactgtggaagtagctaggcaacggcgcaaaaacaggtctgctgaatttgcactagagttagttaggttgataaacgaaaagcagaagaagatggctggattataagaggttttaatatgagaataataaaatgttatgtaatcgctatccgtaatgttatgaaaatgatcttgagagggttattctctggatttgtggacattatcgattgcaagatccgcaatgttttgcttgattcagatttctttggttaatctttcttacgcttgcaataattacttgaattacatattcaaaagtaaacagaaagaacgtgacaccttgttactgtaagtaaactgtttaattcctcttcaacatgtctaattctaaagatacttttctatgaaagctaattttattttgtttaaaagtctgaaaatctgaaatcttcatcatcaaaagtacttttactaaaagcatactcatcactgaagcatacctgaattctgcaaagagtaacagttcgacaacgcttagaattcactgtccaaaaaccactaactggatgttcgccggaaaccttgtaaaccctcaagagtttccaatacttgtccttttgatcatacacgattattgaactatatacctttgagtcatcaagattaacagaaaaaaaacaacttctcaacccctgaagattattgaacacatgcttaactaaattacgcatgtgttcttcttttttcttcatatatcctctgtttcttgtgttctgttttaagtcttgcgctttcaatatttgtgggtacttgcggaggaattatatatctaaaagcagacagaaataacttgagaccaagttaaatatggctagctaaagatacatttcaacaaatttagtaagaacatttcattaaggtcaaaaacaatggcctaaccttttttacagcttaagagttgtacagaagactaattctataagagtattttattatcaattcacattgtgcaaaaaggttactcttgaggcttcagataacagcttcttcttagccactctgcttgatcttagtagatgtaatatatatccttcacctgcaagtttcattaaaacctaactaagtcttgaaactagagacaatttataaacatctgaattcatcaacaacagtacttaaagaagcataccctgcatgaaaccatcc

SEQ ID NO: 57048 - DNA, 582 bp, Arabidopsis thaliana landsberg
aacattcatgggtataatttaaagtcgaattagtcgtgtcatattgaggccacacaattaaactctgtaaaagattatctattaatataacatctaaagtttgtttatattattatagctcatactttttatgttatcttcgcagcttgtatcacatcattttcgtactttcaaatgttggaaaatcattttttactggcctctaatatttgtcatcaattttgactgtcgttccactaaacattccaaatcattaaagcaagtacctttcgagaccattattaacggttttgattcattagaaggatatattaggagaagactctaaatttgtatctatgtatcggaaaaacaaagtgcattgcaaccaaaatgtcatgttagttaatatccacgagggataaggtaaaatcggggtcatagatcattagaactttttatgccattattggatagtgtccgcccataatcttaacccgatgggtccatgcacgtagcatacacacgctttacccacaccacaaaaccagcacttccactaccacatccacaaccacaaccgaacagtttattagcttccac

SEQ ID NO: 57049 - DNA, 1158 bp, Arabidopsis thaliana landsberg
aacgcagaaaaggaattgctcgtaaatgtctacatcgaagttgctcccccatagagaaaaagacatacattggcaaatttctaaacatcaaccactttccactacacatagcctagattatcccatccggcgcctttgccatgaaatcagttttgagttatttcgttaaatgtagacaaatttgtgacaagaaaaatgggtaatttattcaaagatccaaacacaccctcccaaacgatttcccacaccgaaatcgtttagtacatacaatttttcttctgattttcaatgcttcgaatttctaaaacaaaatcagtttttaaaatccgattacaaccaaaaaaaaaaaatccttattcctgagactcgagttcttcagatagcataaactcacacccaaaggtttatagacaccttttgttcacgtcccattctcttagtacagcagctcttcgaacacgggatctacgctttgtccccattctccattgtacatctccaagagcttctccgcaggcgtaactcctgtcatttcaaaaccaaatttcaccaccaggttatcaaacaaaatgtcggtgtggaattcaattatgcattaggaaacttcatttacctgttctgaccacttcatcgactgcgttcaagaaaccggcttccttgtagcctctgcgctctaaaccatcctgagaaacaaagagaaaataagtccaatagttagaagctggaccagacgggatagaaagctggctcgaagtttctaagagggttcatacaaacacacctttgcgagtttcaggacatcttcagcgacatgctttaacaaaccatccctaaaaggagtctttaagccagtaactgggacctgttggaaatcaagtattagtttattacaagatgttttctaactgtggaataagaaaatgtaaatgtggtgcgtcttgttattactttgttccttagcatctctctctctgctggagtccagtcagctgtcagatccaggatagcttggagactatcatcatcatataataaacccacctgaaatttgtagataaaatcaaaacaacagtcaatactttttgaaacattctcattaagcacgaaatatatatgtgctaatagatgtagttacccagaaagctggcagggcacaca

SEQ ID NO: 57050 - DNA, 418 bp, Arabidopsis thaliana landsberg
aattttcatatgtcatgggggaaatagacccccctcccaatgcatcggctccgccactgtgtacaacacacatatatggatgtgctactatctagttttgaatattgttcatcttaatttgagaggatcagaaattcaaggggatatcaaatcattttcaccaaattatgatccaaaaatccaatatttgtcctatttatttccagttatttcatatgattaaaagtttctttctttctttcttttttacattattcattaaacatctaaacccaattagtgtaaactgacatacttatcttaaaatatgtgtatatttcgtagtaataaagattcaaccttcaacctttatacaaaaacaaaaaatatataaattttacaaaaacgattttaggagaaggattataaattttaagtg

SEQ ID NO: 57051 - DNA, 526 bp, Arabidopsis thaliana landsberg
ttcctgatattgatcaaatttatttcgatgcttatcaacagcaaagttttgcaggaggaattcgatattcagaggttaccgaagctttaaatcaaaaatttaatattggtgttctacttatcaattataccggacatggcggagaaagtggttgggcagaagaaagagttttgactttaaatgatatcagtagctggaataccagtaataaattaccgattatttttacagcaacttgttcttttagtaggtgggatgatccggaaataacatctgggggagaactgactttgctgaaaaaggatggaggagtacctgctttattcactactactcggattgtgtttgcttcttataattttgatttgaatcagagttttttaagggccatgttttgcccaacattgtatcataaaaaggtgagttttggtgaagttttcaaagcagccaagaataacaatattggcggtttaaatatcaattcaaggaatttcacccttttgggcgatccttttactttgttccc

SEQ ID NO: 57052 - DNA, 528 bp, Arabidopsis thaliana landsberg
tccctgggccgatgcgcgcgagttctgggtacgggccgaagtccgcacccgtgaatcggcaagggcctatgacaagctcggcatggccgaattcgaggccatggaagctttcgccagatatcatttctgagagtaaatctcatcaaaagatggtttcgacggataataaaggcaatatccaacctttaatttccgttgtaatcatcttttcacattctgcggagcgtcaacgatataattcgtaactaaggtattcgtttcgcatcttagcggattattcccctgatagaagagatgaatttgaactgtaagattcctgtcgctggcctggcgttgctgatcgcaacgggcggagcatttgcacaggtaaaaaagaaaccggctgcatcacccaagagcaagccgacaggtgttgaacaaaaacatattgcaggcagcaattcgctgcccgctgatccggatgtgatcatcggcaaacttccaaatggtcttacttactacgtgcgccggaacaccgaacccaataac

SEQ ID NO: 57053 - DNA, 746 bp, Arabidopsis thaliana landsberg
aagagtagcactcatcagaatctgttaccatagaaaatatttattcttatattgtatatgtatcatagcaatggaaaacgaagacgagcaaaacataaccaaccagtcggagatgaggattagacggaagcaagtccctgcaaataaaaaaacatcacaaattgatccacacccaaagattaaaaaaaaaaattatcctgagttatcgttttcatcacttagcttcaactaaagaattcaaaatacaagtgtacaagtatagcagcttttgcatctaaattatagcgcgacaccaattaaacaacagccatatgatcaactttttccgtcatatttatttgacttttttattcattttgacaagctgagcacctcagtgtttaagaaggccagagtgtgtaccttaaaatcattaacatgaaatcagagtaggagtccctttcatggatttcgtcctacaaagtgatacacgggtcagtgaccaatatagaccaattacaaaatcaatttacagaagaagagcacaaagaagaatacctaagataaacaaacagaaacaagatggcagatataagtgatttttaaaataatgttgttttttcacttaaaattttaatcctgccgcggaaccaggacatgtagtgaatggaaaagtatacttaataaacacatgaaaaacatattatgaatcaaaaacaagaatttgttaccacaataatgtgagttatatcaagaacagagctgtt

SEQ ID NO: 57054 - DNA, 1069 bp, Arabidopsis thaliana landsberg
gttatattccaatttagtatttatcaacaatataatattactaaactgtccatatatctaggaagttttttttttttttttttttttttcctcaaacgagaaactactttctggttctgtttacaacgatttcttttcatgtctaatacagcaaatcctcatagagtttactatcaatataataaagatcggcggtataatttgaaactttatatgtcgcagcgcatgatgtaatctcttttctatatgattccttttctttctaagtttttttttctcagataaaaaataaataacatagtcttacagttccagaaaaaaaaaatcatgtttacttcttaaaatcattatttaatatataattttgttttgctatgaatgttagtttcatgaaaatgaaatgtaaagatattacaaaagagcattacctaaagaaaattaacgataaaaatcgttaaacttgggtgaagtaattaaatccaaagaatcatgagattttggcattttgccaacgctttttgcgttgctgtggtggtatttcgaacctcgatcgatgttttcagagattgtatcatgaggcattatcaactgcgagttatcaagtctattctctatttaataagtttataattatagctccatactcatggaataaatccacgaatttttattaggtgattttccttgaagtttgtaagcttaactactacagacttcggagattaatctaagaaaatttcattgtaattttttttttcttggtaatgagctatttccacatgatgggatgcaataatcgatccatattttttttaaaaaagagaaataaaaatcaatccatattcatacatgtgaacgagtccggtgggtcctctctctctctatgtgactatgtctttgcatggattcaaaggttccatttgataatttttttttttttgttaatataatagaatgttattgaaataaacaaaataatatatagattttcacttattaaactaaagttgtgatgatgtaatcagatccctaattatgcttaggaagattgttacagcaataacagttg

SEQ ID NO: 57055 - DNA, 561 bp, Arabidopsis thaliana landsberg
tttaacttgcgcgtgggatgctgaaacaagttcagcatgacatattttattatatattgttatgaaactaataagatacggcgcggccggcaaagagaaaacaggggttatcattaacgatactaaatacgatacctccgcttttggcgaggattataacgaagcgttttttgagaacgatggcttgaacaggttaaaaaagtttctggctgataacgaaggcaaactaccaaaagtggccgatggcgagcgtttgggcagcccgactgccaggccatcaaaaattctttgcattggtttaaactatgccgatcatgccagagagaccaatgcacaagttcctgccgagccggtattgttcatgaaatcaagcactgcattggttggccccaatgacgatgtaattattccgcgccattcagtaaaaactgattgggaagtggagctggcagtagtaatcggtaagaaagcaagttatgtagaagagtcagaagctttagattatgttgcgggctatgctttgcacaatgatgtgtctgaacgcgagtttcagcttgagcg

SEQ ID NO: 57056 - DNA, 416 bp, Arabidopsis thaliana landsberg
aacaggttgcatatagttctaccaccaaaactccttgttgctttctgtcttatctatttttatttgcaaaaggcacttcttcttattattcttcttctgtgattacctcttttgattctttattgaatattcacttcttgttgtatgtttttacacctgttctgtcatattacaagtctcattactaattaggactccatattctattttcccccgactgaatcttattactaaaagaactttgatacgaacattatggcatacaaaaaactatgtctctaacattttctttaacgacgatcaaacttttactagctgatatacaacactgtcgacactggacttattcatgactacatatatatatagataatacctatcctacgatataatatatttacactcgaccaccattt

SEQ ID NO: 57057 - DNA, 1118 bp, Arabidopsis thaliana landsberg
gacatatctagatctggaaaagctgcttattcccctttacatcttcattgcattcgatacccggtgcaaatccgatcgcgcatttgatcgcatttttgatctcgtccaaactgtaaaacccatcatttggtttaatacctacacaaaaacaaacaatgatcaatctgcataattgtttccacaggtttatcttctttttccaaatcttttatgtacctttttgtataaggatgttgaggagatggactttgtgtttgaatttgagattggtacggaagtaagagtgttggtcgaagatagattggacacaggtgccatgcttattccactcgtgttcccatagatttgtctcgttacttggacatgcccacactccccactctgtccatttcttttccatttggcagactagatctgatatctgttgtttttccgaaattcagatgctttacaagaataaatttgtataatagcttcacttattctagtttcagagtcggaagatttcaacaaaacatatcagttagatactaatagagatagatctatgttaaccttggagatatcgaagagattggtttggtcgcaaaacgcaggccaagtgccattgttgaactgaggccagagtccatggatgataaaatccgacgctgtgttgcctttcgttggagggcaacatcctttttggctatcgcatattgctcctggccactgcatcatataacgcggtataaaaatacggtaagatgtgtgtatatatacatatatgtatgtaagtgttgttggaaacattacgtagttgacccagtagaagaaattgaagtctggttctgtttgagacgaagacacgacaaggctctgtaaaattaacaagcttacgatgatgattcctctcatgtgttttgctctctgtgtttcttgattattttttgtttccttgaatttatttcccaatctatatgtaaaaagggaaaggtacctcacaatcaattgtttccaaaaatgaatatataaagaatattttcttaatttgtttattaatttattattctcaacttggttctccacttgtctaaaaaaatataggcaaccttaatgattacgctgcgtcattaatt

SEQ ID NO: 57058 - DNA, 487 bp, Arabidopsis thaliana landsberg
tgtattcaataattaaaaaaaaaagttactttacattttttcgtctaagagaatttttttggcaagttggagacatggtgtacttcccatacttatccatatcccattgctctaactttttgatgctaaaagctaacttaaggagtgatgaagattataactcataatcaatctaaaagatagactcttaaccatttctaatcaccacaatgttcaaagatcatatttggagctagcggttatttagccatgtgcatggtcttattttgatagattacctttttggattgtttgaacaaaaacataaatacatgtagctaatttcgatatattaattacttttctagttggaaccattcggagaacagcaagtaccaataacgtgaatgcttttccatttaatatcacacaaaagaaaagttccatgtatcatgaatttagcacattccatttataaatatttggcttaactaaaattatatacatg

SEQ ID NO: 57059 - DNA, 514 bp, Arabidopsis thaliana landsberg
cgtcttttctgttcggcatcgagcgaggtatcgttgtcgatagccgccagcgtaaggctgatatccggctggataaagaaattgggatcttcccctgagccggtgatcagctgaatgcctttatcggtaagctctactgaattatttttttcatcgatgtagaaatagagttcttcatcagctttatgcatttccttctgctggtcggcgaggtaatggttctctgttttctgcagattcacacgcatgcccggttcactcaggaacttgatcagtgcgctgttcttcggtaaaccgcggtgcgctcggaaaagcgccagtccgccgtctttgggatcatcattaccctcggcaatttttttccgcgcatcattcaggaactggttcactgcttttttctgtatttccaccagcttctctatacggggtttcaggtcaaagaactgctgctccccggtaatatggcctatagggcctgagatgatcagcggcgttctcgcataatcgatcaata

SEQ ID NO: 57060 - DNA, 445 bp, Arabidopsis thaliana landsberg
  unsure (1)..(445): unsure at all n locations
gttgttcgaagttttaatctattttatgatatgtgagaacttaaaatcatagtcctaaaaatttataactaacaatacataagacataattttaacttacattagaaaaaacttttgaaaactaacccatttaacaaatttaaaataaacccataacttccctctcatttatctctctctctccactcctcaagtctgtacttagtaggcaatagtttgactaagctagatttttttgcagacatacattaattagtaacaccatcaataatcatcataaaagaaaatagagagaaagagagataaatgcaataatgggagatggaccaaaggtgcaggtggtgaaagataacaaacatatgacaatgtctcgaaattaagaggcaccaccacacatacacacacactctctctctagtaggtttgtgtttntaaaatcaatatt

SEQ ID NO: 57061 - DNA, 665 bp, Arabidopsis thaliana landsberg
tctctctaggaaatagactgtttttccgtagtcatacacatcaagcataacctaaacattaacatttagatttcaatttcgatcctttaaaaacgataaaagcaaaaaataaaatggcatggatactttatagtttagtttgttaaaaaatcattttcaaaaaataaggaattcaactggagtacaattttacaagcatccagtcgaatgatcagcaaatggaaaaaggtcgggaataaacgtgatatgataactcaatgacaaaaatcgtgtcaaaaatcacatattagggtagaatcgtcattatgtacttaatgttagcctaaagtatttagtctttcaaaaaatcgcttattggtttggttctagttcaaaatatctataatttggttagatttttggtttagtttaacataattcggttatgtttcggttttccgctttataaactttcaaatataaacaaaagaacagatttactttctttttttctcataagtgttatattttatttcaaagttgtgttgtaaaaagtacaactgtggaaacttccatttacagggcttgacacattaagctttacaatattggactatatctaaacaatagaatcatccaatattgtataaaaaaaaccacccagtccatctgttaaaatttaggtc

SEQ ID NO: 57062 - DNA, 457 bp, Arabidopsis thaliana landsberg
tctcgtcagtggccaccaaaagtaatccgggtgggggagataattgacgtgtaccagatacatttttatgaacctctttcatcgccactactcggtgaagagatggattccagtaggttccgaggtcatatacagtggggcgtacattgagtggtgttgtgtagttgtccattccactgcaggacacatggtacgttgcgaagcacaccacccatgatgccatagagatgcattgtagcctttgcccagaaatgttgttcccccattgtgcagaatgtgcacgaagtggttataccagcgctggttccattgagtattgttccatacatttactatccctcatcaacttctttgactagatacataatattggtgatctaaacacatggcatgtctagaacccactttgaataccagaccctgttcccacgtggtgcccttggagcccattggcaga

SEQ ID NO: 57063 - DNA, 1071 bp, Arabidopsis thaliana landsberg
tatatcatatatagtaagctctacacaccctgcgaaaaactctgaagccttgccaacaccttccttcaaacctattccaattccaaatgccaccgcagtgccaacctattgagataactatgaaatcaggtctcgcacatagatcaaaaacgcattatcacttagtagatgcaagagaatactaacacacaaggcaacagtcttgaaggaagttttgtaagtttcttcttgttgataatctttcaggcctccactatctactgatgaagaagagcgtgaagtggttgcattctcatcgtttttgtgtggtagaagttctctgctctccttctctgtactaacatgccataaacaaattattgtcacaagataaagcttcttcctttatatacaattgtgtcttgctagcaaaagtaagactgacacagacaattcaggaaaaaaaaaaacagaagaaaatattggagaagaagcattcaccttcatcttcctgatcaatacctctggaacacgcgataggaggaagatgagagagacgacgattggcagctgaaagaatcgtaacccagaagcacattagcatgactcagatagatgaatccttcttccattcacacagataaggaatatagaaaatgtaaagaaagagagaaggaggacctgaagcaagagagggatttataaggagagagaaaggagacttagtccatccacgagctctgaaatccggcgggaacaccggaatggtaagaaagattcgatccgatttggccggagggagaattccgtggtggataactgaagctaagctcattgcgttttgtgtcaaatccaaaaacagactccgagtgaccccaactatatcaatcggcgaagaccactcaaaacgttgtcgtttcagatattagacgatgatacccctccttttggctggttcattgatttcggttttgagttttccggttttttagatttttaattaatactatggtacagttttagattgagtttggttctaattagacatatcattagtcttcaatgagttttagatctttcgttatcgggttg

SEQ ID NO: 57064 - DNA, 571 bp, Arabidopsis thaliana landsberg
acatcctgttcattatcctttgtagtgatgccgtatagtgcggaataagcatttacaggatttttgttcgcaagcatatcagtaatattttctgtacccgagccagatacgccgccgttgataaaaggattggtcaggcgcacccatgtaaaagttggcgaattgctttgtgcagagagcggtgtataattgaatgatttcccgctgcatacactcacagggttaatggaactacttaatacagggctgggatttacggtaacggatacattctgcgggttggcgcatccgttggcgcttagtgtaaagcggtatagggctacaacaggtgactgcgtattgttgaccagcacttcattgggattaccggcaccggcattcccggtatttgccatacctgtaactgcagccctggaccagatgatgctggtgccgggtgtagcgctggcaggcgaataggtatatgtttgcccgctgcattgcgccacaggcgccgagccctggttattgagcaccggcaggggatttacagtagcggtaagcatgaacgatgccccgggcaagcgcctga

SEQ ID NO: 57065 - DNA, 1211 bp, Arabidopsis thaliana landsberg
tcctcctcttgaaaatccggcacagtaaagattcttctctcctttccaatgttttggcatcggtgctttggggaatccatccttcttcatcacgtattcatagtcctgtataatatcacaaaaacacatcattatacaagtatttatgcacaagagtatttcctagtctcgttactcgttaggatttcattttcacttgataagatcaaatctatacttaacatatatcgttgtccaatagggtactcatgttaaaatacctctaaccaattgcaaacggagcttttgtaaccagtagcaaacacaatcgcatcgaaatcttgtttatgtccgttttcgaacgtcaaagtcttcccgttgatgcttccaatcccaccattgataacctaacattgcattattagttagttaatagtgtttccatttaatcgaagttaccacttatcatttaactaaatcctcaagaagctttgaacaataaatgcttatgaggttatatcttcattaatttgtgtgaaatcagtaggatatatgaaaaaaaaattgaggtttgaaacatctaaaatcaagggttattttggagtcgtgcagaaattactaacgttatcctcctttacaactgtttatactttaaatgcttatccttttcatataaaccaaaatttaaaagactgacactgtttgaccacaaaacagaaaaatagactgacagttttatacattagtaagaaaccaataaaaatcctttaaaaaataaaataaagatgaagatgaaatttgatggacaagtgaaggtacctgaatctcgccatcgcgaatcttctcgacagttccaacatcaatgacaggagcttttccggtaaagagtttggtggcgaaaggaccttgttttggtcggaagagtccgtacttggagagatctccgtacaaaatttttgccatagtcgtcaccaatgtgtcgaccatcgccactggaacatacttcagaagtgtcatccccaagtgtatcacttctttagtcaccacgtgtctctgcacagatttagagaaagaacattatttgatgtgttattttctacaaaagaaaacccttaatgtatatacacacaccatctacatatgggttatgggactgaaaattttagattacattagaactcatgaaggattttgggtgccaattgatattttacaagccaagccatcatcta

SEQ ID NO: 57066 - DNA, 910 bp, Arabidopsis thaliana landsberg
  unsure (1)..(910): unsure at all n locations
agtacactattatacttgtaattgatgaatatctattgaatctcgattcagatgaagcttagtgttatgattacaagtctcaatcgattttcgaatactagaaacaacatattggatgtttatccaaaagttcattgctgcaacattgaaacgaatacacagaaggagaacagattacaataatgatgtaagaaagatatataggtctaatggtcaagtgacagggtcaaagttggagacgccgacgacgacaccaatgatgacagtgaggacgaggccaccagaagcaatgctgagcaagaaattcttgagggaaggagagattccagaaccagcagcttcagctatctccggaatcaccatcgaagcagtaagagcagccgcggagataccggtcaaagccttgtccatcttgagggccttaacttgaagcctctgtgctctgcctccagttgcaaccaaagccttggatggtttcagaggtaatggcttgaggaaaggagacgaacgggtctggttaagtggtgtgaccaatgacatcgcggaggtagaagccatctcttccgatctctttttggtctctctagattgatctttctgagattctctttcgaaatgtgtgaagttgctgagaagaatggtatttgagaagagagatttgaggttagtgatgttcagagattggagatgtgagatatgaatcttacgtggcagcttctgagcttcctaatggctcattggatagataacgttatcttcatttgcgattactgtggttgctattgggcgtgaaaaaaaatatcgtacttcgagtccggttcgataattgacataaccgaattgagaggtgcatagtttcggttcgattctaacaatttntggttctccaatctctcagacccttaaattg

SEQ ID NO: 57067 - DNA, 379 bp, Arabidopsis thaliana landsberg
atggatatgactgtcattgcacacgaaagtgcctgaccctgacatgtggttcatccagggtttattttcatgactatcggcttctgttcgaaccggttgtccaagccagacttctcctcatgaggacctataggcttaggaaagggaaatccatagcatattccactttttttttgctcttgggacccatgcggatctgacgaagaccgctagagcactctctcttcatggtgaaacgtacataccttagtacggcttgggcaactatctctagaccgcaggtttaaggtcgtccttgatggcaacaaaagtcggaacgcctcaccacgtcttttcacagacccaaacctactataacaccccttacagtctcgggtga

SEQ ID NO: 57068 - DNA, 453 bp, Arabidopsis thaliana landsberg
atctcacagaagatcggaccttgccctatatcaagcacctgaatcagataatggttagatgcattaaataagtttttttagaataatatcaaactatcaaaaaaacaaaaatgcaaaacggttattggaaagtttaaaagaggcaaattggaggccttctctgaacgaatgggcaatgactctatctaaaaatactaaaatcacaattacttaggtgccaaaatgcctattaaaaaattgtataacaatatgaaatctttgcaaatcttaatgttgagatatataataaaattaagtcattagaagctagtgcaaacacatctatcaatgagcacataatgatgaaaaataagaaaataaaaggcagagttagctagctctcagatacttatgatagtttgctaaataacatggaaatacttagcataaacaatgatgagctaactaacaagc

SEQ ID NO: 57069 - DNA, 562 bp, Arabidopsis thaliana landsberg
aaaggactactcacacccgagagttcaagactttttcaatctcaacgaaccgtttttataaatgtacgaccggggcaagattcctagaatgccctggcacgatgtttcaatgcaagttgttggacagcccgctcgagatttgactcgccattttgttcagcgatggaactatctttggcgaggccgcaagccaactaggcccctgccattcctgttaccgccccctgatgcgaaatttgaggatctcgcagcccttggattgacgggcacttgcgaagtgcagatgctccggtctgcattcaattggtcggtgggaatagacgaaaccgagcatagcatccagaatgcctacattcatttgattgaggagtcagagcattttgtctacattgagaaccagttcttcattacaagccccgaggcttacggaaccaagatcgtcaaccgcataggagatgctctagttgaacgcatcattcgcgctcatcaaaatgatgaagactggcgggccgtcatagttatacctctcatgccgggattttaaacaccgttgatgagcagg

SEQ ID NO: 57070 - DNA, 1448 bp, Arabidopsis thaliana landsberg
gaaacgatttttcctattttcggatctctgaataacagtaattaattattaggaaaaaatctgatcatgaaaattttgcttttagaatattctctttttcttaaaaaaaatcataaattatgtttgtttcagcactgctaaagtttatggattcaatagtttggtcattttattcttaaaaataggattatttttgttcataaaaacaggcatcaccacaacggaagatgggaggctcggatcggaagagtgtttgggaacaagtacttgtacctcggcacctatagtacgttatctcctttcccttttttcttctagtaatttttagaaaaaaatagatatgtactcttggttaatttaaaataattagcgtaattattgacttttttataacttaccgggcataacggatcctttttacctgttatgctttataatatataattttgtaagtataaaatagagtgtgataatgtttagactgttttttgttgttgtttataagagtgatttaagaatattaatttgtttagtgagacaattagaataatataatggggaagcagtggcagtggggtttgaattttacacacactgactcacgtgaggcgagagttttgacatcatgtccctttaattgatttttatcttttaatcaaatcaactttttttcttcttcttttttaattatctgatccctctgcataatcacctcttaattctgcattttttgtggatccgatactctgaatacaaaaattgagaactctgcataagggaatattaacaacaactcttttactgaaaagtaatcccattttttttttattgtttttgctgactcttaccgggtccttagatttatttaaggacctcctaatcttcaacaaatctcaaatttttgaaaattagattttttttaaaaagtaatacaaattgagatttgcaaaaatataggcattgttgttctataacaaagatactttatttataccaaaaaaaagaaaagagttgtcaagagcataattacaaaaaaaaaattgaaataagtagtagttgtgaaattttgtatagaaaaataatgtaggttacaagtgtaaaggcgcgtgtagcgcgcgtaggtcacgtgataacactctcacttcataaaaggacaaaatagttcagagaggctttaggaccaaacccgaggtcgatctggtttgctcttgtttttttggtttattaaattggattaattagagttgagacttgctctgagtaggagtcacgagccctcacgtgcactgctcatctctctctatctctctaccatatctttcatctttgtcctccgaacaaaatctggtctaactttatcttcttttcttttaataattgtcttctctactttaccatttttttctctagattattctggtaccaaacttataacttaatagttggtt

SEQ ID NO: 57071 - DNA, 877 bp, Arabidopsis thaliana landsberg
ctttcttaaaacacttaaagacattgaaacatggtcattgagcaagatctatcagttttgcatgaaagaaaaattattgaatgcttttatgatcatatcaaactataatatacatacagattttaagaaaaagagttaaaagaccattttaaatggcaatatttttatccaatatatgatatagccaaattattttctcaaagatatttttttgttatggatcctgggaaaagtaaaacataatcacacatatactttctaaaaacatcataatgatatccatatcaataatgaattagtgatagtagttaacaaaacaaaaagttgtgcattactatagtttgtgtttgtctttgtcacttattgttttatttttcggtcaaaacttaatcttattgttgatagtgaaaaagtaaagtgggttcaagaaaggagaatggaaaacatttctatcggcaaattgttgaatatgaaaaaatctactagcgattattaattacacgaaattcaaatataattagttacacccagtggcgttacatacgaatgatggatcaacaacaaacatctctctcaaaacaaaaacaacaaaaagaaacccaaattttaattgcttgagattttttatttcttcaattaattagtttttgttttgagaaaaattaaatcaattgttctcttaaatcgatcatctaatcaatgtagacaacgccaagcaattgctgctaatttttctcaagtcaaccactgcattttggatcgcattaacctgttgtgtttcaatgaacccgtccacacatcccccgtaatcagacacagccgcagttagataaaagttcatcgccggcacatcacgtttccttatgctctttctcgc

SEQ ID NO: 57072 - DNA, 350 bp, Arabidopsis thaliana landsberg
gtactttcatttttattttttgagaaataagaggattcatcagtttgtaaatcacaattaatatgttttgcccaacttgcaaaaaaatcgcagctaccccacttccacttgcaccgacaactctatcccatccctttttttatttttacacctttcgtggccacattaagtatgtatcttatgaagttatgattagtaaagctatgctatatttgtcgatatttgacgaccacaaaaattcgtatttgaaagttataacattgtgcgttttatgctattcctactatcgactgaaaattttgtagagatgatggttacgcaaccatactgggggaacctcgataatgata

SEQ ID NO: 57073 - DNA, 332 bp, Arabidopsis thaliana landsberg
  unsure (1)..(332): unsure at all n locations
gaaagaanaaaaaanaaaaaaaatatatattaaaaaaaaaaaaaaaaaaaanaaaaaaaggaaanaggtgtaaaataaaaaaaaaaaggaagggaaacaaaaaaanataaaaaaaataaaaaaaatgaaaaataaataaaaaaaaaaaataagagaaaaaaaaaaaaaaaaagaataaaaaaaaaaaaaataagaatatatagaaaaagaaaaaataaaaaaaataaaataaaaaaaaaatataaaagaaaagataaaagaaaaaaaaaaaaaaagagtaaaaaaaaacaaaaatattaaataaaaaaaaaaaaagtaaacaaaaaagataa

SEQ ID NO: 57074 - DNA, 1048 bp, Arabidopsis thaliana landsberg
gtttctcaggagctcaggtactacttactctgcatactcttcatggaattcttttcgaatggtgacatttctccagggtttacaattagtttttggtatctatttgcagctgggttcgtttctaaggaaaatactgaaatgtgataacggggatctgtcaagatcagagtttctagcagcagtcttcagataccttcagcacagaaaagatttggtgtcaaaggagttttcaaagttttgtaaatgtggcggaaagcttgagtttagtagactaaacgcccgcgaattttctccgggtcatgtagaagctattggtcttcaacagaaagagctggaggtcagaatttacatttctcttccaatactaagtttgaatttctcttgctttcgaactttctcatttggtcaattcgtaaatgaaagctgtgtaagaatcttgaatttacggaatggatttcttgctttgatgaactcatgtaggaagttaaatcaaattttgtggaaacaagaagccaagttaaacaaatgcagtcagaatggcagaaagagcttcagaggataggtaatgaatcttcttatacccaaattttctcttctcggtaattagagattacatgatcaatctctatcatcctctatggcagtccatcacgttaaggccatggaagttacatcttcttcttaccacaaggttctggaggaaaatcgcttactttacaatgaggttcaagatctcaaaggtaccacgtcctactacatccttgcatagtagcatttgagttttagtatttcgtagagtatcaacttctgttttcgttgaactgatggcaccattagagtttactgcagaggcagaccttttttccaagaacataaagatatgcaatcaactgtggataatattggagaaaatggtcatattatcgattcacaattctttctagcaggagaaagatgcacggaaaatatttgccttcaacaaagtatttggacagactgtctcacaaggtatgttatgcgattgcatcgatgtccatctccaagtgca

SEQ ID NO: 57075 - DNA, 414 bp, Arabidopsis thaliana landsberg
ctctccataaacaagcaactgctgtatactattcatattttttctttctttttttttttttttttttgttaaggctttttttttttaattaattattgttacccaaaaaccaaaaaggccatgacaatgtcatgtaccttttcaaaagctacaacaaatgtaaagagaggatacattaaaatgcacagccacaatcgaatcttccgcttcaattgactaagggattaccttgttggaaatcattatccacgaccaccttctttcccacggcctttgcccctttcacgactcgtgggttggccatgcatctccttaacctttgttgatcgtttaaccgccctctctcaaaatattcctttaccccaaggagtcataacatccattgaatcaaattccttgcccgaattggacaaa

SEQ ID NO: 57076 - DNA, 980 bp, Arabidopsis thaliana landsberg
aattcgcccattaataatcaaaaagaagcttcttctctatgtagtagtagatccgttgaaatagagatgatttatcgtgtagcccattaagaaaagaattggcccattaacgagaaagacgcttctctcttttctattagatccgttgaaagcgagatagataaaccggatcggtttaatgaaaaggggtaacatcggaattacaaagtttcatgattcttcttcgttcgctttccaagttccaacgtccgttttggggggaaataaaccaggggacaagaaaatccaagaaaaaaaaaattcaggtttctgcgagaaaatctggatgaaacagacctatgtgttctgggattttttttcaaagggaaaaaaactcaagggtttaagatcctctgcaatcgtcacgaaattttgcgcatgtagcctcgtttatgtttctatgttgttgacgtcgatcagaaagttttgaagctgggaaagtgaaattttggttcttgattttatcatggatccgttgtgattggattttcaaaagtttgtgttgatgtttctcccgttgttgggtattgtcgagccgggatcgttttagaaaaatctgaccaaattccatcataacaatggtacgagctttctcttctttaatcgcattgtggtttcttctaacaaaatctgattcgttttgatttctctctgttgtgtgatttcaattttaatttttctgtgaacaaacgttttttggttaatttatgtaaatttatcatactgtgatacatgaattttcgtatggtgtatcaaattgttattgagtttctaaatgtgtaaaaatggaaccatatgtcgttgaattaaaaaacaaaaaaattccttttttgattggtttgtatatgattgaacaaagctgtgaacaactttactctctctattgattttggtttggatgagaaagaaagaaacaaaagatttttttgagaaaatcatct

SEQ ID NO: 57077 - DNA, 1219 bp, Arabidopsis thaliana landsberg
cgaatccgatccaaaatccgatccaaaatgtgaatgtccctacttaagctccgactaagcaaagcaatacaacaagagaaattgtacaaagaggaagtagtaccaataagtgccaatgacccaattttgcagctattgggccattttcaaacaccaatatcaggcccattaacagattgagagaaaccaacctcccaaaagagaaaaatcaacagaaccaaaacaaagccacagtatctctctctctctctctcactcacatcgtctcctccattttcaccactaaaaccagactaaaaaccttcctttattcgtgcccttctgggccaacaaatgttcacaagcggtaacgtcaccgctcgggtcttcgaacgtcagattcgaactcctcctcccggcgcttccgtcagtccccaaatctctctctctgtctcaatctctcaatctcaatctctcttttgcttatctctttaccttcaatgataggtaaatcgtgcaagacacttctacgaaaacctagtcccaagctacacactctacgatgtcgaatctcccgatcactgtttccgcaaattcacagaagacggactcttcctcattagtttcagccgtaaccaccaagagctcatagtctatcgtccttcttggctcacttactccacaaccgatgattccacaaccaccctacctcctctacctcgccgtgcttcgaaattcgacagctttttcactcaactctactcagtcaatctcgcttcttctaacgaactcatctgcaaagacttcttcctctatcaccaaactcgtcgtttcggtcttttcgctacttcaacagctcagatccatgattcatcatctccttctaatgacgctgttcctggtgttccttccattgataagattactttcgtacttcttcgattagatgatggtgtggttcttgataagagggtttttcttcatgatttcgttaatctggctcataatatgggtgtgtttctttatgatgatcttttagcgattttgtcgttgcgttatcagaggattcatcttcttcagattagagattctggtcatcttgttgatgctcgtgctattggttacttttgtcgtgaagatgatgagcttttcctcaattctagctctcaggtaagcaaagtttttacagtatcttactctggagtagataaagttttgagctttgtgaggtttttgattg

SEQ ID NO: 57078 - DNA, 1055 bp, Arabidopsis thaliana landsberg
aaatcatataactaatgcatatataaataccatacggaccatgttgcgaatgatgaagatgttttgaccttttaagtattgtcttgatcaatttctcttctttttttaccatttcccatgcatgctcacatttagctactcgctcacttacaaaattcacttttgccttttagaataaaaagatatttaaaaattcactgttattattcagcaaattgttagtttaaaacggaatttaaatttttttttgttaaaagatataattatattttagctcatggacaacattttttttttatggacaacatatatatgtgacctaaatacaggagaggggatttaccattaaaatttcaatatgtagctccaatatttccatatatttagacatgtagtcattgggatatgtagaactgaggaaaaaataaatgcagtcatttgacatattttgaaaaaactttactagaataccagaatcataaaacttaaatcaaataatagaactgaaaattgttctgatcaacttaagttataaaatatcagaaacaaatcgtgacatgtagtttggaagaactgtaccatattgattcatcattaccaattagtttcgctgcatatgtttataaccatgggacaagttatacaattatatattagttcgacttccctttaaaagtagaaattagggagtagatatatcacaaccagaaacttggaagaaggtagaaattgttggtttaagtttaactatcgttttgtgatggttgagattttttttgtgatagttgttttgctatgcatggtcattttatattacaaaaatgttgaactgtttatggcagatatataattatgtttgtatatactttcactaaaaaggaatatccttttcttttttgagtaaaaaaatatttggtcaaaaaaaatattttatttaatagattgtagattttaaattaatttcataccttgattatttgtttaaattgatttcaatatagaattgtgaaatcaaagataccttaactttttgttttcaaaggttaataaattaa

SEQ ID NO: 57079 - DNA, 501 bp, Arabidopsis thaliana landsberg
ctgatttatcttctttcttccgctctaagaagcttcgattcttaattctgttttatcgattttttttccttgtttctctttcccaaccggtagctggttgtgctagatccatttttctggtgattgatgcaacttctggagctcgattcttcgttctagtatttgattattgtaagatcagtactctcttggaatttagatgcttttgtatggttggatttttatttgagtgaatttggctagattcgattttttgatgattcttcaaaaagttacttgattagttggttttttgagaattcgtcgttcttcaactcttttttctgttaatctgagatattgtacgattctaactcctctcgctattgcaataatcgaaattaagggttatggctgcgttttgatattttgatcatttgaattcaacgaagcacagttggtgtgatgaatgctaatgaggagggggagggttcacgttacccaatctctgatcgaaagacc

SEQ ID NO: 57080 - DNA, 178 bp, Arabidopsis thaliana landsberg
gggattacggttacagcattcaacacgccacattgagagagacttggtcccaggggaaccaaacattcactgcctcacagcagagcgcgaaggcatcaagagccagcgcccagtcaaaggcaaaaaagtcaacgcccagttaccgagtaacgatgggacgaagaccacaccccttgat

SEQ ID NO: 57081 - DNA, 469 bp, Arabidopsis thaliana landsberg
gactttgaacaagctaaactggcgctaaggaagtaatgcataagacttacatgtttgagattatactaataaaatgcgagtgtgggagttggatacgctgtttgcagcggtttatctaaagtttatccaaaaacattgtttggtacaatgtagattgagtatggataagctgttggagatagacttagtggggatttggaaactattgcatgtaaattagatttgttattttgaagagagagggaataaatggaagagcgggcaagatatatagatactactacttggatgcatggaagcgaatagaagagtgagggacaagatggggagacacgttactgcgcactgcatgctgtccctacctactggcattgcattcatggaaaacttgaatgcattcattctcttgaattctttcctatcgaaacctctttcttttttttttactatggacagaaccgtttcaatg

SEQ ID NO: 57082 - DNA, 302 bp, Arabidopsis thaliana landsberg
agggcgccactgtgttatatagccaaacctgattctttactttatgcgacctatatccaatcaccttgaacaatgctgaccggactctttaagcaacagatataaaataagagctctggtctgtgtatacttgttgaaggggccatatctttgagacacacactgaacgctatgcttgctgatgcatgaacacgctggtgccactgtacaacacaaatgatgcagaagctggcttaacactttatctggagctgacatccatagcagccgctatacaaccacagggctttgaccaaatacta

SEQ ID NO: 57083 - DNA, 1087 bp, Arabidopsis thaliana landsberg
aaatttagaatcagtaggttattaataggttttagatgtattcatagggaaagccggtcatttcatacccaatgtaaacagcaatgctcaattcatacatgatagtttactctttgtcaatacatacccaacctttttaaaaattcaaatttcatacccgaacatatcttgtctccactagtgacgtggctccatgtcatggttgccacgtcatcatcatttaaaaaataaaataaaaattttctctttccgtttctttcctctatcatttgaatttttttatatatttgatgtaagaatttaaaatattttttcgagacataaaactaatatttttaccgattcttatatttaaaatgagtttataagcccaaaattcgaaattcttcttctaaaaattttcaaataacttttaatgaaaaattgcgaattttgagtttataaactctgtactcaaaattttgagctacaaagttaaagcatgaagggtatggggttaaattgactactttctaaaagattttaggcattttgataatttctctgaaagtttctggagaagtaggacccaacaagtatgttctcttttggcgcctctggtgtattcacattcagaagacgcggtttaaagctttcccaaatctcgctgcacatggttttctccattttcactcactgctctactcagacagagagtgagagatccaatgcagtgctttccacctcacttatggtgcacctccttggtcgttttcttgtcggttaccggaaccctagccgccgatccttacgtcttcttcgattggactgtttcttacctctctgcttctcctctcggcactcgtcaacaggtttcaaaaatcttctacattaatcatctatgtccaatctcaaagtttcaatttttgaaaattcccaatttgaaagtttcgatttttgattgtgtattcgatttctaggtaattgggataaatgggcaatttcctggaccgattctaaacgtaactacgaattggaatgttgttatgaatgtgaagaataatcttgatgagccattgcttcttacatggtaataatgtctattatt

SEQ ID NO: 57084 - DNA, 1412 bp, Arabidopsis thaliana landsberg
atagataatgattgaagtttggatttgtgtagttttctgttaaataatggtaactatgagaacactaatgaaactaagagaatttacttttttgttgatttttttgctagacgactattgttgatcaagaagaaggttttaaagttgaaagatcatggatatcccagagaagatggagatggatcaactgaatcaagggtcgagctcatctcttaccaataagcgaaaaagaggtcgtcctcgcagagacgaaagccagactcagcaaccagtgaacccacctgttgatgagaatctgataggtcgagttgtttctggtgtggttgaaggttcttttgaggcaggctattttctcaatgtaaaggttgctgacacggaaaagcaattgaaaggcgttgttttcttacctcagaaagtcactccacttaccccagcaactgatttgtttccccaagctaagatgtatgcaagaaatgatatcccaattccctcttcataccaacaaactccacttcaggaaaagaaaaacgctgggaatcaaactgatgacatcggttctgagcctcaaacagatgccttgatcgctgataagaaccagtctgctacttgcaccacatcgctgcctgatgatcatccaatgagggatgcgggtgttggttctgtggctatgggtgagaggaatgatcctattgatacactgatgaaagatgttgctggctcttctgcagagggtaaagtcattgaacctgcaggccaaaccctctctctcatgccacagtttggtagtgatggcgtacccaaagaagatcatactgttctgagatccgaagcttgtgcagcaagtaagacagcagttacagtcactattacttcacctaaagattcaattgctaaaggttctactactttggttgatttcttttcagcacctgaaacgtcgcgaacgcaggccactggatccagctctacactgaaccttgaactctttcagaatcaaactaaacgatcaggaacagaggatgagaaaactcctgcagatgctgaacctcgtggaatggaggaaaaaccggcttctactgttgaagatgtgccagaggagcttcagctagagcttggcaacaagaacatgagtgcatcaggcattgctactgaagcaaatcctgatcagtctgtttcatcaaagagcgggttcttggcaaatgcttttgaaggaaaagaagaaatcgcaaaagaaccagaagattctaatgcagcagcttcagagagcggcttcccagtggcaacaacacaagtcgatgctaatgattcttgaaaagtggatgcagcatcaaagaagctgttggtattattgaggaagtgaacagtttttttttgtttttccctccttttggttagaatagttagtagcaaac

SEQ ID NO: 57085 - DNA, 532 bp, Arabidopsis thaliana landsberg
aaaaaaggaaaaaaaaaaaaaaaaaaaaaaaaaaaaaaaaaaaaaattaaaaagaagagaaaaaaaaaaaataaaaaaaaaaaaaaaaaagaaaaaaaaaaaaaaaaaaaaataaaaaaaaaagaaaaaaaaaaaaaaaaaaaaaagataagaaaaaaaaagaaaaaaaaaaaaaaaaaaataagaaaaaaaaaaaaaaaacaaaataaaagaaaaaaaaaaaaaaaaaaaaaaaaaaaaaaaaaaaaaaaaaaataaaaaaagaataaaaaaaaaaaaaaaaaagaaaagtaaaaaaaaaaaaaaaaaaaaaggaaaaaaaaaaaaaaaaaaaatgaaaaaaaaaaaaaaaaaaaaaaaggaaaaaaaaaaaaaaaaaaaaaaaaaaaatgaaataaaaaaaaaaaaaaaaaaaaaaagaaaagggaaaataaaagtaaaaaaaaaaaagaaaaaaaaaaaaaaaaaaaaaaataaaataatagataaaaaaaaaaaagaaaaaaaaagaaaaaataaaaaaaaaaaaaaa

SEQ ID NO: 57086 - DNA, 537 bp, Arabidopsis thaliana landsberg
ttctttctctttttacttgctaataccaccatggccaacttgggatcggtctcttcatcatttcttgaaccggattgatacttttttcagaaattccaccatagaatctggtcaaagatcacagcaaccaacacacaattgaaaacccttttgcttgcaataaatcaacctctaacgactcagaagaaatcaatgagcggtttaaagaataaaaaaaaacataatctacaaaggacaaaactttcacaggaaaaagatgaaatttttttaactcttagctcaagatctaagcttcaccattgaaacacaaataatgtttcaccagaatttgaaaatgaaatcaactagaatttgaagaaattttataacccccaaaaaaacggtgaaaattatcaaaaggatcagagaagaggaaccctcaaaacccgaattatcgatcatctgcttccattattatccctccgaccaaattcgtcgtgccttgtactcaacagctagtcgtcttcttctgcaatttataaatcgatttctgcaatc

SEQ ID NO: 57087 - DNA, 479 bp, Arabidopsis thaliana landsberg
atcgttagatcttgtcagcagttttctgaagatgagatctcttgataaagttacatgtaatcttattttaaacaaagaaaaggctgcttttcaaaagagtgagcgtcgacgacaacgaaattccgtgagagtgaatgagtgacaatgggtaaagggaaagaaaaaaaataaataaataaaagacatggcaatgttaataaaagttgttggttggatagtccacgttgaacgactcaagtgctaacccagttttggcatcaaagctatggtaggcatcaccctggacagaagtaaccgaactaccttcaacccgatacgagtccgagaagtccgaaaattctgaagtgtcaaacgtaaccgaggcgccattgaggaagtctatgccgtcgacctcacccaaggtgtagtcatctcccgcgtctaagaagttaagaaagcccgtatgcctcgccatgtcggaggactcttccgaagtcatg

SEQ ID NO: 57088 - DNA, 886 bp, Arabidopsis thaliana landsberg
tccgctgcaatcagtcaaaagtttttttgtatcaatggtttatacttactaccgtataaatacatagctaatatctttcacacgtgtgcatacgtggattgatactatatcaagcgtgggagaattattcatatttcatccgacttatctataaagacacatagtctctcttgttcttttaatccacatatcatcacaaactttctctctcattctctttttagcttttcttagtatatagtacacgttcgaagaagaccgttcgtgtgcaaaaacatgaggtgtagagcacttaacattcgtagaagaaagagagtaatggttaatgtgagctcaaggaagctcatgacccgtctacggcgaatggttgctccggagacgagtttttccggcgaggttgacggtgctacactttatcgactcacggctgatcacattttcttacttcaagcaagaatccaacttcttcgtcgtatttcttctgtttgtggtctctagatcgaagatacacgtggctaaaaaaagacgaagaaatggtataattatggataaaacgtctgttttctctatatatattctcttaagcaatcaacttataagttcgtcgtaatgccgacgctataatttgaacgtatttatgtgaatttatgtttgtaatgtttttaattgtgaacagttttttacatgcatgcagctttgaccgcgtttatatgtagcgttgacacacgaatactacgacacgcctacgtttttgaagtatatatctagtttgaaatgacgactaattatgagatataatcatagaaaaataaaattgacctaagaatatggtaatctgcgtatgacatatgcgcggtccatgcatgatgcatgtgaaactggtgcc

SEQ ID NO: 57089 - DNA, 872 bp, Arabidopsis thaliana landsberg
ttcgttattcgatcatgaccattaaaatgcatatgtttgatagtgacccgcaccacacagctcagcatattgagacagattagtaaaagcagtccaaaccttaggcacccagtccacggttcatatcatctgaccattgagaatggtgaagagagataagatgatcgaacggtgtacaataatatgaccataaaatcgaacggtgatacggtataggatcccacgtaaaggtccaaacaaaaaaaaattaataaagaagaaaagacaaagagggtttgcgtagaaatttgatggctcgcgcatgcgacagtgttaggcacttgcatttgcctaaaaggcgataaaagcctacctcatcttatcgtatttctctttctgtttctgtcttcactcaccgatttttatgtttgtgttcaatttgaattttacaagtttggttggacttaatctttcctttaacataaacattcaatgataattttattattaatgttcatttcttgtgaagattttcattgtttctatatataatatatattttacattgagaaaaaaaaaatgatgcgaattgttttgaagttgaagtggttgattaatatttttttctacaataaatcaatgaaaatttagaattgaaaaatatctaggcatggaatttctcaactcaacatctagataaacatatgtaccacacattcgagcaatcgtataaaattatatacgaataaatagaattagtttctttctcggaaattctgttaatatttttaggaggattaagtgggttcgaaatttaatcacttcctgcacaaattcatctcaatgtattaattggtgatatgtcatttttttattttattttttgtatgagc

SEQ ID NO: 57090 - DNA, 627 bp, Arabidopsis thaliana landsberg
atctggatttaacttttttctttcacatgtcgaaagtgaaataaaactaatcaaatcagaaaaaacctaagtaataaaaatcaagttccgcttggagaatagtgttatcgttacgttacgttttgcaacgtgtgaagatgatcagccgccaacacagccacacacgcgttatcttgattttcttattcaaccaacttctaaaaataaacccgaatcttcgtacggacgcatctcatgttcaattattttcacattgctctaaccatgcatgtaatttactcaaggctttgttttgagaccgtctttcttttcggacgaccgtccatccattactccttttagtctttcatcaacactttcttatttccaaagttgcatattaattacattattaactaattaatactaatattcttgattaacacggtctcatgtgaaaactggcgctgccggaatctgacggtcacgtcttcagtctaaaacgccacgtgtcattcacccacgtcgtccgttcaccaactttttttctctatatatacaaatccaacatcctcttctacactctttatacatttcaatatttcttacctaaatacataaatttttctctccaaatcccaagaaata

SEQ ID NO: 57091 - DNA, 505 bp, Arabidopsis thaliana landsberg
cacattatccgaatgtcaaatattgagttagctaaacagtagatgtccactagattttgatttttgcgatttacatatacatttcatttattcagagagaataataattatatttcgcaaaaaggtgctaaggcacggtcttaatacaagtctaaattattcatatgaaaaattcatgttaggaaataggttgcaccataagaggatggtgctatcaatctattaacaaagctacaaataccctgagctgttttgccgcctactttcaatcaacagttccgatcatgatggtttattacatccagaggattgacatataagactgttgtttattttggttcgattcgggaagtaaaactccaatgctattttctgattaacgatttgcagtacctacacacctgaatataaaaaatgcattggagctaattctcgtcagatcatatccatgatatacatttagtaagatgcaaaaaaaactcactattttctacctgatctatat

SEQ ID NO: 57092 - DNA, 1748 bp, Arabidopsis thaliana landsberg
ataaaatcgagtttgaacactgatgcttagagtacattgatttgctttttgtttttttctaatgtttgagtctctgctatgtttttatctgacctacccgctcaagtcctgttctaagttcatttgattcagaatcgtgtgctacttaggttgtaactttaatcatctgattttgaaattttcaaaaattctaatgtcgacagagatttcaaggatggctagagatttggactcgcgaaagaaaagaaggatctctttagatggaattgctgccttgtgtgagcattccaaagagatcattgattcattgcctatgttgaattctcctgactacttcttgaagccatgtataaacgagctggttgagcgagaaattgaaagccctgattattgcagccgggttcctgattttactattggcaggattggttacggttatattaggtttcttggaaacacggatgttagaaggttggacctggatcacatagttaagtttcataggcacgaggttattgtttatgatgatgagagctccaagccggttgttggtgagggacttaacaaggctgctgaggtgactctggtcgtaaacataccagatctaacttggggaaaacagcaagttaaccatattgcttataaattgaaacagagcacggaaagacaaggagcaactttcatctcatttgatcctgataatggtttatggaagttctttgttcctcatttcagcagatttgggttgagtgatgatgaggcagaagatattgcaatggatgatgcgccaggtttgggagatcccgtaggactggatggtaaaaaggtagctgacattgatgaagaagatcagatggaaacttcggagctagagctttctcattctctcccagctcatttaggacttgatcctgaaaagatgaaagaaatgagaatgctgatgtttcctaatgaagatgaagacgaaagtgaggactttagagagcaaacttcccatcttatgacagccttgactaaacgaaatgtaagaccttcgcagaaaattgctcaaagaaatagtcatcaagaccctccaccggtcgtgcgcaaaactccgcttgctttgctggagtataaccctggtaatgataaaagctccccaggtagtatcctgatggtacaacaaaataagaatttggcagtgagaaagtcgaaaacgggaggtttcgagctggacatcagccatgtcacaccgttaactgataactattcccgcaatgttgttgatgcagcattattcatgggaagatcgttccgagcaggttggggcccaaatggcgttctttttcacactggtaagccaatatgtagctccagttcccagatggtattgtcttctgtgatcaataaagaaaagatagcaattgacaaagtggtttgggatagaaagggaaaagttcagaaagaacttattgattctgcgtttgaggctcccttaagtctccacaaggaattgaatcatgtagaagaagaagttaggtttggctctttcagtcttaaacttcagaatgttgtcaccgatcgtgtagttctttcagatatctgccgaagttatattggtataatcgagaaacagctggaagttgctggggtgtccacatctgcgaagctgtttttaatgcaccaagtcatggtctgggaactcataaaagttctcttttctgagagacagagtactgaacgtttgatgtatgcagcttctgataacg

SEQ ID NO: 57093 - DNA, 559 bp, Arabidopsis thaliana landsberg
  unsure (1)..(559): unsure at all n locations
tgcttttccataatagtctgtagatagggtgaatctgcgtctggcccataaaaaatctgtaagctttttgagaggagaatttgtcatacccccaaatgtaccgccaacggtcatgggcgtcactgaggacaatttgctctcaggaccccttcagcaccagatattgatcatacgcttgttcagagataggcaaatgaaaaaaaccatcaaactgctcctgctctttggcctctttaatagtcaattttgtgtttttgacaaaggagaatagctctggaaaattatgcctcgggatgctctgactccactgatcatcccagaacgaaattgatctgccattgccaatagcagggatagccagtcctttaaagttgggaagaagcttgatcatgctcttccaccagaaagagccattgtttctatgaccagagagaccacggggtaaatagtatttattccagatgagatgcacccaaggtaagtcatctttcgcttgtgttatgcatagcggcttctactactnatatagattttatctctataaatatagctacataag

SEQ ID NO: 57094 - DNA, 1713 bp, Arabidopsis thaliana landsberg
  unsure (1)..(1713): unsure at all n locations
aacccccaccccacaattaaattttagcaaaaaaatatataaataatttaattatcattacatatttatatacatatagatatatgacctgcattgagaaaaccctttcaagatttggtggatcattcaagaaacacaaaaattcaaacttattcaaagaaaaaaatatagcaaaaactagaatgaagaagacaatggaggatccaagcaagatcatgagaaggtcaattcacactttcctccaaaactaccaccgtgtcaccaccgcagccgccgtggccctccctttctccgccggtctcctcctctctcaacctttcttctcttcttcctcttccacccttcacatgaggctgaacatgctctttcgcggagcgggtttctcttcttctcatgatttcttcaacatcttaagccttaaactttcacaaaccctatcttcctctttattcactcttcctttctccctcacattcctccttttatccaaagcttacgtcatcaaacttctatcaaacaatcactctgcagattcctcctctgttttctacctccgccttctcaaaacttacgtttgcaacttcttcttccttctctctgcaaacgcctctgcttttgctctgtttttcttagcatacaatacccttgaagcctttggattctcttcaagaaacttgtacacattcctctccgtatcctcagcaatcatctactcaattatcatagcgaacgcctttgtaatctccaatctagccttggtttcatcaccttcttcttcctcaggaggatacacaaacatcctcaaggcgtgtcttctgattcgcggaagaaattcaacagcaatggctcttgctctgcctaccaatctcggcttagcaggagtcgaagccttgtttcagtaccgagtcatgagatcttattacaatggagacagagatatcatatccatagctcttgaaggaaccttcatagcttacttatacgcactcttcttggttcttgacaccatagtcaacttcctcttttaccagagctgcatcaaaaacgaggaggatcaaaatatcggtagagaagacgagtattcaatcaagatccaaatcagcgaaacagagaacacaaagatacacatcaaaggatcaaagaacttgcaagaaatcttgtgactctcttgtgttggttgatgtaattattacttatacaaaaaaaagtgaaaaactttacgagattattgattctttaaggataatctcaagtagctttcacttcaaagaagagcaaaggtacacagtaaagaacaatcacaggatctgcaaaactttttcttcttcctctgtttctgcttttctttattttagtctcttttttttccacattgtaaagtcaaatataccagaaattttaattaatgcaaatcttggaattcacatttggttaatcctacagtataatttcattgccgacaaagtatattaattagcaatgattttgattacttccttgagttatgaagaagttgactagattcacactttaacaagagtgaagagtcttttgatcttgagcaaggataagttcaagcaaaatctttcattacaaagatagaagaagaaatgtcacaattatctttaaatagacggtagaggcgaaagcaattgaactttctgtatttttcgtgaatgaaatnctaatatacattgaaatgtgtaatgataa

SEQ ID NO: 57095 - DNA, 1642 bp, Arabidopsis thaliana landsberg
atgagatgtacaaatcttcgaaactctatggagtcaaaaccagtagtatgtggatggttcttttttttttttttttgcttattaccttacttctcctttttatctttgggtttacgctagtaacttttcatttaatttgcactgaaacttttcactcttcatgtggcattaagtggaacaaatctccatcccaggttcaccactatgggaacaacaacacaggtacaagatgttttcctgataccatatttttttaataagggctccctatatgaatgaatcagtgggttccctgtcatcaactaacctattattttctttaaacggggtttcagagtcacaacagcaggatgtatctaacttgagcacttctgcagcagagcaccagattctggtaggattttgtaatgttagctgtctgcttgtgtgagcaaggagcgatctttaatcctagaacttaatttccttcaaatgtaatgctatggcctacgggacaaatcagtgagagctaatcatgacacataataatcaaatgtcagatattggcaaggcaacaagctcagagagaagaagagttagcacagacacagcgccatattttagctcttcaggtgtagtagaattggttgcattgatctgtttctgcacatgttgcaattagtaactgtttattctgaatcaggaggaaatcgaggagcttgaacgagaaaaccgtcttcacagtcaacaggtatgtgattacacgagagtttggttgctttgccagtttcttaggatcttatttcaaacttccggtggtatgctaaattacaggaagcagtgctaaagacggagttgagggagatggaaagaaaacagaagagagaaggcgtggatatgacatacctaaagaatgtgatattaaaactgctagaaacaggtaaaaaaacctggagattaaaggtggattcacgaagtagatgttttaggggtaaattaacttgtgataattgcaggtgaagtggaggctttactacctgtagtggggatgttgctgcagttcagtccagaggagatccagaagtgtcagcaagcctaccatagctcaacaacagcggcaacaacaacagaggcgactccaagtccggcaagtgagggttcaggtctatcagtcttctcaagattctcgttttcatagtcgggtggacagtggacacattcttttgggccaagatacatacacatacatacgacattgtgtttaagtccttcgtttttgtgtaatgaacactaaaagtcaagaaaacactttttgtccagatgtaaagaaaggataagccactgaattgagttgttgggccatttttaatggagtctattgtaatcatgcagaaaaccgctgattatcggaattaatgaaactaaaaaagtcaacgcaaaattaactacaaagatagtataataataacggtcgtcgacttgttgttattggtcaaccgttatgtacggaatcaatttgaacgggtctcactctcactgccttgaaggccattttaattgagcggaattcatttcgcctactagtttcacatctcgtaacgaagaaggtgattggctcttcttcctcttgctggaagccatggtgagtaggctcaagatacac

SEQ ID NO: 57096 - DNA, 995 bp, Arabidopsis thaliana landsberg
ggaaggttcctccttgtcctcattctgatcatctctgcttcgtccaggcaatctatgttcttcatccaactttccacttgaaggctacaatcttaacgatgcaatttttcgtggataatgtggtaaagtcctgaattatttcaaagtcccaaccttttccgccgatagactcgagtcattctaaagaagtctaatttgctgtcattttcttgttccatttcgaaaaatccgataaggtatggaagaaagttgtatatgcagaccgacttctgcagctgttcaaatacgttcctcgtgagcagctgacaatcccagactttgttttccagtaagttcactctactcctcacactctagtaacgttattcagttctcgatttgttttacttactagaccttgtgtgaaaaattgcaggcatgatcttgaagttaacggaggaaaaggtctaatcgttgacccaagaacaaaatacgtttatcaacggccatgaaccaaaatcaaagaccgttactttattcagtacttgtatgtttgcttgtgaaatatttcttcattctttcatgcttatcttctcaagatgatcctgggagcaaataaagtcttcttcttcttctaatgtaatctaaagattgaatctttttgtttataaatccattttctcagcacaaaaaaaaagccaaagtcttctctcttttctctgtttgtcaatgttcttgttcagctgaagatgacgcagtacatgccattgtttagatcatgctcgagcttacgattagtaagtcagcttcatgctcacctacttgtcaccggtcgtctccgtcgtgaccctcttccagtgacgaagctcattgaatcatacgctttcatgggttctccagattcgtctaggctcgtctttgaagcttttccttaccctgattccttcatgtacggtgttctcatcaaatgcaacgtctggtgtcatttacttgacgccgccattgatctgtaccat

SEQ ID NO: 57097 - DNA, 330 bp, Arabidopsis thaliana landsberg
aaataaaaaaaaaaaaaacataaaaaaaaaaaaaaaaaaaaaaaaaacaaaacaaaaaaacaaaaaaacaaccaaaaaaaacacaacaaaaaaaaaaaaaaatataaaaaacataaaaacaaaaacaaaaaaaaaaaataaaacaaaaaaaaaaaaaacaaaataaaaaaaaaaaaaaaaaacaaaaaaaacacaaaaaaaaaaaaaaaaaaaaaaatatcaaaacaacaaaaaacaataaacaaaaaactcaaacaaaaaacataaaaacaaaaacaaaaaaaataaaaccacaaaaaaaaaaaaaatacacaacaaaaaacaacaaaa

SEQ ID NO: 57098 - DNA, 1141 bp, Arabidopsis thaliana landsberg
tatgaaaatatttatattttttttgtttcaggctggcagaattaacatgggcttggataagacgtttcttacacataattttccgacatccactagaatatcatcaatttataatatgaagaattattaaaattgtgaaaattcaataaaacagatcatttattttagatcaaaatcatatttagggtctcacaatcagtcaatcatcccatgagggtgagactctttatcagatttaattattgtatcgcttagtaaactattgtatataaaagaataaccaccgtgaattcttcttatttaaggaaccaaacaactcattgtttttttatataaatgatcagtaggggatggtaaatcgcctgtttgtttcttaccaaatattatcagtagttgaatcgaaaatgagtagagacaatagtcaatggaaacgtgagatgtgaatacacaagtgaccttagttacttgaagccaccacatgtcggcagagaggtacagaaaccaacacgtaccatctttcttcttctcatctcatgcaaatgcgatcacacagatctgcagatcacttttttgatttttggagacaaccttacctgttgtgttttattttctcttttcggtcttatattcttccacctcatttcctacttattttttctttcttttttctgataagatcgcagattaggttatcagggataaggatttttttgaacgaaacgtaattctgataattggcttaacatttacgtatatctcctctaattagttaaatacggaaaacttcatcaacatcaaaatctctaagttcttgtctccacaatcatgagtcatgcaaaacaccattatcaaacaaaccaaggaaaacagcaaaaaagaatgcaaaacactgtgattccttttgtctgggcatcgaaccaggagtgagtgtgtgtacctttcatttcttttcaacgactcagagtagtttcttcaattcttgcacgaaacgatctctagtacatgtgggatcttctttgtcttcacttgccttctcgagcttctttaatgtcacaaaacttgcactgaggtgtttttgcggctaccatcaccatccaaggaatccctgattcctttgcacgattgaaaggcttttctttcc

SEQ ID NO: 57099 - DNA, 482 bp, Arabidopsis thaliana landsberg
  unsure (1)..(482): unsure at all n locations
tgcttctatttctggcgcctcttctcttttcttgcgccgtgtgaactagtggcccacaaaagcatctataacagctcacatttatatgatcgcaaattataaatagcgagaccaaccttcttcaaatgaaccgagaaacgaaaaaccctttctgataaataagaaacatgaaaatccttcgcagaaccaccaatgaaggattgaagaagaaaactcagtcgtaacttagatcgtcgaaacgagatcacaagggaaaaaaaagcacgacggacattacccggatgatagttgagtgggagactaannnnnnnnnnnnnnnnnnnttggaaggagagagccggttgataatccagggataatccaacgagtgaatcgaggagagacccatccaccccccctaataagtggtccaaatatactgcagatgctgcccgaaccgtaagttgtttaagttnttgttaaaaatcccaactacatgcatt

SEQ ID NO: 57100 - DNA, 463 bp, Arabidopsis thaliana landsberg
  unsure (1)..(463): unsure at all n locations
tccttttttttatgatttgctgtccacatatcagtagtgacagggatccgagattgacacttttgaaagaaattgatcatataactcctctgcacctcatacatatctaaaatgtcctttttaatagtgttcctagacattgttttgaaaagaggttgtagagctgcacaaaatctcctaaaaccaacatggtcaaccattgaaagcagatactcgtggacacatatcattattgcgagttctttcctagcaacttgttgatcaaaaacatacttatcaactattattgctccatgttcatccttactcaacttcaaggttgcttgctttaatccttttctaacttgccgtgattgacaacttccaagatgactacgcaaatgagttgtaccagctttactatctccaactaattgctntttacaccaattacattgagattntaatttaccaccaatagtta

SEQ ID NO: 57101 - DNA, 520 bp, Arabidopsis thaliana landsberg
  unsure (1)..(520): unsure at all n locations
tttatatatatatatatatataaagtattttcggggtcctaaaggacttgtattttaaaatccgagggagtagtaaaggtaacttaaaatatgatatacaacatctgttggagatagtctagggagacagtttcaaataagaaaccgcttgaacttctaatgacaaataaaagaattttctccatcagtaccgggatgcaagaaaatgcaaataatacaaaccgcagactgtgaagtcgaagagaaaaacaaatgatccacatgttatgagtgaacctgcaaaagcacaatttcgacggtgcaacttgtacatgttttgtttaaaaaatacaataagatacgtaaggttgaagctgtagttgcgctgctatactgcacanagcatgttgcaacaaattcaccttttgcatagtactcacttcgtccaaaatattgcatctctcactattttattagtcaaaatattttaaattgaacaaatttatacaaaagatgactaaatttatgatattgagtaagt

SEQ ID NO: 57102 - DNA, 1135 bp, Arabidopsis thaliana landsberg
cggccataataccccttctggggggattccatccacaaacgcaaagtttagggcaaaccaatatggcaaatcatcattaagtaatcgcaattgttttcctcatggagggacatatgtaaagacagatcttaggaatcgggcacggtataaaaggttatttacaggcacatattcctccgggagatcgattggggagtgggcataagggtctatatgacacaatcaataattagattcattctcattgaggccttgctcgagccaccttaggagttatgacttccttggacgctcccccaccaacacccaagctttgaaatagcaagccccaccaacacccaagctttgaaatagcaaggcccaatagcccattcataaaggcccaattcccgaaaaaacatgaaaatttccaatcttcaccgttatatttagatcaatagaacctctattttgtctttcaccaacttgttaaaaataaattatatctgttgattcggtcggtttttgataaaaacacaccaaagtattatagagtaaaccactccattagttcaacagctcaatgattcaacggacatcataaattcataacctccgaacagatttgagtcaaacggccatgaaattcacgagatctacagtttaaggtcatcatactttctgttctgagtgtaaaataccttccaacctaataatattatactaaagtattgatattaattagtttagaacttcaaattaagaatcttacatgatgcccttttactatgcattatgcaaaatggacaaagaattatcaagaaaattttcaaacatgtatttagtctaacttttgttgtcagcaatacaaatcagtatatttagtaactaaaccaactgagtcaacaatttaaaaccattatttcaaagattcctaattgtaaaaatgtagaaataaccttcattttatttctcttcataaaagagtaggagaaaagagacaattacaatcacggaagaaagaaaccacacgaacattttactccgattctttatatttttattattattattgcaatgctaaaagacttaaagattaaaaactaatccataacgatccattttttattaatccaatgattcataactaaaactc

SEQ ID NO: 57103 - DNA, 451 bp, Arabidopsis thaliana landsberg
aaagctgtatttatttccacatataagttatgtttcctgtacatctggacacatttacaatttcaccattaaaactataatattaaaaaaaattaaaaatgtatatataatattttctaaatgatcaaattttaaaaaataccaaaaaaatccattaactccttgttgactattattgtaactttacaaatgacaactcaacacctcataatatttggttctagactctttaaatccttggtgtcaaaaaaaactatctaaatccttaattatctattaaaaaattaggaaactaaatcgaattacacactaagaaaaaacaataaacaaactttaaatatcccacttttccctctaatccttgtggattaggtcataactcgttatccacaaacccaaaaatagcaaatgaatcacctgtctttcgtaccaacaagatctttttttatat

SEQ ID NO: 57104 - DNA, 1626 bp, Arabidopsis thaliana landsberg
tacaacgtccgcgaccaactccacagtacctacatattaaaataagaagtagatttaagtttttggattaatatagataggaaaggtgagtatgagaaagaggaatattaagatggtgagacgacagacctttgtttagtcgtacaggcatttcaagcttccgaagaagtggttccatctcatgtgtgaactgttctagaggaccttccttcagttcaacctaatcatttaggtggtaccaatatagtaattaagataaaagtaacgaaacaaagttttttaaataacaaagagaagcagagcctgatcatagtcaagcttatttatttatctagaaacaacagtatatagagatggcacaagttctgttcacaaaccgtttctactgcaatgcttccggtccttgaaaagtcggaatcctcataagcgttaaataagctgcaatacacaaccagaagaagtattgtgaacagttacaacaactagacatgtatacaattcaaacccgtcactgttgtttcaccaaagcaaaagaggaaaaaagaggacgtcaagagatacatagatagatacctttcgacttcttcctttggcatatcagtaacaagaagtccagtatcaccacgaagcagctgaaacaacattccacaacatatgtaaatctaactgacaaaaaatgaccatttaacataaaagaaccattgtaagaagcagaatacacaaaccttggagactttgtagataccagaacggagttcatcttctgcagaacgaccaagagcaacctgcatcactttgttcgaacctaggaagaacctagacaaataagaaccgagtcagtcataacattcaagtaattctaacatcaaccagaagaaggacaaagaaactaactttccattgtgcctaaactgctgcctaaactccttgaatttgatatttctcatgttttcaaaagagaaaacatagacagaggaatatttttcaacagcctccctaattccattcacaatacactccttatgctctcttcctttcttcttcgtcttagacaaagtcactgcagcaaaaaatcagaaaacaaaacccttagataaaccattcatcaatcgattcaaccatagaagctatgaaaaaacattactaactccaacaagttaaagtttttttcaaaagggttcctctaaaaacctaacaaaaccctaaaacccttgacggcggctacaaaagttacagcttccaaaaccagtgacagagatacaatggttcagacaatagagagcagaaagagtgaaggaagaagagttctaacctggtctatctcgctttgatttaggcatagctgaggtttcaaatgttgtatggaagtgagaggaacgaaagtgaaggagaacggcttctgtttattaagctcctttcaattttcttcagggaaactgaaacccttgttcccttgtttgctttaattcgcactttttaatctggacccctaattcaacccgatccggatccggcccgtttcaggccttttagctatcagaaatctgggccgatttttttttgtcattggagggtgtactagtttaaatttaaatggattatagtggttttagttttttttggttt

SEQ ID NO: 57105 - DNA, 1536 bp, Arabidopsis thaliana landsberg
gagaatcattcaataccattgagccagcaacataaatatatttctgaaaattataaaattcgattttgccattgaaccgttcttttaaaataaagtatgcaacatagtctctgggaattttaaggcataaagtctcttcctttcttgattactttatacacaagaaaaagagagatttagagacttaccaatgctttgagaatcaagcgactctgttacaaatagttgaagacaaaatgtttgtttcgtttctaattcgacttctggtttcggcttctggttaccaatactttactttttacatgtttcctttctttttcccctttacgtttttgttatttttcctctctttttttgcatatttatttgattctagatattcatcgccgcaaattgtgtattattaagagatattcatcgcctataaaaattattatcaattagatattcatataaaaccagatttctagacaagagaataattattaaaccttctcaatcatcttccttcaatcgtgacacaatgagtgacacacgaagaacatcaggagacacctccggcgagctccggttactaggtttactaattttggcctgggcaatattgctagcttgtggtttgctagcgaaccaagaaactcctgtcgcgccgaatatagaaatagcttctatggatttcactgtgcgtaatattacacaaactcgtctcagtgcaaattgggatttattgataagggtccccagtaaccttcctaatgcctatatatgtctccaaggagacattcaagcttcattgttttacaagactattaatcttgttacctcatctgcacaaaggttatatataatttattcgattataaatcaatcttatagtattttatttaaaactgtttataattctgacaaaaaactgcttgcatataaaataggtatatcgatctcaaatctggcacagctcaacaaattagggttttagtagaagaagatattgacggtttgattaggaaaaggattatcaaagatatcaaagaaaagagagaagtgaagttcggatcgcagttgtttctaacggattgtagaaaagggaccacaggagttatgagctatgcgtgcgatgaaaccatgttgcggttcgagccaggttctgagaccaaggcgtctaaatttggagacaaccctagctgttttaatttttgattagttattttgcaaagatttgattttactctttctttaaaattagagtcaatctatgtaattctcacttattactattaattaatggaaacagagaaacaaccatttcatacaatctcaaccctacaatataaatgatcattagttagcgtccactagagagaaacgattccgtcatgaccaagcaaacgttactactcgcttccatagactcagtcgttacacctaaggtatcaaatccttcattgattatccgagaattcacaaggtctagcaggttatgaggaagagtggctacaccgtctaaaaattggatcacgcttgacatgcttggtc

SEQ ID NO: 57106 - DNA, 1141 bp, Arabidopsis thaliana landsberg
  unsure (1)..(1141): unsure at all n locations
aacggaaacatgcttggaaggttgataattgctttcaactatatgttgtcacacatattattataattctatcatgcttgtttcgtttatgcctcttacacaaaatgttgttcgtatgtatgcagcactaatggatgctataagggaagatatctctgccctcacactcctagcagaagtcttatgtctcctagatatgattgttaattcatttgctcatacaatatccacaaagccagtggatcgatactctagacctgaactaacaggtagctgattctcttactatcattcctcaaacacctaccatcgtatactcagatattccttatctctaaaggcttctacaacaatgaaaatgaacctttaggtgaaataattgatcaacgtttttttgtnnnnnnnnnnnnnnnnnnnnnnnnntggcagatagtggcccactggcaattgatgctggaaggcatcccatcctagaaagcatacacaacgactttattgtaagttgttagtgttatttctcatgatactatcatccctcaatttattcagagaaatcattttggtggcagagctactaattctcactaacatcagcatccaagaaatttgaagatgtctatatttatgtgttctgcagtttatgctctctcttccacaaaataagccctgtccacgcttttttaactcacaaattttctcttttgcagtctaatagtatattcatgtcagaagcaaccaacatgttggtagttatgggtccaaacatgtaagggaactcttgccttacttcttctaatgctgattaattttccagaaaatcctcattgactcatatttgaatttgttgcattccatatctcaaggagcggaaagagcacatatctccaacaggtgtgtctagtagtcattcttgctcagattggttgctatgtcccagctcgctttgcaactataagggtggttgaccgcatatttacaagaatggggacaatggataaccttgagtcgaattccagcacggtaaaactttaaatactcgttcagagattctcaatactagtatatgatcattatcaatatgataatttcaaagattggcctgttgatgaatccaacagttatgatcacaagagagcattta

SEQ ID NO: 57107 - DNA, 965 bp, Arabidopsis thaliana landsberg
ctgaggaacaatgtagtcagaagaggttcctagtgtttgatcagtctggagatcagacgactttgctactcgcttccgatatacggaaatcttttgagaccctaaaacagcatgcctgtcctgatatgaaggaagagctccaaagaagcaacaaagatttgtttgtttgtcacggaatgcaaggaaatagcgaaccggatttgaaggaggattcggaagaactaaatgcattgctttactctgaagatgagagtggttattgctctgaagaagatgaggttacaagcgcagaccattccccaagcattgtagtatcaggccgtgaggaccaaaaaacatttcttggaagctatggacaaccattaaatgctaaaaagagaaagatactcgaaacctcgaatgagagtatgcgggacgctgaatcgagctgtggtagttgtgacaacacaaggattagttttctgaaacgttctaagctgtctagtaacaagataggagaagagaagatatttgagactgtaagcctcttgcgcagtgtagtccccggggaggaactggtggacccgatcttagtcatcgatagagccattgattaccttaaatcattgaagatggaagcgaaaaatcgagaagcatgaggttctttgtttgtaggatacctaagacatattagcattggcaagtggacttggtttctaaacaaagtagtagacatattggaccgtggtactcttgtcaagctacaaagggatcaggttgttgctagttggaagataaaccaaataatgtttcggagttgcaagagaaggaattgatattaaaatgcaaattgaatatttcatattagttgatgattaagatggattgcgaaattttaatttcagtcgtttagctgtttgttatatcatgtagttgcttcttctttttctataagattttgtcggtgtggaagttatagttgatct

SEQ ID NO: 57108 - DNA, 481 bp, Arabidopsis thaliana landsberg
cagccccttattcccaccgagctcgccaccctcgtcgcccaggtcctaagcccttacggcatttcctgtctccgccactcagtcgcacggaaatatgtccagtggcgcaaaaccgattctgcctcttcctcgtcatccaggcccccctccctcacacgcaatcagaccctcccggggagcagcagtctctcgtccttcacccaccacgaccaccaccactccctatcccagccactacccccgagccagaaccaacaaatcctcacctcctccatgggcgccacctccagctacgccctggcccgcctcgccgaccacacccagcgcgaggagcgcctggcccaggtgcgcctggccaactgggccgccgacctgcagaagagtctggcgcgggagcgcgagcaatatgccgcgctggcgaggtcagagcgcgccgtgtggctggccgagaggatgggggagtgcgtcagggacgggagtt

SEQ ID NO: 57109 - DNA, 1481 bp, Arabidopsis thaliana landsberg
ctcttgcatattgcacgtcagaataaatttgccaaaactatcttctgttacttcagcctgttttgtttgaagtttactaggaggagtcagcaggtggttccattgcatacaaagttatgtagtaagaggcagcgctacccgttgagaaaacgtacttctttacgcgattgagctgaaactgcgtgccctgaagaaacgaaaactgaatgtcaaaatatgtgagattcattattgtcaatggaacatgaatcatatatatgttctgacctgaagcaaattgtgacgattaaggccccgagtaccataaaggaagactaagacaggacaaggagaccatttattacaggttctagcttgtagtccaagcgtataaccctttagatcgaaaacctaattaggagcagatgcaaaaaattaatcaaagactctgctaacaaatcacaattctaataattttggaagattgaaagaaggaattacatacaccgcatttctccagtagtttctcagatgccggaattataatatcagctgcgtccttatcctcaaatcctccgatcaacattattatcgtcgtctaggaggtctttttaggtttcagtcgatgacgatcatgtatacatcccgtatccggccgactcattttatgggcttcgtttgggccttcacagcccactaataaatcgcgggaagctaaatgcaaaggtttttaacttaagagacaaaacaattgtgtttcaaactcatactgtgaaagtgagaatttttggatgaaatcctgatcgtcgacaaaacaattgtatgtttgtgtttcaatctcgaacacaattggagatagaaactagacaaaagaaataataattctcattattactttcatttttgtgccattactataataatatttttcatatatgtttagattttataataatgtagtatgtatggcaaattgaggatcctgcaaaaattaatctatatagggatatatgagggacaatgaagtgttttggaaattgtttctcaccatagtagataatctttttcaaattggaatatttcatttacatccacaagaatctacgacttttatcaaggaattttgatcaataactcaatatatatgtgtgtagactaagatgtaagatgttgatatagagagacatttgatatgatacaatggcacatatatatgagattcttgatgtttgcaattctcacttgatgagccggatttttttttaaaagaaaatttgttttatcatttttttaaactcaaattaaagaattttcaaaaatattacgttgagacttaagtatgactttctttttaacttatgtatttgtttttattgtaattgtcttaatcctatatttatttgtttgtatattttttgccattcaatttgttttttggttgtatacccgtttcgatgcatcataatagcattgctttactctttctatgatgtataattagc

SEQ ID NO: 57110 - DNA, 253 bp, Arabidopsis thaliana landsberg
ttttaaaaaatagcaattaaaaacttaaaacaagaataactttcatcaaccaaacaataaaacataaactaacccgagaacccctacaaaaaaatcactaccaacgaaaacaacaatacaaaaaaatacaattaaaaaaacctgaccataacaattgaaccgatccactaaacaatgctttatatactacaaaaaataaaccatcaatcacaaatactctccaacctatgaatccaagaactagcacaacgca

SEQ ID NO: 57111 - DNA, 486 bp, Arabidopsis thaliana landsberg
ttttacgtctccactctgcaactcaggtaaaagagtcttgctcctattatctcatgttccattgttttgttgatttcaatttgaaatattagtttctttcttcttcccttcattccttcaacttttataccattttcctgttatctattgatttgaaagttttaatttttaagaggcggtgatgacaaaaaacatttctcgatgctgaaacttactcgagagaccaaatcactcttgtaatctttcgtgatgcttgtttttatgcgtgtctgagcctaaaccaaaaaatctttcatttatgctttgattatcatagatcccaatttatgcgtttcttttattgcttttcaatttgtaatgcgagttttgctttattttgtccagccatggaagaagcagatcagttatgtttagctgctaaatccggcgacttgaaaaaggttcaaactttaatttactccggcgccgacgttactcactttgata

SEQ ID NO: 57112 - DNA, 153 bp, Arabidopsis thaliana landsberg
tttaaccactccacctctactcttaaaaaaatggtcttatttcataaaccatactactttcaaaacaatgctatcccatttatcatacattcctacccgttattatatctttaactttctttaacccttaaacatatatatctctctcttcca

SEQ ID NO: 57113 - DNA, 283 bp, Arabidopsis thaliana landsberg
aaaaaaaaaaagaaaaaaaccaaaataaaataataaaataaaaaaaaaataaaaaaaaaaaaaaaaaaaaaaaaaaaaaaagagaaaaaaaaaaaaaaaaaaaaaataaaaaaagaaaaaaaaaaaaaaaaaaaaaaaaagaaaaaaaaaaaaaaaaaaaaataaaataataaaaaataaagaaaaaaaaaaaaaaaaaaaaaaaaaaaaaaaaataaaaaaaaaaaaaatgaaataaaaaaaaaataaaaaaaaaaaaaagagaaaaaaaaaaaagaaaaaa

SEQ ID NO: 57114 - DNA, 950 bp, Arabidopsis thaliana landsberg
ccttatccctggtcaagctcatgatgatattctttgtctttgctttcttgaagccattttctggaaagcaacgcatggtatataccatctttcttgttttaatcatacaaactttgacttggacctatcttcttacttttcattgtataatctacaaactttataacaatcttcaccttccctataaggttaacccaactagtggattattcgtatccacctcaagcgccaaaacatggtaaggatcattggtagattttagtatgattgtgaggtaggatcattgccggctcaaagttatgggcggtctaaagttttttttttttaataaaaaaattagcagaagtagttgagggaactcgaacacacaacctcttggctgaaaatgtgacataaatcgctgcactgtaaggaatttttataattttattgcccccaaatatttgtgatacctaaggttcttgcataaatgcagaacttgatagaatacggtacacactggagtctgtaactgtagaagtagaaccaagtagccaacatgcgcctcatcaagaaacttgacgtacgtttccgagacgggacaatggtttgatttatgcctttatgggtctttaacactttatgagaaacaaggatctttaagtggatttaaatatttaaaatttaagaaacaaaggtctttaagtgaatactataagagtttctttatttatttttccaatcgaatactcataattttataaatactgagacacataatattcggctagctctaaaacattggagctggaaagtttgccttacgttacgttaattggagctacaaaatactcataattttgtagttgaagcatgatgaaaaagttggcttacggtattactttttaaagcattggagctgaaaataaaatgcttgcacgaaatactaacctaacacaatttagcaaaca

SEQ ID NO: 57115 - DNA, 793 bp, Arabidopsis thaliana landsberg
tttttttttttcctatgtcctttaaaaatgtgtagttgtagatgtagttccctgttttcatgcattctaatattgattgcaagttcaatgaatagcgttgtgttggcggtatagggtgtcaaattatgcttgacgcttatcagtcattaccaatgatgtatgtgactgtctattgcaaatgtggccgacttcatgaacaaatatgaacaatagtatcattggttacatacaccaggcataaaactacatcatcctccaaaggcactgctgatctcagggacgtggaggtctgttctgtagaagctggcgctatattgaatacaaaatgcgtgcagtcaacattaaaatagtttttatgattcactcggagatctttacttgatttggtcggctgtattatattcgtgaactcggaagtcaaggcctgtcttgatggaagaatgactccttacttttaatatatatataaataatacactggatatgaatgccatcttttgtttgtttacttttggcgtcatgtgattcttgtattgtttactattgttaaatgcaagtatcaggtagtgcttaagatggaagcatgtgcatctcgtatgttgaccataacctctccaagagttttcttggagttgggagaatcgctgacttgattaaagaaaaacaacaaaagaatataataagagatgggaggtggggtcggcgccgaccctactcgatgatattagtctataaaagagagggaaggaatgaggtaaagaagcagaaagctggagaaagatgattctaatgt

SEQ ID NO: 57116 - DNA, 565 bp, Arabidopsis thaliana landsberg
cacaatgacgccggaatttggattctcgacgacgatatctttcacctgaagccacaagaagagctctttttgcgatagcccttctactccgacgaggctcccatagctcagattccctcttacgacggcttcaaagtgcacgttcgtctcgaatttagcgtaacacggcgccgcgaggaaaacctcgagacgaccgtcgttgtgaagaatataagaatcaacctcttgaggtaaaagtcccgccgggagaccttctgatcggagaacgtcgtggaccgttgggtacgacggcgaggagagggataaagagaggcggagagtggtgaggagaaggatcatacgggagatgagtttgttcatagcttttcactgagagagagagagagagaaagagagaaagttttttttttcacggcgatgattcaagtgaagagggaggatcttaaatgggaaagaagagaaggtggaatgacgtatttgcccctggttggtgagtgaatggggccatatatataatagatatgggtaagtgattaaagttcataagtttctaaatttttagaga

SEQ ID NO: 57117 - DNA, 881 bp, Arabidopsis thaliana landsberg
gcgtagaataaaactcttttatctcaacgaaatgagatttaaattgcatatccataaccggcttaatataaccatctactcctcgttgtttccccatagaatcctgcgcttctcgaaaccgaacaccgttcatcctaccaagacggatgagaagcataacatgataaatattcagaaacttagagacttgttctaaagctttatttgcaacgccaagttcattcgttagtggacaaagtctttgtagcaccgttccttcattaatcaaaaatgattttgtgctaaggtggttatttatggctcctcttggcgtaagattgtctttgttaagaccattgaataggtattgcattgatacagattctttaccatcaagtactccttgagatcttcctagtcttgttagttgtctagatagaccaatagtccagcaattattgattatctgctccacaatctcatcaaaaagacgtggtaatgagatcctttaactatcaaaacaattctatttttttttttttcaaccacaaaaaatttcttacaataaaattattagaatcaaatccaaaacatatgaatgaattttattttataaaccattaaattcattctttttttaatcttgcttcttcttactcgctctatggtgagctcaccagccttcaagatttttgaccaaaatatatgtatgttcttttttgtgtttttgtttactctggcaaaagctttcaacttttatagacaaaataatactatgctaaattttgaatgtcattaaatactactaaatttacttattcaatagtatcagtattttattgcatactagtaaacatatgtatgttgtttacttatgcattttattgaattcacgaaatcta

SEQ ID NO: 57118 - DNA, 531 bp, Arabidopsis thaliana landsberg
gctcactggcattcacatcatttatcccggcggagctttggcgaaaatgaaagaagccgtcagccagggtcgtatggtgggctacatgatcgatcagcacacgccggctcctaagggcattcgagtgaatttttttggaacacccgcttcttcctcacgcggcttagctaaaatcgctcgcgaaacccattgtctgatttttcccatttgcgctttccgccaggccgacgggaaacacagaattaaacttttagaggctttgccttacatcaccgcgccggaatttcctgaaaattccccggagcgggaagcgcgggaagagtatctcaacattcaacagtatcaggcggccatggagaaattgattcgtatgcatcccgagcagtggctgtggattcatcgtcgctggaaagtggatcgcactccgcttgagccatcgacggcttataaagccaatattctatagtaacagcctgataaagctcttaatcagtaagccgattttttagcgggaaatttaacggatttatt

SEQ ID NO: 57119 - DNA, 940 bp, Arabidopsis thaliana landsberg
acacatcaacgacagtagcataaatcattatagtgttcatttctcgatctatagggcctgtccgcgtgcgcatgggatacatcgctttctgttgatgccaacacgagtaaaaaagagacgtttatatggatgtacataaacaaagatttgtttttaaaatttatcaagaatgtttgataattgattaagtagctagaaaattaaccccaaaaaaaagaactgcttagaaaatcaaatttaattggaatgttaatataaaaaaatccacacaaaaaaaaataaaaaaaatccacacaagaatgtgagaaaacacaaaagagaacacaagtgcacacaaaaaaatatatatacatgagataaaacaaatacattgctgaaaaagataaagacaaaatcttagaatacaaattgtcatttttggttataaatacaaggtattgctaaatcattaatgatcaaacaccatttcttaacattaactagtttctatatatactaaaaggctaaatgctatgcccaaagaagaaaatagctagtgagcgaccagtgtgccaaaattaattaagaacacacattcttatgaaacgaattcaaacttaggtaaaacaaatagtgcattaatgaatactttcgaccgatacttaaatagctagagaatctttgggagtgctaaaaaaggtgcatcataattaagaccgttatgtgtcgtggtaatacatttataagagtgttgatgttatagtaagaagtaatgcacaaatatttaaatctagttacactattcccaaggtgtttctgacgaggttgggtctcccttggttgaaattcaagtgtcccctatggttcatctttattttatttggcggccgatttatgtcttgctctattattgagacaaatttattgaattacgtagttctttatattctttaaagactga

SEQ ID NO: 57120 - DNA, 588 bp, Arabidopsis thaliana landsberg
cacagagcttgtaccctataagcttcagagattagtcaaggaattcaaatccttgacagagccaattgatcgactcaaatgggttctccattacgctagtctccttcctcaaatgcccgagtcgtccaagactgaatcaaacagagttatgggctgcacagctcgtgtttggctagatgctgagttaggtcaagatgggaagatgaggttttgtgcagatagtgattcagatgtgtcgaaagggatgtgttcttgtttgattcaagttcttgatgaggcttctcctgtagaagttatggagttgaagactgaggatttagctgagcttaatgttggtttgttgggtggagagagatcgagagttaacacttggtataatgttcttgtgagtatgcagaagaagactcgacgattagtagcggagagggaaggtaaagttccttcctttgagccatttccttcacttgtgttaacggctcatggcattgaagctaaaggaagctttgctcaagctcaggtgagaatctgtctctgtttaattctcagtttgaatctgaagtattagactatgtggattaagaaatgagc

SEQ ID NO: 57121 - DNA, 500 bp, Arabidopsis thaliana landsberg
cggtcgagaccgtcacctggtacaccggccacctgggcatgggcgcgatcggtcccgacatgctcaaccagttgcgccacgcccagttcttcggttcgccgcagggcgtgcgcgaccacatggccaagcaccgcacgatcatcgcgccgaagttcgacgaggtggaccgcgtcctcaacgcgcgactgagcggactcggcgtggccacctggaccaagccgaccggcggttacttcgtgagcctggacgtcctggacggcaccgctgcacgcgtggtcgcgctggccaaggaggccggcatcgccctgacgcccgccggatcgtcgttccccggtggcaatgacccgcgcgatcgcaacatccggttggcgccgaccttccccgaactcgccgaggtgaccacagccatcgaggccgtgacgacctgcgtgctgctggccgccgcggagaagctcaccagctgacctctcgggctggcacactggcccgcatggcgagcg

SEQ ID NO: 57122 - DNA, 197 bp, Arabidopsis thaliana landsberg
atttctctttacttgatcattctgaacatcccaggctaatggatcctttattttgatgggctcatagattttatttaaaaaagcccatattacaaaagtttttgtctttcaccgttggctcgtgacaaaaagtcgtccatgattgagaggactcgctggattcttaattcttttttctactcagactattaaaagtc

SEQ ID NO: 57123 - DNA, 678 bp, Arabidopsis thaliana landsberg
tatacaactctggcaaatgattcagtgctttggttctccgataggtttttgttactaaaactcacgtcctctgttgattatggatgctgggtaggtattttctttacgctaaagattgattgttatctgaaggaatgaaacagacgagataaaaaaaacttgcagaagatggaaactgtaatttctttcaagggttaaaaagtcattcgtcagtcaactgcaacgtctagttgtttccatactcggtttcaaacaaaagctgacatgcttcagaaaacctatccatagattcaagcttctccatcatcatctccttgatttcaggttgtaaggtggattttgaaatagattgtcaccgtctttaaacacctggatatgcttgggatatattccactaattcttctcttccaccgtagtctatcaactcaaacttctctagacacgaatacaagcattcgggataagagcccctatcgctctgaaagctgatgcgataggggatctatctgttgatctctgaaaagttttgacatggtattagcaataatgctagtaagtaaccacacgtcagcaagtgtttgtgctgagtcttaaacatacattttaggctcaatactgaaaactacacactaaacggaattattaggctggatacagaaactacccactaaatgtag

SEQ ID NO: 57124 - DNA, 550 bp, Arabidopsis thaliana landsberg
taccttctaaatgtagttcagtggtcaagtgatcatcattcttctaactataaccttattatgtagacaggaaacaaaccgatgaccttattcgggtaagctcataagattataatatacataaaacgcatttgaaatcacgaatccaatttgtagttaatccaagcatatgtataaacaagcgttttaatgatttgttgtgatattatggatttcatgttcacaagtttttgcagtgtgatacagagccgatacgttttgtttagggtttgatcagtgagtcgtgacaataaagttttgacaaagttcagttttgtttctagcttgtgaatttttggttaatttaattgaccattgaaatggaaagatggctcttgcttgttttgaatctctcttcagttcagggtgttttgtttagctaaaagaacttatattattactggtacaaagaatttaacaacatcaaaatcttagccaaggaatctaaacatctacgacacattcgctaaaatctctgcaacttgtcagctctgatcaaagggcactgtgt

SEQ ID NO: 57125 - DNA, 497 bp, Arabidopsis thaliana landsberg
agatcttacagatgttatatgcatgaaccaagattaatagtatataagagattgcctaattgcctaacttgaaggtatttcaccaaactttccactgttttgaaaaaattgagtgcaagtcattctcactcagtgttacggaaccacggaatatgcaaatttaattgaactttcaactctaccatttcttaattaattaattaagacgtcaatttgcctcatttgttatatcacataattcataatatgccaaatttaattaaactttcaacgcttccaattttttatacttttaaattaatttagaagccaatttgcttaatttgttatatcacataattcataatataacaaatttaattggactttcaacgtttccatttctctatttttttatttttgatatctcgaggaagagtattggaattcttttattttcggtcaactgagatatattgacattttgacccactcacaaatttatgttaaaaggcctt

SEQ ID NO: 57126 - DNA, 621 bp, Arabidopsis thaliana landsberg
catgaaatccatctattttcttacttcttgctcgaaagtgattggtctttcaaagtctccctagattcttctttttatgtatatttttttggtacattagcctataattataatatttgctgaacaacgataagcgacattatttgctatcaattagcttcggatgcgagtgaacgcgtataacctttaaaggtctcacgcggtaaattataaagaacaatactatattacatcgcaaaagtatagttgcaaagtctggttctagatagtacgaatcagtcttaacactgccaactgaaacaaaaataaaatatcgtataaaatcaaaatggagtttttattttttggctaaaatgaattttcttacaagaaaatatagatcattacctatcttttaattatatactcagacaaaacttatattaaaatgaaagctatattcgaacccaactaaaaactgaaactgtgtaatccaatttatacaagatgacgtgatttatattaatcattactagtattgttttagtaaacctagaaattcagacttccaaaccgggatcaagtcgagaattgagatatatagttaaaatgagccacttaaacaagaatggtactaaacga

SEQ ID NO: 57127 - DNA, 810 bp, Arabidopsis thaliana landsberg
tgtaatgtgagaaaggtttcgttatgttaaataggcactctatcgccattctctccagaatcgcaagcttcgattcccataaaacccttatgtcttcctttaccgatcccctttttctgcgatcgctttactctcctcgatccatcgccatcagatttcatggagattttgctcatagactctacaatcccattcaaatttacaacaacaacaacaacaacaacagtggctcttgtaatggtttgttcaaggttaaaggtggaggaggaaagccgaaaggattcaccttgcgaagttgttttgattctcataagaaacctgatcaaaaggctcgagctttaactcaacatcgccgctttctccatgatctgggatctgggcctagtgaagaacgcgccgctgccggaactaccgaccttgccgatggccgtggtgcatatctgcgtacgaggtttcaaggaaatgataagattgttgtggctgttgacatagatgagggtatgttcttttagtgtgatgtttacaggtttgaaatgtctttggggagatatcgttttatatgttttgttgacttgttgaactgttgaataggttctagaaaagtttagagtcaaagagtagtataaatcattagctgggaagtagctaaacattctggatggtatgtagagcccatgcaattgggaagatagatccctgatttgagtaaaatatgtctactgattcgaatctgcgtaactataaaattgaatttgctagttttagaccaggaactatgttaactgtttctttaaaaaggattccttttct

SEQ ID NO: 57128 - DNA, 779 bp, Arabidopsis thaliana landsberg
cggaaaagaatcactagcaccgaaggcgccaaaaactgcagagcaacaaggcataggtaatggttgtgaagaaacatctttgcacgactaaaatccaaatcaggagttttacttccatgtaatctctgataccacgaaaggactgcttcgttcaagaacatctgaaggttaggacgaaccgccatcgcttgtagtaaacccgaaagtaacaaacacaaaacccgaaacttcgcaaaatcatcactcaacatgcctacattaccaaccaacccactctgactctgactactaccactagtcccaggatcaccacttctcttcactaaaacctctgccaacggatgaatccaaagcaacgaagtgaaaaccgatacgatataattcgcatatagaatcatcctaccaaaccatccacaagaaatgatcgacaaattactcctaatctgatcagtcccaacccaaaacgaccttgcacttcttccagcaggcatataaaggaaaccaccaatacaagccatcgaaaacgatatcacaatgcaacaaaacgcatcaacagaacctaattgaaaatcaaatcctttaggaaaaacaccagcactgattataatcccaaacacaaaccctaaaacaccaaaaatcaaactcaatctcttctcagattccttagaagcagatctctcaatagaaatctttcccaaagctacaaacaccttacacaaagcttttaaacccctagaacaatccggaaacatcaatccatttactaaaaaccccatgac

SEQ ID NO: 57129 - DNA, 100 bp, Arabidopsis thaliana landsberg
ttcatttacccaaagatacaaccactacctgggggcgcttttaaaacaattgcgccctaacaataaaccgcgaggaccggcatgcatcagatcacaaacc

SEQ ID NO: 57130 - DNA, 801 bp, Arabidopsis thaliana landsberg
gcttgtttcttgacctccgccagctgagaaaacacacatccattagtcataaacaagattgcatagatgcaagatgcaggtcaactttcctaagtcgataaaaatacaggagatttgatcaagagacttgaaatgaaacgtgtaagaacgatccaggagaaaagaaaggataaccaagcacattcgtataaataacaagaatattctgtttcataatctactcaagcgacaatcatactctctactttgccaaaacatatacacatttacaattcgatggagaccttacataaaatgaacatatccaattcactgtggtcgtgcaaagagaaaaaccctataagcctctagaagtaaatcatcagtgctattttctcacaatgacataattatgcaacaaggagatagcagcagagttccaatatatgtatcctttacaatctagaacagaaaattatagagaatcactcacaagcactaaaacgacactctaataacttggatgttcaaactataagcattgtgtgtaatcacaaagaatcaaacaaaacttacaggatcagggaaagtctcagtagtatgatgcttgccaccttcacaaacccagctaccatcactagttaccgtaacaatccccgatagattcttcacagaaatcactacaacatctcctttagtaacaagaacaacatcaatgtcttgtctagaagcagtgtcggcatctggaattccaagtcctacataagcttttccaccataaagattctcaagtctgcaataacaaatggaaatcataatcaa

SEQ ID NO: 57131 - DNA, 1313 bp, Arabidopsis thaliana landsberg
cctgtaagaacgtggacgagccattggcatggtgtggtaatggttgaggtggctcacacttttgaactttggcttcttatgtggatagcgaaagaacaaacagtaagtgatggtagatatgaaggagccgaaacccatttctctgctctctctctttatatttatacgttgctagatagagagatgattaggactcaacaaacttagagaagaagcaataaatatataaacaagaggagtgcatggaggggtttaaaacaaagaataagattagacagaacggaagatatgcctttggaatcacttcactttgtaataagttatgatctcttctttacctccaaaaaaaagagttgtgatatttatttttatgttgcaaagtcatttacatgtagaaaatatgactcaacacatactaatttccgctcttagctaattctgtggataacatatagtaataactttcataattaaagcttcttgtaattataatttattgaaaagtgttagtcttagtcttgacataaatgcgaaaggtatccaaatgtttttaaatgcatttctaaaaaaaatgtggcactatagtttatgcatgatgtatataatcaaatcaaaagaatataaattgtcctggttttatggcttaattggtcatcaccaataaagtggccgcaaccgcattatccagtgcacattgctataaagagaagattttattaaagatccaaacgaaaatataataagttgatttagaatatatatagttttatacccagtggaaggagaccataagactttttgtatatcattatctactatgaagtttaattaaagagtatgtaacatctaatagagaatcagagtagatcatacacagttaaaccaaatatcaagggtactgatttatgttcccttagattagtgctgtaacttttttctaggagaattccggaatgtttaaagtagaagttaattatataaaaatcatgaaatctaaatgttaatatataaaaatcatgaaatctaaatgttaatttgaaaaagtatacatgaaatatttttatatttgaagaataaacaattacagctcccatttaatctagacggacaatagtccgtagatgctaagatgatataatattctcgaaaatctttatcgtcggtagatagaaacgaaaccatagatttaagtttttttttaaagagcatatttagatatgtcacatgtgtcagtatcatccggactagaaaaaatatcaggagagaacacgatattcccacgcagatattgtaaacatgaaaaagacatatct

SEQ ID NO: 57132 - DNA, 1167 bp, Arabidopsis thaliana landsberg
acaaaaaaaaaaaaacaaatagctatctatgttgtgtttcatatcttatcaactcggtctcatcctctttccattggatgcaattctttttcatagaagaaccactaattctttttcatagaagaaccactaattcttttttttcttttgccattaactcaacaatttttattgtacttagtggttctcccttatgtttctttgccttggaatgtaatcactctgttttgacaaaaaaaaaaaaagataaaagaaggaatgtaatcactcttaaagtgatctgtaacaatttgaaaaagtgtcatatttattagctataacttataattaaagttataacgaattactatgtaaaattttagttagaactatcaaattaaacgagttaaattattcttatcatgtctgcctgtaatgataagataatatatatcaaagcttatgaaacttcatttttttttttttggttgtcattgcaaaggttagattaataacaatatcactgataatgatgcttacacgtaaacctaaacaaatgaggaaaacaaactaattcttacacgtaaaccttaaccgatgcagcataggtgttgacaatattttctttccttttatttaaatagacgacgttgagatctttaaaattgtcatcatttataaccatttttaagttgtctttatctgaaatatacaaatgttcaattagtacattgacctaaaagtctctaggactaatgattgattagaggtttattttgctagaggttctaatatgttgtatggaactagaagcaagattgttttaaactcaatgtcattaagtgaattagagaaagatcatcaaaactcttaaactatatctcccaaaattaacttaattcagtttgaaaagaaaaagcccacaaagcccaaaactcactcattcataagccaattataatatccaaaataaaagcccataaagcccaagcccaaaactcactcattcgtgtctccttctctctcgcacaaatgcttcaggagttctcacaacaagatcgagaaatacacacatagaacacgaagaagaagaagaagacgattcatatccacaacgccatgggtttaggcatcttagctttttgaacaattcgaccagcttctcgtcttcttcaatctaaaacctcc

SEQ ID NO: 57133 - DNA, 1129 bp, Arabidopsis thaliana landsberg
agcatgcttcacatcatactcaacacctggtccatgcaatgttgctcagctgaatgcatcttttcatccatgcaaataaaggagttgggatttgcaatttccgtaaaacgcctgtcgtgcttcaccgcattatctttagcttgagagtaattcttacaaggaacgatatagcctatctctgcagcttttcttgcatcattatccctttcttcatcccaacggatccctgcttcctcccttgaaactctcctagttttggtgcgaaaatcaatcccttcttcagatgacaaatggcttggcaaagtagtgtcagatagaggtatccctaaccatgtaaaatctttcttttgtgcaaccaaaactgttggattacttagaatcgcatcaaccacaatctttcccctcctaagactagcaaaaggacggacacaaactttcatagtcggaacctcaccacaggaaaactcttcaccatgaggaccaatggagcttgcttcaagtgtaatgcacaatggtgaaactcttctaacctttccaaaatcaacctcacgctgaatagtctcactaagcacagagcaaacagatggcaaaagcttagtctcaacaaaaacacgagccttgttctgtccataccacaccaataaacaaaccccagagataacagcaaagaacacagaacacctcaagaaaaacaaaccctcttcccaaacaggagccaaagacctaaccaaatccttgcttcgtacgaaaggctctttcaaacatttaacttccattctacttctagaatcaagagacttcctaagcaattgcacatttttcccacaaaattgagaaaatttggcaactttagctaaccaatcattctgtttcttctccgaatatatacgcttgctacgaaacgcccttctagctacattgattctcttctctctgcgattgaaagaaccatgaagcagaggagtagaaaggaaagggttttgcaatctcaaactcattatcacgtgctcatctgctggggaccaagaagtgtgactcttagccccctaaagcttcagactttaagacaacccacttctgagaatcttaacatagattgaattggttctgaatgtgtggggaaacaaaa

SEQ ID NO: 57134 - DNA, 557 bp, Arabidopsis thaliana landsberg
tgtctcctttatcaccgtaaacacgattcagggtagaaatgcttggacataagttgccatctttaagctttttctctgttggacctgactaaggggtaggttggaaaaatgtccagccaaataaagaattaagaaaaatcaagcgaaggtgacaaatcaaataacacagcaagtctcaaaaagagtgagctctctcacagatgcttacacattcacaagctctttctgcattcgtgtagcatcttgactaaggatatgatcaagggatgaaactgcatatttggaacttgaccaattccaagcaacaacaaaagtcgtagcagcaactcctgcgtcgaggtgaaagaaaaaaaaaagacacaacatttttcagaaagtcgaaacgaatgatcatatacaaagatatgcaaatagttaccagctgcaagagcaaccctctcaagtcctttcggctttatcaacttctttgtcactagaagaatacaccacagaaaaggaatcaaaagctatctatctatctccattacaaatttgggttacacaaaagaaaaaaagac

SEQ ID NO: 57135 - DNA, 1465 bp, Arabidopsis thaliana landsberg
ctctgttgctatatacatgtcgattaatatcttttttgggtttactacagaatacaaaatcatataaagggcagattagaatcttggtgtactgtatggaaaatgcaatcttgaacctaccagataaccaagagcaaatggtttggctaatcgattttcacggtttcaacatgtctcatatctccttgaaagtgtctcgagaaaccgctcatgtgttacaagaacattaccctgaacgcttaggcttggccattgtatacaacccgcctaagatttttgagtcgttttataaggtacatttcaaaatctctctatatgcaagtcattatgcatcatgaagctttttgacataagaggaaattgtttaatatgcagatggtgaaaccatttttagagccaaagaccagcaacaaggtgaaatttgtctactcagatgataacctcagcaacaagcttctggaggatcttttcgatatggagcaactcgaggttgcatttggtggaaaaaacagcgatgcgggtttcaattttgagaaatatgctgagagaatgagaagaggatgatttgaagttctatggaaacaccacagtgtcatcaacctcagctcatttgactaactcagattctgaagtttcagactctgagatgaagtatttggaggacaaagaagatgagactatagagaatggaactttgcaatctcctttagatacaacaaaaatctaaacatgaaagcctgaagttgtagaagcttctggagctataatttttgttgttgttacacaattaagaccagtaaaactgcagattcttaaatgtttcacagaataatacttgtttgctcaaagagtttggtaagaacaacaaacacaacatcaacaagtgtttgacttgaaggaaggaaacagtgacgtgttgaacattatccttcaggtaacagtggttatggcacatatgaatgaagaagaaccggaaagaagaagaaaatcagaagttatatattcttagtaaacgcctctaagttcctaaacttgaggaagagagttgagtagatcaagaactaatctttctagtttacttcaggcacagattacttcactatcctcctctagcttctgtctgtattgagccaatctctgcaaacacaaagaaacactcagaaccattgaaacagagaaatctaaaaagataaagaagagataaattattcataaccttggtataagcataaacaccagcttctgttggaccaaccgggcttccccgcttcatgaatttgccttctttgaagatgtagagaagtggtatacctgtcgatagctctagacttatcacctaagaaccaaaaccacaaagacattttcagttagtcgtcaaaaccgcaaaaccagtaatcaagaatggatacgtaaccagtcttttgtcacaccttctggcaagtcaatttgtcaagatacataatga

SEQ ID NO: 57136 - DNA, 542 bp, Arabidopsis thaliana landsberg
tctcaatgctgtatcctttgatctcttgtgaaggagtttgccttatgtcttgcagaattggagttaacaatcaacatcaagtgagagaagccaatagattaaactttatgtctgctttctgtagccttatcagcatagttttaaccgatcgtcatttgttctgaacgaaaaaaaaaattgttcgaccactaattgacaggggtgcctttcactgatgttctgagaggtttcttttgactgtactagatttcctttttcatttcttcagtagagctgatggcatcattgcgggagacactgaaatcagtgaaggacatttcacatctactcaaggtatgtaggtaccattattctatataatatagctttagcatgcctatctcttttagccataagagcctgtgaaggagaattaaaattactaactaatggtacagagaaaactttccacaaagtttgcggtgaatatgttaattgataatctgttggtagaaataagcgtatatgagcatattctgcccagacagaggacgtggatatat

SEQ ID NO: 57137 - DNA, 651 bp, Arabidopsis thaliana landsberg
aaaagttgtactacgcttataaagtttggctttttaagttaaggatttgtatgattgttggccaaagacatcttcgatacattctatcaattttttaaaaaaattctgatttctttagttagtttgatatgtctccattttatcgattttattttaaattttttgaagttttcacttctaattttatattttcagttctttttgaccgtcaattattttttttatcataaagctttagattctaaaaatatttatatttttaacccgcataaattttgtatttaaccaaaaatttccctaaggttttcttttaacaatttgtccattagaaaaaataaaagacaataaatagtgtttctcctcgatgaagacaaaactccaatactaagaataaaaaaaataaaaaccaaaaagcaaaagggataacacaaaacccctttcaccttcccaattccaccaccacacagacaaagcacaccgaaaatggcggtttcttctggaacattctccactttcctctgcatcaaaactacatctttccgcaacccctcaactcctctgtcctctctccggttcgcctctcacccggcggctaaacactgcttggtccgagcggtaacatctgcaacggaatcttcagagccaacagca

SEQ ID NO: 57138 - DNA, 480 bp, Arabidopsis thaliana landsberg
gtaggattttgatttagtttttgtagattcactttttggattatttcatgcgatgtatccgtttggtgttggggtttaagaacactgttcaaaataattacattatgcttttggaaatggactttgtatcgcttaattatgagatcctatctttgatgtttcagagggcgtgaaagctaagcatcccaaaatcacatacgcagacctgtatcaggtgagttaaggctgtgagagaaatctttttgatgtccttgttgctttttctgcacatttgtttttcaaagttcgctggaactgtattcggcttgtgtcattacctcgtcccaggtttgagcttgttgtttaggagacttagttgatagttgagcagctgtgtaaatatggtttcagttgtaatttgtttcaggagatgttactgattgtgatttggtttacaaaaatcatagattgactatgttgttcaactagaacttttatctc

SEQ ID NO: 57139 - DNA, 512 bp, Arabidopsis thaliana landsberg
acacggtcccttaaaaaatagtttgtggagaaagagatcacacgttgaagcatgatgagggggtactaatcctatatataatgtatggataagtgactacattatatatatattatcagattataaagtaagaatgtcttatttttgctcaccttttcttttagactttggacatcaaacgcacttcatagctcataatacccacatattatataactgacggacatcaaaacacataacgaatcaacttagatctccaaaagttcaaatattctttcatctcacgtacaaaaacattttaaaattgagtttttgatcgttcttgctactcaagaatcataatattactatttcgttagaacttgatttttttattttttttgttggacaacaacaattagaacttgaatggttttatgaagaaattacaaccaaaacaatgaaactaaaattggaactcctctataacccaaaagaaaaggaaaaaaaatctaattcgattgggtgtagta

SEQ ID NO: 57140 - DNA, 973 bp, Arabidopsis thaliana landsberg
  unsure (1)..(973): unsure at all n locations
atctgatttgaatagaaattcttgaagtagggggtttcatcttggtttcgcccagttttgattggtcttatacccttttgcagctccagcaggtggtagactctttcattatatttgcttctcagcaaaataacgacttgccattatcacattcaaatcttagttcagctctacgctttgagctgccatggacactgtttagcccctcagtgataagaatggttccatttccaacccgtgaatacactgatgatgagtttcaatctattgtcaaaagcgtaatgggattgttgtatgtatcacctgctctatattttctttccttacatgtatgcatggtatttgagtgtttatggtttggatgattatataattgttgagcaggtaccttctgggatttctgtttccaatctcccggcttatcagctactctgtctttgagaaggttggtttgggtttatgtattttgcttactttggaacacagctgatatgtatctttcgtttaccaatagttgcttttctatcacttacgcttttttttctgaccttgcaggaacagaaaataagagaaggactatnnnnnnnnnnnnnnnnnnnnnnnnnnnnnnnnnnnnnnnnnnnnntcacatatgcattgcaggcaagtttctgcttgaaatttgacttgtgaacttttgtttgcctctcttcccgtggctatggtagcattttctgttgtcaacaatattgacttcagctggaagaagcagacgctttacttcttttgatatatctaataacttgtagttcttggtatattttgtcttttctaactagactttgttctgcagtttgcattgtgctctgggattattacagcttgtacgatgggaagtctctttaagtatagtgataacaccttagtcttcacatacttctatttatttgaaactcagcgcaatcatgctctcatttatgatatcgacattttt

SEQ ID NO: 57141 - DNA, 989 bp, Arabidopsis thaliana landsberg
tttccgccaaacaatgtacttcacgtcaccggctatgaaacaatgtactgatttaatcaattcacaacgattggtgcgtctaatctatcgtgattcgagcaatcatgcaaaatcttgagtaagccagcctagatatcctaaatacctaatcaattcttaacagatgcggaaattaaagtcaaagattactatcaactctcgcctcttatccatcttaattagttcttcaaagatttcacccgagtaacctaaattccattggaattaagtcaactatattcctctcttcgcggtttatagttgaaatctgaaggcatcgccaagtagccgccagcttcgccgattttacgttgaagatcagcgttttcttccaatatgaaatttctggcgtaaagcgataagtgcacttttccggcatagattgagttgaactgaacaagaatagtacgacgacatatcagatttttgaggataaagaaaccattgtcgagaatttgagaaaaagatgaaagtcgagaaatgattattgattatctgatgatttataaaaatatataaaaaatatttaaagttcaaattttattaatcctactaatattagtttagaagtacatttaaaaaatatgaactaatatctatcatctaaaagagtataaattacaacaacaaacgaaatgtgttgaaagaggctgtttttccgggaaataagcatttgaagtttagtttcagaaaaaggagttaaaagaagagcaaagtaaaaaaatcacatatatccaaaacggtgtcgttccattctcaaacgtgctttatcttcttctttatacactctcgcctccggacgacggagacagtcagatataaattagggtttcagattttttagattttatctcttcaattcgagccagtgaattgccgcaaccacctcctcctcttcttccctcaagttagttactttcgtcttgagttttctaaattctctatctata

SEQ ID NO: 57142 - DNA, 1009 bp, Arabidopsis thaliana landsberg
agaagagcttttccgactggactatgaattctatagtggaatactttcatgttcttccatatgccactctcatagaagattggttttccaggtttaattgcatcctttttttcttcctaaattgttattccttaacattactttgagtttgtttggtatcatttctagtttaggggtagcaatataagtttattgtgctttttcaggcgaggagataccgaatttgtgatagagaaagaaccagaagctgtatgtgatgatatcgaaagcaacaaagtagatgcaaccaaggagtcggaagtttccgacatttttgaaagacgagaaaaagctgctttaaaaaggagatatgaaattaaagtatgctctcataatgatacttgtattgtatggttgtgttaaggaaaatggtattacaaattaacttaagaatttaaattgcaggccaaaaaagttgccgctctactgagccatcctggagctagaggaaaagctacgacgaggttgcaaaatcggtacttaaaaggaagtatgagtggtgcgaaggaacctaatgttcactcggagacagtagttgcgttgaaggctaagaatgtaggtaatgaaatgagcccttgtaaggataactattcgaatggagagaaaggtggtttcgaggtgaaatctgaaatctacactaacaattatatattctcaattcaatcttcaagtatcctttatcacccttttgtaaatgcaggttgcgtctgacccaaaggaacttaaagaaagaggtctccagaggaagaaagctgttcctgacagacttaatagcattcataagcttaattcaactcctgcttctgctcataactctaatccaaatcttgaggagctacagacgtctcttctttctaaagcaacatcactatccgaaactgcattgaaagttcttctttgcaaacgagataaactggtaataactgtagaatttgatcaaagatacacaacacagcaaaaaaactgattc

SEQ ID NO: 57143 - DNA, 1152 bp, Arabidopsis thaliana landsberg
tgggaggaaaataaccaaaccatctttatgaaagggccagccataagtggaagacgaaaccaaccccagagttactggttattggtgataacctcactttgctcctcagttgcatgcctcccttcagcgcctgatagtagaagtggcatcagaaatagtgtgccagaaggagcttggctttagtgttattcttctccattttgatttttatatggtagtctactttgatttctctttttgcttggtggtgatactgagaagggagaactggatgttataggccaagctggtgatatggtggttgtttagattccttctttgtgagggatattgaatggtgtatagttgatagtttttgatcctcttggaatgttggtccacagttttattaactgttgagtgattaagattgttctagtggtagatgcaattcccagaaaaccattaataacaaacagaccaagaacaccaacctgttgagtcttgaatcttgcagtcgtaaagtgtgattggtatagcactgtactgttgaaaattggctttagtttgttttctctaccaactggtgagtcgcgacatgttaaatatcaagaagatagaaatcgcaccttgctattcctatgtgtagcctctgagattgttggccttaacgactaggttttggtaacgactcaaattacttgtcttagttatatcttttccatctgatccaacagtcttgagtaaccgttaagcggtcacttaactttcccaagaaacctaaaccaccatcaagccaaagactatctcagtcaactaaactcgactaagtgtcggtaaacttatttggctagttgagctatatagtttagtcgaaatatctcagtttttccagctcatgtcatctcgtcaatgcactttttctcaatactgggtaaaaaagtagctcatgctgctgcaaccgggtcaaaattcctaggtcaaagaaggaacagtgatgtaccaaaaggtccaaaatgctctaataccagtataccacacgttcagaatcaaataaaaaaaacaaaccaaaaacaaaagcataagcacattcatttcattaaatttagattgtcgaattagaaacgtcttacatatcataagccataatatcaccacacatccttttttttt

SEQ ID NO: 57144 - DNA, 614 bp, Arabidopsis thaliana landsberg
actgagttagagaatggaaatgagattgaagacataaaaatatagttcataacagaccaaacccgagtctaatatccaaaaaacagaatgaaaaagccgggaaaccatcatcctagaccaaattatccgaggccaatagccaaaaataatcatgctagaccaaaaaccatgaccatacaactaattgcctaaaacaatcaccaactaaaacaatcaccaagtaccaaaactcaatcattaagtgaactctgtgatgcttgacttgcttgacttggaccttctcttgctttcttagatgcaattttgcttaggaccccaacattaggacacttcttagtgttatgttctgtaatgctacatcatgcacaatgcaaaataattccttgtgttgaaatcttcatatacttctgtggaggctcttcggatgctacattctttcccttggtcttcttcttttttggagacttattcttacctttcattctttcttacttctttgtaggacctttagatatctctctagggggaggctgaatccttgattcaccagatgtaggccaaaagtgcataccattaactgccatgagtggctcactgtattgaacaacccatct

SEQ ID NO: 57145 - DNA, 1387 bp, Arabidopsis thaliana landsberg
  unsure (1)..(1387): unsure at all n locations
aagaggcagaaacaacttcaaagcaaagagtcatactcatagctcaagcctagcgaagtacattttggagtgtgagtctcaaattcgattcatgtgaaggaaagagcatatatagtccacaaatttttaagtagtagatcacttgagttcaatgggggcctactagaagaatttcgaaaagctataaacctttgactttgtacaaagtcaaaagtattgtggcccaatatgctccaattattcttcctcttgtctccaccacctctcttaacagtttctagctccaaaccatctttttttctttacttgcctctcctacatatctttcactacaaattaagatttatcgcagaggctaactagtagcaaatatatggtgtacaaactacaaagtaaagccttgattgtttttttatatgtttacatgttatattatagcttgtgttatcgagttgtggatttgaaaataaacttgttgggtaactttttcgattgtttcaagcagagtgttcattgtttgacaaacagtgtcgtgacgatgcaaagcactagagataattcataatcatttaaacgaaacaaaatacaaagaattatgtttgattcttaatatcttattaattatatgatggtattagtctaacaaataattaaaaaaatcctgtaagtaagaatatggactccgaatttgtataagtaaaacaaatcaaatgagtgtttgacaaaagaaaaaaatcaaatgagttttcttaaattcttttttcatacccactttggtagatattctcgacctatgcctatgaggttggtgttgggcattaccaatccaatcattaactggccaataacaaagttataataacgattgaatcaaccgttttagaaatcgaatataaaatttgatacacttttgttttcttcttcatgctgaccttaatagtcagcaggaagttattaatatgaatttaaaaactgggataacaacaactaattaaattatacaaattaacacagataatggtaacaactattaagttatcatcagctctcgttgtatagaagccggcatacggagccggctagagaatcattcttttctacaaatatacaatcatatgtctctctctagtcaaatatataaaacataatatttttatgattntacttaacatagatgacacataatacaatatttttgttaaaactatatgacatatgagattatccactttatatcgacattgaatcatcgacatacctacaaatttcaatattattcgacataacttttcgttatttgaagaattattattattatttttaagacacaacttagtacttaactatggatgatttggtatttacaaaacaaatttgtattctttat

SEQ ID NO: 57146 - DNA, 1105 bp, Arabidopsis thaliana landsberg
aataaacatatatgagctaccttttttcgaaagttaattattttttttttaatcagtagcaaaatcaaaattggggggagagagaggtgctacttggacgctaatgttgacgctgactttgtactgaacaaaaatcaaaattttcattgatacttgaaccggttctgatgtaagaagtgaaccaaagcaaaccgagccaaaactaggctatatgttaactagactacttcacggttcttatgttcaaaaacatgaactccacatctcacactctctttatcaacaaactctgaatccaaaaaccgagcaacgaatatccaaagtttataaacatcttcgaaattagcaagaaaccctaacgcagcagtgagaacagagatccttggttcgtcgacgtctctgtttcttttcttctcaaaaactctatctttcacgccttcgtagtcttcttggaacaagatgttcttcaagaaacttttaccgagtgagatgttgctgcaatcggctaacttctgcacgataaaaggttcgattttttcgcctttatggttgaatagattgaacgcaaccgctggtcctcgattgaaattaactttcggaccgtagattttaactagacgactagttgttgaatgtttgagtttgtagagagcacttaccaaccaatttatcaagcatcttgatctgttccctgttgctaccaaccctagtgaatctacatgatctaggcctttgtattcgacactagagctaaagctatatgtttcttccgaatctgtttgtgttcggttgatttccaacgcgtgtaatgaaatcggattgtcggtaggtacgaggttaatcatacctggaccagtggaagattcaagaatcgatatggtggatttcttgacaaacaagcaaccaaatccggaagggttttctccaaacaccttgtagaacgaacacaccatgaaatcggggttatatatagaaagcccgaaactatccatatccttaggtcccaaaccgcatgcatcgatcattacatgccacccattttctagtgccacactcatccatagatacggatacctagatcctgtaaccctagaatgaagcggaa

SEQ ID NO: 57147 - DNA, 487 bp, Arabidopsis thaliana landsberg
  unsure (1)..(487): unsure at all n locations
ggtcaattagatggcagacgcgttgacgttcttagcggcttgcatcagcctttctcatgtctcgcggaatctgtagcattccctcgccatcaggtgtctcaaccctgataaggtgaaccatggcagtgttaacccctgcggcttccatgcgaggcaggatggtttcctctacactgtcctcgctatggcagtagatgacaggtcgtggcccgagcccttagctgtggggggtcgattgttaggccgttggtgatgtaagcgcanagcagcgctagaagcgtactcttaccaacgttgcccttgccgataatgagcgtcaagtccgttgcagggatgcgacgatgcagcagccactcagactttcgcttagtgtagcctgacaggggctcaaagaggacacgccgttgggctgtctcctcttcttctatcaccttgttggcgtctagcctagccttgatcttgtctgcctcaaaggctgccttagcca

SEQ ID NO: 57148 - DNA, 964 bp, Arabidopsis thaliana landsberg
tttattaagttattagtatagggcacacggaatttgtttttctttttgtcggtttatctaatctcttaattccgaaacaaatgtaatttttttactattaacgatgtttaccatagacaataaataattacatttcacatatgctccgtgaaaattactaagacgaatttcacatatgtagtgaaagattgttttaaaatatatgtacaactccaagaaaccctatctccataagccatgtaacaaattattattattatttttttggtaaaggacattttaacaaattcgtaaataaaacaaagtcaaattcacctccaaaggttaagtcgacgacctatattatatagtcaaccacatatattaaataaaacatcgctcacgccatctactcatatgtatgtttttacttaattatatagctaattgattatatgatatatcatcagttggaaaattaaaaaccattttattccgatagcgtaaaagaaacagatcattctttttgtttaaattacaatttatttaactcaagttgttgaaaagtgtgtaatggaaggcaggtccatagctatttcgtcttatatttttaactattttcattcggtttgtctttaataaatagtattttattaatgttttcttacaaaccaacaataaaactgtatattcacattttgtttttttttgtgtatatatagagagacatataatccacaacatatgcatatcatttcccaaaacaatacaagaaacctgaaatccaaaaaagaaaaacccaaaatcttcgcttcttcatcttctttttacgtttatatggtgagaaattctatgaaggctgagtacgatatagatcatcttcctcatcaaaccttttatggtgattattcaaaaactttggtccccatgaacaagaactccaaaataataaccaagatcaagcctaagatccgtatcgtccata

SEQ ID NO: 57149 - DNA, 526 bp, Arabidopsis thaliana landsberg
tgctgccgtcgtcatccgcctccacgcccacgctgcccatccgattccgatctgatcccggccgctgaggtccgccggagctagctagagcctatagcttggcttgtttgcttcttccagccggtacgcaaggtacggtggtgcagtacgcgccatgtatgtagctttgctttatagacgccacagacatggtcgacgacgacctttgtgctagctagctctcgccagtcgtcatatttccatttagtattttttttcataatatactcacagcaaaattcgagcgaatccataatttggaaccgacaaacagatgtgtgcatcatttaggtcgtcagattttatttaacttgactttaaacaaccaaattaaaataagcaagtggtggccggctgctcaccctaaccaagagacaattattaggttcttcacatgtttgtagcgtgaacgttaatccataacgttaaaacctcgtaaacgtggtctttgtcgagagtttattagttcatgagagtacactcaaca

SEQ ID NO: 57150 - DNA, 1235 bp, Arabidopsis thaliana landsberg
cggctgtggcatcgacggcagcaaacgggacacgttttcagctttttagggggagcggctaaacctaaaacttcaaacgttaaatagtttttagtatctttagtttcaaactagtgatttgtcctaatatcaacactacgaacgaatttatatacattgaacttttttctgaatcaccgattacaaaacgaatataatttggtatcggcagttgctattaatttgatcggtttggactttggactaatcacgatcaaatcttaaatggaccgaagtgaataaatccctaatgttttcaagagagtcacacgaacgaaacaaaggtaaaatatgaacatagagcgtggggaccttgaagcagaaggtctgtatggtgacagaccggtgagtggagtgtatgaatgaacgagaagtgagaagacaaaatacaagaaagagcgttgacttggaagttaaagccaaaaaaaccacaaggggcaaatttgtctctttaggaaaaggacacagacagactttctatacgggccaattagaaaaataggccctacttctaattaaagcccatttacttctctccttgtcttcttattcctcttttctccccatcacgtgacgacgatgctataaacgccgtcggattatataactggtgccgttgacaagacggcgacagaagaaagaaagaagaaaccacaggctctagggaacgtaacgttatgtcctgtctatagcatttataacggtcagatcaacgccgtttagataaagatctgtcaatgttaaagaagagatgcatctctacaccgttaaatttaaaacgccgtgaacctcttatctattgatttttgtttgatgaagccaaaacaaatcgtgtcagaagacttatcagagaagaagaaaacgacgacgttcccgtttctccatgtctaataagtgtagtagtggcggctactaaaaactctaaagtttgactccagtaaaactgcctttctagtgtaattccagtgattttagagtttgaatagtgtgtgaccaaatttgaaagtacaatctcagcaatattattgatcactcgttataaaagaatcgaatgtaaaaatagccaatgagagactgagacgtatgtgtttgaccataagtcgtatagtttgtatctatctacctgcaagatcagcagatggttctctgatcaattgtaccttaattatcttttattttcgtaaaatttctctatt

SEQ ID NO: 57151 - DNA, 1280 bp, Arabidopsis thaliana landsberg
caaaataaaactggttcaatagaaaatgttctcttagacactaacattccatagcatcgtaagggaatgaaacaaaaaagtaagcatttgcttacactagctgatccatgaaggtcggcttcgctagcttccttaagtttagctgaagtattcttcaccaattcggatatctgtaaccttgtcttttgcctgccaacaaaagaacctaacactttaaaacaattcacagaacaaatagatgaaaccaatctaaaaaaaaaacaatttctcaatacacacacacacacacacacacacaaaaagctcattatttgcaatgttgtcaggcattatttgcaatgttgtctcacatcgatcagcaaactcaaatttgttcttcggttaagggaaaataatgcaggattagcttcaaaacaattagaaaactttttcaattaaaaattgaaatgaaatcgaccaaaatcaataagtaaaaccaaaaccctaatcaacagagatttaacaaagagaagaagagtgtgattaagaattgctactgacagcttatctcgtaattcaagagtatctttaggtgttccgatcgaattaacgaggcggaagaaggaattgacagccgtgctgatcctgaaaatcccggcggcgacctcctgagatggatccccacgagacgaaggtctctgttgtctcccaccggtaaaacgattcggcgccggagatcgagtaccagcttcgagatcttggaaactcatcgtctcttctctcgaatctctcgaaattctcttatctctatctcaggggaacaaacgaagacgaagatgatggaaatgagttaggtgaattataagttttcccaaaatttaatgttaatttttgttttataatttgtataaatcatttaatctcatgtggtccgcgtgaatatggtggtggagggaatttattaatacgtataaattatttggcggtgacacgccattgcgagggaagaatcctgcgtgtcgttgttgacctcacctgcccttccgtgtaaaattgaaactcggttcgagtaaaccggaccaattgagtgggtttgcaggataaggattggttaaatgattttgggctacattggagtttagtaaaaggaaaagagaagagttgggccaaaaacaaggagaagtccaacttttttgtaattaccaagttatcatattttatgactgaattaataattacagtaatcactttgatacataaaccactttttatagaaaaacaatgatatatttttgttgata

SEQ ID NO: 57152 - DNA, 817 bp, Arabidopsis thaliana landsberg
agtgcatttgtttctttgcatggctaatccccatgcatctatacatatatatatatgcagtggattgattagtacaagtgcatgccaacttaagagtgcaatagagaaggtacggttcatcggatcatgagtatttatctcgattctaactcccttcgtggtcctcaccttaatcttacatcactattatatccctataaattctatagcatcacacaattgtatagatatacatctatatgcatcaaaataatgcttaaaaaaatggaaatttatttgtccatatcccctactagcttaccaatagaaactctgtctttaattagtcgatgtatgaacctcttttttttaagccaaggaaagaacatagaagggtagtgtaccaattgacacatcaaaagtgaggatcatgtgtaaaaccgagagtacttcaattattggtctgtttttttcttttttcttttgggtctgttaaagagagctatttctatttgaaaattttgtttcccattgatatttgtaagtatattttgtaaattaatatgacaataatcatataatgtgacaataatgatataatgtgattttagttagtactattaaagtagatagataaatcaaccgataaaactaaaagatggaataaaatgttatagagggtatgaagccgaagaaacagcagcgagggaagagagcggtgacatacttaacatgcaaagagaaatgtcaaatccatcatgaaaattgacagtgcgcctgcaaaatggtcagtaggacaaagcccctaaccataaaaaaataaaagaaaaaatctgag

SEQ ID NO: 57153 - DNA, 496 bp, Arabidopsis thaliana landsberg
gctggatatgaacggccggtttcggaagttatgggacctgttgaagttttgaaagctaaccatcatgcaacatataatgctaatagtgatgcttacctgaataagctcaaaccgaaggctgttattgtccatacctggcgggatgtacaacctaatcctaatactgtaaagcggatttttgatgccaatagtgactgccagatatttaccaccaacatgacagatgcgaacaagattagattaggacagctttttgcaaaaatcaaaagcataagcggacacgtcgttgtccgggtagaaccgggtggcgaaaaatacagtatctatgtgctcgacgatacaaatgagaaatatatcgtacaacgggtattaggaccatacaccagtaactaaaagatgaaacaagcaatacgtttttttttcctcatctgggggctctccataacctcactatacgcacaggggagcaaacaaacaaaatttgtaaatgcagatg

SEQ ID NO: 57154 - DNA, 183 bp, Arabidopsis thaliana landsberg
tacagatggacaaatattcttatccgccgatctttttaatagctggaatcagacctgctattaatgtatgtggatttctgtctcgagagtaggaaccgccgttcaaataaaagctatgaaacaggtagctggaaaattaaaattgggattggttcaattcgcagaattaaaagcctctatcca

SEQ ID NO: 57155 - DNA, 1031 bp, Arabidopsis thaliana landsberg
gatggtaatcgtgttttgtgaaatgtggcaatgtccgcccatcaaatccaaatggaattcgcttcccttcaacattttgctgaccgacacacgctgtcatttgagaaatattgatgaaacttcctttggatcctgctgtcaccatggccttaaggttattggtttctgctaaactcttttgagcactacttccagcatcatcacgagctttattcaaaacctacaagaaaagtttatgagtcagcacatataaaaactgcactgacaaccaaacgaaaatcaaataattattgtcttgaatatacctggttaaccctgttctcaaatgtatctctcatagttcggccaggctcagggtccaattcctttccctggaactgccggataagatctttcacagcagtttttgcattggaaatagtttcattaattttctccattgttgatgaatcggcaattgtgtcaccaattccgatggtaaaaccattctgcagaagccagtaattgacaagccattgagtatgaccgaggaattttctagctgcatcaggaccaacctcttccctggaagccaagtaaaaatgaattaaaacaaaagagctcatgaaactaattactacatttagatattcccaacaatgctgcatgtgatgtgaagttaactaaggtaccaaaatttagccagtaagcaaatgtgacaaaccggaataaacactctaaaatcttgatgtgcaacttaccaaatgacatgcacgagacttccattagatgtaccaagggtctttttgcaaagagttccggcaagaagttcccctctttcaattcgcacttgagtatcccccggagttataaatccagtctctgtatctgcgtgccaagcagagtacctcaacagatttatctgttttggtatgataagattaaaaacttgtttgccagtccaaagaggacgaggcttcaagattgcaggagccggatctttcccatcgaagtcttcccaccacatcagtgtgttcatgaatacttcctga

SEQ ID NO: 57156 - DNA, 521 bp, Arabidopsis thaliana landsberg
agtgaagagtaacttagagaaatcgcgacatgaaaatctcaccgacgaagcaaaagatgagaaattgaggagtggaggaatctagagatctttcgtatccacacgcatgtttcggatttgtctttttggttcaaagaggaattttgtagttgaatcacgattggttcaatgaggaaaaaaaattatgatttgcttttttttttattttggagtatttaatcgtgaccgttggattgatgtgaaatgtataggattttaggtaaaccgggtctaatcagtaatcatcttccaagtcaactaaaaaataagtaattaatgttcgtttaatgaaatcacaagctgttgaccaaaaatttctcttgaataattcttcattttattttgcttatgatatttgtcaaattttaacatctggtttaacttttaaccaataattattaaccggttggtctttggttagctctgagtctcagacgtctgcttcccgcgcaatccgtcgttggaccttaatctctcagttt

SEQ ID NO: 57157 - DNA, 870 bp, Arabidopsis thaliana landsberg
  unsure (1)..(870): unsure at all n locations
gaaaagaaaacaaaaataataatttaatttaaatatttataaaattaaaatatatttattatataataaaatataaaaatatttattatataaatatatatttaatataaattatattattatataaaatatacttattatacaattaaaacataaacaaatttattatatatttctgatgaattcttctacactcatgatatatactctctccaccttttcttttgcagtgaaagctcacaaaaatatacaaaactacattctcataaaaaaatcaccaacataaaaaataccaaaaattgtatttaattctatagttaaaatcaatttgagttttattgagtttttagataattttagtcttttaggtgaatttggggaattgttatttgttgttaaatcctacttaaaatcatgaaatttgaatctttgtattttgaagtatgtaaattatctaaatccaagtcttctttagtccaatcccaagcattctgcatcatcagctgtcttttctcctagggtgcgtgtgaagtcattcctgagattgaaggtctcccggatctgcctctcatcatagccgcaagagttcgacaagtacgtttctgcccctagattgtcaaacataaccaattagataacactagatagagatgaaacagaaggcaatgccaatgctctgtgtcgtatggcttctgcaacaaggtatatagagtagctggacagtggacgtagaaatactatgggccagaataatatgggctcaaattagaagtatttttactattctattgngccagcattatttattctctaccttaaaccctaatattttaacacgatcaaaatggcctttaagacacgctgggccta

SEQ ID NO: 57158 - DNA, 751 bp, Arabidopsis thaliana landsberg
cctgtaccatacaattgtggaattaaatttttactgctatttccacatacagcagctgctaactaattgcatgtttaattaaataagattttgtgtaaagtaaacaagctcgtcttacaaagtccaaacaatcccagagtactgctttctctacattctaacgtactcacgtgagtctagagaagtatagactacaaaagcaaaacaagttcaactgctgatatcaatcctaccccctaaatgactaattattctaacttattttccacaggacttcctagctactagaccagtaaaaaggtgtactccatgaagcaatatattctattttatttacaatgctataacaagaagttaaacaaggctcagctcagttgtatcaaataaaaggcaaaaaaaaccttgaagacagcaaatggaaaggactcgataaatcatatataccttgaggaagtactccacccatcattcggttctgtccctgaacatttaatcctgatccgctatttgctgccaaatttagtcgtgaagacagaccaggaatagacaatccaccagagctaatattcctccccaggttacctccaccaaccatgtttcccattgaatttgttattcgaggacctgaatttcccaacaattgggatattcccatccctggaacactattccgattactgagtcctgcagatgtagagagaattccaggaatagaaccaccaactccattagcgttactactgaatccagg

SEQ ID NO: 57159 - DNA, 1084 bp, Arabidopsis thaliana landsberg
gaaaaatacatatacataattttattttacccattaacaagtttgtaaattctcctcttccctctatacactttttcaattacttctcttaaatcttttttcctctgtaatcaactcaaaaaattgtttacaaaaatttgctaaaactctcttcaaaaatatttaacacaattaacaaaaacaaattccaaaactttgtaataagacaataagtaatcaatctccaaaaaaaaaaaaccaaataaaaaaaaaccttgttgttggtttgggtctttgccgtttcgtataaaagtgcgaagtaccctctctctacccaattcctcttgttttgtttctctttcataatctccaatcttcttcggattcgacgaatccgtcaccgccgacggaatcgtggccgtgtaatattaacagatggggaagaagagaaaatcaacagccacaagcctcgatgaggtagatcggactgtttacgcttcttttcgcaccgccgctaactctttatctcagctttatactcagtctatgaatcatcagaagttatcttttcaagccggtgaacgccatggtttggtattttcatatttactctctgtgactgtttcaatttcttgattctttgtgtgattcattgtcttgacaactctctaattgaaaaagttttgatttttctcatttctgtgttagttttgcgttttaattttgattgtctttcacagggcttgagacctcttagacaattgtttgttatcttattgttggaagcaagagattgtgtttgtagctaaaggtctatgttttctcgtgtttgtgtgtaattgtattagtgagacctatgccaaagatgtgaatgcatctttctttctgtctttcagggtttttgaattggtagtatatactgagttgtttatgtagcttgaatcaaattataggcaggggtttagctatatgattgaaagagacactcttttactcacattccattcttaatcaacacgatttacacacatcccctaaaccagcgtctttgattgctaacacacccattgagcattcctccctgtctaccttctcttggcccact

SEQ ID NO: 57160 - DNA, 673 bp, Arabidopsis thaliana landsberg
agtgatgtgtgtgtacttgcaatgacattattggatccattttttgatgattgatataaaaacagacgtgaaggcttacacagcacatgtgccatcatttgcggacacatggggatgggtgatggcatcggaccatgagtttgacgttgaagttgatgaaatggatcgaagaatcgaagagagagttaacggagaattgatgtatctaaacgctccttctttcgtctctgctgctactctcaacaaaaccatctctctcgcgtaatttccatttttctctcttttattttcttttcttaacacaataaataattattcgatttatttacaaaaattttgaaattaaaaaattgagcaggctagagaaggagactgaagtttatagtgaagagaatgcgagattcattcatggtcatggtgtggcgtaccggcatatttaaagacgaaccggtttcagtttcagtgttattaccaaacccatgtcacaaaaacaaaaggccggtttcttttctccgcacagaaccgggtgttgtcttgaatcttgattactttggttcggttttattttctacattgctttttgttttcttgttcatccctcaagttattccggtttaacaagactatattgcttactaagaaagaccgatcttcaattacttatttcttcaca

SEQ ID NO: 57161 - DNA, 526 bp, Arabidopsis thaliana landsberg
tctaaacgctaatactcgcttataaacccatccgagatgtaattaaccttaaaagtattacattttttgttttcttttaatatgttttattgttttattttaattttgatttatttttaaatatattattccatggcatattgttaaattttggctatgaatgaataagaatttgttgagaaaataacaaggggacatattaaaatttcctttattaattgggatttttattatcccatttatttccctgaaatttggaagtttgctcttcacttacgctactagtgagttgactcgagggtcaagaagactctttcaattatgtaattatgttacataaacctcttttatcttcaaactatcgtgtggttgtagaaacatggagacctgcaagaagaacttggtattcatctactctgtagtctagttgacttcggagccaagaagaccctttctgccttttaattcaaaacaaacatgcatatttgcaagaagaatgggttttattataccacggagtgttggt

SEQ ID NO: 57162 - DNA, 512 bp, Arabidopsis thaliana landsberg
  unsure (1)..(512): unsure at all n locations
tgtattatagtttctgtacatacctcagaacgagaaagccgataaagctcggtgttttgtgccatccagccttcactgtttcaggcaaatggatctttatgttattacttcttgttaaaagacgctaggaaatagaggtatgtccgcacttcacgggactttatctcggcggcctgttgtgtttgcccccttcttcgccacccacggcggcctgttgttcaagtacctgtaagggccacaacatctcgaataactcctgccaaatcgccagttcatgtgtattgtgcgctagccgcctagctgcactgctgtttttttgggttccattgttcgtattttctcctgctgtttttttggtcccattgttcgtattttctccttgcccgatacttatgtatatatgcctcatacagtgcccgatagggcgctgtcttttcctagtgcaataaattntttagaacctctttatacgcaggattttttacagaaatattacaagttattttacagat

SEQ ID NO: 57163 - DNA, 889 bp, Arabidopsis thaliana landsberg
ccatttcactacagattttgttttggcaaaacagtagctacaaacttttgaaaaagaaagagcatatttgattctagacgttttggcaatgtggattggtggggtaaaaaaaacgtgtgaattggtgggaaaaaaaaagagtttatttccctaacgcgaattattaaataaaaagattactattagtgaatagtggcttaggataatcctgctggttctttattaaaatcgtgattggtgcgatttgaccggtcgaaccggccggtttgttgttaaaatcgtttgtgttgggtaagaaataaagatagctagagaagcagaaaaggcacggcgaacggagaaagatgcggagcacaccgttggggacgacggcggtttcaccagcttcaatcaaacacaactcttatgggtatggccgcttcgtttcctcttcaggagtctctaatttctctatccatcgtcggagacgccactcgtcgttttctatctctcaagctccttcacaaatcaactcaggtttgatgatgagctatgatttagatcgagttccaattcttaagccatccccagatgaattcagttagatgctctctagtgtaattgaccatgcctgattgaaagattcaattttaactcatttttcaacgaaacaattgattgcgcatgtttgcttcatgaagctttaaattttcaggcttttgcatgatttcagcaaatcagttgttttattaaacctgaggacctcttgtcactgagtcttttaggaatagtttagagttttcaccgggtttgagattctggttacagaagaaaagtgtgaacatagttgttgcttctatcaatgggtgataaatttgttctttgatgaatatatctgttatctctgtat

SEQ ID NO: 57164 - DNA, 961 bp, Arabidopsis thaliana landsberg
agagatagtttttgggatgttataacataaaatttttgttatgcatctttgcaagtgtagttctgaaagggtgaaccttttttgcaagataacatgtgtttgtgatttttttggtgaacacatgtgtggctttctgtatgtttctacatgttctcgggtaagttgaaggattcttatcggaaatccatgttgtttatggttcttgttatttttgttggttatgcttcttggtatgtcactgaacttctgaagaaaaatggatttgcatggagtgaggaggcaacaagagcattccaaccttatatgagatggctatatgtttgtttttttagggaaagaaaatgttgcatataactagtgtttttggagaattgttggtgaacaaggactcatggaaattcaaggtgaataaaattcaacattagggatggtttgaagtttgatgatatttttcagatggttagcgaagattttggtatagataagttgattcatgaggtagaacttagctatgcgttgcctgaaccgatgatgaaaaacatgctaaaggatattcttccagtctttgtaaataatgataggcaattggatagttcctttggaatttgcagatcgatgcatgttcgtctttacatctctgtaaagaattctaaaccaagagcatcaagatcaaggtttaaatttttgtgagatttctgtggttttttggagaaagtggtaagaacatgattggaaaatcatataataatgttggcaggtagaatagtaatgctgactgaagttgagttttctaacttgcatgatgagaatgtcattcaaaaagagcaatggttcaagagtaaatcagacctgtcttggaaaatacggatgcttgcatgtgaacgaaatttcagatttactatttacaagtcagagcccaagttgttggttataaaatgtgttgacaagaactgtaaatgga

SEQ ID NO: 57165 - DNA, 1000 bp, Arabidopsis thaliana landsberg
ctctgtcttttaaatagtaaaattgtattcgaatactcccaacgtaagttttttttttggtaaaactcccaacgtaagttcttcacatgaaactgttttttttttatatacccaccaagaacctgattttgtattttgtgtatgttgttgcaaaaccagacttaaattgtaaaagaagaatcttaactgccaacacataagatgaagattacccaacgaacgaaaactattatctaggtatcaaaagacaaacaaatgtcactaatactaaattttcgtcattatacgtttttaaatcacgtcagtttggtataagaatatacatattctgatattcaaaccaggtaaatgttatattatggccgaccgaagatagcctcgcaatgacttgatccactaaaacatccagaagacatcttatcatcttccactaataaaaataaaagaagacttaaaaacgaaaatagcaagtcaatatttaaaccagttgacaaacaaaaagccactggactttataaaaccctttacgaaaaagacaacaactgactttggcgtaaaaaaaaaaaattatgaaaagaaaacgattggctctatcgtgtaatccttgcttgatttcttccacaatcattggcattgacaaaataatagagtttttcttttttttaaacaaagcaattttaacatttataaatgtaaagttattacgagctatttaaacagagttgccttaacaaaaaaaaaagaaaaaaaaagagccactctgtttaaaacctaaaccacatattggtttggtaggtactgcttactcaataaaatccggttgaacaaatcctctgcttttctgcttcatttatcatttttaacttttcaagttgacccatcccactcttcatagaactccttaagatactcttccatgaacttgtgccttttcttgccctccttttacccgctgataattttcaatccccattcaaatcaaaatcgaaccaaatttccg

SEQ ID NO: 57166 - DNA, 647 bp, Arabidopsis thaliana landsberg
gagcaaattcacaaaaatccaattgaaaacgctaccgaaactcaaaatgaaaaagacctacaaatatgttttggtttatataaacccatacatatgttacacggaaaaaaagaaaactactattacgtactggttttagacttttaggtttttaaccacatccaaattatccaaattgaatatgaaattttatgatttgatctatgtacacctttagttataataaagcatagtctctttttttttttttatgtttttatttcgtttttggaaactcatatgctgacgtaccaaataaatttgggatatataatccagtattgaaacaattattattataacaacagtggagtagtattttaatgcatttaatggaaaaaaagaaaacagagtaaacggataagcgtgtcgtggagaagaaggaccaaagcaaagtaaagaaagtcatatattcctgaaaatctataaaagacatttcgcatttatccacttcctcgattcaatcaaaactgcttcaagtaaaaagcctacgaaatagcatcggaccaaaagacaaactcaccgagtaaacatacgcaacctgtcgtgtaagtaaaaacaatttgatagtgactctctatgtttggtggaggaagaggcctatgggt

SEQ ID NO: 57167 - DNA, 1325 bp, Arabidopsis thaliana landsberg
aaagggataaagagcttcttgaggttttaatcctttgacgatttttcgttttcgttaaagcttgaagacagtttctgtgtgttcatcttttggatgaataatctaagagtagagagtggactttgctttgtattacatgtaatgctttatttatgttttctctcttatacttcgtgtcaatttttacgtttgtgtcatcgttttcatgttaattatgttagcaatctatatctttctatatgtttttactttttatattggaataagtgaacactatgacattaacttataacatgttaactaatttaaaactaagttggtttgtttggtggaaagtggaaactattataaaaatgaatccatcagataagcttcaagacacctcacttagagtttaatcgacgagattggttggacatgttgagtggctcgaggttctgacgtaccgactaaattaaccattacattaagattcattgcatataatcattaattaattttgtaagagaataccggcagtaaaccggaccgggattaattttactaaaccagacttggttactacactgagcgctccttttaacggaagagactgagacagtggagagtcgacagtggaagagtcactcactcactcatcaaaaaatggcggaaaatgttggaagcgactcgagcgaattcgaaagcatctcttcttctcagaaatcttacctcaaaaactgtcctttcgccggtcacgaagctcttccgacaaaatcgacggattctgacaacactgaggttctcgggaaccagatttctccggcggttgttaaaactccggttctctcgttctcttctccgactagcctcgattctatcaacgatgacgtctttcgtactcctcctgagaacgcgtctctctcctctgccgctgaatcggaacccagagttggggtttcggagattaagctccaaggaggttcgaatctgacaactccgttttctatggctgagacgacgcttgtttcttcttcgccgtctcttccggcggaaaatgttagggtttcagagtcgaatttgaaatcttcttcttctacggccaaaacgacgcctgtttctgcttcaccgtccgtaaatgctagggtttcggagtcgaatttgaactcttcgtcttcgacgacccactgtttatgtttcaccctcagaaaaagttagggtttttgagacgaccactgtttctgcttcagcgtcagaaaaagttagggtttttgagacgaaatgtcattctgattcaggtgattcgttcatttgtcttctctcagcagctgttgcgcgacgatgta

SEQ ID NO: 57168 - DNA, 834 bp, Arabidopsis thaliana landsberg
attctaacactgttaacggataccaacggcaaacagatattaaaatttgttttttgtcattttaatacaaaaccttgccattttaccataaacatatggtaatactcaaacaatggtgatcacataataaagacataaagcaaaagcacaaacaatcccaacaaaatgtgaatatggtataacgcacataaataatcgtaatctcatttattgacgacacaaaaacaaaacaaaaacctaatgtttgatactttagcattggatttaataccaccaaattaccaacggggtagcatgggcatgacggtgaacttcatggtaccattgctgcaatgagcaccgtcatgctcgccacacgaaatgtagtaaggcttcatctgttttagaacaaactcaaagccttttccagcaccttgcttcggagacgcaatcattttgcctttcttcacgtcacacttttcatagctcgatgggttcgaaaacaagtagacgctgtgcgtgaacggggctggtgggttgtatttgaaaactgcattcgcatgaatatttttgttaaaattgctatattgataataattgctttaagtgtagaaatgtatatggtagactacttcattggaatggaacctaaacatatttatgtgtggatatgtaaatatatatattttgttatccatacggttaggaaacaaaatgttacgaaaagattatccaccccaaaaatcaagtggtctcgcaatagattactcgacccgcatcaaaagtatatgcatttcctaaataatgcgagataatgtctaaaatgactcacccagtatgtcaattgagaaagaa

SEQ ID NO: 57169 - DNA, 1064 bp, Arabidopsis thaliana landsberg
aagatcaaaagcatttatttttggtagggagaaagatcaaagacataaccaaacgtccaaaagcttttttttgtttgtgtgatataatacacacactttctattaaatttgttggacagctttatgaacatattcttttttttttccttttgtcaaacttctctttgtcttttttcttttcttttctttcttttcatgttgtttggggtttactttctatttttcatatatatataagtatactttaaagtgctcatatataaaagagtgtttactcttttaagtttatcgcatatttatatgtctggttttagccttttctgatatagtctgataatatattcttagtagagatatatgattgtatatatggcttttaaaagtaggccatgatggtttggcaccgcacgtatcgtcgtctcattaaagtcatgtccaaacttattactccattctcttgtttccccattcattattgctttccagcatttgctagttgcatgcatatacctaggtggaccaaaaagcaaatgtaacaaaaaaaatacaaactcaaccgaatcgaagcgaattatttagattttatcatcttaccaaaaaaaattagtataaaccgataactaataacccaaaccgaaccaagtgaaattatttaggttaatatcgtaccaaatattttgtataaatcgattattataactaattaggaagcaaaataaccaaaccgcattgaaacaattttagtccaatagaaagttaaaatcaaaccaaatccaaactgtaaataaaaccaaacgaaatcaaaattacatcaaaccgactggttataaattggttttaattggttttagttggttcagtttctatagaaccagtctaaccaagataataaacgaacttaaaaccaaaccggatcacccataaatagttagattcatacgccatagaaatctcacatcgaatcagaaatcaagtacgtgatgtggttcgatcaaatagtctatcaatcaatagctggaagccctgtatccccaagaaattgactttcttcataaatggcaatc

SEQ ID NO: 57170 - DNA, 1250 bp, Arabidopsis thaliana landsberg
gacatcaaatggctactcttttttctctttctgctgaaacctcacgaaagacattgtttgtttaatcgaagcatgatgttttgttttaatacgagaagaaaatgtgagtttcttcttgttacttgctttgggtatgaagaaactcacgcatctgattgtgaacttcggatttcacaacaagtcgcattctcttagagtcttcccaaagaaggcctctccattcccgagcaaagtcacaagctgcctcaaacacatcctgctaacatgattttggttaatgagatttactataacggttttgcgttatggagaagagaaaataataagagggttcaggtttgttacttttgaaggaaattcatcatagaagtgagcctgggtcatctcaattctctgcagatctgtctcccaaagccgaatctgccagaacaatgcatttttattcaacataagcctgatgaatcaggacgtagagatagtatacactttcaattctataaaccaatcctatacacatttttgtataatcgacacttgatgggcatagagagtataaacctgatcagtgacattttctggaatagatgggactcgatcagcacatcgtggatgagaattctgctggaggaaagttataatctgtgacaatcaaaagaaaaggaaaaaatatttattcagaaactataaagagacgcatcaacaatttgatcaacatttcaaggacagtgaggatccgggcaaaatcatgtattcgataacttcaaaatgtttttcaactgaaaccaactgtacctgatctgatgtgatgccattgtcaaatgcattgtacaaactttcctttgtaatggcacaagcaataaggtttggaagttggtactctatcctggaaataatgaagcaccaactacttagacctaaaggattttaagacacagaagagtaaagtttcaggtcgatgttcaggagcttctacctcgcaaatagtcgtaaaatttcacactgtaacttagatgtggagtacgcatacattctgaagtttgtttccatcacgacaaatccctgatgaggaacaacaaacaacagcgatacacaaaatcaagaaaattgttggtagcaggtagatatgggacaagaggggaataaaaaaggtgtgacctcttttcgcgctgatgaatctaccagaccgaccgataaatttgtagccagtttagtaggaaaaaccagctgtctttccttcccttcaataatca

SEQ ID NO: 57171 - DNA, 1122 bp, Arabidopsis thaliana landsberg
tcgtgtgaaagtatatacacaaatatatagtctagggtaattttccataatgttacttaatttttatagctagagaaatatattatactgtattaaagcatgcttttctctttgactttcagaaatttagtaggtacaattaattaaaagctataaacaaatataaagcgtagtaaaaaaaaaagaaaaaaaaaagcgtagttgcgcaaagaaagagatttggattaaaaaaacaaaacttgtagtatttcatattagtttcttttctcttaaaaatgtagaagaagaatcaaaaaaattgtggatgctgaaagaaattagggacactgatgcatacagtaacaatcctttaagcttgggatagatgtgcacatgccagtagccatcaaccagccatgcgtattttccgcaatacatcgtttaacgcaatcatcgtttatgcatggtttcatcggcaccgaatatccgcaccattttcctgtgggttctggtacttcatgtattttgaatccatttcctattttcatctctgcagcttttatcgaaaccaatatagcgaatcgcaacgactataggttagataagaacaactaaatcaactttcttaagtaaataagttgagccaaaaaccattttgttactctcttgccgtcatgcaacttactagatgaaattatttcttgcatactaataatacatgtaaaaatgtcaatttgatagttgaaaaacgaaatgatttacttaccaacacagaagaagacgagcacaataagaaacgctaccaaaaaactcttcattttttattttttgtatgtagtttatttttcgtatatgattatctctattttataacactataatattggatgttgattgagatacaagggatgactttatatattacacatgatcgaatctatggtcgtttgattcgacaacagcaatagaaggttgaacttggattaccctataaaataatatttatttgctattaattatgaattatttccaaattgacttgacaaaataaatcctaattcctaagtatttaaatgagaagattttacgatttgatttgtttcacaaatataccaagttaattgggagcctttacaatggaaa

SEQ ID NO: 57172 - DNA, 585 bp, Arabidopsis thaliana landsberg
atcataatagcgaaatatcagattcattccacatgttcttaatcaaatctgttttattaaaaacatctaaatctacacatagaactttgttgtctcaatctgatggagctaatacatgtttggtctttatgtgggaggtgtgggacatatagatttaaacgagattggctccatcaattcttacctttattattagcacatgataaaatttgtttccatgggaaaagaaaacaaacaatgtctaagttgtagtattatgaatgtttgaagatgcaagtaagatctccaagactccaacacatgtattggagttctcttcataatagctattgcatagccacaattaaacaacaaagttaagagtgtcaattagagctaaaaagagacggttaatcagttaatgcaataattgtcaattggcactgcacaaaaataaaacatatgactcttagtccaagggaaactaccaagaccatggaagttaagagtttttttcaatgggaagtttctaaacaaaatttttcgatttttaataaaaaattttatattggtttaaaatattattttggtttcttaaatttgaaa

SEQ ID NO: 57173 - DNA, 524 bp, Arabidopsis thaliana landsberg
cgcatcttcccgcggtctcttttctctttcatttccacttcggtcgcagcgccaacatacaatattgtaacgccacctgagagtttacccagacgttctttgagcttgtctttgtcgtaatcgctggtagtggtttcaatctgtgctttgatctgtttgatgcgggcagtgatgtcctcttttttgcctgcaccgatgatcagggtggtattgtctttgtcgatcaccactttttcggcacgacctaaatgcccgagctcggcagcatccatgcggtagccgttttcttctgagataaccacaccgccagataaaatggcaatgtcttcgagcatcgccttcctgcgatcgccaaatgcaggtgcttttacagctgcaattttgagggccccgcgcagtttgttcaccaccagtgtctggatggcttcgccatttacatcttctgcaataatgagcagcggatggcccgtttgcaatgttttttccagtaccggcagcaattcttttatggatgaaagtttttt

SEQ ID NO: 57174 - DNA, 871 bp, Arabidopsis thaliana landsberg
ctcccaggtacttaatgtagcatagcagaatataatcatccaatactcataacgtagtaaaactaaaatatattcaatcatgctggttaaacaaaaatgttggtcctgatatttttttcatcttaatatggattgaacctgatattttgcaaaatcaatgtctacctttttttcactatacatttcatgtaaattcttgcttaccacactttattctaattcattttgttgccactaaatcagattattaactaactatcaaattaccaatataattattcacgtttaaggtacgaccaagccaatagccaacggagttgtgtaccgagaccggaccggtcaggctcacagagcttacctaaaggaaggcgccttgagtgagatcatcctatcggccggaaccctagggagcccacaacttcttatgctaagtggtgttggcccatcggctcaattacaggcccaaaacatcacggtggtgatggaccagcctcatgtgggtcaaggcatgtatgacaaccctatgaatgccgtgttcgttccttctccagtccccgttgaggtctcactcattgaggttgttgggattaccggggaaggaacatatgtcgaagccgccggtggtgaaaattttggcggaggtggtggtggttctagtggatcgtcctccactagagactactatgcaatgttttcaccaagggcaacattattagagtcaaattcaatgaccaaattatcatcagcccaaccttttcaaggaggcttccttttagagaaagtaatgggcccattatcaacgggtcatttagagctcaagacccgaaaccctaaaagataacccggattgtgactttcaactatttccaac

SEQ ID NO: 57175 - DNA, 407 bp, Arabidopsis thaliana landsberg
aataacagcaaaacaaattttccatatacacagccctgacagctatccaatctcttagcgaattaggatttgccaacattacgcttcggaattgtggctattatttccttgtttaagccagaatggagaattgttagtgcgcttgcaagtggactctattatggcaacgcaggcatccaacacggacttaaaaaaacttcaggtataaatgaaaaatttgcctttcggactgacttaataatttccgctttacttttattctactttataattaaaatatgaagaaaacaaattaatacaatattgccattgacaataccattggacaactcataaaaatgtacgaacagaaagttattgtgataaaaaataggccactattctatgagcccattaaaattaagcag

SEQ ID NO: 57176 - DNA, 499 bp, Arabidopsis thaliana landsberg
ttgtgatgatgatttctaagaagagcctaaacttgagtctttcaggtaacatacgtcgtcgttttcgtttaccttcgttgcttaatacttaatagtgtcattagtggtttccgcgattaattaatcaatcaatcaacgttaaagtactcaataattaaaatataggtgtaactagctgctgtacacatggactatatactaaagacaaaaaactatatggacttatacgacaaaaccaaagataataaataaacttctgtgaatgtggtcaaattttgtattattgaattttcgagatgtgtatgtgaatattagattaatatagtattttttgaagtccttgatatgttataagatattttaaaatatcagagttttggtatgtgttaagatggcctagccatcaatccttctaggctaataactcacgtgtagggagatgacaaattggtctaaatataaataaaccattatgtgaaaatgacgaaaaaatacaaaa

SEQ ID NO: 57177 - DNA, 479 bp, Arabidopsis thaliana landsberg
  unsure (1)..(479): unsure at all n locations
tatgtttaggggaactatgagtaaactaaaacataacggagcaattttttcaattaataagtgagttattaaaaattcccttgatcactgttaaaaatttgatactaattaaaaacactgtagattttgtactataaaaggaaaaaacaaaacactaataaaatgtttaaagatagctccggaatcagaactcatgtaacatcaactgtaaagttcgaacaaaatataatattccagttttggcaaatcagaatcccatccctcattgaaaagattaaggcaaaagagacatctcataaattaggtaaaagaaaatgcaaacataatcagacataaaaacattggatctgacatatacaagatataaagcgagatagatatatataaatcagtaattttgaacaatcttgcgttntacttcatttctagagggcgagttaattatttcattnttttaatcttaatttgtaaaaagaatg

SEQ ID NO: 57178 - DNA, 1240 bp, Arabidopsis thaliana landsberg
ctgattgaaacatatgaacagatcacgattcaatccccagttgcttctggacccatatcgaattcagagaatgtggatcattaactgaaactatgactccacgaccccaaattcacgattcgatttggattttagtttaccttggtacgggggacgcctaaccggagcttgacgaaaccgacgacggttccaaaagtccgtttagccatttcctcttggatctgatcgaatcccatattggtgaaatccggaggcggatcaaattccggggtcgttgctttcttcccccactctttccatgactcgtcttcttcattgtcttcaacgtcgtctaggtcatcggagatctcgatccgtcgcttcgttgcttcggcgatccggacaaatccgtgaaaattcataaaaagaaggaggccaacaagtagaatcagcgaagaagaacgaacgatcttctccatcgtttaacaaatttattcaggaatcagaaacagaggaagagagactgcatcggcaacggcatttctatatcagtaaagcttctacaaactcgcacacaagtcacaaaaccataataatgtgactttttacttgtttcgggaaaaaaaactattaacgacataaactgaacctgctggttcaaaactgttcgccgtttttctatcttaaaatagaactgcgtgccaactattgacgtaaagatggcaagcatatcaaggctgaaagatgaaaacgacacgaggttgcaccgtaaataaaacaagggtaattgtatgattctctctaatctactactgcactacagaaggtaaaactaaaagtcaaaatttgtctaattttaaattcaaattaattaatcaagtaaaacaaacataagtctaatttgatttccaaatttgtttttttcttttctttttttgatttccaaatttgtttatagtagtatcattttagtattcttattacccaatacggaaacaaatatttgaaataaacatggaaaaattaaaagtcattccatttggttaacaaaaggaacgtttggtaaattcacacgtgtctcatcgtcatttgtgcaactgacttgtataaggaagggtacttctggtaataaaagcgaaaaccgaggggtggcctcgtgaaacgcattttccgtgttccaactgtatcgaggcgtgggacctacaatcaaaaataaaataaatttagcgccccttccaaaaaaaagggagggagaaaaaaa

SEQ ID NO: 57179 - DNA, 354 bp, Arabidopsis thaliana landsberg
acccctgtaactaaatcatttcctcatctaaaccaaaattgtataaaactagttaccccgtagaaacaaggggtatgggtgagcttataaaaccaagacttgtgaacacttgagcacaatcagagttccaaaaaaacaaatatggtgtttgaatatacaaaagagtcgacagagttgataattttttcttaaatggaaaaaaaaaatgaatcgattacctcttttccgaggggatcatattatcggcaagacgacaaactaatatagcctgcataatccaatgtaggtaacatttttagattctcaacagatgcctataaaccctagcttaaaccccagatcaaagaaaccaaa

SEQ ID NO: 57180 - DNA, 457 bp, Arabidopsis thaliana landsberg
gccttcccgcaaacgacatcgtacccgtttgcaaatacaccagggctttttcataaaagcaggaaagccgacgaaaacgccgccagcacaaggtatttgatccccgcctcaatgctatggttccgcgtgcgcaggtaggcaatgagcgcgtacaagcctatcgtaaggatttcgagtcccaggaagagcgaaacgaaatgctcgctcagcgccagcacacacgcgcccagcgtgcacaggaaaagcagcacataatactccttcggcccttcctctttttcctgaaaatagatataggagaatacattgaccaccaatcccgaaaaaatgatcagcccggtcatgaaggcgccgaaactatcgatcatcaacagcgaacctacctcataagggagcatttcgcggatattgagcagagaaataaacgcttttacaaaaagcagcatgctcacaagct

SEQ ID NO: 57181 - DNA, 900 bp, Arabidopsis thaliana landsberg
  unsure (1)..(900): unsure at all n locations
aaaagaatctgtcaataatatagcaaagcaagacacaaaatatgccaagattggtaggggatttacagagcaaagatggttgacaaagatacgcttaaaagggcataaaagtctattgtaatagcaatgattctcaaggtcattgtttaactaccatattcaccatttttactatattctaatagattgcagccgacacaaaacaaaactttctaattgcagcacgtgagggagagaagattccaaaatgtcagaagaatcattgtgtgttgttacatatatagtaaatacatacctaaagcttcaagcttgagccttttgctagaagaaccaggaggtcttcctctcttcttctctcctccatcgccgccgctactaggttggctgacagtgaaagaaggagctccaggattcaaaccaagtgacatttcaccactatcaggcccatatttcctcggtctacctctcctctttttcactggctcacttccagttccagtcatgcctccagactcacctccgggcaagttcatgttcaagacagaattctcaccagctgagttgggttggtactgctgcggtggtgatactgatctcatcggctgcttgtaaagagcagttccgtcgtctccannnnnnnnnnnnnnnnnnnnnnnnnactgctgaggttgagcttgactgtgttgctgctgctggtggagagccattgtaaattgcattgattctctggtcgccgccattaaacccgtctcagatcctgacattttcttttcactttcccaaaccaaaacagggcanaaagtgttagcagaagattaaccaaaaccacaaaaccatagtttccattcaagaagctctgaagtgaagaaagttttgaactttagccatanatctaagcac

SEQ ID NO: 57182 - DNA, 427 bp, Arabidopsis thaliana landsberg
atccaaatgcataaaagtcagaatctttttgcagatttaataaaaaagcaatcaactttaacggatcaggttattcaaacaacgaattgccaattgatcgtgttgaatcgggaaggaaaaaaaaacagaacaccgatatcgggttttgaatccgggaattcaatattcgacaaccacatcaaggaggagagattgcgaatacgaacgaatcgtaaagatctaggggactgaatcaaccgggtgcaactgtttgattttaatttcgaaccggcccatactaaaacatttcaatgtataacgacgagagctatattattaaaaaaaaaaaaaaaaaaaggtgtgtaaaattatgatcctctattgattccttggtatatatatagggtttttaccctataaaatcaaacccttattatgttcccaaggg

SEQ ID NO: 57183 - DNA, 345 bp, Arabidopsis thaliana landsberg
ccttttttttttttcccccccccctaccggccgtaattttaagttgtctttagctggacaaggacgggttgttttaaaattccttggggtacactaccaaaccgaaccgttcaagatttggtttcggtttacaggtattaactgttgttcgattctcggtttagttaggttttcgaacaataaaccgatcggttaggacattaaaatccctagattgattacttaatttcttcttctgtgctctcattattttgcttgagccacagatccgtttctcctctcgatttgacttcttcactcaccttctcggttggtttgacaaagaacgaaactttccggcgggta

SEQ ID NO: 57184 - DNA, 551 bp, Arabidopsis thaliana landsberg
gtatcttcctctatttagtgacctaccgattgattcttggtttctctttttttgcattctaaggagaagaggggatctaaaccaaccacacgggaggagctaatgccattttcctccccgtggaaggtctaacaatcacacgtctcctaatctcgtacgtcttcttaggtatgttctatgcatgttaaagaaactgtatcttcaattcttgtcattacatgataatggttttcttatacatgttttgctcataccttataggttttgaagaatggaaaatttaaggaggttgtcaaacccgggaaatttcggattcattggaagatcacaatcacgagttccccaaaaaaacatggaaaataacatttctcctcctaataatatgcaccaccatagtgcttctttagatgatctttttacagaagaccaaccagcttggctcgatgagctcctaagtgagccagcatcacctaagattaacaaaggtcatagacgttcagctagtgacacagctgcttacttgaactcagctttaatgccttcgaaggaaa

SEQ ID NO: 57185 - DNA, 919 bp, Arabidopsis thaliana landsberg
gtaccttttactcgattactaaacagtctctgggatattctatctttagccgttgttttcttacgccttgtggaaaaggtttgcttcttgtttttcttttcagcaaaaactctatcaaactcatcatccatagcattcgatctagaagttgaggctattgccgcaccacgcagaacttcatgattgtgttccttaaccttaaccttaacaagctttgctcttttcctcaccacttctttgtctttctcccggatattcttcagagcctgtttcgctatttgcctagctaactgattaggatcagaatctgaagttgtttcatccatagacacatcctggttggtccctgaagttgaagaagtttggttttcactctcatctaatggagattcctggattatggtgtttccttcatcatcccggggtacaatgggtccgtgaaacggacagactctgagatctcttctctggcaaagaccacctttctttagagaagcacggcatggaggtgtctctgttctctcttctctatacacggttgcctgaagattcaattctgctattttatctgctggaattatagcatcttgatccaccctgccccagtggctctcgatctctaaaccccggtaattagctcgaacttccgtagttgattcccaattagtcaactgtgatccccaattcatcacaggcgcttcagaaattagcttgtctctaagagagtttccactgcttccaacttttttagtgttcgacactttattggacctagcttctgatgtagacttctttgcttcacctgatgatggtaaagatgaattctcactctgctgagttctcatcacatgagccacgttcttgactgaatcagttttaaccttgccatcatcctcctcccagatatcttcttcttcct

SEQ ID NO: 57186 - DNA, 1087 bp, Arabidopsis thaliana landsberg
aaggttgtatcaggcagatccaaggaattactcatcgtggaaacatcgtctgtcaagatcatatccttattttttgacccgggaccaccaaataaatttcttctatgccattcttcgaaaggcggatgaagctctaactcccgaagtagaagaccagcagcgtcagctcctcttgggccaggcatgttctgttaattcactttttacaacaaattatcttatgagaatatagatcacaagatattatttcataatgtacttgaccaaatgtcactaacaagaacaattgaaaaaatagtttcactactttactataaacacagattacctgcatatgtggtccaagagccgcttctaccacctcgggtaacacagtgtaatttccatcaatataatgcagtcgaacttgaatgtttacactacctacctgagagccaggtaagggatgcgcaagaccagatgttcgcttgcagagatccattagtatatggaaaagaactctcacctggaagatcagaaagtatccagtcattataagaaatttcctagattattgcaccatcaaagatggcattgctttcttcgtttcaaaatctacgaagtctatcatatttttccccaacctaccaagggtttcccattattcttacccatattgaccagattaagcctaagcctctattcttgaggtaacaacaaaagggttccacggataattgtatcaaaataaagaggacacaggaatataggtgccaacctcctcataagtatatccttgaccggcattcccagaacccatctttgttgtacgagcagaattttcatcaatccctttcactccagtacccaactgggcaccccggaatccctgggcgtcctctatcctgttcaaggcaggggttggtttagcagagttgacttcttccattttgctggtagcccccgtttgaagtttttgtgaactaacatcagcatttcgctgtggaaatcgtgaagaccgctggagaaaacagaagagcaacagctggcataaccgatgaaggaaatgacaatccccaatgagcccaacagcaggtgttcctggaaa

SEQ ID NO: 57187 - DNA, 196 bp, Arabidopsis thaliana landsberg
aacattacctgaaaaccaaaaaacaataaaaaacatactcttttaaaaaactccattaccctatcccaaaaaaaaaaaaaaacacaaacttctttaccaaaaaaaaacatagatacaaaaaaatctatcctttaaaagactaccatgataaaaatacatatccatacagacaatagtggacaaactaaccaccatc

SEQ ID NO: 57188 - DNA, 221 bp, Arabidopsis thaliana landsberg
  unsure (1)..(221): unsure at all n locations
gactataccacatatacgcgataaaaagcaggattagcattcaagtctccgagcctccctnccacaccaaaacaaaaagagngagggaanaattgaaagaagcaagacaacgnacgggcganagngaaagacaaagaaacagagagagagacacnccnaagaccgacnncactacccaccaccgctccatagnncncagcttccggaaaaagaacagaaaa

SEQ ID NO: 57189 - DNA, 553 bp, Arabidopsis thaliana landsberg
aaaatctctgggctgtctttctctcaccaactaatcaaattttgaaggaaaaaaaaaaaaaaaaaaaaggggagttttctcaggttgatactgtggctgtagattcaagaggcacactctcatctttgttcaaagcttcccagtctatctccctaagaatcttaaaccgttcctccatggacacaaacccagcttgaggaaccactataccaggacttccagctttgtaaatcagaacaatactggtgcccatctcaggaccatggagttttcccgttaacaacactcgtagtggcatgaaaagtgatttaccctgtaaccagcatcagaagaatctcttgtaaggtttgttcactcaagtaaagtagattttgtttcggtattaactgcattagagagatgactaactttgcgtttcaaggatttgccaaaggctttcacccatttctgccaagcaccttgtccttgttgtaaagcgctgggaatctctccgctgtcataagcagctatgaggctggctgctacttcatgaagtttgtcttccacagcaggc

SEQ ID NO: 57190 - DNA, 1273 bp, Arabidopsis thaliana landsberg
tcttggcgtatgagctttgagacaccaatatcccattctcaagtgagtccaagaaaaaatccaaacttatgtgatctaaaaaccaaacttaatgattcattagatccgaaatatcaatttaagacaatgtttgatagaaacttgaatttatacgacaacccgaatgccgaatcaaacgtctggagctaactattttttttgtttattgatgaaaactattcaagtacactcttcaaaaattttgtttatgatttttttttggggttcatgattagaaattccaaatgttcattccgacactacctaaataaaacaatcctctatctaaggattttattccgataaattgagatggaccatagcagactaacccatctcgagccacttgcccactccggttcaatctggtttattcatggtttatcaaaagaaaaaaagatcaagcctattcttttaatctttttttcataggtgggataaccgttcaaaggagattcttgataatataacgagttttgaagctgatttcatctgtctacaggtttctttttctttgtctctcgtatcacacataatgggggacttgtaagcctaaagtcatgataaacatttacaggaagtagacgagtgcattagtttttttcgatagaaacattgaggcttatggatacactggaatttgttttccaagaggagaaggatataaaagagacggctgtgcaatctttttcaagcccaaattgtataaatagagacttttacacgtaaagtgtgatcttagggtttaagtctaattaatgagcctaacactttttttctttaaacagtgcagagttgattacatacaatagtgtagactacaacaatcttgctgaaagccgttgcgtggcgagtaccatatggtgatgcagttcaaaaactaaaatgtaattgcctcggaatattggcagctttcaagattttaaaaccgtttaatcatgtcgttattgttgcaaccactcatttaaaatccgggtaaaataattaatattcattagctagaaatttctgagtatttagtttaaccttttggtttattaatatacattttcataatttttcaaacgcaggaaacctgatgaatggaatgatgtaaagctggctcaagccaagtctctaatgtttagattagccatgttcaagaggacgatatcggctgttgaaaattgcagtccatcggtgatccttgctggtgacttcaattcgaacccctcgagtgatgtataacttcaac

SEQ ID NO: 57191 - DNA, 1588 bp, Arabidopsis thaliana landsberg
tcaaaactgctatcaaatgtttctggtcagcaccgatactcttacggtcttaccaaattttgttacttcatgtgtttttcctttttttggctaaaaatgtagaaatttcttattaaaaataaaaagtgcatgtttaggattacattcaaaattataaatctaaggaatcacatatcataagacacatatttcagtccatccactcaagacaagtacacaagctaatctgacaaagttaccacaggttttaccactcaaaaatgctctttcaaacattaatcttctaagatcttgaacctcgtgttggtgcagtggtgcacttaaaagaatcttgtcaccaaaatacttgcctggttcatagagacaaatcaaataggttgttcaacacgtatttcgtgttttatttctatgtctctttccgaatatagcacacatcatcgcaattaatattgattcttgagcgaaatgctataacatttactgcaagtgaaagttacaaagcgttttgtgtgtagttgaactatttgaatttttggttatttgcttcagtaactgtagggtaaagaaatgataaaagtgttgaccaatttattgcgtaaataaacataagttaactttatggtttctaaacatgtggaaaaataagaaagttaaataaaaactagtagtaaataaaagcaaatatcgtagttaattaaagtggtgagcggaagctgccaacaaaacgatcaaatacgtcatttcatttaagcactcaacatgccatgatttattgtaatacgtagatatataattaataaaaaaaaacattgaaaaacaatgggttacagtggattaatattttactaaaatttatgattgactactagcctctaaatgatcgatttaagtcttaacaatgatttgaatatctgtaaaagcgcttaatcaactccactggttaactatttgttaatatatttaaaatcaccctataccaaacaaaacaaagctatatgacattacatcttatcgttgactccgaagcttcatcatcgtgatgaccaaaaaacatatacattaacgaaaacattcattacattcctcgtatactcatcattttgtcttcagactataattaaaattctgaccgtcgtaatgaatgcgacggtggtgccaccttactccggccactggctaacgaacacagataggatgggtggattggcttacgggatcggagtctccattggtatacttatgctaattaccacaatcaccctaacttcttactattgcactcgaagccatatctctgcctctcccacgaccactcctaggacaagacgccggcaaagagagaccaatggaacgttaccacctggccaagaacggttcgacttcgaagatgatgaaagcgacaccgttgtggtcgaagtcttggggctaaacgaggaggtgatcaagggttttcctaagctcccgtacgaagaggctcgtgtgagttatagcttgcaaaaggaatcgagtacgacggcgtgttgttctatatgtcttgcggattacaagaaaatggacatgatcagggttttgcctgattgtaaccact

SEQ ID NO: 57192 - DNA, 457 bp, Arabidopsis thaliana landsberg
  unsure (1)..(457): unsure at all n locations
ttgtaagacacgggatgagcaaatggtgacaacacgagggttaagatactgacaatgaaaccagtgctgcgacatttgcccctaaaaattgttaggaaaaacaacaaacatctttaatcccatgaggggatagcaatcataacaagaaggaaactatggtccgctagagaagggggaaccaaagccacttgcactgggtccttggccatatggcacatgaccagcaccctcaccgagcatgaacaccacatggtctcactccctaaggcctagcagcaagaggcaaagcacctctaggcctcttaggacgtctttaaacaggctgagcatgaacaccatgagaagggcagttcatgttgatcctgctcgactcaaaaacccaccgctcatnnnnnnnnnnnnnnnnnnnnnnnnnnnnnnnnngttcatccctctcaccaatactcacaatggaacc

SEQ ID NO: 57193 - DNA, 611 bp, Arabidopsis thaliana landsberg
cgaactttacaaaaattgatgtggattttaaaaatgattttcctttttttgtgagagaggcaaactagtcatttctatgtctgaatgggtcccacactgacttttcattattttttgttttctttcgtttctttattttcggattcgactctctcattggtcgctttttattttgccaggtcagcggttgccacgtggagacagctaggatctcggtttcatgaatgctcctcgtaacttttgaatcttgcccttaaactggattactcctagctaattaaagactaaatcataactaattaatttgctatgaaataagtataaattgcaatgagttgacaattaaatattccgaccacaaacaaaacccaaaaggaaaaaaaaactcatttctcatcgccgggcggtcaccgactagacggcggacgaatttagggcaacaccagttagtcggaatgacgaaaatacccttcttgtttatgaacccaaccaaacccccaaatgggctttttcactttcagatctctgggctagagaactgctaaaatattgatttaaaatttttaaatcaaaaaaaaacgaattttgttattttcgaaaagaaaaaaaaa

SEQ ID NO: 57194 - DNA, 979 bp, Arabidopsis thaliana landsberg
tcacagccaagtgtctataaatacagagcataattacaccatctttccttacaacacaatctcacaacaattacacactaaacaaaattcaattttgcatctccatttctcgagaaactttcgttttcgtagacttataaaaccatgggtcatggcactaacagagtagaagacatggcgtcaccaaacaatggaaccgcaggagaaacggtcgtggagatacacagcgtttgtctaccgccgaagaaaacagcgtttcagaaactgaaaaaacgcgttggggacgtgttcttccctgatgatccgttacagaggtttaggaaccaaacatggagaaacagagtgattctaggtcttcaaagcttgttcccgatattcacatggggttctcagtacgatctcaagcttcttaggtccgatgttatctctggtctcaccattgccagtctcgccattcctcaggttactatttgacaaaactcactcttttacttttacattgggtttttatgaccaaaaggaaagttttatggaacgtttcgaaattttgaaaaagttttaatccgtgaaatcattttgtttttttatgttgaaagaataataaaaggcgtaattatattgaagaggttttgtcatttttacatcttgagttgtgtggggatgctagttgaacttggagaagttaaagcaaaaaataaatacactttttgtgtttgttttggattatcaatgtcattcaatgttttcaataaatgtaaatggaatacagtatagttttaattcgatgatttcatagtgggttcacttagaattatccacacaaaatatggttcttttaaatgtttatgtctttacatatttgtttttgttaattttgaaactttattttgcagggaatcagctatgcaaagctagcaaacaaaccacctatagttggtctttgtaagtcttcaacacctaattttggactaatcagtct

SEQ ID NO: 57195 - DNA, 426 bp, Arabidopsis thaliana landsberg
ccccttgtgagattatggctctttttttttaacataatgatgagatcatttccatccaattggtatttaataccacctatttccacctcttaagtttcacaagaaggaacgaacgttagcgttgggacacaaatgacaaaaccctttactctttaacaagaactcacatgaggcttgcgtaatgtttatgacagaacaatgatattatactgtcctagcgatatttgggtttgattgagttaccaatataacccaattggcccacaagtatccaacattctggcccatttgacgtttcagtatattatcagcgtggaccattaatttgactccgcgccacgtctttaagcatattaaccggtttgggtcgcggtttaattatgagaatgagattacaaaacagagtcttcgatttcagagttgatt

SEQ ID NO: 57196 - DNA, 476 bp, Arabidopsis thaliana landsberg
tttcaagaatccacccaaccataaaaggggacagagaaaaaaaaaaaaaaactcatctccaactaattacaataccccaactgtagggggggggggaggaaaaataaaaaaataaaaagtctcaaaacccacaattaaaactaaaacaaaagtaacgagttaaaaaatgacacgtgaaaactcggcctatttaacacaatatttctcaccaccgagtcgacaccggctccgactaacatcaccggaattaagcaactcctcccaatcaatctcctcattctgcaccaaatcatcatcttcaattttagctctcaacacttccaaaactcttttcgccttctgcttagctctttctctcccactcctctacactttcaccaacttctccaccgcattcgccgccatagccaaccctgtaaacctcaaaccaccgtcgtgactcaacccatacaaataccgaacacagctctcccgag

SEQ ID NO: 57197 - DNA, 514 bp, Arabidopsis thaliana landsberg
gggctgtgctccttgatcttttttacagcctccagcccggaatcgccgggcggattttatatcctttatcaccacatcccatttttccttgtatacaagttttaacaggctggcggagtctaccacatctaccacgtctgcaccaggcaatgcttccatcagcaacagcttgatgccttctcttacgatcgtgtgatcatcagcaatcaggattttcatatctgtggggggattttatctggatagccatacacccggcatcatcggcatacaaatgcactccatgtttccatggcttttcaatcattctgtaaacaaaaggaagaataccctcaggggtgtgtgcaggtatgcaggataatacagttccgggtagaacttttttcatagatgctggattttggatcagtacaatcgcctgttccctcccgggaaacctggtattatacagcttttccggggtaatgatacaattttctggtttaaacgggaaaaaaaagaaatattttgggcc

SEQ ID NO: 57198 - DNA, 855 bp, Arabidopsis thaliana landsberg
tatactatggtaagtggcaaacaccacttgcaaagcaccaatgtctccccagttggcatttcccagcttgttccatattctgtcaactggtgacactgctatcttagaatgcttctttatccaatctgctgcgcactcataaacattgttcaagtcaaaatccaatttatttacgtccccttcaacttttacaacacctccatactgcgaatcaactagaagaatgaagacacagtttgagctttgagaaaaatctaaacggctcacactccttgcgatgagtatacgaacagcatagaaaagagcctcgcctaagacaggtaaagaaggcagacgatcactatcctgtgcaaagcttccaatgtcagaccttagaagagcaagttcaagaatgtgatcccatttcccgtgaggatgccgaggatttttaagcagaatacctgtgacgcaaagaccttcaagcttcccaagagctaaagctctctcagcctgataaaacttaagattctgattgtataaacaaccaacagagaaaggaacaggctcttcctgactccaaaacgcctcccacaagctcttaacagtggcgtgtagaaaatcctcaatagctagataagccttagcctccagagcattagacgaagaagcgtaaacaggacttggcatccgagtaagctgctggaaagaaatcccttctaatgcataatcaaacttttgaagctcaaccaactcaaaaggaacatcaaagaccggtccttcgctcgccgagttttctaatgttgaagcaaaccaatcttcaagcttttcagtgaaatgtgcagagtcagtgaatctgctaaggaaatctctacgagt

SEQ ID NO: 57199 - DNA, 535 bp, Arabidopsis thaliana landsberg
aacgattccatggactgaatttggtaatttaactgtctttgatcaattgaattgctatcttgaatcttcttgatcatcagacaatgcatgtgagtatatcttagaacaacctttgtttctttcctgctctctcaggtggagtataccttctggaggttcaccgtatcttaaggcctggtggcttctgggtcttatctggtccaccggtaaactatgagaaccgttggaaaggttgggacacaaccattgaagagcagagatcaaactacgagaagctgcaggaattgctatcttcaatgtgcttcaaaatgtatgccaagaaagacgatatcgcagtctggcaaaaatctccagacaatctatgctataacaagttgcctaacgaccctgatgcatacccgacaaaatgtgacgacagccttgagccagattctgcttggtacacaccgttacgtacttgtgttgtggttccaagccctaagcttaagaagacggatttggaatctactcccaagtgccagagagattgcacaca

SEQ ID NO: 57200 - DNA, 497 bp, Arabidopsis thaliana landsberg
tcactatacttttagtattatatgggtgtatacgccatttggggtctgggtagtatacagctttttcacttttccccaaaataaaaaatgaatcatatatattactagaaattttcttataattgttttttgtctcacatataattcggatgtgattttccattgatcatcaaacaataacgaatccaaatctttggagttacgtaaatattacgctctcgtatctatgacagaacttagcaaaacatcattgctctttaattagagaggaataatttttcaacttgttcaattttatttagtggattaaatttgtttattgtatattttttttgtacatctcatttattttattccttgaactacgtaatattctactgtttagtttgatcatattcatcttattcaacatctactgaaatcataatctagaagcaactcaactactttcggagatggtgtcccaaacgcgtaattgatcgccttctcatctctag

SEQ ID NO: 57201 - DNA, 102 bp, Arabidopsis thaliana landsberg
atggagacacaatactagccaaatccaaaaacaccttttttctaatataaaaaacaaacaacaacactccgggaaagataaattttaaaaaaaaataccccc

SEQ ID NO: 57202 - DNA, 363 bp, Arabidopsis thaliana landsberg
  unsure (1)..(363): unsure at all n locations
acgctcagccacgccgaggcactgcagaagaaaaaactttcaaaatctttatccaacaccaccggaaacgaggagcaaacaggaaggacaaccgcaacccgaaacacggaaaaaaancaaaggcacaacaaaccaaccaccgagcccaggaaaagaagcaacaaaagacagaaacaaaggccaccaccccgaaagaacgacaagccaaacgaggagcaacacccgaacagcagcaaaagcaagacgcagaggcgggacaacccaccaagggcccaaagaaaaaggacccacgcaaggaaaaagcaccgacaaacggaggacaaaaggggcaacccgaaaacggacgggccgaaaaacgggcca

SEQ ID NO: 57203 - DNA, 595 bp, Arabidopsis thaliana landsberg
  unsure (1)..(595): unsure at all n locations
ctacgaaatagtcttaaaggccctaaatgtacgtacaatatgaactatcattattcattttantactttctctaagctggatgaataatggcaaaatttaaaaaatcgtttaggctgttaagtatccaaatttgtaaaccctaagtcaaagttttaccagacttgtatattgttcacacgataaatattattcttttttttaccgttttagctgctttttaacaactttagactcatcccttttcttcaccatttgagtggtctgagctgcgctacatagtatgtacaaacaagagatatctggtttggttcctaaactgttttcttaattatatttggtaattttgaatctaataacctctatcgcttgcttgtaaaagatctctggtttggttcttacactattttctaagtttgatagaaaatgtcaaaatatataaatcattttggttattaagttttcaaatttgtaaaacctaagtcaaaaccttactagaattgtatattgtttatttattcatcactcgaaaaaaaaaatgattatttgttactaaaaaaaatcacacaaacaaaacgaaaaagagtctttgtaaac

SEQ ID NO: 57204 - DNA, 575 bp, Arabidopsis thaliana landsberg
  unsure (1)..(575): unsure at all n locations
aataaagatgtgatttggaagacaagcggctactgcacacagttccgctcttcttccggattcgaccttctcccatttactactccagcagcgtaccggtaacgatggacaccggggctgtgtacatcggggcagacaactttaaattttatgctttcaaaagaaagaccggtgacctgatctgggaatacacgaccacggcgcccatcacttcctcccctgtcgtctacggcggcaatatcatctttggcggggacgacggcaaattatacaacctcgaatataccaagggcgtaccccgctggatcatggataaggctaccgaccgtatccgctcctccccctatcttcatggacagactgtgtatgtaggcagctacgacaagagtttctatgcggtcaatgtactggacggctccctgaaatggacgttcaagactaccgggctgatcgcatcctcttctgtagtgtacaaaggcaacgtgtactttggcagctatgacaatatatgtatgcgctggatacagccaccggnaagctgatgtggcaatatgccatcaaccggctgatggact

SEQ ID NO: 57205 - DNA, 1353 bp, Arabidopsis thaliana landsberg
gagagacggaaaacgattatggaagctcatctcaggatcgccacgagctatcttataaaggattgtccccaaaaaccggcaagaatcgataccgaaatcaagtacattgctgtcaatgaaacaaagatcaatcatcagtttcctttttattctgctacgacttctaaatgtatctcatgttgtgtgttagagatcttaccgtatggtattgggaatctcttgaggagatagaactcgactactgataaggacgaagaaaacatcatcacaaaggtagctgttgcgctagcaacctgtgttttaaccgttagataaaaatgaaagacacaagatgaatgattatgggttttacaatcatatatactgataagatggtgtgtttacctgtgggatgactccaatctcaagaagcaaaggcccgagaacaaatccaccaccggatccaaggagaccacctacgatacctccaatgagaccacagagaccacagaagattagactcagaggagtccactcgatcgtagcttcacagatacattcagtgttgccactgtttaacctctttttgttctctgtatacaatttgcttgcttcaaacccaaacaccgctaaagcaactgggaactacaaagggaaaattgttccgaatgacttgatttagcgagagcacaaaacataatcaaaggttatctgcgacatatatatgttacctgtacgatgaatagtatccaatatattgtgctgcagacctttatttcgttctgtataaacccacgagttccattgatgagagctcaacataaagattattgagaatgcttagacgaataagaagattacttgccttgacaatttgaatgagcaagaaagtcaaccacacagttactagaattagaagccctttccatttgaggttggagcgtattatttcctgtaagtttttaaatctttatgcaagtctgaagagccaataagttaagaaaatcatcttgcatacactcttaccagctctgatttctcttctctcgggtaaagcggctcatactctgtatcgattaaaactgaacaagagaatcaacaatgtggtcagtttaagatcaagaaacatgactaaaggaatcaaaagtatgaagctttacacacgttctccccgggaattaaccatattagctcgttgctgcgccatttcgttctgtttaagacaagccacataaaacattcagtatcacactcacacaacataaaagccacagcattaatggaaaataaaactcacctttaacaatgtctctttcttccacatctcaatgccttaaaaaaagatcttcgagagttccaacgaaagatgatgat

SEQ ID NO: 57206 - DNA, 953 bp, Arabidopsis thaliana landsberg
ctcagcgtattaagaggtacattttaatccacaatataactacgtatctaccttcctagagtacagtcgtacagagagagtaatgagtctcaaactaagtagtacataacctaagcagggatttgtaaagtgggatactcacctaaaacaacatttttgcttcaatcgtaaatgcttatctttcctctcaacaaagtgcactgtcgtaacaggtctctttaaacacaagcctctggtccatgttggcgaactccaaggagacaagacatgtgaaccctacatgagagaacaagggggaggtaaacatctatatttctagtgtggcaagtaaaagaaggctttacaagagtgaaacggaaggtacaaccatttgcagacatgaccattacagagacacaaaacaaagtagaatttaggactttacagatctatgtctaagatacctgcaatttatgggttaccaacaccattgtctctagctgagcagtgaatcatttactcaaaagccacaatctgaggccgaagaaaggattgaataagatgattgtaacctccaaagatgatgaaatcacaagtagcgaccataaaacattaaaaggaaatttcatatatagatcacaacaaaaattacttgacaggagcgaagctgagcaaaatccgaagtaagagaacctcattagcgagcttaaatatcataaatattcaatttttcaatcctctcagctgcaaaacactcttatccaacacccaattccccaaatcagattaaattacactaaactataaaatctaaagcgcaaccataagaaacctggaaaatgataggttttgttcccttaacaaaagtaccccaaatccataaaatagattgcaaattagaaaacagctgcgaagaaactgagagggaaagagcagaagaacggacctcaatcatgagctcgttgccttggggt

SEQ ID NO: 57207 - DNA, 495 bp, Arabidopsis thaliana landsberg
ccatgcaataaccgaacataacattgatctcttctgcaatcggcgtgccggtttttactattgtaggcacccggccctggagcgcggataacaccgagattcaattcaacgaagcggcgaacacgcaaaatacgaaagacggagagggcttcgattccgattttaattcccgcaattcactattccaatataactatagccatgacaacgcgggcgggttcatgcttatctgcacgccgggcaagcgcaattccgccaacaacgtcggcaataccggaacggttatccgctataacatcagccggaacgaccatcagcggatcttcaatttgagcggagccgatggcgtgcgcctggagcataacgccatttatatcggacccggtgatcatgcgcaagcgctgttggtcagccaaagggacggatggccgaagaacgcgctcttcaaggacaacaagtactacattcaggggcacgcctcctggggccatcaac

SEQ ID NO: 57208 - DNA, 1125 bp, Arabidopsis thaliana landsberg
tcagagtgccacactcgaataaatggaaaggacaagtactttccgtccccaccaattatctaagttacatggatctaaaaattcggccgtttttagtgatttattgggccacatggaccgttgattgagattgccaaaattggcccatctcactcactgcattggagttctagtgtttgtaccaaaaacggtaagatgtttgcgtacattgaccgcaatttgtagccctcccagttcttgcacgacaaggttttgtaggattttaaggtactactatttcctcttgaaagttctttaactgaaaaaagtaattgttaacaaaagtcggatgtgatgatatgatgcatatatttatttgatgttgtgaataagttgaatttgggccgtgacaaagtgctaacccaacaacaatgggacttgtgactcttcgtgtatatttcggaattgcccattaagactaggagtagaggagccaaaagtggcatattttcaaatgcatctttgtgtggttactttgtcggttggttaatgatttttctctgacacaatccactctctaccgtctcttccctcctttaatttgaataaatatgacatcctctatccaattcaaattcatatgcaataggtcgagttcgattattttcaattattcttaaacatattttaatccttttttttagttactgctgaatcttgtaaaagtaaaacaattatcgacccagtgggactgtacagttttttcatggctcaagagtgaagaggtcctatacgagttaagattctatagactatagcatttaagataacactttgtttattttttgtatcccaaatttgttgtaacttttttttttgatacctatatatagttttaatgctataaaaatccagtgaccctagatatcaccaacggatacacacaaattaaaaatgtaacaacaacccacctgcatcaatcaataactaaacttcaaaaagtttcaaaaataaccacaaaatgtcaaaaacccaaaacgcaaatcccaatatatcacatttttaattagaactatagtgtatatattattaaaatttcaaaccatagtatatggacaagaattcaaaaaattgatcatgactaca

SEQ ID NO: 57209 - DNA, 497 bp, Arabidopsis thaliana landsberg
catatcgttttgtaccggtacgtcaccagagactctggtcgggggaatgaagctctagcatgaaacacgaccagaccttcgtcatttcttgcgatacctcgactacatggacacgactaaataaacgacacatgcattgaaagtatcaaggtagatttattgatgataagataagtccatatagatttgaaatcatatattagtatcaaggtagatctatatatatagatgtgaaaacgttataaaacgtacatcgatggaccctatagctagaattttagccgtctaaactttgctccaaatcgagcgtgactcccgcttcttcctccaagtcgtcctctaggttcaaagcatcaaaccacatgtccagaccactatcgtcttcactagatgcaaccgggagctcaactcgacagagagggcacgagttatgacttgtcagccaaggaataatgcaatcattatggtataaatggttgcatggcaatctcctagca

SEQ ID NO: 57210 - DNA, 315 bp, Arabidopsis thaliana landsberg
gcaaaccaacaatgggcgatcaaatgatcaaggacactagcccgctataacgactagttgagggaacacataatcacactgtaaaaaagaaaactcccataataggaacaggattcatgcatgacagggtacgtgcagcaaaagaaacaaaaaagagacagcaacaaagagatggcaaggataaataccttgaaataagaggagtacaagatgcacttacaaaggcttatgtcgcgcatggcatagtatatgagggaaggcgacaactaagacaccaaaagaacaacaatcaccagagtatcaaccatgagaaga

SEQ ID NO: 57211 - DNA, 1431 bp, Arabidopsis thaliana landsberg
tcttggtttaaacgcaatcccacgtttgacgacaactaaataaaagcctttttcttcttaagaaaaaacactttcacatttcatggttttaattgtatcactagagttatatataatactaaaactaaaagactgtgttttttagtggataaaaatgtcgactgactaattatgtcattgtaattgtatctttaatcataacaacaacagtttatccactcgaaaccatatgattatttctctttcagaaaagcaatatgaagtatagaaaatcaatggttgataattggattccattcaaacaaatataaagcgaactaaaatgattttttcaggaagattttcaagtatctttgactttcttggcctaagagataaaaaacttttacatgcaaaaaactttaaccttgtgttcaattggttctctgataattaattatatattacttattgttaactataccaaaccccaagaaattcgtatccttgccacaagattgtaagattttatcaaaaaagtaataagaactaaaatagcatattattgtgtagacaaacagtaaatgttggtttggtaatcatataattagtctaaattagaaaaaaaaattataaacattgaaaataaaagaaatttagaacataaaagagtccatgagaagcttgagcaaggaaggcagcaaagaaaacctagaaggccaaaactagaggagaaacccatataacacacaccgacatattcatatagatggtgggctcggaacatcatcaccatcatcaacaacatcatcatcaaaaccatcagcagcagcaacaaaggagcaaagaagctttagggatggtggctctcacgacgccctgagaactgtttgtctcaacaccgactggacttactctgtcttctggtccatccgtccccgtccgtacgtatctctctcctcagctcctctcttttttttttattgacatgatctatctatctctcctcaaaacgatgtcttttttgttcttcaggagagttcgaggcggtggcaacggctgcaaagttggcgacgacaatggaagcttgtaagttacacttcttacaaaaaaaaattaggttacccgtatagtcaagagacttagcgtactatagttagtctttatgaaacatgattaaaaagtcaacattttcccttatggtttatcgtattatagtcaccggaaactttccccggaaagaaactaactagacagactagtattagtactctaggcttgaattaacaaaacaaaacaaaaatccaaaaaatgttgcatggagatcctagacatgatcatgatcacgtagctctatgcatctatatatatgcgatgagactgtatctaccattcgtttaagttgtgaatcatgatttgctggaaaaaaacacatcaagtcatctcttttat

SEQ ID NO: 57212 - DNA, 825 bp, Arabidopsis thaliana landsberg
gatggtgctgatatttgttttgataattttcactacagatggagtgtcagacactataaccactctcgggttcggtatgccaagtctgttaattgctttccctagacagtttatcgctgcacgcataggtctaacagatctggagaaaaacatgaaaggaagacttagtcaacaagctcaacaactaaaaaaacaaacctagatgcacgttttaacatacttgctcatcaacattcgcatgtgcactgaaatatcaggatccccagtctcgtgtagaacccagtccactgcttctttaacatcttttgtgggagatatgagactcatcatcaactctccaaacacattacctcgtggtgccgagtttccttgctctccaaatagctcaaatgcagcagctctcatctcaggatgcacattcttgaggaaaaactgagctgccacagcgtctgtcgtgccttgaaacctgaaaaccaaatgctcgactcagtaatgattataactttcacaaaatgaattcaaagttgtatcttctgtactttcttttcttcaactgaccatataatagcttcttcccacttcttccaattactgcatagaacattactcttagccggtttctcgaaatcatccaatctcataacaagccgccttttgtatttcttcacgcagccattttgtcgccacagatgcttgacttcactcattgtaaacgtagcatttgagtaagcaatgtaatcaccaaaaggatacttccccctgagaatacccagagaaagaaagaaatataaacaagacaaataacacaaactacggcaagaatag

SEQ ID NO: 57213 - DNA, 814 bp, Arabidopsis thaliana landsberg
ccccttgaatataacgttgacgctaatggcggatcggttactctctgaaacgcagcttttatctgacgtcatggctggcgtcattccgcttaatacttttgttaaagtcactggtaaagtaaccgttcttaaaatctttaagattaaagtccaatcgtcttcttcgtgtgatctcagtatctctgtttcggatcgtaatgttacgagtcaacactgtaagtattcgactaagttataatcagatctgtagattctaccacactttgttcttgttttgttttttggtatttgaattggtttgtatttaatctctatgtatgttttatttactttaatgaacagagatttgattttgttctttttcgtcttaaaatcttgttgatttaacaaaattagtaaaacgtgttagtcaatgtgtcatatacaggtggatatttttttcaaccttttgaaagtagaagaaaaagtcagataaagaatcaaatcagattcttaattactgtcacataatttaggcagattgtaaggaattagttggcagctcaaatcgcatttaaaacacttctttctctactttaatttatatttcttctataagtgtggcttcaagctctccaaatatacaaattaaaccatccatacattatagttttggcatgaccaatcgtatgcgtaaatccagccagtgcggatgctgaacagcttcctgtttcatttttacccattctcatcctcatctttcgtcattggactttcctctttggtttttcgaaaagttcaacaaaacccgaaaaaaaaccttattaacggccag

SEQ ID NO: 57214 - DNA, 1020 bp, Arabidopsis thaliana landsberg
ttttaagaatcattcgatatcgtttactatttcttaatcccaaacaaatttctacagttttatatcatcggtaagatcatataatctaaaaattactaaaattagattaattatctctctaatataagatctacaacgtgtatatcattattcgatcggtacaaggataatgtatttggaaagaccaaaaacataagagttgcatttttcattcgtttaaacattagagtatttcttttcttaacattcgtttaaacatgtgttcccataacttaattcaataacttaaattgaaatatttatatatatatgtgttcccatatatatgtgttcccattccttttcaagttgtgaaacttgtttcttttcaaaaccacaaattactgaataaagatgtcactcgatccgaaaaaagaatagtagatatagtatattcaaaaaagttcatggcaacctatcatacatgtttaccacatactattagtactccattatttctttgttccacatcaatatatttattcagaaatataattgatcatgcgagtgcatcgttatttataaagacccgaatagtacaatttataagaggaaggatggatcttaaaatgttcgacactacacaaaatgttgatggctaatgagtaaaatgcagtcaatacaaaacaagtgttattcttttggtaaaatggaacgttcgtatatataattaagttagctactttcgacgattttttcctattaaatgtaatgatataaaaagattatagcagtacgtgaaacatttatttcgatcaactatattaacatgtacagtagtacgtttttaacaatctttcaaacatttttttatgtactagctattaaggcgttcaatttcatgcatggagatgtattcgtacaaatttgtattaattccgtatgcaaaattacaaaatatctatgccggcaaaaaacctagatatacggtttaataggatgtgtcggtatagacgtattgtacctgtttttttgtctgaa

SEQ ID NO: 57215 - DNA, 787 bp, Arabidopsis thaliana landsberg
tccgctttccccacaaatatgtaaggcagagtttgtagcatcgacttatacgtttttgttgcacgagcaatctcgaacttcgatttgaaatctatgtcgattaacagtctttcacctttcattatcacatccacatactcatattcccctgtttcatttcacaaaacaatcaactctactgtcaagcaagaagcctaagaaatggcttggctttacaactttgccttttcacagaagataaagagttatagactataccagcaggacaagaaggagatttctcccagcgagatttgcatagagccgcatcataacctaaactcactaacccattagccacacttttcaagcacgatccatctttaagcttgcaattcttacttgtttccgcaatcttggtcacatcagtcagcaaattcctcacacggatgctcttacagagaaccaaactctacaaaatcgaatctccatatatcaagttctgcttttctaacaaaacctagaatccagaacaaaattgaagaatcataccttgaggatctcacaagcttcaccagaagaacattcagtttcatcatcagagctctctgtaccactcccgctaaaacagttacatcggctacgtccacaccgctgtttctcgccgccgttgttatcctccataaaatttagaaccatcttggccaaacaaacagagctcggctcaaaatctccagagttacctctcgaaagcggtgcctcaacatctgagccggtaaatttctccgaaacgttcttattagtgaac

SEQ ID NO: 57216 - DNA, 1398 bp, Arabidopsis thaliana landsberg
tataagtaggtcggtcatacatttgaatcaatataaataattgttgcacatatcttttagccatagataaagacaaagacaggctcttgattttatttcctgttgtgggggttaccacatgagttcttttcgcatgatgtcgttattatgaagcaaactatagttgaaacttgaaatcgtagtgaaaatactcaatctatgtatgatctagatcaccatagactacatatgagtgaattgttgtaaaattttatagtcttgaccttaaaagattgttctaggtcatttattgttttggatattgtagacttatgtaacgaaacttttcccactacacccaactatcaactatatcaaattgataataaatcacctaaacttttgtttccactccgaaaacacccttaaaaaaacccctaaaattgcagctcaattcaaataatatatgaatatatatatatatatatataataaagaaaaaatctgataaaaaataataatttagtttggaaatttgctgtttagattttttttttttctttttttttcccccgattttcgatctaaaagcctaaaagtgattatgaatctagttcaaaaataaagaaaaataatgaaactaaggcccgtattaagcctgttaagagtatttaatgggccatagcccataacaagcaagaaccctaatatttcgtcatcttcatcaaacgtgcccagaaccaagagcttacctcagcatctgatgccattttgcaatctggatcaggtctgcaatttctgatgattcactctccattgctcgagaatctctcatcctcagggcttatgttacgatcaaaaactatttgcgtatgaatcgtctctgttcaccaaatcagtacatgttaagagtataggcgagtgtaaatgctaccggagagcttattcaaacctgtaattcgcttcgtttgccatttttgcgtttacgtcaatcttcaagatcatagcttttttgattaacccatggctgtaagtttgcagcttttttccttttacacaactctgtttttttgtttacttggttatacgaaagtgttgattttgctacttcaattttgtatgcagcttttcatttcttgtggggaagtttcatcttctcagttcactgtacttcgcttactcaaccaaagccttgattttgttagtgacaatgtctctaggctcttagctcctattttcaccaacctgaggtatatgttttgattcatccttttcttgattcaattatttgtttccatgactatctaatctgtttgctgatgattctctgctatatggaaatgtagggactatgaaatgcgtctttcttgtatcgaacgtcctccatccatttctggcaatcattctcatttgcgcact

SEQ ID NO: 57217 - DNA, 1188 bp, Arabidopsis thaliana landsberg
  unsure (1)..(1188): unsure at all n locations
tttttttaatacaattccggggatttatccccgaggaatcaccaaaaaaaaaagatattctagaagattttatactcctaattttactccgagctaaactcggatctttgtatttatatagatacacaagagcaaaatttttagtattagcacgaaactccattcgagctaacacacctccgccgtttttgtctcttcttccgatctcatctcatctcatctcatcgatcacctactctcaaggttaataacctaagacttgatccttagaaaaaaacaccaaagtccatgttttgattgttcggtcaatatatagtcatggttaattgattaagatgtaactgatctatatgcttcggttcatctgttattgttatatttgattatcgatcatcgttattacgagttgcttgtcaatcgttactacttattagttctgtgtcataattaagctttattagggtttttatttagaataatcgttcacaaactcacatagttcatattgttttactaaaggcacgttttatagatttattgattcatgtattgtttggtttggtataaatcgttggtttaacctagtttgaggttctgatgcttaacgttttttttttccgatattcatcatcaagattgtttataattatacataaatgccttcaccatgattggagcatgttacaatacattcactgcataatattgaagattcacagttatagttttactcatgattactctttcattataaatatacaatataaatctctaattaattaatatctctctctctttttctgtttagatttttcagctcctccttgattttcaaaaccatggacaagaattttcgtgtcaacactaacgacgaacgtaacatctggtcgtccacggcggtgaatgagaatctgacaatggcgtcgtcgtcatctcagccacaaccaatatcgtctccgtttcatcaaccagagaatcaggtcaacagagttaatcctggaagtcattattatgatttggaaaccctagaatcttcttttggtgggctttctttcaacgattcaagtgttcgtcagaatggtgattcgattcacctccctcgtcgaaccaatcaggtattcactggcaagtagtctggtggtgctggtgatgacaatggctacttgntacctccgattggtctcatca

SEQ ID NO: 57218 - DNA, 774 bp, Arabidopsis thaliana landsberg
caatcataccgggcgtaaatttcatgtattgattcgtctccggatcgttaactatgctcccgatttaacaccgtcagttcagtatttatcgggcgcaataaattccgataatgtagcctcttgagagaatgttttgcgggttggactttggagaagaaaacaatcatataacctatctatataaaatcgagtagaacgagaaataaaattattgtaaagcgagagtgcattaggattatgtggtctaattatgaaagaaaaaagattatgccaataatgatgatatcgaataaacaccagcacgatggttttctaataatccacaactaaacaaacgtaaggcctttatttatctatttttatgttaatcttgaactatcgaagcacgacttgagctatctatgagttattacaaaaatatgatgtcgtcagtttgtcaccgagggcttattaattagataaattacaaaccaatttttgtccttcatataatttcatttaacggatcatgaaaattaagaatcaatacgatacaaaatgcataattgtgtatttgacgtgataaaagaacaacgaaccaatgcacatgtaaccatgtgataacgtatcccccgaaaacaaaaaaaaatagccaagacactacagcgaagtcgtcttttgtgatgtcgattctatatcgtcgcccccacttacaacgacgtcgtataggtttaatcatcaatcatggtttcatttataaacaatccaacataaaaaactttgtatacggtctaa

SEQ ID NO: 57219 - DNA, 892 bp, Arabidopsis thaliana landsberg
ttcgtcgcacaggttgacgactttatagctcagacaaaaactctggccggacataacttggaaccaacaccgtggcatatcttcccacgcaaatctttcagcgcagctacgaaacattctcaggcttaccgaatcctccagtgctcctacttctcatgtccgtacaaagccgtcgtccaaccaaagagtctccactcggaatctgggtcgggtcgtcaaacccatcaaccacaatgcccagacttcttcaggtttgtttgagcgaaccaattactttgaaatgggcttttaacatgattcagaaagcatcaaactttcttttattggcataaaccgttgatttttcattgaattggtgaaaagccaggtggattcaccgggatttagagccgtgggcaaagactggggtgactaaagagcacgtgaagagggcaaaagcgaatgctgcgtttcgagtggtgatactatcagggaagttatacgtggatctctattacgcatgtgtgcagagcagaatgatgttcaccatttgggggattctgcaactgctcaccaagtatccagggatggttcctgatgtcgacatgatgtttgattgtatggacaaacccatcatcaaccagaccgagtaccagtcctttcctgttccgctttttcgatattgcaccaacgaagctcatttggacattccttttccggattggtcgttttggggatggtacatttctctctttttgattgacccttgacttgtttactcaacgcttcttttattttcgagtgttgtgattaaggttggatttttttttaaggccctgggaagaagagtttggggatataatgcaagggtctaggagaagaagttggtactacaggggatcctctaggtgac

SEQ ID NO: 57220 - DNA, 324 bp, Arabidopsis thaliana landsberg
gagcgaggaaacaaaccgggaggtgaagaacagccccagggccaaccacgccgcccaaaggaacaagggcccaaaaaggagcgacgaaaaaaagggagaggcgacaggacaggccagaaccaccccaggaagcagcgcgagaaagagagcggacagacaaccggacgccagcgcaagcaagcccacaaaagcagcaccgagggagaacacacagaacggccgacgaagggaggaaacggacgagacaaaggcggaaaagagaacgcaggcggcaacaagcggaccgagcacgcgggaaaggcagacacaaaacgccgagaccag

SEQ ID NO: 57221 - DNA, 304 bp, Arabidopsis thaliana landsberg
  unsure (1)..(304): unsure at all n locations
aaatttttattccacctccaattttaactcanacnnanctcccttttttttatctatcaaactccttacaaacctaaatacccaataaacattagctctcccttaaaatcattttatccatccacaccttccaatacacatacctttctacaacttcactccaatcactatccctgccttacacacccccctcctttcaattaaaataacgacttcaaacattcccatctcccatacttttacatgcctattttacaaattccccttaactaattcaccaacctattactgaccaaccattact

SEQ ID NO: 57222 - DNA, 193 bp, Arabidopsis thaliana landsberg
ttccaccaacaccaacaattgctttaaaccaaacatacattctttaacttcaaatgaataccctccattctactaacaatcactaaccttgtaaaatactcacattttgactgcgttacacccataatatatcactgcattaaacatcctttctacatacaaaatttcttaccccattactcccacacatctc

SEQ ID NO: 57223 - DNA, 1476 bp, Arabidopsis thaliana landsberg
tagaacttgctgcaacatcattgattcaacctaagaacatacaaaaatagtggtcactgagaacaagaaaacaaatttgtgaggaatatttacatcatgtgtttgtcatcagacgttagaatcaaaatactatccaagcaatacaaaccattttttattggttgaatccttgcctttgtgagcatcatgatctcttgttccctgtgatggatcaacatcatcaccttccaagtagtctgagatttgcatcataggtcaatgatgatgatttactttgcagcactatcttgaagctggagtctccgagtaacaacagagagacctgaaacttttttcacctgctgagtttcgcgttttcattgcagagtctggtaacttcttcagccaaattctgaagttctactgctgcagcagacgccaattctttagcataagaagcttcttcagtgagtttcttgttaagttttccaagctcatctttttcctcaatcaatcgcatcttctccttcttcagattctctatttccaatgcctagtgagtagtgatgtgaacaaacccccaaaaatgtttatcacaatgatttactgtgtcgggtagatgaatgaaggagcaaattttgtatgggaaagatacctgagagttgagagctgtttcgttgttgatctctttagtctcttcctgagcaaatactctatttaagctcatcacgctggtcggtgttccagctccagagtagatttctgactcctcacagttatgaatattcttccctgatgattcgtctcctgcgattttctgtgttgattgtctctgggctaacgaatctagttgttgtcttagtagaatgattgtctcttgcatctcagcgttttctgatttctgtgtatattattagggtaataatgaacttcaaactggtagttctcaacctttcacacattgaaaatacagaaccattatatgaagttttagcttacagtgatctgcagctgctcctgaagtatcctattgtctgcagactttatcttgaaaaaggcatttcatagcaaaagacattgtcaccgagtcagcgatattctgatctataacaataccgagtgagaagtaatgagagaaaaaagaaaagaggatgagtacctcatgttcaaatattttctcatttagttgcatcgtgagcttcgacagaacctatatcaagcaaacacgggaatattatccaggaagtgtattgaaatggattcatataagcagataatcctgaatgaaactatttctacatctaaactcttgtttctgttcttgatctgttattgtacctgggacattcctagagaatctgaggcataaggagtcattccgaaaatctcaataatttgttgctcgagaacacgtatttggtcctttttttcgctgattgcatcttctaattgctggaagcgagtcctgcagtcgacaatggcaaacatgaaagaagc

SEQ ID NO: 57224 - DNA, 1268 bp, Arabidopsis thaliana landsberg
agagggcttcttgataacctcgaagctcactcattctctgattctatgtattggaatacagaaatttaatgattagttttattttttctgcaatctcataaagagttataattgtaagcaattagtcaaaatatcaacattcaaatacctttgcattattttttgtagcactgcgtgcaaaaggtttaataattttcaatcattagtttgagtatataagctgtaatttaatcagaggaaatttgtatatttggttttgaaattattaaaaaattaaaggtaagagagagaatagtgtaaagatgtgaatgtagaatgaaatgattgaaaaagagtatgaaagtgcagagagtgtattgtgtaatctcatgcttttctctttttcctatttgctcatgctttctcttgtttcagctttcgtgattacaacaacacttctaaattcccttttttttttgggttatttattttaaacccaaattaaaaataaaataaaaacattcttgtacaatgtgaagtgagacaatgatcagctctatttttttttcatgaaaacccctatttttacctaacattaacaaataaataaaaatggaatggaaaatgtggtccagaacaagaagtgtatatcgaaatgatttacttaaatacctttaactattactccaatcctattaaaattaaagtccatcagctatgatttacaggagtggacattctgatattttatctaattcgataaatgttgcggttcattccaaatttgtacctatttaaaggtaaaatatctatatagtcttatcgaattttggagctaagattatttttaattcctaaaaacatatgtttagtgagctagttagtaaatgaatctaatttttttgttggttaacagaaaatatcacatacttacatagtgatttcaaatactaataaattgtttcatactatatgcgtatatcctatatggactgactggtcagacatattgaacggagtggagtctttattcacataacctaaaaataactttttttgatatgcatgtgtatctataggccaaatatattttagttctaccacagaagttaaaataaattgtattagtaatatatttagtcctttgaaagtgggaaacgaaattagcctcacacaagcacagtgatgattgatttcttcttcttttttttacccaaaaaaatccattttttcttgtaatttcttatttccagattattttcttcataacaaaaaaataaagaaaagaa

SEQ ID NO: 57225 - DNA, 999 bp, Arabidopsis thaliana landsberg
tgagaatgcatcaaaaagtcctactatgctttatgattatgaactatatacagtaaaaacttgacgaaaaaactacattaggttaaactctaaagaatgttttggagaatgcacccaaagtcccggcatgctttatgactttgtgaccagtccatatacagtaaaattgatgaaacaactgtacatttatttacttcaacctcgaattaactgcttcagtagctcgtgctcaatcacagcttttggcttctcgaagaggggcaagtacaatgattgtaaatcaaccaagattatttgacctcttttttttatgttatttattggttttataactactcaagcattggaactagaaaaccagaatttttacccattacattccattcattatttgtttcattctaaattaaaaattcatcaattggcaaataactagtagattgttttatgttctatcttatctgatatctcaacagtaggattcttgatatgcaaatcgaaccgatgatccttctagccattagataattaaagctaaccgatcaaacaaattgtaggccaaaccggtaaaagttccaattctgatacacttgtgtcatttgtatctatgtaaaaaaatagttgtaattttacggagggcataaaggttgagaggtgggctgagagtcagagtctaatttggtgaagtgtatgtgggtgttggaacacgagtgaagggtaaaattgggaaaacaaaagctttaagtataagttaagaaagtagcttaccgttaagaaaaagaatcgtaaaagccaacacaacaccaactccacaaactcacctggcttgccttttctttaatttctaacggctaaccactaaaccctcttttaatgggcttttagcgaatcaattatatggccataactacaacacccacatctctctccgtacgtacttaatgatcctttagattgatgcaagtctcacaatcgacaaaaatttgatgtaagtatcct

SEQ ID NO: 57226 - DNA, 1532 bp, Arabidopsis thaliana landsberg
tttttaatcctactgtatttctcaaatctacaacctttgatgattttttgtcatcaccaacttttttaaaaaaataattcattttaggacatttcaatctcaatggcaataattagtaatttatacgaatataagtttaaatggcttaaatgaaccataaccatgatcctataattataagtttcctccttgaggtctgttacacacaaagagggatgtacatgtcaccagaagcaacaacaagaccaagacgcaactaaaaggccaaaacaggtgaagagcaaaagatttaatcctagaaaaattacaatgtactaagacgaaaaatttggaacctttacagagtatacccacggtttaccgatttctggttttctttccgataaccggctatgtatttcattttgtattatatacaaggcattggtcaaacctcactcgaaccaaaaaagaaagtgcattcataactgactactgaaaaaaaaaaaaaaaaagaagcattggtctcaaaaaagattaatttttgtttggctaaatcaaatttgacactagtgtcttcctcagtgcgtgtgttaacaaaagtttataagttttctgggtggcgagaaaccaagagaaaatctcgtgaccctgttctctcgggcgcgcacaaaatatctcttcttcttcgtcttcctcctccaatcgatgtaatcacacacacacaaaaacacacatcttttccttgttttcgtaggacctagtagatagcgagttttgcccccaaaacagcgatcgagggaatttatgagcacgagatctcgattccccatacacgtaggcctctgcttctctctcttgttcctttgttcctttctttattcgattttctgggtcccttttgccctgtttttcctctgtctcattcccccaaaatctttcggttttgtttttatacaacttgcaaccgttaatgttcatcctcaccgattgatcaccttctcttttccctttctgggttttgtctctttcgaataaagattgatccttttttgaaattgttttggtaatcagtagggtctggaatcgaggcacaatgcaaatgaatcctgttttgaagctggctcttgggttattacttcttagctcaggtatgttatgtagaatggttttgtggagattttggttgataaaaaagctggacttgtttctgatgttctcgtaattggcaaattatatatcagttattggctcttttgcggaacttgattttggtcattgcgaaagacttgtgaaaaagtgggctgattcttcttcatctcgtgaagaacatatcaacaaagacaaacgctcgcttaaggatttgctcttctttctccatgttccccgaactggaggcagaacatattttcattggtgatttttatttccctttaccaaaaagtttttgagagattcttttatgattcttgtctggttaagaaagtgtttgtgctcttgtagttttttgaggaagttgtatgatagctctgagcagagtccgtctgtgtgtc

SEQ ID NO: 57227 - DNA, 1021 bp, Arabidopsis thaliana landsberg
aactaattggatatctggttaattagacccttgtgatcctggaaactattcgcttttgtcttttatttatgcagcagcagaggattgggaaggagttgctgacataagatcaaagatgaagagtatgggagtagagaaaccatctggagctagttcggttgaattggaggatgggatacatgaatttacagtgttcgacaaatcacacccaaaatctgatcaaatatatcagatgcttggtagtttaattgaacctccagatcctggtgagctggttgctgttcgataaactgcttagtttatgtccagatcattaggtattatatcgattataggctgtgagcatcagcactgtggcctaggccaaaaatttgtagttcattttccaaaggaacacaaagatggttttatccttgtaacgagttcgagtactgtatatagagcataatttataaatcttgagatcaatttgattttgcaatactaactcccgtctccagacatggggtttctggttcttaatccaataacaggttctgtgaccaaccttgaagatgacagtaacaagagaagactaggcaggaccaaagacattcaaactcccacataacctcattgtgagtaatattgtgacttcgtgaaaattccactgatgatgtattgtcggtgatgtattatcattggacgtcagtgtgatgacgtattgctggtgatgttacctttggatgaaccaactagttatttagaatgatgtttagatggtcaaattagaacaaaactcgtggggtttattttattacaagaatcaatgtcttaatgatgttgagttgatctcttaagtttcctttttgtagtgatattcccattgaaatagtaataaaataatggagaaaagaggaccaccaatagtgcttccttgatttgttccatccacaatagatgactttgatcataccaaaaaaaaagtctaaacccgttataatggtcattcacttgttcttaagacccttttatgaatgat

SEQ ID NO: 57228 - DNA, 397 bp, Arabidopsis thaliana landsberg
  unsure (1)..(397): unsure at all n locations
gaaacccagaacgccaccagaggaggacagcgccacgccgattattagggaccgccaccaggcacaacgcccaccacgcaagagcgaagggagacgagcaagccaaccaacagacacggccaaaaagaagcggccgggaaagcgacgggagacgcgcacaccggggcaaagcgcgaagaggaagccaagagacaggcccgcgcgaacagaaacacaagacagcgcaagggggcacacacacacaggggcaaccagagaagagcgaggcacgagacagagaagcccaaccagaagcaccacagaaggccagagaagacacaaacgnacganacacaccaagcgaagacagacgaaagagaccagcaccagcgacaaacgaggggcgaaacacaccgca

SEQ ID NO: 57229 - DNA, 233 bp, Arabidopsis thaliana landsberg
  unsure (1)..(233): unsure at all n locations
gcaggcagccaccagcngagggcgggagacgacggcagacagacaaccaaaaccgaccaagggcgaaccccgcgggaacacagaaaacgccacacggaccgngggccgacaccacgcccctacaangacggacagacagggnagggaggcagcgacgacaagagaacccaagcggccaangcacaggacggatcgcagaaagggacgcgcaagactaccggccggaacgcaag

SEQ ID NO: 57230 - DNA, 398 bp, Arabidopsis thaliana landsberg
cagagaaaaagccaaacaccccgaccggcccagaagccgggcccacagctaacaagggcggaataaatacaggaagcaaaaaacgcaccaagggagaaggactaaaccgcaacggaccgccccgcccccaccggcggcgagggaaaggcaaacggaacaaaccaacgaacgaggagggcaacaccacgcgcacaacacaaggggaagcaacagaacgccgagcaaaacagcgccgacgaggaaggggcccccagaaaacacggaccaaaacccgagaaccgtcgaggaagcgaagaaacgcagacagagcccgagaacggcgacacgacaccgaacggcgacaagcggcccgaggcaaggagaaaagacaacaccgtcagcaacaggagaagccacag

SEQ ID NO: 57231 - DNA, 520 bp, Arabidopsis thaliana landsberg
ttaattttttactaattgcaaaccgaaatcatttgggagatcggcatctcgctaatctttatgttgtgctccttctcccgtgcttcaggaccaagaccctgctcctcctccactgacttgacaccaatcccctgcagggcagaccaaatcagagcaccaaatcaattacaggtggacgccaaactaaccatcaagcttctcgattttccggtcaaaattgccaagaaatataagcaagaacccaattgaagttcaaccagaggtataatcatacacttctttatatagtttactcacatcttgagctggcaagaaattgaatacaaaaataggatataccccttgctttcgaaacttcttcagaataaacatggattgctaggcttaaatattaatcttctctccgtccttaatattaatcttttttctagactaacaccatttgccccctcctctatcttacgtcaagctccatttctagtcttaagcggtagtcttgaactactattcatgcggttga

SEQ ID NO: 57232 - DNA, 1229 bp, Arabidopsis thaliana landsberg
aattcactcgaattttaggtagagagagaatgataaagctgataatgctttcttattacgaaaccgcgttttacacatcaatcaaactcagatttgtacagaaaagtatatgaaaagaaagagaaagctatacaaatgaaacaactaatcacctcactgctgtgtgggccattatttaagtacttcctcagcaaataaaatctcaatgtaccttcctattcacatttcatgtactaatgtaaccatgcatggtgattggttcctccacctaaagatataagctatgcatatcatatctctcccgtttctcccgtttctatgagcaatattattgtgaataataaaatacatatgatgggaaaacaaagggacaagaagagaatataccaattctgaattattattttttaaagacttttttgccacaaaaaaatgagactcttttagaaaaaagatcgatccacttcatgttaaaaaatatgtgtataagaatgaataagaaggaatgagtaaaagaagatagaatgaaatgaaaagagagaaattgtcaatcgacttggaaatcaaggaagggaaaagaagagttgttatcgatgagaccatccaaatcccaatctccgattttagggttttctatttcccaagaaccattctctatccccaacacattccctaccttgaagctctctgaatgacaaagatttttgctattgaagcaaggatcaagggcctgtaagtttaggttgttgcttgtactacaagcaatgacgttggtattctccgaggggggaatgaaccaatcatcaccttctactgatactctcttgctaattggatcaagaattgtgtttccataatctcctaaaccattaacgctgaacacattcactgtgtttcccatttggtgatatccgttatccggcactgatatcatcaagggatcataaagttggtttaagcccacactattaaccattggtccaacattgaatggggaggaagagtccatgcgcatggtgttccccactgtcatcatgttttcatcatgatgatagtcatccatcaatgaagttgagttgcctcccatatccacatgctgatctcttgggtccaaggaattactattactattgttaggtgatgatcctgatgaagtattgttgttgctgttgttcttaagccgcttcttcaatgtcgagttccaaaagtttttgatctcggtgtctgtt

SEQ ID NO: 57233 - DNA, 868 bp, Arabidopsis thaliana landsberg
  unsure (1)..(868): unsure at all n locations
aaagaaaatgttaaagacaaaggtaaagaaacttcaaaagaactctctctttaaggaaggtcagatcacgatactaaaagacacgcttggaagcagacattttgatcttcttctctccagtcctgagttctcatataatgatttcttagtccaataataaagacaacacaattaacaaatgtatatacaggtgtctgtttctcgttcttgtttctatctttgttgcggtttggtgcttcatttcccggatgaatgaacatatgaactcaacctagctatcctataaggcgacgaaatccttcacttgaaccggcttcgtcattgactctgatcggcaaagattgtagacatgcgtggcgatattatctgcttctagagttgtataacggaggctctttttcaacgttgtaggagacaatatatagtttcgtgaccagctatcactttctttgacggcttcaacgtccgtcaccgtgagaagataaaactaaacgctaatgtggccatggctgcttatgagattgattcatgagtatggctcggctctatctgcgagagccacgtctttttcttccctaagcacttcttgggcagtccatcgcatgaggtagcggtgatgacgtggaaagcggaagcaatctatttccgtacgtttgttttaatgttcttgagaaaatgcttacatttttcaaatagccgtacgtaatccgcgtgcattcattcgaacataatccgcacgttgaagtggaagcaagtgcattacttgcagagaactgatgccattntcggcagccacaaagtctattagagtaactctagaattctacatagacaacttcattagaataagcaatacagacccatcaca

SEQ ID NO: 57234 - DNA, 441 bp, Arabidopsis thaliana landsberg
  unsure (1)..(441): unsure at all n locations
ccattacctttttccttttttaaaaaccncccttttttctttttggggatgtgaaaaatataaaacggatgatcacaattaacaanaatctccccttcctaaacaaactcccatcatccttattttttacatttatttaattaataccaacattttttaaaagaaacattcacccacaactttccatgccatccatacattctttattcccttgcttacctccaatttataactatctttttttttttcaccaactctcttattttctccctaattcaacactttaactatacactatttacacaacacgagtggtcatcatctaacaaattctccttatattcttttggttctatatagaaagagtcattgtccataaatcacatttttctctatgaagattgtcactcaaaccttaccttttaatgaacttatgacatt

SEQ ID NO: 57235 - DNA, 422 bp, Arabidopsis thaliana landsberg
  unsure (1)..(422): unsure at all n locations
cgcggacagagtccatccacaatnnnnnnnnnnnnnnnnnnnnnnnnnnnnnnnnnnagctagttattggttttatgtggcgtttaaaaattggctatcccctatacccaataataaagaatatgcaaaaaaatgttatcttaaatgaaaaggcaatcaaacagaacacatcaaggctattacctagttgcatgaaggagcaatatctatcctaaagaaagtattagagatatgtatagtctaacacatgtatatcatgttacttgtacttcacgttgtaccagactacatatatgaaagcaaccccttctaattaggagtaagcgcgtcttccctaattctctctacattggtatcaagagtctaggtctctctacctaacctttttgaccatgtcacccgttcacaactgtgtgcaccca

SEQ ID NO: 57236 - DNA, 497 bp, Arabidopsis thaliana landsberg
gtgctattaagctatcttatacatacagtacaattgaaaattcaatgcatgtgaactgttagttagatgatattgaataaaaggagaagattaaagtttggatagggcactgatagttaatgcaatgaaactatgtaacgtacatagactcttttatattgagaggatctaggtttataaacattgtactgatcttaaataggcggattatgttgaactggtctactcgatatatatctatatatacatttacagtaaaagtttgtgtaaaaaattcctaagtagattattattaactgtaaattctttacaaattctatctgaaccaaatattttatatgtaaaaatatacaaatctttaatttgcattaaatatttcaattaattctttactaaagagacctctcgggtcaatatctactctacatatacataaatgtaaaccagtcgaagaaataacttcatcaaaaaataaccagaccgaaaagtcactaggt

SEQ ID NO: 57237 - DNA, 1111 bp, Arabidopsis thaliana landsberg
  unsure (1)..(1111): unsure at all n locations
ccgaaaccttgatgaatattaatattctgattcattacgctatttgttttttttaagtgacaatctttggaacttgaagtggaaagttaaaggctaaaaagaggagccgccataaactttccacgccggcgaatatttatgtgattaatatttctctgtgtttgtaattaacaattaattcatccaaaagaaaaaaccttatgtggtctttttggccttaaagcataagtgattgactaatgtctttattagttatctccttgaaaaaccaaaagccaaaacaaaggagaagaagaagatgctgaaattcgatgaaccaaaatgcacaaacccatcctgtttcttctgcagcatgaaagataccaacccgtttcgtcgaagatcaaaactcgctgcaatcttcaaagagattcctcgtacggagtcaaaagaccatgtcttggtcttgagtggtttgtggaacatagccatgtccgagcctgacgatcctgagttcccgtcactaggtttgttcgagtgtatgtcaaaactcatacataaatcgatcaaaaacagtgtttggcttctcaaagaccagaacatattcattccttattacgcagctcatatcattggatcgtatgttatgaacaaggaagatttagctgccatggcggttgattcaaaggtctttcttgttcctgctttgttggagcttttgagagggaagatcagttgggttgagcagcgagccgcagctcgagcacttggtcatttagctagccatgagaagagttttgaagcggtttctttattcgaagaagaaattgtgaagcttgcaatggagatagctactaattgtttgaagaatgtttacaaaagctttcttggggttgaagataggggtaggttaaagtatcagagcgatttgttgactagagggcttggtgggtttgagacagagaatcaaaaagcagaggaatgggggattcagctacaatgttggtctttatttctattgaatngtttcgcatctcgaagtaagtctattgaccgaatctgcgagggagggttcttgaagaaagtgatcgaaatgtggngtggtttagtaaaccggaagtctccgggagga

SEQ ID NO: 57238 - DNA, 220 bp, Arabidopsis thaliana landsberg
gcatcggcagcaggcgccgggcctgggcgagcgcgcgggggctgctgtggacgcgcgtgctggtcgtcctaggctgagcgcgcgcggtgcatggactccccccttgccttgatcccccgactgtgtgatgtgcctctagatcttctgggctgcagctgggcgcaatggcatgctcgctgcgtggtggagtggcgtggaggagagtgctgggaggcccatc

SEQ ID NO: 57239 - DNA, 568 bp, Arabidopsis thaliana landsberg
  unsure (1)..(568): unsure at all n locations
cttttatgatttggattccaataaaataaatgatttggctcgggggtttctagattcttcacttgaaaggagacagaaaggactatgactttgtgnnnnnnnnnnnnnnnnnnnnnnnnntcgatgttgtttatgatatcaacggtaacagctaatcactttgttcttactgtaaattcaagaatatctagtcttttgcctttgacaacaaagattttaagatttcgtataatttatgctctctttttttctcagggagggaggccgaagaagttgagcccatactagaagcactacccaaactagagcagtaagtaatacataacatctatcaaggcctagcttgttcatttggtttatagctttcaaaacatagcccttcaaaatttaaatcttccgttaatgttataggtacatctactgttcttcagctggtgtttatctgaaatctgatatcttgccacattgtgaggtatgtaaaagatatcttattcttattcctggaagatatgagcttagacttttcttggatagccatagaatagatgattatgtacttgatcatatg

SEQ ID NO: 57240 - DNA, 478 bp, Arabidopsis thaliana landsberg
gtttagctatgcaactacttaactagaatacatacgtgttgttatattgtaattatctatataattatattaaggaagttttttagaagttcaatcatcaatcctttaagtgtattcttttttttcttttgttggctcttaagcgtaggcttattactttcagatttgttaacaatagcgactaaacatgattatgtttcgcttcgttgtaatcaataaaacttgtgactaacttatgttaattttgtagttgtctatcatcaacaaggactagaaaaatacatatcaaacacccaaaaccatatagttaaaacgtacattacattctgttttggcaatagtaatcgctgtattgcttacatatgcgttggagatttatcataagaggcagagatgtcagggctaatttaaaagggcagatgcaggtatatcttacagcatctaatattttgtaatatctgactttctgagccttttt

SEQ ID NO: 57241 - DNA, 1043 bp, Arabidopsis thaliana landsberg
ctttaaagttgctacaccatgaagaaagagccctaggggagacacatccacgtgactttggtttacagattaaaaagcaaaaccctaaataagcaaatcgaccataatctcgtaaaaagaacagacaaaacacaacctcatgtagaaggaacaatttctgcgcgccgccagtgttattaattcagaatcataatttcacgattttcaaccctctccttttaagcttcaactccaacatcataattttcccttccacaaactactgtataaatcacttttaactctattgcttattattattactgtaattcattattattataaattaatgaccattgattatttcccaaaacacaattaaagaaaagtgcgtaaagattaaagaataatatgaccaacggaaatagctgaaaacgatgacctttgaatttgttcaaaaataaatgaaatcaatgattttataattttaatttgtaaattgttcaagaaagttttctgaaatatattcatgtctttcacttaaaacaaaagaataaatcgacctttaatcaacagtatcaaaggacctttatactctgacaataagaaagaatggtgcaagggttaagataaaaatagtacatcataattatgaatttgttacttgtcaaaaagacattgaaatatgtaacttataactgcttttatgcaagtccgtagaaaaggaaaaagaaaagacatgtaagttcgaacgtggaacaagaacttcgttaaacgtacttttgctttctgcatctctcatagattcacaactcacaagtcaataaaagatgcaatgcaagtccattttttttaattatatattgggtcaggtccatcttaaattaaaaacaataaaatgtatattttattttctataaatacgtaatcagctatcatcacattcaggtgcctcacaaccctaagacaatcacagaacaaaaagaaaaattcttagctttaaaaaatttcccttaggtcaaccatggaagaagcaatcatgagactcgaaggtgccgagcaca

SEQ ID NO: 57242 - DNA, 1301 bp, Arabidopsis thaliana landsberg
ccagatagtttgaaaagcacaccttatcaaccacaaattaatgtgatgtgttaagagataaatatataacatattaacactcacaatgatttaaaatcttcaacttcttgaatataagcgttcagcgtatattcagtgaaatttgtgttacatatagaagtttctcatgagaaacagttcagttttaagatataagaaagtatcaatctaaaggtacatacaaatacatatttaataaaagaatgaaaaatacttttgtaaccatcaacaacacccatcaaataatacaaacaacaacttctctttctaatcatctccacatattataaaatctcacagcatctgtgtcggttaactcacatttcaatatattattcctatacagtagacacattaaatttttttaaaaaacacatgaggttagaattagctcataaaaatacaggccttataatttagacaatcacgattgacgtacatataaaatccaagttacctggtatcacgaagttcgatcgaaatcttatagtacatgcaatatttcgccccatctgaatctccatcatgacgtaaatgatcctctcctgatatttgtgacctcacgtcatttacttcaaataagtcgtcttcagcgtcatcatgttcatgttcattatcgtctccttcatcgtcttcttcatcttcttcgtagtcatcatcatagtttcggattcatcgtcttctagatcttctaattcatcgacttctgatagtgttacttcctcatcatcaccatcactttcttcaccacaaatatagtcacttttgatttcactcggaacattaacgtaccacccatcgtctaaatgacagtcgttattaccgctttcttcacagcatatcccgtcaatctcatcatcattgcaatttggagttagtaaaaccatcaatctatcaagttcgtatggtgtatcacaagagtatgtaccaagacacatatttagtaagctacgtagataatattcatttgagtcgactttttctgttgtaccaccagttgctacatccaaagtagtaaaatcaccaacatgtacagcgtgaccaatcacgtctgtatctaaaaagaatattatcaaattatatgtgataaatgtaaacaacgtaaaaatatccaattaacagaattccgataatatttatgttgatatccatttatttgccatttaatgaagaataaggaaactcataaaatcgatggttgaaatccaccgcgaattattaataaagatctgacggccaggactaactttaactaataatcg

SEQ ID NO: 57243 - DNA, 1188 bp, Arabidopsis thaliana landsberg
  unsure (1)..(1188): unsure at all n locations
gaagaatcatcagttttcagctaaaattaagtatgagtaaatagattaacattttgtattcacatctttggtaaagcatcttatgttttttttaactcgtcttatgtcaatttcataagtgagatttctaacacgtttagtcgataataattttccttactgttagtcagtcacaattttcattttgactttaaacatttattgtaatattcttttcttatgattaagtacatctctatttattatactttgctataaaatttaaaataagaaagaagattatcattaatcatgtaatgttaaaataaaaagtacatatgttcgtcttgttaaatgtgatatttaaaaaacagtcgtgttaattatgtgatatttatcatcaagagtttccaaaggcaaaagtggagaaaaaacattcaatcttgttttgcataaaaaggctacgtacgtatatgtttgtttgcaagtaaagttaggtgtgtctttagtctttacttatattagtgtcttagtgaatcattctttagcaaatcttaattaagtttccttaaacaggtgtcgagatcgtacattatgtggtgcgatttccatttagcattagctttttggaattattccctcccataaaaaaaagtgttgtattattgtagcaacaaaacttttaaggtttttaaatttggcttagttaaaggcgttaatgggaatcacaccctatatgatgtagcctatgcatgtaaagctaagctatagattaatatatataacccacaagtttaatagattactacttcttggttatttttaaaaagacagattaagaataggaattaaaaccaaaaatatccaccccggatgtgtatgcttgagatatagatgacatccaataacaaaaagagaggggttctctataatgttgaaagtcaaaaatgaaatttgtgactgactaattgtggttaattcgatatttagtgaggttagaatggatcggagttttgtaggagactagtgcggttgggagattgtttcccaccatagtttttttgtaagaaacgaacgtaatctccgacttcatttttgatacatattttctatgtaacgagagaacattctattacggggttaatcggcgagtaacattnntggatntggccaggtcaacgtttagatctgtcaaatggctgatcaacg

SEQ ID NO: 57244 - DNA, 407 bp, Arabidopsis thaliana landsberg
  unsure (1)..(407): unsure at all n locations
aaagacaaaaccacagtacggggaacaaaaaataataacaggcacacccaaagacaaaaanagggggagatatataaagaaacacacacgaacaaccccgcgggcaaaacaccgaaacccaacgaaagggcaaacaccgcaacagacacacgaggagaccagcaacgacagaaagaaaaaaacaaaacagcgcgaacgcaaacaaccaaccccgaacgccgcgggcaccaaacgacacaaccgcaaggcggganagcaaagacnccaccaaaancaaaaacaccaaacgaagncaagaaccgaacaaacgcccaaaaacaaaagagaaaagccgaaaacgccacagggacaggaaaagcaagagaacggngcaaaacccacacccggccggaacaaacggggcacgg

SEQ ID NO: 57245 - DNA, 1116 bp, Arabidopsis thaliana landsberg
gaaatgggacctttcttgggtttaggaatccgatggaaagaagacttccgatgttttgaaggcgtatggtagggtggcgtgggaatggaaccattcacgggtgaaggaatctgatttgatgaagaattcaaatgactgagacgtgtatgatcagtctcgaaagatgagattgatggaggtaagattggatcggcaaggagagtatataaagcaggaactattgtgaggacaaatagaacaaatgctaatgtaattgcaactcttggtgttctttgaaggattgcaaacaaaggaagctccattgtctgcttcaagacaatggtgtctggtcttgtcataaatatgtatgtatatatggtgaataatggtgagctcgtggtcatccaataactaggcacaacatttgaccatttcctgaaatataataaataaacctgagggagacagaaagtcaaaaaacttgatttagcttggtcattaggacaacattcgaacttgcgccaataatcctttgtcttcttctctctttagcatagccagcaagaagtcattgaggttgtcgataggaccgggcaagcaccagtggacacagtcgttgtacaacgtgacattggcctctggaatatggccgtagcggcttgggtgaccgtcgggtctaagccacatagcttgggtcgtatctagtaatcgtaaccttttccctttcttcttcgcttcttcttcagctctccaaaattcttccaactgaatcttgtgtagcttcattgtcgtttcgtcttgagtctcattgctcctataaggttgtttcctcaaacaatctcctccttcattccacaacccgccttcaaaatgtgacggtgcaaaacttcgtaagtacattacgcctttgaagctttccgactccaagatcgctttaaacgcagttctaaaagcttttctatacccgtaaaacattgtgaggtcggttatgtttggtaattgacaataatggcaaccggtgattgtccggttttcgtagtagactgatggccggtaatgccagtggccacaagagatgattacgaagtcaaaatcaaataaatcggctgtccaactctcgtctgcctcatcaaggta

SEQ ID NO: 57246 - DNA, 679 bp, Arabidopsis thaliana landsberg
gtttcagacttgcaccactgatttctcttctgttggaaacagagtccaatttacagttcttactgtggttacgatcgaaaacattattattagttttcccctgcgaatgtagtgatgtgcataagaagcaaatgttcttaatttataagagtcaaactctcgtttccggtagttgaatgtcttgcatgaaagaaaactcaggaatttcatactgtttgttaattgtttctggagatgtcttgtgaccattgtctgtggttcttatgtcttctcaacatcttctgcagactctattttttggagatttatatgatgttgaaaccaaaaagttggtggagcgacttgccaattatatcatatacaaggtagctgttcttactttgattgaaaactagactctgacatacaataacctacattctgtgttttgtatgagatattcttggtagtgttcattatttaaaataactgtgtcaggtaaacaaatggtatattattatagtgacagagtaatgggaaagagaaaaatagtttttgaagcctcagaggtctttacttagacagttgattctgccacattttcccttcatttcctcaagcacattgcatctatgtgtagtgttttctggatttgagttatttgcagacatatgtatgtattgtgggtgttaatagttgg

SEQ ID NO: 57247 - DNA, 1076 bp, Arabidopsis thaliana landsberg
tttcatcggataaatagtcagattttctttcccccttaagccttgacttttttgctcgtgagtttataaaactgacaaaactttgttgatataaaccatatatcctgcaactgatccaataaacaacattgcaatattattttcaaaatctcaaattgattcgttttgatggtgatcaactgatcatgatccaagcaaaactcaacagtatatattgtccatattgtttcattccaatactccagagtcaaaaccttgagctgcctacttcatcaaacttgattagcgcctaccatcaattgagctacgacacactaccaactcccatatagaagcctgtaactcgaaaaatgggttttgagttatagtttgtcacaaagctctgtgaatacattatactacatgaaaactcatcaagtcttttgatatggaatcttcagaaccaagaatagctttaatgcttttatagttgtgaagtctgttattattctattactgaatgtgtattctcctccagaaatatctaagatcttagatgagtcagtttagacgttttaaacagcaagaatgttctacttttttatgtcattttaaaaagcttaaggttttggattgtaagcatcgtgtggttgctagaacttccttccctttgcattattgagatagtgtactcgcaaaacacggtggcaatttaaccaaaacatagtacaaacacggtttcaaaattttaaaaacaaaaccatatacagtacttgattaccatcccaagacttacatattcttagatggactatgagtctatggctttttcttcaactactaccaacttgaacttctcctccaaaccaattaagtgggctttcaattggtcatgccttctttccatatcacgagtttcttctagccagcgggagtgatttgatggaaaggtggtcgcattcgtggagtatgcttttgtaagtcttgattggaaaagctgtaaacaatgctctttctgaaatattgagggctagctttggatcgcgccatcgcggctaactcttggcaacaccaatggcttccttgtgtcgtcttcc

SEQ ID NO: 57248 - DNA, 170 bp, Arabidopsis thaliana landsberg
cgacaacggagaaagggaagccaagcacgggcgaccacgcctaaagcacagggaggaggcacaccaaaccggaccccccacggccaggagcaccgcaaaaaagaggccggaagaagggacccaccagcccaaaaccgccagcgagcccaacagaaaacgaacacccgcgg

SEQ ID NO: 57249 - DNA, 568 bp, Arabidopsis thaliana landsberg
gttgtacaccaacgaaagcatgagctttttagcatagttagtaaatagtaacccatctatatatatatatacacaaacccgaaaccaaacaacattcaaaagttgaaaccgtttacattttttttttttgcgtctgtgtctttgacaaatgcagtgaatgcatgcatgtacgtagtacttcgaattatacaaacatggtggtattactaaaaaaaatcaaatttaattgcattaactttgataaagataggatgcataccgacccattgtaattctctactaaaataagtgtaaatttactaatggtaatggataactcaaagcgttacagaattcttataaatattgctttgctagtaacattttatccaaatgttgctttgttccttaacaaaaaaaaaaatgttgctttgttttcaacttcacgaaaagaaggtaaaagagataagatcgtgaacggaacatcaacatgttaagtctggctcagctccaaatgttgtgagttgtgacacaatatggaatatgtttcacttggttttttttcttatacgtttgaattagttttaaa

SEQ ID NO: 57250 - DNA, 799 bp, Arabidopsis thaliana landsberg
acatttggccgttttcaagaagtagatccgctggtaacaacgtgacccgaccgagaatgtcgtttggagctccgacgacccggaaagtaagcagtgcgccgtgttcacgtagcaactccaccggagaatccaaatcgaggaagtggccgagtagtcccagtcgtaacggcgtgcatcttggtcggaatagtccggtttggcaagtccggcgtggaggaggagctccggttgggaaaacgataccggaaccgatgggtcgggttgtgggtaaaagggagattcccgagacgcgtaagggtaaaacggtaattgagagcaataaagcaaaagtcttgaacttgaacgtgcctatgtgcatcggttatcggagccggttaagctgcagaaccgaagagagtagtggtggtggtaatagtaacattgggagtgacaacaataataataataacgccaacgctaataatcctaatcctaatggtttatttggctttcgtaatctcttcattaagaaagtgtattgactttatttgttttgttttcttttgtattatagtaatcttgtataagtgttcattttatcgaaagaccctcttattatataatctcgagggtacctttttattgttcttaatttcgttttttttttttaattgctgcttttggtgttagtacgatgtgtggatttaggtagtatatcgaatttgcttatatatatcatgtaattaagaactcgatgcttattaatatgtaactacttagattgttttcacattgtttagaaggatcacaagcttttact

SEQ ID NO: 57251 - DNA, 457 bp, Arabidopsis thaliana landsberg
aattttacctttttagccatttagtaagtaatgttttgggattcggataatattttctattaagatacttataaaaacaaaaaaaaaagcgatatatatattaaagcaagaaaaatgtaaatttaaaagaaaaatatttgaaaaaacaaaaaaacaaaataaaaataccattaggtcaaaagctttaataaaaatacaaaactaaaaaagctatggcagttttttgatctataatataaatttattacaaagggtgaataatttttgtatgatataaatgtgtttttaaaaaatattgtttctattttcaatgtgcaagtgtttgaaaatatatctttttataatatgtatattgacattctaagagattaacaaatgtatgtctttgacatatttatactcgataaaaaaaaattttgaaatgaaattgaacaagattagtaactagtcaacatga

SEQ ID NO: 57252 - DNA, 370 bp, Arabidopsis thaliana landsberg
  unsure (1)..(370): unsure at all n locations
ccaacatttggagtacttaaccganggacncaagcagacanggcgagaaccaaagcaccccgaaccgggacggcaaaccgaacaccagacaccaaggaggacggcggggacacagacgctctgcagaaaacggaggaccggcccacgcaactgcctgacacgcaagaagcgctaacaaagcgagaagccacacgcacagcggaaaggcaccctgagcacagatgccgcccacaatcaaagttaccgcaccgagaacactaagacaaccccagacagctgactgcaggaaccagcagaaagggaagctactactgagagcgcaaacacgagcagagaagccaaggaggaccaagaccgaacggaacaagag

SEQ ID NO: 57253 - DNA, 1245 bp, Arabidopsis thaliana landsberg
ctccatcacgttacgcacagtccaaccatatttttcttcaatcggtgaatcagtttaacggcatcggagcgaactgtgttttccaaattaagaacttctttgatagcttctcatacgttatttttcttcttctcagcctctctttgttcagattctctttattggcttgtttctctttcttgtattagattgaagattttatgagttactgttgtcaatgaattcatctcggtatggacttcttctgaatcttcactatgagtttttggttcacctacatcgttagtattgcttctacgcttcattctcacaggaagtttttctgaagggcccctttaattgatgtccacaaaatgcgaaggtgtttcatgatcttcctcgacatccatagaaaatcttcaatagaacttgtttgcttttttcctgcaatttcacatgttcgagcatccgtaccatcacctaatccaatagcattcccaccggttgctatgttgtcctcaaataccatcttgagatcatccaattattcaaaggtttcatctttgaattttttgtaacttggatgcgcctaaaatccaaaaacatatatattttagcataattacaaattgcacaatttacttttttattatcttattgatgcaacgttccacgtactatttaaaattgtattaaaaagccaaaagaaaaagctaacgtacgtatgtgaagcttacctttatataattattccacacctcatatgatgctgtaaaccgttttgtgtttggatcccatccaaacccggagctgcaactaagaagttcacaccacttacgtattttcccttcaaggtcttcattctgtttaggtagtgtttatgagttttgtcactcccatgtttttgattaacaataggcagtatttttctttccactgtaaacttgctgaacacaccacttgaatttcgccaacccgaagcaagaccgtctaaaagtaaatcaatcaaagttctggtttcttgtggactccatggaaggtatgattttttttcttgatcttgttgtgatttgctcttttttttttatttgtgctacataaaaactagtatgaaaagttagttaatataagcttttcgtttacctaaaggttcttatgataaatggtgatttgacaaatcttcgattaaaaaatttagaaatcttacaatttattgactcacaaaatataaatatgtatatacactttctattacgaacattgcat

SEQ ID NO: 57254 - DNA, 412 bp, Arabidopsis thaliana landsberg
  unsure (1)..(412): unsure at all n locations
agagagtgaaagaaaacccaanaaaagagagggggccgcgcagtgacccccaccaggtgagaactgaccaaacgggcaaacacccaggaacggccaaggaagaacaaaaagagaccagaacacccaaaggacgaaagccaaagacacggggaagggaaaaangaaaccggcccaaacnagccagaaagggggcaanccaggcgaagccaaaacgggagaaagccgccccgaanacangagcacagaccacacgcgcccaaaaggagacaaaccaccaaagggcaaaagaaacaaccacccgggcaagaacgagcaaagacgggcaagaacgggcaagacaggccaacacaggcgcgcccgaggcaaagnccgcccacgcgggcgccgaccgcgccanggacacacgggccgg

SEQ ID NO: 57255 - DNA, 1191 bp, Arabidopsis thaliana landsberg
caatagatagtaggagcatacactcctttttgtatatgggtcgcattagacaattcgtgggccgaaaatatagaaaagccttggaagccggaagtgtcaggttttggagttatttttggagcccagggtgttatatacgcatcgctgacatcaggcactaaagggcatgaacaacaatgacagggatcgccacttttcgtggtccatcttttagccagccaatatcaattattatagtccaactaaaattattagtactaaagaaatctcacctaattcccaacacaataccctgctttacttccccactctcaagtcctacatataagcttgctagtcaatacatcatcgttttttttcctattcttaaaacataatttaactcatatccttttatatacgatgtttaatttacacatctacttttttttacaaacaaaaaggaaataactcatatcctatattgtgtgtcatccaaattcgaatgcagagcagaaaccccacatggacagcctgagcctgtggaagaccaagcgtgcaccaacgtctgttctcttgctttgttattagaaactttttgaagtaaactatacaaataagtggaaagactgataatactaatatttgtctcttttggaaaatattttcaagtaaaaataaaataaataccaaatataggtgaaaaaaggttttaggataacaagaacgattatccacaaaggcaacatgaaagcagaaaccttttccctgcaaaagtgtatagtaaaacacactcataccaaactttcccttcttttctttttcttatcatctttgctcttttcccggaaaattccaaagatcaacagccgcagaaacatctcataaatcatgatgatgaagttctatacgttcactttcttaatctgcttgttctcgaagctccaaggtcactgcaaatcagatatcagccttggcaattctctgacgctcacttctcctctagaatacactccagggtttatggggaaagcttatatcatagagacagaatcatcgtcaacaagagaacctggttttaaagccgcgttaacaatggaatcaagcgacaaagatcatggcccatatttatgttcccttcaaattaacaatgacaaatgtaagagtttgagagctcagggcattactcaaagatgtacgtgtctatcaaat

SEQ ID NO: 57256 - DNA, 692 bp, Arabidopsis thaliana landsberg
  unsure (1)..(692): unsure at all n locations
atatcttatcaaatacatgtgtctacgcagaactagcaaaacaatactaatattgagtaaatagttaatttttttaaagagaaaatgaatattcctatttgataatactcataaaatatgaaattataattccaagctatgtttaatttttaataaaatttggtgaccatccaaattaacgaacaaaaaaacaatatccttcaaccgtttgattaaagataatataaatcaatagaaaatgtagtcatagctagtcattcgaatttgtatggtaggtcgatttgggaagttataataaaaagttattgataggttgatttgtaggtatttaagagtttttattttaaaaggtaaagttctttaagcaagaatgatatggcctacgaggaacctactagaccacaacatttcttactctattcccttgaagcaaatagatgangttctgttgaaaaacccataactctctgtatccgtttatagttgaaaaaacccaaatttctacaagtttcggagatgagtctgagtttagctttggatttctcctggataaatgaattgtgagatgggttttaatttgggaaattactttaaataatcattgaatcaaagtgaacatgcagttatactaatatattgttaaaagagagcatgcatgttatggcacataaatcccaactttatataggttt

SEQ ID NO: 57257 - DNA, 340 bp, Arabidopsis thaliana landsberg
  unsure (1)..(340): unsure at all n locations
gaagttgaagaccaacccacaccnccccccaaaaaagaaaagagaagcagcgcccaaacgggcgccagagcgccgaaaccggcgaccgagcgggacgcacgaagcagagacgaaccccacggcgggccacggaccaaagaacagacaccaccgccagggcaaccccaagaggagccacgcccaacaaaaaggaccccgagcgaagaaaaaccgacaaagaacaacaaaccaaagngaaacccaagacacgcgaaaaggaagaaagagaagcgaacacccagagacagagacaaaggcgacccagagaaagaaccgaacaacnaacaaacacacaaagacg

SEQ ID NO: 57258 - DNA, 369 bp, Arabidopsis thaliana landsberg
  unsure (1)..(369): unsure at all n locations
aaccctgaagcgagcgaaccccaattagaggctaatgacggcgccaaaancaggagaaggaggggaagataacgacacaagcgcccaccccaaccggacggcnacgacgcaaggggaaagcggagaaagcgcagggcggaaatcgaccaaaggcccggcgacgcgaatacgcaagacagcagcagacagcggaaggaacacaccatcaggagaaaacgaaaggcacactgccccccgcagcgcgccgagaaaagaggaagcgcagcgacgagcccacgaacagcccagacagatctcaagccagccaataagccggcgaagcgcccgcccgcgaagaacacagaagtccacaccggaatcagagagaca

SEQ ID NO: 57259 - DNA, 901 bp, Arabidopsis thaliana landsberg
cttgctctgtgtcaaaaaaagtttagttgcaaactttcattgaaagatgctgaagtaactgagtgatcctgataatctcattctcttgtactggatgaattgagcagagaagtcaatggttaaagaatctcaaatattctgatgcgctcataaaaaaatgctgtttacagtggaaatgtggagacaacaagagataaaacacaataacagaaggaaaattctttaggtatcttgctaacgtggacctacttacaaagaaacagaagctaaaactattctttctaggaagttaattcttgtaacatgccatccaatttgaatcctcagaacaaatcagaccacctccatcagtgcttattgactctgcagcagagcatggaagcaattctcttccttttcccagagaagcagcactttctttgtgatttggaatatcaaattcagtatctgtaatctgttgggatttcatttcaggcatgtggctatttgtttgctctactctcaaatgtgtccttgacactttatccagtgttacatgaggatgacaagaactcctgtcaactaaacctctctgaaactgtgagagatcaatagaatcagaagatgtggccaaatagtcgaagttgaaacttgaacggctcggctcccatgatgaagcctggatccttggtgacaaaccggctgactgaaacttcattgtcagtgattccaaatctgaaccaacatcatgtttcttttggatttcagcttgagaacatgagagtccaaaataattgtcgaagcttgagttggattcaggtgtttgaataacattctcactttccagcgtatcaacagataagggagacgatttgtctcctttcaaatgctcagaaggatctagctcacatgtaggggaagt

SEQ ID NO: 57260 - DNA, 637 bp, Arabidopsis thaliana landsberg
atatatgcttgtggaaaatatttatatataatgcttgtagaaaatgtttatatatatatatatatttatacttttattatttgtaccatattttattacgcgcacacatatatatatatatatatatatatatatatataataaattatattagaaattgaaaaacacatattttacatacaaagatgcttagatcaaattacgatctacgtttagtccttaatttagctcaggtgttctctctctccactatgacaccgaccaaacaagcttaatcgtatagtattgctcaaaaaacgtgatccagctatatatatgtttgctcgtactcgtaccatattattatattaaaatgtttgaaaacataacaataatcacctatatatatcagcataatttttgaagctctgcactattttttttagctttatactattttaccgattaataatataaactgtaatgtggcgaatagtttgaagcttgaaagggcacacttcatttatagaatgcgattatcatttttatgacttaggatgagtcccaaaagcctataaactgtggacttgcacgtgaaattaatcaaatccacaaaagtgatcgtctctttttccaaatgcgttgacgatgagggaag

SEQ ID NO: 57261 - DNA, 1613 bp, Arabidopsis thaliana landsberg
  unsure (1)..(1613): unsure at all n locations
attacagtaaatgttttattattattctataaatgatgattaatcactctttatagtataatgtattcaaacttcaaagtcaaagatcaaactggcaagtgttggggatggttttaatgatattttatgttcctataatatgtacagctgtatccatatctttttcatacagtattaaatttatatcttgactttcatttgtaatctcagtatttatatgaaataagatcaattatatacacaaaaatagataacgaaaaattaatgagtttgttttttccgtcaacagaaaaaactatgaaatggaaatgggtttaaaataaataagagaacatgaaacaaagaaaatagagaagtgggagtaaagactaaagaggaataatcacgtgaggcgggaccaacgaacaaaatgattactgtaacattgaaaaagtacaaccaaagctataaaaatactgccttcccaaaaaaaaaaaaaaaaaaaaaaagnagctataacaatactatttgcttaaacttattcaaatcgagtttaattagtgctaactgctaacaaaaacgtaggagtactatttgctaacattttgttttcctcggtctattatttagcttattgtttgtttaacaggctaaattctttatgcgcacatacaacaaaaatgtggaaagaaaaaaaaagaattggggaagagccaaaagctacataaataactaaaaagtgataatctagttaaaaactcaataattatggattgatggtggtggtacaacgaaaagggcacgtggagtggtgggttctgaaaagcatcacgtgtcaccacttttgacgaaagctaaagatgaaatgtctccttcttccccgttaaccaatatgcggaactcatgttctcttttctcatattcgtgttcttgtattgtactgcatttgtgggtctatggattcgctttgtaacgggcctagcatacagcccaaatcgtataaagcgtagacttatggaactgtggttttgcaatttattccccctctccagtctagatttaatatttgggcttggctttttggttttgagttcgttattttgttagtacatatcaggtactgattcaatattgtaattatgattaggtctctttcattacaacttacaagttactatcaaataggaatctaaaagtccctgctaaatgcttttgtgttatagaacttacaagtcgaaaatcttcaagattagtgagaaaaaattccacatggaaagttctataacaaaaaaaaaaaaaaaagttcatgaagtcattttttactttaaaatctgcttgttctactacacacaatgccttttacaaatggtgaaaaatgagtgagataatagtttgctctatatttcggcctaaaacagacaaaagagatgggtcctcaaggccacaacaacaagtattgaatcaaacctacacgcaccattcccctttatgtttccaacagttcatatcactattatgatcagtacatactatataattacgatttaagtgttacaatctgaatgtacaatatgatcttatcaaatacaagccaaacttaccgtgaaacggcgcggagtaacgggttatggata

SEQ ID NO: 57262 - DNA, 1120 bp, Arabidopsis thaliana landsberg
gtttccaaaacaactctaaagacaccaggaaaaagtctgtctgaaactgatcatgttccttatgaccgtatcaagaagtctgttcttggaactggatctcctgcagcagtaaagaaaagaaagatagcaagaaatgatgagaaatctcagctggaaacaccaacactaaagagaaaaaagatcaggccaaaggttgtccgtgaaggcaaaacaaaaaaagcatcatctaaagcagggattaaaaaatcctctattgctgctactgctactaaaacttctgaagagagcaattatgttcggccaaaaagattaacgagaagatctatacgattcgactttgaccttcaagaagaagatgaggaattttgtggaatcgatttcacatcagcaggtcacgtagagggttcttcaggtgaagaaaatctaaccgatacaacactgggaatgtttggtcacgtcccaaagggaagaagagggcaaagaagatccaatggctttaaaaaaaccgacaatgattgcctcagctctatgttgtctcttgtcaataccggaccaggaagtttcatggaatcagaagaagatcgtccgagtgattcacaaatttctctgggaagacagagatccatcatggcaaccagaccgcgtaacttccgatcgttaaagaaacttttacaaaggattataccaagcaaacgtgatagaaaaggatgtaagcttcctcgtggacttccgaagcttaccgtcgcatccaagttgcaactaaaagtgtttagaaagaagcggagtcaaagaaaccgtgtagcaagccagttcaatgcaaggatattggacttgcagtggcgacgccaaaatccaacaggtgataaacacacaagcaactttcatctataatatttttcttagatttctatcttttgaattaatactagttttacaaaatgcaggtacatcgctagctgatatatgggaaagaagtttgactattgatgctatcactaagttgtttgaagaattagacatcaacaaacagggtctttgccttccacataatagagaaactgcacttattctatacaaaaaggcgtatgaagagcaaaaggcaatagtagagtatcgaacc

SEQ ID NO: 57263 - DNA, 1262 bp, Arabidopsis thaliana landsberg
atcaatcccacaacagattttcgttagagatcagggcaatacactttcacaaacatagactcaaagatcaattctttactaactcttaaccaccccagacacaaactaagcatagagattagatcgaaagtacctctcgagatagtcacgaaagaaggagagtgaaggagtagtgagaagggaagggtcagacttgcattgatcgatgaagacctttagctcactaagcttcgttgaatccatccttttgagaaaaatctgcttccgatcggcgagagagagatagaaagaggaagagtgttggtttaggtctgagtgttaaaagtctcgtctttttcgttttaagtcgtgtttcgatttcgagaatttggggaacaaaaggaagtgaataaggcttttgttctagtaccttctcatttctaaacggataagcatcgccggttttggaccggcttcgtgcttttttatttgcggaaaatcgaattgaacaaaaaccaaaatgttgaaattggaataaaattagtttacaaaccggcttattttgttggcgagtttttccgtgggccactataagcccgttaataaggcccaataaagttaaaacaccctaaaataatgcagataaaatgttatagactcaaaaacgtacgtaattgttttgggttcacggattttctttcaaggaaaaaggaagaagaagaaaaaaattacataaaatttggtatgaatacaaataactaaattaaaacattacgaagacgagacttgcaagcaaaccaaacatagccattgatgcagcaaccgagttcgctcttcctccatttccctcactcttgccattgtctttaccattgctactgctgcttcctcctttcttttcttctcctccttcaccacacaaaaccaaaatccattaattaccatgaacgcaccattcttgtttgaaattgctataacatgaaagagttggtaacgtacctttactagtaccgtcacaagagtatttgtcgaaaacgccacatttagttgtgattgctttggagtaaggtccggtgatgtttgaaacggcggggtttgctatgtagttatcacaaagacaagtcacttgcgttgaggttgcggattttagatcggtgcagcaatcttctgttggcgtcacactaccggttgcaaaacacttttcgagcaggtcaggcataaccgtggcacattcaggagtcatctctggaaacatcgttgactgtggctcagctaatagcgga

SEQ ID NO: 57264 - DNA, 474 bp, Arabidopsis thaliana landsberg
ctgttactgttttttctttcatccgccaagacgcgaggctacggctctctcgatcccaacccaacagaaggaataggtatcacagtcaaatcttggccccaaccgtacgcggggctgcgtagtcctcggcgtcgtctagctagtcgatggccggctttgcttgccgcgggcgcactgtgcggtgctccgacgattcgtcgtgctcgtcaccagggcgtcctgatttggtgcagtgcatgtgcagacgaccggccggggtggtcctgggctccctgctctccgccgatacgtgcacgcacgacgcacggaacggacgtgtgtgcgcgtcagtcggtcgatttcgattctcacggcaccatcgattattggaactagcgcagcaacgtagcggggaattcaactcccagctagcagttcagaaacaagtgctgcgcgcggcgcgcgcgcgtacgtacctggaggcggcgagccgcg

SEQ ID NO: 57265 - DNA, 452 bp, Arabidopsis thaliana landsberg
  unsure (1)..(452): unsure at all n locations
tttttttttctgaaganactttagattacgagggggtgtggtgtttgtctgtctcctactctccttcctcggaaaatcgatnnnnnnnnnnnnnnnnnnnngtgacgctcgaatcatgccatttctgtgctgatcggcccatttgctctaacatctagcccagataactcttgtggtacacatcgacgcgacactctgacacgctacggcctctcggcggggcccggcaacagaccgggcagcagcacggcagccatggcgtcgagttcgaccctggatttggcgatgggccccggcgccctcctcccccgcagcgcggtcccgtacgccttcttcgctccaggaaggggaaggagcgcgagcggaacgaggagcatgaatctggcgctcttcgcttcctcctccaccggacttgcatgaacccctattgtaacacctctgatgagggaagg

SEQ ID NO: 57266 - DNA, 1165 bp, Arabidopsis thaliana landsberg
ctacacttcaaatcttatcaagattttactaaggtaaaattgatgtaccgtcgtttctttgtcgttgcaattttcctcgattgatgtatgctctattagtccaaattcaattttcattatccccaacccgtataagtgaattaacataagcttctggtaaaaaatgcttatcaaatgaaacatgttaaaagtcatggacacttaaacatattatcaggcctgacgtttatattgggccacatgctatatttgtaaaagactaattttatacgcatttaagattttgcttaagaaacgaataaatttgggctctaaaatgctatgggcccaataaactgcacattatacttgctccactaacagtaatacagtttccttttttttggtaggctaatctgaacagtttcctaataatgcaaatcaatataattaattaaagatttgtttcattcaagttaattctacctccgaacattatgttatgaagaagagaaagactttgttgttggacttgatgcactctttcgctcattaaggtgatccatacattttaatttcaaaattgttggcaggaactagattttggttttactgatttacaatgttattaactacaaaaaaaaacaaaaaacaaaacaaataagttatcatatctatcaagtctcaactattaacttgtggccttagcatctccaaatttctacattatccctgcttttggtttctttaagactttaatcccaaccttaattcacagtttttttctcatatatatagtcctcatcatgtaagtaagtcctagctaattttgctgaaaccactctctcatattaatttttcgtaatatgtttagaaattagaaaataaaataaaattagaagctatatataattaaagtttgttccactaaagaaaatctcaaaagtgtaaaattgtcagagataattcatctgtataactttaaagtaacggtgtatactgagttataacacacaactgacgtacgttactagaactatgttcgtgtataaatataaagatgagattccttaaagctagatacaaaatccccggccaaggtgaagcatatttaaataaacaatgcatacactacatgaaaatacttgcgacagacactaaagaattcgacacacatcgtattatt

SEQ ID NO: 57267 - DNA, 450 bp, Arabidopsis thaliana landsberg
tgagttgctggtgagtggcgttcgggtttgtgggcatcgcgagacctcgctggtgttgctcgcgggcgcgtctaggaggatcggacgtcggggcgacaggaattcctcatcggagcaaagaccaagccatccgtctgccttactccgagaacgcgcacgacaacacctacttcgtgatgagaaccttttcccaagaatcacattcattcctgcatcgtgtagaacctcggggtcagggagttcgtgcactacaaccgtagttggcgttggtgccggtggggattcgccgtggttcgtgcatcgccaccatcctacttgggtgcgcagagaagatgaaggtggagtcgtgtgatctagaatcgatggccacatataggagccaggtaacagttctggcaacggcgtgatggccgtccgatcgcgatcgtactagtctggggcgtgttccac

SEQ ID NO: 57268 - DNA, 1016 bp, Arabidopsis thaliana landsberg
gcagtggtcttagtggtggtgaaccttacaggagaaagaactcgtggtttgtatcctaatctcttttctgttctgctacgacttgtctgatcttgtgccgatatgaagtcaagagtgtctaacagtatcaattaagatatagacttagaagttttaacagttgacaaggtagtatattgtactaagcacctaccaaactttactgtctttatgctaatgaatcgaaatcacttgtgacttgtcaagtagttatacctttctttaaatcatcatccattgatcattggggttttacaggtatgggaggtcgcaacgttcaagaagtccgagaagacgttactgattgtatgatttggtggagagttctccccatatctctctgtattagggattccctctcttatctgtaaggaactgatgcatgactctgagtgttgaacaaatttttttctggggtttttgtagggtttggctgcttttgcattggtttatctctttatgcatttgcatgggattgttgcgtttaaacaccatgagatctgttttaatgctttgtattggtaaaaaaagagaaacattggatgaggaagaatgttttaattttcattctcttattgattcatatttaggtcagacagaatttgaaaatcaaagaccttccattacactagaaaaccaaatatgattatatagaaaaaatcaaagaatttataaccaatggcattatttcacactggtttattattctaggcgtaactattggtaacctaaatatgttaacagaaatcatcaaatgactattaaatattttggctgaaattttccaatcaatggcaatattcacatcgtttgtttttataggcgtaactattcgtatcctaaatatgttaaaagaaatcatcaaaggtttgatgatttgagatagagcatgtactttcttgctactcacaggttgcatgatttcatttgtacgaatcaatcatctatactttgtgcattgagccagtcccacatct

SEQ ID NO: 57269 - DNA, 1144 bp, Arabidopsis thaliana landsberg
ggacaatgaagcacgtcgaaagcttgtggctttgggcgatgataatatgcatcatgcatgttcatgagagatcacatatttaagcttcgcaataattattagaaagagaagataataatactgataattgataatcattacattactacacgagtatttaattatttgtcaactacaacgaattttttggcacacacatgtacacatatcgtatatatatgtataaaaattgtattacatgttatggtatgatgctagtatccgacttgttataaatttttgtaatcatgaagttttgtcaagttgggcactaaggtccaacggacatttttatgacatcaagtgtgaacttttgtcaatgtggattgtcaaaaagaaccaacattttcccccaaaatttacctatgtccccattgatttagtgagtttttacacccatcactacaaaaggtttgacgaactgttagaaaatgtaatcgttacgattaagaagacgagcgatgttggaaagttcatccaaattcacaacatgttttttcaacaaaacaaaaaaaacactaaatccgtgaaggaattctaaagcttcttaaacttttttaaaaagtaggaagtgtttgggctaacaatagactgttatgtactccatatatacagttttactgatgagcataatttttttttttttttttataatctgttttttgatattttcatttttaaacagtttgaaacttttaaaggacattgattcaattagaggtagggactattttttttttttgtagggactatttttttgtagggttgggatcctggaatgctagtttccagggtttgaatgtttgaacagtttcggatatctgaacaaatcttttaaagtttgagcgttaaaataatatcagccaaatacatatgggcggcgatatgtcgtcataacttctcattaaatggaaaatgttaagttatgtgttacatttttacatttaaatttgtaagattatgatctccatatcaatgccttattccgatgccttagatgttccggagctccattttagtgtctctaagttggaatttctaaaatttgcggaaataatttcacgcaaaactcctatatgtactttatatataactcaatgtatat

SEQ ID NO: 57270 - DNA, 1130 bp, Arabidopsis thaliana landsberg
ctatataatagtgaaaatttctacacacctctttgaggatattggagaacaaatgcttctgtagatatgtcaggaacacgttcacccaaatgaccatcgtagattgcaaacaaaccgagctcgttaccgtctattttcacgaatttagacacatgataatcctccattggatgattagctttccctttcactaagctgtaaccgaatttaatctcgccgtcgttatttctcccttttccagaactagtcgatgccctcccaaccacaagctacaccaaccaacaaagacaaattcatatctcataattgttcaacattagacacaaaatgtttaagacatctcttaaactcaacaagacatagtaccatcttaaccacttattggcccaagagaaaagaaaaaaaagacaagatttgagattacatacatcgtagtctgaagaaccgaagcaacataacttcgccatgagagtcagatgttccacaaaaatctactcaaagatttcaacaacctgcaaaaaccgaacttttcataaacccccaaaaaaacatagaagtccttttaataaaacaaaacacgaaatcagaaagaacccacataaggattacctcaaaatcggagaacccaggttccaaaaaccataaagaagggataattttggagcctaccagtacgcggcttgagagcaataccgtgaagaaagggttattgacagactctgcaaatgtactttattcaaaagtcttcgataaaaaaaccacggaattagtggaagacgacgactactacgacgagtagacttcaatttttgctgttttttttccattagaaatgaaaaacaaatctctttccttgttattgggtttcgttggttgacttttttgccgtgtcttaaaagcagagtcgctctggctttgtcctcttgttttcaatatgatttaaatattgttaactggtttagctgtttaagagagtaatcagacatgttatgtatccattcattagctaaacgacgtcattttcaattaaagaaaactcttgaaatcattaattagcattctcgattgttagagtttgtaactaatttgagaggtttttagataaaaaacaaattttcgattatggtaga

SEQ ID NO: 57271 - DNA, 115 bp, Arabidopsis thaliana landsberg
  unsure (1)..(115): unsure at all n locations
caggacccaacgacacaaaaaagaccgaagccaaacanaccaaaacacangaacaaagacnaccgggaaaaaggccaaaaaaagcggcaaccgccaaagccgggacgacacaaag

SEQ ID NO: 57272 - DNA, 515 bp, Arabidopsis thaliana landsberg
  unsure (1)..(515): unsure at all n locations
gatttttgttttttaagatggggccccaccagaaaaggccggggtatctaacatgggacctgggtgctccatctgcaaaaaaaggctcgttcggatcagccgatcgaagtcaaccaagcgccaggatcttgaccactgagggaagcatggtatagatcatccttcactttcggcgaacgagatgtgtgggaaggaacagtgaaaatatgggacacannnnnnnnnnnnnnnnnnnnnnnnnnnnntggacttgggggctcacctcataaaaaggaggcccgtcgtagcctcaaccatcaagggaggcatgcgaacggaatgtgtgggaaggaacgatgcaccttccatgatgaatccattgctgccaatggagagctcggagtacgatccctactgctgatacaatatggcaggccatgggcagtatcacggtcagaccctactacattcgatgcaatactctcggtctccccgaagacacgaagggagcaagaactaatgatgactgcctaacc

SEQ ID NO: 57273 - DNA, 511 bp, Arabidopsis thaliana landsberg
atttttatttcctacatgttaaactgaacttgcttggggtcgtgaggacagcgaaacgaacctgtgcagcatacgcaaatgacatgaaattgaggcagttcccagcagcaaaaaagagtatacctgaatgcagatgtagcattaaaggtgggctcgacttaaagactataaaattagtaaataaattctagcagacaggattacctattctccaagtctggaaatgcataacagattttggaacgaatttttcatttccctcactgttgttaattgaggaaagcttttctctctgccaaataaaacaaatatatttttttattcttcccatgtaaaacaacatcatattcattcacacatgggaattgtgcctagtgcaagtgcaagatctcttcaacatgtgattgggtgcctgtttcttcttatctactggctagtttctcatagccataaaacgggtgttccttctttttttttgcgcataaaaacagctacaatcacattgatttca

SEQ ID NO: 57274 - DNA, 297 bp, Arabidopsis thaliana landsberg
cgggtgtgataaatagactttaatagataacgagccctgacatgtttatggcgtcacaccagatgcctgatcttacatgaccacttgttatagaagacgacctacctactgggcgcttgtatagcgaccgctagtcttgaaaaacgatgtctaccggatacgttcatgatctgacctttatacctggagacactatgcctgcgctgcaagagatcaagcatgtgcgagtgcgagagcaggcaccagatggtcgtagacagctcgcgacaggctactatacgtctactttgggacata

SEQ ID NO: 57275 - DNA, 360 bp, Arabidopsis thaliana landsberg
  unsure (1)..(360): unsure at all n locations
ggaccgccgagacacctggcccgaagaacgaccgcatagaacttggaacaagccccnccccggacggagggggggaaactccaaacccagcgaccccagaggccccnccgacaccgaaaacaacgccgccgcaacggagaacgacanacgagaggacgagaacgacgggacgagcgngaacgccaaacncaangaaagagaaaacgagcaaagagagaacaacgaccccgaagcncaacacccacaccggaccacccccaccaccgnagaacacgacgacgcccgagngacccagagaccagaacgaacacccagacggacgaccaaagaaagaacgaagacgaaaggggcaaaaacgcc

SEQ ID NO: 57276 - DNA, 1177 bp, Arabidopsis thaliana landsberg
acatagtgacaacattattacaaacgtcaatatacctaccatgatctcgatgactcgatcaaatttttagaaaaattaataccttgtttaggttattcttttcttcaaagataatcttttacaatatatatacacaacttttttagttcattatcttcaattctattgcgttcttcttctgtacctttttacgacgcgttggtcaaacgctaacttaaagaggacagaaatatgaattatgaagtgccctccatagtcttctcattttctccctttttctcgatagccaaaattggaatccgcaatatcaaaagacaaaaagaatatagactttgcacaataatgtcataaacataatcttccacgttcttctgaccatttggagatttcttacaaagttaaaactagtctctttcacaacaacacaactacgaaccgtgaacgtacctgaacttaaagccgatactaatcagttattagttattacattctcccaaaactacccaatgaactgagttaaagctacaagtctaaggagttttaacgatttgtgatcattttgggactcttctcagtgctacgtatttgccaaacacatttttctcctgccacatgtgcgggatgaagaacgatctatacttagctggcgacagctctctgtccaaataaggcaacaccgcaatagcctgaaaaaagggtcaaaacaaccaattgaagaagtgaagtgaaatcaaagatggattctgtttcaggaagatggtttgattcctatacctcccatgtagataagtcgctgcctcgatactgatacggtctgctaagctgcaactcaatgaggaatgtacaagtttcgatgttctttaactggaaaaaatggaacgagtaaacaagccatgattaagtttatgtttagagatattttgaaggtttcatgagagaagagtgtgtgagtattacatattgttcttcggatgcttggttcttgttgttgaagtatggaggtgatgctgaagtgcctccaagtgtattgttaaatgggaatggaagaagaccgcggaatccatcatcgatccaccgtacttcgctaatgtagtggggcacaaaaaacgataatgggtatcgatgccattcacttcccacacatagaacagaacctgacatacaaaaccaacccaga

SEQ ID NO: 57277 - DNA, 1223 bp, Arabidopsis thaliana landsberg
tgttgttgattaccagccaaaaggcagtagagggagctaaccttatcatccgtcattgacagtgtttaagtgcctttgtaaagattttcagatttagaagccttaaagttcatgtacttggcaacatccttcaatttctgtgaagagttctgaaggaataacaacaaatacggatggatcattatcagactagatcccaccagtagctcaacgtttatacctacttatatcgaagagtgcaaaccttgtaaagaaatctgccagaagggtagaaccttatgtagcggtagtaacaaacctgcaacaaattttccaaaagaagacgcagattattatatgtgtctgtattggacagatgaagaagaaaagaaagaaaaagacaaagactttacaatgtgaactggatttgtaatcttccactcagcaattccagctcgaatgtaagtattcctactcacataaagacctgagaagaagatacatagttactttaatcaataaagatataacaagacacgatgttagtcagagcatacaaaagaaaacaatcacttggcgctagaatgtcgtgaagcaagaggatgaagaaagaaagattaccatcagtacgaactctggatctaagaagccacattttcctccatgatccatcatatttagactgcaagatcttatagttttcgataaccccagcagtctgccaagctttcaagcaggcattacgccagaacatagggtttcgaactgtgtacctccactttctgcaaacacaagctgctctacctaagtcataaggcatcatccgagcaaacacctacaagtaacatatccaagaatcaacttctccagtacataagaaaaacaaatttcagtacaatgacaaaacatagtataaagaaagctccaacctcgaaaagaagctcatcaggcaagcaacgatgaatcaaagctggatcaaaatgaggtttacggcttgtacttccgaatggtggcacaggcctcacatggactccataaagatctgtaaaatgtaactcattacaaaccataaacccaattcttgataagatgaaaacagacaagagaatgagtgttaaatgattagagatgtaccaagccaaggcctttttgtaataaagtattgtacagtcctgagccgcaaggcagattcaagctcagatggtatagtgagagcatctgtgacaaacaagcaccaatgaaat

SEQ ID NO: 57278 - DNA, 1810 bp, Arabidopsis thaliana landsberg
caggtcgactctagaggatccccgtgacatatttgctcaatcggagaaagtgaacggaaaaggttacaggataggccggtgatggaagagaggcaatctccctcagcgtccataggttcacacagagatagagagtgtatattgttttctacgattagagcaactatatatattacccaattaaaagtaaagttataacttatataagttctaacttacataagttctaacttctaacctatcccacaacaaaatggtttgtagtttatacccgatccactaacactctctcgcccacacctctagatcacggccacacatgtcgttcgtttaccctttaattattattttgttatttagaaaaatgaacaatgcaacttagttgctatcattacatgttttaaaatgtttattatctttgtctttaaaatttttagctaatttcttacactagaaactgaaaaacgtacaaattaacacttgatcaagatgtaacatgtgggccaaaccttagatttgccgtcaaatatattggacacgtaacccctaaccacatacctcctatcgcctgctaccacgtggattcattccaaacactttccggatctcaagccggtcggcaaagagcaccagcgtgaaattcgtcttctgcaccttcttcgtgccttgatggccgttggatccgaatcagacggccgatacacgatctcccttgatcttacatgtgaacttgtcatttgcgttaagtcaagtaccaaatcatttgtaaatatgtcggacgaggtacaaaaatgtgttgttatacaacaaaatatttaaaactcatataaaataaaggtatacaaatgtgaagagtattgcaaatagatttagctggttagtgatgttttgaacgtcatggatattgtcgtagtatgtgtttataagttgatcgttgtctatgtttcaatgtaaaaacagatttttggatgtaataaattagaaatgacaatcggttttaaacttcaattttctgataagtggttcattgaaatactcaaagttgatgatttatttttcctcgtttagaacttgatgatcttcgcaaagatcttaatcataatataattagattttgtttgtgagtaatccagtcatatatagaattaaacactagcattgtatgtttaaggcaaaattgcaattacaataagattcggtttcatatcaaatctcttgtttatggaacatgtatgtgtcttttttttttaagaagtttttttgaaaagaggtttggtgatagatatggtcctttttttttaagaaagggagggtataacgatataaatatattcttcttccaaaaaagagtgaagggcaacaaatacaagaagaattatgttgaaatcaggcgttaattaaaaacataaaattcagatgtgtattcatgctgcattgaaattatttatatcgaaaatgataattgtagtaggagtagaataacaaagacatacacaagtgcaactcggtgtaattagataagatcactgctttgcttctttgtaccttcgatcatgttcttgtataatcaagattcgtatagaagctaagatattcacatgtttttgttcttctaattatgaaggggaaccatctattattgtggttggggattaatggacgatttgaaagaatcaaccgaaactcactacatcgcgtctttgtgccttggatttatgtcttatctttttaaaaatttctatactgaatctggttttcttagcaccttaactttctaattaatatcagaatgacatcatcataaaccttt

SEQ ID NO: 57279 - DNA, 1608 bp, Arabidopsis thaliana landsberg
caaagagtcgtagacattcacctataaaaggtatagctttttgttttttacttcctctggatattgtttgtttaacttgtgttatatgtgtttagagtttttctttctattgcagtggaagggagtgaagaaacttggggagtagaagatgatgatgaccttactgaccctatttttgataccattgaggtcttatttcatcactttatatgtctctctctctttgattttaaaattggcttcttttttctatagatttgagattaacttctctttttcagggcaatggacattcagatccaacaagctgcttcgatgctgatttaagtgagtacaaaaagaaggccacagtaatcgttgaggaatactttggcaccaatgatgttgtctctgttgttaatgaactaaaggagcttggaatggctgagtaccgttattattttgtcaagaagttagtctccatggctatggatagacatgacaaagagaaagaaatggctgcttttctcctctctaccctttatgccgacgtcattgatcccccaaaagtttacagaggtttcaacaaactggtcgcttctgctgatgatttatctgttgatattcccgatgcagatgatgttcttgctgactttgtggctcgggcaattgttgacgacattcttcctcctgcgtttctcaagaagcaaatgaaattgctgccagataactccaaaggtgttgaggttttgagaaaggctgagaagagctatctagcgactccgcttcatgctgaagttgttgagaagagatggggagggactgataattggactgctgacgatgtgaaagctagaattaacgacttgttgaaagagtatgtcatgagtggagacaaaaaagaagcttttagatgcatcaaaggattgaaagttcctttctttcatcatgagattgtcaaacgagcactgatcatggcaatggaaaggcgaaaagctcaagtcaggctgcttgatctgttgaaagaaacgattgaggttggtctcataaactccactcaggtgacaaaagggtttagcagaatcattgattcaatcgaagatttgtctcttgacataccagacgcacgccgtattttacagtctttcatctctaaagcggcttctgaaggatggttatgtgcttcttctctgaaatcactctctgctgatgcaggagaaaagttacttgaaaactccagcgccaatgtttttaaagacaaggcgaagtcgatcatccgagagtatttcctttcaggtgacacttcagaggtcgtacattgtctagacaccgaattgaatgcatcttcgagtcagctacgcgcaatctttgtcaaatatctgataactctagcaatggacaggaagaaaagagagaaggagatggcttgtgtgctcgtctctactcttggtttccctcccaaagatgtcagaagcgcattctcgatgctcatagaatctgcagacgacactgctttggacaacccagtggttgttgaagaccttgccatgttcttagcaagagctgtggttgaagaggtgttagctccacgggatttggaagaagtgttaaatcagactcccgaggcag

SEQ ID NO: 57280 - DNA, 554 bp, Arabidopsis thaliana landsberg
  unsure (1)..(554): unsure at all n locations
tacggctccagggcccgctccccctgatttcttggcgttcctggatgacccaaaacaagtangctttccatacnctcaatcacgaaaaagacctctttctcatcattcccttttttattgcctgccttttctcttttggaatcgacattctctgtattcctcgtcactctctttttgcccaagggcctttttgaatattatttcccacatatcccacgctctttttaatacgtgatcgatcaggcgtggcgtgaccttgctaggtttcacaggaaaaacgacaaaacaacactctcttgtcgaaacgaatagactttagccatcatgaaggtttccgctaccctcgctgccagcgccctcgccgttggcgcctcggccaagaactacctcggcttcaactccggtgccaccctcgccgaccgatccgccaagttcaaggccgacttcaaggccgagttcgagactgcccagaacctcaagggcgcccccggcgacttcagcgccgtccgactctacaccaacatccaggcctactctcaggatgaccccatcga

SEQ ID NO: 57281 - DNA, 306 bp, Arabidopsis thaliana landsberg
  unsure (1)..(306): unsure at all n locations
ggccgacgcccacaaccccgagaagggccccgcaagccaaaacaacaaccccgagaggaagagaggacccaccccgaggacagaggggaacaaagcccagggnacgccaaggggccggccaaaggaggacccacacgaccaccgggacgaacccganagacgcggcaacccaacaaaaagcaanggagacagagaagacgcacacaagcgccggagggaaccacggcccagaggcgacaaagcacacaggagggaaaagaagcngccccaagacacaaacaccacnagggacgagggcaagaaggc

SEQ ID NO: 57282 - DNA, 1303 bp, Arabidopsis thaliana landsberg
aaccccctcgcattgtagaactcacagaggaaagagtattgaagcatttgactcattttttttatgattggggttttgggggcagcttataatgctactgtggagttatttctctgttgttgtgacagaccctggtggtgttccaacgggttggaggccagaattagacatagagaaaagcgagggaaaccaagctttgattggagaagcttcggttggagattcctcgtctcatggtgtaagatattgtagaaagtgcaatcaatataaaccgcctcgttctcaccattgttcagtctgtaagtctcttcaatgagtgattcttttctttgaatccggtatatgtgttttttagtagtgaaaaagttgtcatattgggttttcaggtggaagatgcatactaaagatggaccatcactgtgtttgggtggtgaattgtgttggtgcaaataactacaaatcatttctcctattcttggtatgtcaacttatcatagcatcgctgaacgaagttgtttttgatatgttctgttcattaatgttgccatgatcataattcattcccaatatgtcaaaaatgcagttttacacatttcttgagacaacggtggttgcagtatcactattgccaattttcctcgtattcttcagcgatggagatggtgatataaccgtatcaccaggaagcctagcagccagctttgttgcatttggtgagttcaaagatatagaaatctcagtttccgtttttgtttcagaacaccttaacgttaccatctgattcaaaaacttcactctcttgatttccagtattgaacatagcatttgccctaagtgtcctaggcttcctaataatgcacataatgttggtcgctcgtaacaccacaactattgaggtaaagcaacaactctcacttggttttgctcttaacttgggttctctcaggaatctccatgtcaataaactcactgaccaaactaatggtttctttaatctcaggcgtatgagaagcatacagtgaactggccatacaacgttggtcgtaagacaaactttgaacaggttcgctctccatcttctttgtttcactcgttcttcagtgactgattcgtttccccgctacttagataatatctttgacatcgaacacaatgaaagctttaaaaagtttggtctctattcctttgttgaatcaggtttttggaagtgataaaatgtattggttcgtgccattgtacacggaagacgataagaagaagttgccagcacttggagggttagactttacgagcaggtcggagt

SEQ ID NO: 57283 - DNA, 1100 bp, Arabidopsis thaliana landsberg
tagtttggaaacaagacatggtcaaaacgcaagataatacatagacacataatttcagtttaaaagttcttaaaactttaaagaacaaaacttagatgtagttttaaatgttaatttacctggttttggcataacacaacctaggagttaggaatgttccaacttccaatacttttacatttatcaaaacatgcgttaaatagagggaaaaaatgaatcttgaggaacgttttatttcttcctaatttgttggctaaaaaatgaataagataagctcaaccaaatggagacccaaacaaagttgacattgaaaaagtctaaaatttcaatgtttataaaatctaacaataatcctattctttagattggacaactttatgctaagataagagtaattcagaattctaactaaatcacactcactccattattatggccgccgtggaaaattcaacaaccaaatcttcaatcatataaatactttttcaactgacttaaaagtaaaaaaaaaaaaaaaaatcaaatgtagagaaataataaatcgatattaggacactcaaatgtactagttaacaagcttatgatgacagaaattggataattatgggaaaataagattggataattaagggctgggaaaaacaaattgatgattaaggaaagtaaaaaagtaaaaaaaaaacgaacgaaaactgaaaaaaagtaaaaaaaaaaagggactgatctcttctctttctctcgtacgttcttcttcctcattcgagagagttaatttcaccatttctgatttcgacaacgacaaacgagcaaaaggtgattttcctgcgagcttcctcttcttttaaaatcgcaatgctcctactatttctatactattattgttgttctccaattgatcaaacgaaactacgaaatccattctttgttttatttttttagccctaggattctgtgatccaatctctgttttcttcttcgctgattctggaaggttcttttgcttctttgaatttctagaagcggaactttgaaggttaaagtgttactttgaccggacagatggattctgactcggaactttatatctccgcgccgtttgg

SEQ ID NO: 57284 - DNA, 1135 bp, Arabidopsis thaliana landsberg
atcgactctatgcttctttgatttctaaacaaaaaaaaaagaaaagaaaaatggtgttcgaagaagcattcgttcccgctcttttcggtgctactcgatttttcttgtataaagacaagaaacttaattgcacatcccaagaaaaccgaagaagaaaacaaaagacttttacaagagttgagactataatgtgagtgagtgagagaccaaagtcagtaaactacgatattggtccaaggtcttctcttccaccaaatacttacggcaaaagaaaaaagaaaaaggcaaaaactatagcaatatatatgaagaagatacgcccacttaaatttttttaatatcgtttaatgtacaagaactaaacttgaaacgaatgtataagaatgattgaaaaaagacatgaactatagttatatttttgaaacgttttagtacgtttagggacataatttgtctgctctgctgttcataaaattatattttgacattgtaagttaacattactttgaagttttgtgagatattttgttctttaaataatattctaaatagtttgcgcgttgtaaattataaagtggggttagttgaaataatgttgcaagatatgatacaatcatgtggcatcattttatatttcttttaatttcttagttattcgattaaattattgaaaactcgaaagagagctacctgaaaaagcttgatctgctttaagcagtccactacaaggttttactaatatataactccttccctccctaacccctcaagttaaaacacattctctttctctctctctctcacacacacacgaacagttatttagagaatcagaagatcctttttaacctcaatttagttgaattttatggataaccaaagcaatgctcttcttggttggccttactactctcacgcaaaggtaaatttgtttttctttcttaatttgagtttcatttgtttctttaaacactagtgagtgagtagtggcaggttttggcttttgccttccttttctttcaatttttattttgcttaaactggcacataatgtctgtccaaaaaacagaaatttctcgagggttttctgttttcttctccttggtctatctaatataccctgcatctacaccta

SEQ ID NO: 57285 - DNA, 275 bp, Arabidopsis thaliana landsberg
  unsure (1)..(275): unsure at all n locations
accccaacaangcccacaagcccgaattaagaatgcagcccccggagaacaaacggggcncaggagaagggaaaaaccacggggcccccacccccccggaggcaagaaaggacgcaacaggacccgcggcgcnagcaaaaaggccaccccaaccaagcgggaaaaccagaagaagcaaggccgggccaaagggcagaacgggagaagcagaaaccgcgcaaagaacaagcaaaacccggacccaaacggaacaagccgcagccaaagcaaacggc

SEQ ID NO: 57286 - DNA, 256 bp, Arabidopsis thaliana landsberg
  unsure (1)..(256): unsure at all n locations
gatcaagctccggcttttgccgatgagtcacgcccacagncagaagagacccaccggcgggtaacaacccaccctcccnngcggacccaaangcaaaagcccanagagcaganaccccgggggaccancacaggccgccacccgagaacggcgcccgcccagcacacaccccagncagacccgaaaaacaagagaaaacgggggaaaaggaaaaggcacacaggaacgccccccccaaagaaccaaagccggacgg

SEQ ID NO: 57287 - DNA, 362 bp, Arabidopsis thaliana landsberg
tttagtttttttttgcggatggcgacctacatggggggaggcggtgggtgctcagtgaaactcgttcctacaaaagtgttctctcagcgcaagaggactattgtgcatggataggcacccgaagcaccgctttggttcttctgaaagcggggtgtaatcctgtgaggacttgcaccgaccgtgacttcaaagtttttgccgaccatgtacgaaggtcaaatgttgaggcttcggagtggtctaaaaattcttatctgatatatggaagaaaggtggaaaagaaattagcatcgaagaatctataaaaaatatagagaaggttcgagttttactaccttcatctcatgttgcttaaattgtat

SEQ ID NO: 57288 - DNA, 1297 bp, Arabidopsis thaliana landsberg
  unsure (1)..(1297): unsure at all n locations
agactcttctctttgcagcttaagtctcccagttcataaaccctagccaaaactggtgagcgattcttctccggcaatttgtttaaccttctagttcgtaacgagtttcattgttgcttccttcacttttggaactcgtatgttttgaagatcaaatgatttttctggtctgtgtttcattcattttgtttgagcctatcgaaatcgtttatgcacacaacctgttcgacgtaatgcgtaccagagattcttctctataaaaaggtgtattctttgctattgtaggaaggtatcattgtttagtaatgggtagcaaagtgatgatgttcaagtggtcaaagaacatcacgccttcacaggttatcaaactgatgcgagctgaaaaagatgtggagaagtctatggcagtttttgattccgcaacggcggaatacggaaatgggtacgtacatgatcagagttcttttggttatatggtcttgaggttggtctctgctaataagttcatagcagctgaagatctgattgttagaatgaagattgagaattgtgttgttagtgaagatatattgctttcgatatgtcgagggtacggtcgggttcataggccgtttgattcgttaaggttttttcacaaaatgaaggattttgattgtgatcctagccagaaggcttatgtcactgttcttgctattctcgtggaagagaatcagttaaatttggcatttaagttttacaagaatatgagagagattggtttgcctcctactgtggcatctctcaatgttttgattaaagctctttgcagaaatgacggaactgtggatgctggtcttaagatttttcttgaaatgcctnnnnnnnnnnnnnnnnnnnnnnnnnnnnnntatggaaccttgattagtggtttgtgtaggttcggaaggatagatgaggcgaagaagttgtttacggagatggttgagaaagactgtgcaccaactgttgttacctatacttctctgattaacggtttgtgtggatcgaaaaatgttgatgaagctatgagatatctagaagagatgaaaagtaaaggcattgagccgaatgttttcacatacagttctttgatggacggtctttgcaaagatgggcgttctttgcaagccatggaactatttgagatgatgatggctagaggctgcaggccaaacatggtaacgtataccactttgatcactggtctctgtaaggagcaccaagactccaagaagccgttgaacttcttgatagaatgaatcttcagggtttggtacct

SEQ ID NO: 57289 - DNA, 491 bp, Arabidopsis thaliana landsberg
caatttttttttccgacttttctctataaaaatggctggggctgttcagtgctagctcttttttaggctgtttgggagggctggtccaagagccggagcccatttagaagccctcccaaagaggcccatatatcatatatttatatagccgatgtcaatgaaatgacgggtatggtttagacacaaacaacacctcaagattctaaagcagctgtgtgtatcagtgttgctgttgtagtacaaagcgtacaaccgttgatgatcttaattcaatgatataaatggttagaggtcctggcgttcccaacactaatttcgaactcctttatcattactaggttagctagaggaggaagacaacttgttcatgtcagataatcaggcatcaccatcacctcaatctgcatacacacacaggccaagccgccaaggtcgcccgtacacggactcctggcctagatccatggtcaagcgcatgcaagaatggagct

SEQ ID NO: 57290 - DNA, 450 bp, Arabidopsis thaliana landsberg
gtctttttggtttggatattttgtagtttgtactccaatggtcgggtgtttatttctctcgtactgtcttaaaacccgtaatatggcgacaatgataggtagaaagaatctcttgacatatgagtccttcaattaacgtcttgataaaaataatctaaattccaggcaaatatctctacttttcatccgtataataattgtaaataaatcacacgataaattattgtcagtatcccacggctccattgtctaattagctaaatcaatataattaatcataaatcaattgttgggcccctgtacctcacagccacatacatccgatgattccgatgatatatggtgtatattttagactccataaaattgttataaagatttcaaattaaaccatagttttttgtcatattattagctacgtcgtattaagaaaatatcgactctgactta

SEQ ID NO: 57291 - DNA, 1452 bp, Arabidopsis thaliana landsberg
gattatggattttttaggtggaagagatcaacctgcacatcaatgagaaacgtaactcaaaagtattaacaagatttagggttgaacatgaacgagaccattccagttcaagcaataatatacaagatcaaaatcattagtaactcaccgttccattaaagtacgtaagaaaatcaaacagtatcccattctcgaggactgattgcacgcgagcattaaccatcattcctgggatgagaagatcaaacgacatgccactaagatccttggtctgcaaaatggtattcatgtggctaagtttgtgtaaattaaggaaccttcactcggtaatttgcaacagaatgttcaaggttcaggacataccagacactttgccactgaatctgggtcagaactaagatgaacaattttacggtctctatcgatctttgtaaccacaccctgtataagctgcccagtcttcattcctgactcctggtttgctagaaatttcagaaaaaggaagatgaaatctttcaaagatggtcagaagcagaagcagaaagccaagaaacttgcattaggatcctctaaagtatttccctaagttggacatatacagcccatttttatcatgatgtacattaagaggtaaactgaatatcattcccctgatgaaatcatatttaaaagttcaaagtgagacaaagagctaagaggccagtagtaggtcaaccaggttacttaccatcgtcgcttatttcgataaatcctgtgatagaaggtaatccaaaatgaaggatagaaccatggtcttcgatgcttttcacgtttgcagagaacacctgaacaagcatatggaatgaaatataagataattattttcaaacaacacatcataacctatatagaagagctacaaggttaacaactatcagcaataaaaaactgagttgcaaagtatgaccccagttcagaatagcaaatatatagcttaatttcattaaaaactgctagcatatgcaaaaaataaagcctaagctcagtcagccattaaatctcccaactcgtttaggatttttaaatcgcttaggtatgcaaataaacttgcatacccgtacgcagaaatacatatgaaaatattaactaaggcagagctcccaagtagtacataattacaaaattaaaggaaagtgaaccaaactttgacataccatccctagttgaaaggaatcaaaactgaatcccttgtgcaacaaagaaagtcgcaatgaaagccatattttccttttgcccgcctccttcttatcatcatctaactccaatacaatgcagggaacaagctgacccacagaaaaaatgtctccaaggagttcattttcatcgtcctggtttacaaagagaggaccaactctaatcagattgcagaaacaaaaatggaaaagggccaagatgaccatcgtacagggagct

SEQ ID NO: 57292 - DNA, 548 bp, Arabidopsis thaliana landsberg
gtttatattttatgtgaaactaatttctgaatctctggtttgagtactgtagagttatgaaattggtattttgctaatgcatgtctacattgtgtccagattcttataaaaacagaaactttgatcttatcttatggatgaattactttagattactgatgatgatttgtataacctagatgttcgtttcagagaaaaacctggaaattactgtctacttccttttcctttctctgcgatctttcagttttgattttttccagagtctttctcatatctttcctttgagaagaatgtgatgatagtaaagtatttctattctctggatcaatgatgatagctatgtgacattgctttgatttggttttgaaggttgaacaatgtttctcaaagtccaattaccatggaacgtgatgattccagctgaaaacatggatgccaaagggctgatgttgaagagagctatactagtagagttactagaggcgtttgcttccaagaaagcaacccaagagcttggctactacgtggcagtcacaactttggac

SEQ ID NO: 57293 - DNA, 951 bp, Arabidopsis thaliana landsberg
ccgacagatgctaccaaaataaccgaaaccgaaccaaaaacaaaatcttggttcttttcaaaattccagcatttttttaattggatgttcttttccaaaagttgtggtgtggattttatcattacaggacagagtagcatagagatgtaatacaaagaataatctaaaatacagcacaaaattgacaaatcaagtggctacaaaagtacacatccaaaagttcctcttcttcttatccaatcttttgcaaatccttctccctctctctttctatatataataacaaaggtgcacatgataagagagcagctacatcaactatatgaaaagccctttgtctgcaaacaatttttaacttccaatgggtcacatgattgtgcacatacagctttttccacttccatgatgaaactcatcttctgattcatcaacttcactgcaaaatttcaatcagagcacactgttttcaacatttgttccccaaaatggtaaatgaaagacgaaatgtgaatgattacacaacttcttaagaacaaaaagccattgtgtcaagagaataattatcactagtctactaaagggagttatgacttatgagtagtatctattcaagaatgacctaaagactttttggatctattacactgttgcttattcatgatcttgagagtactactataaaatctcggactataagcttaagtttacatggaagaatccggtaagatcatgataaaagatgtgccctaaaccattttaagcagacagagagggaataagtcagttctttcctatgaaaacaggttattccctactctaacatagaccagaacttacatctagtggctacacatataaagattgatcaaaccgaatctaacttcataagagaaagcatccatacctaggctcaaattctctgacctcagcaatctcaataccacatgtatc

SEQ ID NO: 57294 - DNA, 891 bp, Arabidopsis thaliana landsberg
acacattcctcgtacaagttaaactagtgaggccttggtgagagtttctcttctcctctcgatgtgctgaaagacaaagttaaacgttccatgaaacaatatagatatagactcaaatatttaattacttgtataaatatcgaatatcgtactattttatagaaagcaacgaagtcattgaccagttccggttttaacgtgactggatccatgtaaaaaggggttatacttataacttatacataaagcgaacgtctcttacgaatctatatatctccggtgagaagttaaagcggtggagatgggagttgcggctttgacgtggtggaagaaagcgacggagcagaggacagaggcaatgagagcaaagaatccaaatccgatcattagagagacaccggcgacgataagatccatcgccgtttgaatgctcattattcccatcatcttcagattctttagttttagaaatggtttggataatggaactattataagagggtgaaacagaatggcatagcaattgcctttggaaatggtgaaacagaatgcattgccaccacgttacgtgataaactcaaatttacgacaccttgaactaattcttttaaaatacagaaatacaaaacaaaaccgaaactttttttatccaaattcgaactgaacctaaacttggactaaaccgaattaaaatttgcttttatttgatacttattttcaaaattcattgtactaaaccaaaaagccctaaccaaactaaacagaaaaactgaatgtccatgccaaattattatggtcatattattttatggtaatatcataaataataaggatatagttttgtcaagctcttgaataaaactaaaatcattttattgggagtattgataa

SEQ ID NO: 57295 - DNA, 390 bp, Arabidopsis thaliana landsberg
  unsure (1)..(390): unsure at all n locations
cggccgaacacgcaacaaacagagacgcacacgaagagagagcgaaaaagcgggcggccaaacgcggaacagaaagggagggcaggggcacacaanaaaccacaaaaccaccaaaccaaacacagagcgcaaacacgggacagaaagcagaccccncagagatacccgggagctgggacctccagaagaacaagaacaacaagggggaaacggaaaccacagcaccagaacccgagcaacggagaagaggggcncccacaacaagacacacggacgagagaagaaagcnacgctccacgggggggaacngaccaccgcaaaagaccatcagcgaaaaaggcaaacaagcagataagcagcaactacaccgggccgggagaaagggagcga

SEQ ID NO: 57296 - DNA, 481 bp, Arabidopsis thaliana landsberg
tgtcggacttgagtgtggggaagaagcggggaccttgattcgggccctaaacggagtcggatgcaggggtcgtagctcggtcagacaggcgtcaccggcgcccttcaatctcttcaatcggcggctcttcgtgggaggctgctgcgcccggctaatggaggaggaagacgattgaaggacgcgacggcaatggaggacaactcacgggctcgacatctccacgggctcacggcgacggcgcagggggacggaacccggtgtcaacgagaataatactgacctaaacctgtaaatggtgtagtcatgtccattttagagggttggctatgcccagctgtttcataagggagaaaccctctcctagacctccatttcgtcgaagccaaaccctccgtgtttcataatggcaaaaatctcgtttcgcaggccagctaccaggccgttttcctcttcgggctttgggtcacggacaccgtacctg

SEQ ID NO: 57297 - DNA, 1172 bp, Arabidopsis thaliana landsberg
atgcattgaatagctacatgtcaaattaatattagtcttactaggcaacaaaatgcctcatctgttacttttcagatttgtagttgtaacttgttcttatactcgtatttatctaatggcttgtgatggttgcaggtaaaagttaatcttcatgaattttttactggatacacgtatggcccatatgatcgaatgggttggccactagttctgaaactgaaagattggcctccagctaaagtcttcaaagataacttgccacgtcatgctgaggagttcttatgtagtttgcctttgaagcattacactcatccggttaatggacctttgaatctcgctgtcaagcttccccaaaattgcttgaagccagacatgggaccaaagacgtacgttgcttctggatttgctcaagaattaggccgtggagattctgttactaagctccactgcgacatgtctgatgcggatagtacccatatgatttgtcttttctcgttttcatatccatttctttcttctaagtctgtccattcttattgtttttctgttgcacatctataatgatttcagaacctatgaaaacattaaaatcagataccatttcctaatcggtcacttagattttttattacattaaggattcgcctcctcttcttttccagatcagttccttaagttattctgttcctcttttggctgagttttgcggactctctcgttgaactcctctttttcgcattccattcgggctacactcctccttcgaagcaaaggaactctccttagatgcgttgcatcctcatattctgctttagggccgaaaatcaaagtctctggcctaatgttcttgaacattctaagattgcaatgtccatctgaaagttcttacgctgttcataggacctatggaccaagctttatccattcaatgtgagtccatcaatagctttcttagtccttcataggcctggcattcggtttttggttctgccaagttcgctttctccgggtctggaaatcgcccctaaaaagaatcggctgttattccggctcgggttatataaatgaaacaataaaaaaactttatcctagggtaatgtttggacaaaaaacaaaatcaaaacttgtacaggtaatgtattttaggcaaatgattttttggcgcacccaaa

SEQ ID NO: 57298 - DNA, 1064 bp, Arabidopsis thaliana landsberg
ccttaacgccagtacgacctgcttggacttctctatatatcattagtgcttcttccatcacattggcttgagccaaaagttttgatctcttttttcccgacggatgggtcgatagataatctccgagtgcgtctccaccgagctttcccagcttctcatacactgtgggagctactcgtgggtcatagcccgcagatgcaagtaacagcaaaccgatgtagtctgcttctatctccatcctgtgatgcaacaccaaacacatacacaaggggagtttgaatgcatcagaacttcttcttatacacacatacatatttcatttctcctaccaataccctaaccacaacaacagcttctactggtttgcaacgttttgtagccaaatggttcactagatgattaaaagatgtgaaacataaacctacaaagctttcttgttaacttctcttatcatgcctaactataccaacgccttctaatggttcgcaaggtgattaatttttttacaaatttatttaaactaaatgaatttttgttcctgtaattttgcaaacctcatgagttattcgagaacgaaagaactattgcagattcacagtaaaagagattagatggtgttgatagtaagagaggaagaagaattactttctggagaaaggaagcctcaagaaaagggcggacatagtgttcacaagatcaggcatgacaaactgatatagcaccagttgaaggatagcaaaccataagttctttgttattccctcagctacatgccgggccaccgcatgaccaacctaaaccaatatacagaacaatcagaaaaaaaaccatgctttcgttccaatagcaactctgctaatcatttccacattaacaagcagcctaacagaaagatagtacattcacaaatcaaaacaatcaaaactttctatatacctcatgcccaatcacagtggcaacttcagcatctgacttgaaatgattaagcagcccagtgaacaccacagttttcccaggaggcaaagcaaacgcgttaacaataggctcattaaacacaagaacct

SEQ ID NO: 57299 - DNA, 2109 bp, Arabidopsis thaliana landsberg
tgctctctctctcaatatatatacagttgcacaaagcttctgagacagaagatttatgagttttgaaagtgttaccctaaaacgagagactaattccaaggttgtgacagagagacccttgaagttgatgcttctactcctcttctgtgtttaatcgcagagtttaagatctcgtattgttcattcaccgacttgtacaaagcttggctgtatgcttctttcgcctgccataccacaagaatgtatttatatgcatgatgaattactcgatcttgaaactaaagtcattggtgtgctgagtgttacagacagacctcattagggctctcgcagtctgctgtgacgtctgagaagttgatttcaggagcaattgatagtccagtaccgtgaaacccaactaatcttttctctccgatttctttctcaacctggcagatgcacaatgaagtgatgatgagaggaaagtcaaccagagttagcccaaaacggagaagagagacagagagaagaaaacaatcaatacctggggtggagggggcatgatgtcatagcaaagcaaagacattggatatatatgtccaggagcgccagaatgttcaaccagtcttctcatgttgtctaccgaagaagcatcaaagggtgcctgaacattactagattagtacttgcatatctaccagactcagataagatctctgtattccatcaaataacttacagggaacgcattccccagtagaaggattcgggcggtccctttcagcgcttggtgcaatccatataagttgaccgccagacctacagggttcatcaacattagcagactatacatcaatgttttcctttaatttctgttcctatgagatcaaataagagcactcgctatttagttccattaaccttagcattgtagccatctcctttaagcttcgtgtgtttgcttttcttttcatgtcaacaagctcaggatcatcattcatgtgctttttcgagtaaacacatatgaggttcctgaaagcagtagaaatcccggaagtcatacaaggttgctaagattacacttcagcccatcaggtagcataccattgcaaatgaaagctcgtgataccttcccatactgaacggcttacaaagaggatcagtgatgactcgatcaccagccacacatttctgcaaccaaagaaacaaataagaacagagacaatagcgtataatagctcagaacaaggctcgaaggctcacaatgttctctcctatgaaaggagattgtgcttcaagcaatagagaaatgacagccggatcagcttcactttgatggtttgatatcaacacgatattgtgtccctgtaattaaacagttgagtattaaaatcctgaatggaaagaactttaactgttgatgaaagcaaacagcattaactagagcacaagaaagagggaagatgacctgtcgaatcttgtcttccagctcagagaatatagaagcatttccaacgtacgaatttctgcataacatattcaagggttgttagtagatgaacacttgatggcaagaagaaaactggaagatccaatgatactaaccaaacgatattgctttctaattacattcagttatgaataaaatctgataactatgagtgcatattccagcttacttgaaatcaataagaggacggatgtatgtatggacaaacatgtagtagtcaaatggttctctgactgctttatgatatggattaaaagtataaggatcctgaaatattcacagcgcaaggaagctcaagttaaagaatttttagatgacatctcctagtagaaaaatcattccgagagattgacagaagaagtacctccgcaccttgatgtatgcgaacagaagcacctgacatgtctgatacagcagtttcatctgacctggaagctgccctacttaaaacctaaaaaccatcagtatgacatcaatgccaaagttcagtggactgatgttctttaatctaatgaatgccaatgcatagcactaatcgtacatactatcgagagctgaaaggatacattcactgtaggattgtaggatcaaatcagagcttccgttcctgctgatacatt

SEQ ID NO: 57300 - DNA, 1184 bp, Arabidopsis thaliana landsberg
gctcatgaggagcgtgaagcaatggtggcgaaaccaagcccataggtaagagcatttaactttctcaagttaatccttccttgttgctcatacttagctaaatcgagctcaaagttatcattcacgatcgcaggaatatcatatgttttaccaaccgatgtgaaaagatgcgacgaaaatataggaaacctcgttgcgttataagaatcaaatccccaataggctaaaggcaacacgaggtagatcaaaagaacataaccgatgaaaacatttgcgatggcgaagaaggggctgataagtggactaaacaagaaagaggcaaccgcggtccagtctagtgtaaaggctccaagaccaagacctctcattccagaaccaatctgttgagcagtgactgatcttggaaatgcccaacaaacccatgagatgcttgtgagtgttgtgaagagatagccagggactatgtaccatccaaaactacagactaatgctatcacaaagaattttgctctcgtcatcctttggtcgtccttctcatgcaatgccctacatgaaattttaaattaataaaaaaaaaaattaaattatttattcatatgatttggagagatttcgaatcaattgtaattcgactacttacaaaatacacgtcattaattcgtcataagtataattatatatcaagttttgtgtcaacatctaattttttctaattatctccaattaattatatcttgaatagtaaatacgcatagacccaccatgtgcaaccacagattaaacaattataactcccgtttattgttattataaattcaaaaactcaattgtcgacgaaaaatcaacgaatcaaaaacttaattaagacgatcgataacgtatggaacatcttaatcatgattatgaaatgtgaaaagtgttaaacaatttgtggaccacgagtgaatgagttaagttcatactcacgtaaacgcaaattcataagggcgctatatccacagcagtactaaaaggatctccaggttcatcaatcatagacggttcaaaattccgttaggctcacgttacagtagagggatcctcctataaatatggaaacgaaagtatatagtgtatgtttgcccattgctatgtatgtataaatggtgacccatacccttagctaatttagctcgcgatccggg

SEQ ID NO: 57301 - DNA, 598 bp, Arabidopsis thaliana landsberg
cagacttctatgcaggctactgacgaccatctcgttgagttctctgaggctttgagatttaagttatatttcgatatgtgtaacatgagctgtactatatcctttggatatgggatttaatttttcagtttctgggatattgtaactgttgcaaaggcactaaggggagctgctgaaggaaaggcgttggctcaagctgaggctgctgaatggaagcgtagatacgagttagagaggtctaagaacgtggagttgcagcataaaggttctctactaacttcaaagggttgttataaaatgttcaccatttagttctagtaattttgatttgaatggtgtttttggccatggatatgtttgaataacagaattcctggcttgttttacagaactgtcaaatggagtgtgtgccgatgaatctaatggtcaaaggatggagcacttagcaaagtctccgcggctttatgctcaggaaatcagttctaatggcatggagactatttgctctcataagtgctccaagatggtggatttaacagttttaataacaaattgaagagggaggtaatatattagttgactgttactatccttgctt

SEQ ID NO: 57302 - DNA, 1417 bp, Arabidopsis thaliana landsberg
taaataccgtcgaggcaaaacaccaagctcggaatcttagctttagaggtaaaaatgtcaaagaggcagaaccggaaaaccaaaccgtcgacaatccaaattgttggacaaacgaaatttgtaagtaatatcgcctatttttttttttttttgcttaaaaatgtaaatattttataaaataaaaatggtttaggtttataatcaagattataaacttatacaaatggtcctatggcaaaaaaataaaaacatggaaacataattcgtaaacaaaatttcagtccatccactcaacatgagcaaacactaatagagttagatgaagtgatttgacgattttgctgtttttcccaaatttgttgctcgagaccaatacacaaacactagaaacctttcaccagagggccgagactgagccatcaacggtagggtactcagagccctcgatcacatactcctaccaagtcatgtgagagcgggtcatcgaacgctttcatgagctctcccagaatggaacctcacaaaccaaatattgtgaacaatgtgagctcaccctaccaaggtcattctccgaagtcagctagaacagagctagaatttgcaaattaataaccacactgaacactattagtcttactagcttctctagtgcgaagtgcaaatgcaacaaaagcaaaaacgcttttaccacaagagctcgactcacaacaacaacaacagcaagacacaagcgagacaaaatatacaagcaatgtgaacatattggagaagggaaaagctaccaccgatagcgataatatcgcctgtttttggaagttgttgtcaatctcattcctctctttaggcacttgaaccaacttgacctccaaaactacttttaaagtacccactctttcactgcttgtgttgatttaatcttgaatagcatttctccctttttttttgtcaaacgaatagcatttctccatcttcctcaatcacaactattattgaaacttcatgtatttctacaaatgaggaatcactctacatggggccacgatacactctttttagtttaagtgtgcagattgtcacgcatgactacaaacaaaaatgcttcaatggattaatctctaaatacaaaaccgatatctcgttaaataatgtgttatattccctttatcatcttacaccctagtctctcttccatacttcttaaataaattagtatcttatttttttttaaaagttgcaagcatacttaattacaaaatcttcttgaacattttggaatcttataagcaagacatgattttgaatcttgatttttttgcctatcttgaataagaaactcaagttagttagattaggtttttactttttagttgtagtcaaaagtttgttagctgaaatcacgtttaacacgagttgttaa

SEQ ID NO: 57303 - DNA, 1384 bp, Arabidopsis thaliana landsberg
  unsure (1)..(1384): unsure at all n locations
ttcggattcttgacaaccggctcaaccatttcccagtaaacaccatttcacattttttctctttgtttaatttcgttcttcgagtgcctaatagtgaaaagaaaccaaaatttaacattacagaaaaccatcacatcttcaacttcaatacaagaaaaaactgataatcagttagatggaaaacttacagagtacattctttcagttacgtttttccttatcgtcttcttctcaccattggccatctgaatattaatctgaagaaaacccgggtagctaagtcaagatgattgttaaacattctactgtgagactaaaacaaacaaaaacacccaaaaggtatgtaagtaatacctgtttgtataactctagtgcttctatgtagaacgtattcttcgaatacccagtctttcttaacttagcgatagcgtaggcacttcttagctgaaatttagagttttgacatgtattaagacatctgcaaaacaaatatcccagtctaataatgcatgaatatgtttctacctcccgtataaaatcctctttcgttcttcgccaaccacttcttgtaaaacatctgaacaacaattaacagaaaacagccgaggcaattattaaaaactcaactctagtagaacaactatattgtagcttatagtcagaacttcctaaaacgattaacagtaaaaaaaaacaagcagaaaagggaagtttatcgtattagaaacagtatctgccaatttacctccgccaaatcgagattttctcccggagcgcatagggttcatatacaaatccaggacttaccatcgacactctaacagcaccctacactcataaatacactgatgtgagacaatcaaaaccacaggaagcaatatatttatatcagtgacattagaaaccaaaacaaatctgacaaaaagttcatgaggatgagacacttcacacaccgttttctgtaactgaggtggagccttaacttgcgttgtagcagaccttttttcattcataaacggtaaagactctgcaatctgagaaacaagaccaaatcatgtatgtatgaatcaaaccaaagatcagtgatttcaacacctaatgatgaatctgatgattattaccattgtagatcgaagcaaatgtgtattgacgttgtgcccttcatatnnnnnnnnnnnnnnnnnnnnnncatgagcttcaggaactgaaaatgtaaactaaattacaccaaaagcatcaattcacagtcagattcaatggagaaattgagaaaaggtaccgtgacaaagagaagaatgatagcttcttcaacaaccaaatctgaaatcatcttccatttgaatcatagagaactcatttccatccgaaatctgaagaaaaccat

SEQ ID NO: 57304 - DNA, 397 bp, Arabidopsis thaliana landsberg
  unsure (1)..(397): unsure at all n locations
atcttacactgtccaacacaacaattactgattttttacaacagacaaacaccaaagagaagtgaaaaaagccggacccanacacgtccccctacaagaaccgagaaacccagggagaacatactgcgagctgaaaccatagagggggtgacacaaaccaaatcaaaccatgtacccccaagataacagtagggcgatatatggaggagggagcactctcgttgagaagagacacacagacggaatccataagagcgagaggttgggctacgtagtctcggtggcaacgactgagctgagcgacacctactggagactctaattacatgagcatcatctacaacatcagatgaagatgtcctcgatacagagaacacgtgcccaatacattgcgagc

SEQ ID NO: 57305 - DNA, 1354 bp, Arabidopsis thaliana landsberg
  unsure (1)..(1354): unsure at all n locations
tgttttaaggcggttgagtaacggtacaaagtcctctaacacagaggaaaagataggggaagaatataatgagaacaaggcttctctattccgtgttgtaggatcaagcccaagtaacatgcaagcaatccaagtgaatctagtgggttctttagtactttcactactcttacatacctttctctatttgttaagcaaatgaaaatcgtccccccgcaggttgcaacctccttgaactcatcctactcttacattttacaatatggagcttctgccttcacttggattgggaaactttcatcagactctgatcatgaagttcttgacagaatgctatatttccttgatgtaagtaacttttagctctcagctgctgtttactaagttcatgccatacattgattctggtttattaagggttatgttcagcattactagtaacaaaatctatttcttcgtttccgtctgcagacatcttgtcaacctatatacatcagggaaggaaatgaaacagacacattttggaatttgcttggtggtaagtcagagtacccaaaagaaaaggaaatgagaaaacaaatagaagaaccacatttatttacatgttcatgcagttcaggtaatggtaaatatctttcaatttctttttatcatcttacagtattgtttagttctgccttggttcagctataaattaacgaaatagtggtccacgactttggctcttctgttcagatgtactcaaggtactattcatgtgtgtattgatgctattatttaaagtgattagagatcatctgggaatgaatactcttatctgatagccactttgtgcatgattttcaggtgaaagaaatatacaattttgtgcaagatgatttaactactgaagatgtatttctattggactgccaaagtgaagtatatgtctggattggatcaaactcaaacataaagtcgaaggaagaagctcttactcttggtctggtaattttcatctttgtttggccttccaagtgctttttttgctgtttacgggtggaacttcagtaaaaatgggatcaaaacatcatatggcataaataaattttaagaatggcgaactcggggttaccgaatatggcttcctttttcagtgtttcttagtccattgtnnnnnnnnnnnnnnnnnnnnnnnnagagatggatatactggaagaaggtctaaccatgaggactcctgtatatgttgtcacagaaggccacgagccaccatttttcacccgtttctttgagtgggttcctgaaaaggcaaacgtaagaaatcttttcccatcttgaagtcacctcaaaccgaacgttaggaaattccaaa

SEQ ID NO: 57306 - DNA, 926 bp, Arabidopsis thaliana landsberg
aataaaaaatgccatatattttaaatcagagaagacaggataattttcacaatcatctacaaaaatctataagaagtttggtgtatccgtacatattccacgaaaattggtcgtaaatttcaactgcgaacatataatttttgtctctataaagattcatttttaatttcctttttatctcatatagacagagtggttgtcaggttgactgcatactgaggtaatttacagaaatgaaaatatactaaacctcttggatatgaagatgccagattatacacaacggttacagcaaattaagctgtgaacaagtgtatcaatatactatgggctgatttttttttttttttttaaagtttcaaaagccaaatcttttccaattaagctttaattatcttcctaataacagccccaaaaatgttcctaaatgtgttttaaagatgtttgcgtttttgttaagccaacaaaaatgtgaccttattatttttgaaatgtgttttttagaattgactaattttgttcggtgcattgcccaattaaatttgcattgtattcaaaacaactagctagtagttattgaagttttggtcctttgagcatcatggctgagttgctttaatttctttgggccatcgagaatcttgaatcgtagttttgtcttgaaaacgtttttcatcattattcgcatttttcggaaacattagaattgcaatttaaatctttatatcattttttttttgataaagggacaagggttagcaaactttttaatcaagtattcctatcagctgcatgcataatgctttttttcagatcgcatgaagctgacattcgtaatttgaacaaattaattccgacacatgaacagtttataagtatacattataatataggtataaatctataaaaggaaaataggtttttga

SEQ ID NO: 57307 - DNA, 1254 bp, Arabidopsis thaliana landsberg
aacattagtaagttcttatagagttaaatatccgggactattttgtaacgtaaacaacgatggtacatcgtaaagttgtagaatccacgtagtccgtagtcgtactattttatttgttaataaattgaaaatttattatctatattctttagtgaaaaactatttacattctagatatacatcacctgacattagattagtaaagtttttaattgagttttaaatatctgatgacgttcttggacacccaaaattttgcttttaatattttaaaagttatagagtctatgtacttactcggtagtcgcactatttaaactcatttttgttaataaattaaaaatattaccacctacattcgtttaagaaaatatatttactctcgcagattatacattaccagacattacattagtatagaattttaatagaatttaaaattctaacttcttgctcagaatcccaaaaaatcaactatagccagcatgttaatattgtaggatccacctactcggttgcactatcatttaattaacaacttttttttgtcaacatgcattatgtaggtttgaactcgtgatacaacacaaaaccaatatcaattggtacaatacacattcttgttttaaccacattaaaatctatatattccatcaatgtttaagaatgtataatccaactaattaatcactattattaagagggacttattcaaatacgaagcttaaattttaaaaatctcagaaaccttcacgactaatagaccctttaaacacaaaaagagtgtcaccattttcaacaccatgccaccgaagactacaattctctcgcataatccgttgcttgtgtacgaatatatactcgtctcttggcaacgtcttgttagcttgtaacccttctcgcatctccgagatggtgcaagtgtccttaatctccactggaattcgcgcaccgttgaataaactcgatgacgtctgcaccaagaaacagagtttccttaccggagcgacgtctttcgcacggttgattgacttaagaaacaccacaatctctgagaattctgtgattccatattcgtttaggtttcgataatcatcagctagctcgatcccagaatagtataactgcattcgctttatcggtgtgttctcaacaatgtgaatcttgtcctttaagctacttacctgcaaaacattagtagcttgttaatcaagaaatctcaaaaactgtaataagatgggaggtaacatgttg

SEQ ID NO: 57308 - DNA, 1443 bp, Arabidopsis thaliana landsberg
tggagcctctcgcccttaaactctcaagttatcgaaaagtaaattgatggaagaaacaggaaaaaccttcttaaagtgatcctgctcacgcttctcatctctattcgaaagaagaaccattgaactcaagttcttaatttttttggcttgctcctgcaaaactctttccctttgagcttgtgccttcttctcctcttctaactcaagtgctattcgctctctctctaattcagactgcagaaaaacaggatataaggatatatcagaaacgtatgaaagaataaacaactaagtaataaagaaaaaatgacataccttcaacaaggtgttacgcaagttaagaatctcttcttccgaatggtcagagtgagaagtctgcgatagaatagctgatatttattaacccacaatacaagcttgagataacttttaagaaactaatactgaaaacgatcaagaaaccttcagtttggatctgagctcctctatctccttcttctggcgctttaatagagcagcatcagtcaaaatctgtattgaaaagtggaaaaacaagaatggatggataattagtttttaagaaaatgcttataacatacttaattagaaagcatgttaaagatagagagaataagtgcaaaatgattctgatccaacctcattgacatgggcacagttagtgacacgtagtgctcggctagcgaactgaagactgctcttggtttcatctgcatgaatctaacatcaaaacgaagattaacattgttaatcgcaccaaagcaaacaaatattaacattgttaatcgcaccaaagcaaacaaagagaaaataaagattgctattggtttcatctgtctggcttatcctgattatattattggtgatgaatacataccgatgcaagtgtgatattgcatataatagctgtgttggcattcccacctaaggcaggctgcaagatccttgtaagcttgctgtctcggtacgggacatgaccactgactcaaccaaataaaaggccaataagattagacacttaatgcttatgtaccatatgcttcgttccctaacaaaactgacaaaaaaaacgtacccttgagtttctactccttcactcagtttttttatgacagtcccgagtgtcatcaagcttttgtttatatgtgagccctccttcaacctaacaccctctgcaccggtttttgcagcccgttctgaaccagctagatccaccaaattctacaaatggtacgaaagaagaaagatgaaacagaaaataatacgttgcatataagggaacaaaaacactagttccaatggaataataccagaacagaaacacgaactgcatcacaggaatttccaacaccttcatcttgcatcttctgtctactttctataatctgtttaataaaaaaagctggcgagttaaaaatcgacttc

SEQ ID NO: 57309 - DNA, 1096 bp, Arabidopsis thaliana landsberg
  unsure (1)..(1096): unsure at all n locations
tattattatgagaaacgtactgttcttcatcagaaaccttgtcgttgttccttgcctctcaagcaacatgtcacttccataccttattacaaacaataaattttgaatcttctttaaagtgtgatcatagacatggaaaaagacaaaacaaaatattcttcagtcaacagagataagttatatacctgtatgatttttcttgttctttgtgtcactatgcaaagagtggactcaaacccaaaactcaaaatcaaactcataaactcatgtctccgttttctctgacgcgagtaagatcgatattccttagatcacgaagatgttgcagaatctcatggaggagatgtacacctttgtctccttttttcaatgaaccaacacaatgtcttaagaactctctatctgcctctagagcttctaacctctcgtaaagctcatccacttcttcttctatcgtcacattctcacccttctccgaatcatcaaacccgttttcgtgatggtttccgttacttaacccgttttccatctctccatcgaccgcatcaaacaggggaagtaatctctttgacttgataactctgtgcttcccgtttgtttctttgccatgaatatgctcatttccattgatgctaccattactctcaaacgttttagcctcctcctcgtcgtcctcttcgttattaagatctgtgagtttctcttcaagaaacttcaatctcccaagaatcgaaagcctctctccatcataatcatctaaacactcatcaagacgaagtacaacatccaccggcgtattctccatctcattctctctatatttccaatccgtaaccccttcaacgttcttaaactgtaactctccannnnnnnnnnnnnnnnnnnnnnnnnnnnnnnnnnacgaatcaacagaggaatctctcaatctcctcctcaacatccccattttctctttagcttcatactcctccattctctttctatacacctctagctccttctcaagctcagcattctccttctctctattcaccataagctcattcaacaactgcaagcttcttgatcaaactcagcttgctccttcatcattctc

SEQ ID NO: 57310 - DNA, 304 bp, Arabidopsis thaliana landsberg
tgcgagttgtttatagttgcttcggaaatggaaaacgacgacgaagaaacagacgcagaggtttctataggtacagagattcctgatcatgagcaaatcggagatattccttctcaccagctcattcctcaccacgatgacgatgatcatggtaattttcttataacataagtatgcgttagtccttctctgttcttgattctctagttaacattttcaacgaatgcgttacttcttccaaacagaggaggaaacgttggagttcaaaacagtaacgattgaaaccaagatgccagtcttaaac

SEQ ID NO: 57311 - DNA, 1115 bp, Arabidopsis thaliana landsberg
atcttgtcttcgagcggggggatcgataaaccctagtttctccgtggatattctagcaacttcccctagatttctccgtatatgggtcgggggatttagaaatcgaattatattgtgatgtttagttaacgaaaacccagtttattgaatcgtctccatcaagtagaatccctaatcttagatcccctgcttagggtttcgaaatttgtctttttttgttcagctttatactgattctatttgtccaattttgaagattttgattctaagtctctagtatattctttgttatgcaatgcagaaacatgtctaattcaaaggacgagaaatcacaagatgcagctgatagaatcaaggctgcaacactcactgctgctaaaggtctaagccgtacacaagcggagagagcagcggctgcagcagcgagaaacgttaacgcttatggcccagaaggaagaaggtccgagtagatggcaggagaaaagagaattaaattaggcagatgtatttgatgagtactgagaaagctgtcaggcttggtgaaaggaaagataaaacaatgtcagcttcagccgtgggaagcagtgcttcggcggcttcacagtgtcagaaatgtttccaagctgggcattggacttatgagtgtaagaatgaaagggtttatatctcgaggccttcgagaactcagcagcttaagaatcctaaactgagaacgaagccttctgttgatgatcttgatggtagtgatgatgatgatgaagaagaaaggcctgatgcaactaatgggaaagcagaagttgagaagcgatctaagaagagtaagcgaaagcataggtcaaagtctgattctgaaagtgatagtgaagcctctgtgtttgaaacagatagtgatggctcatctggagagagtagttcagaatacagttcatcgtcggactcagaggacgaaaggaggaggagaagaaaggccaagaagagcaagaagaagcaaaagcagaggaaagaaaggcgaagaaggtacagctcttcttcatcgcagtcatctgagtcagaatcagcttcggactaagattctgatgaagatagaagcagaagaaagaagaagagcaagaggc

SEQ ID NO: 57312 - DNA, 587 bp, Arabidopsis thaliana landsberg
aacgttgcaccgcgggcacgtttcttatcttgaagagaccaaaaaatactgctccaagctggtggtgggcatcaattccgatgaatcggttaaaatgctcaacaagggcagcaaccggccggtgaacaaagaagctgaccgtgcgtatgtactggctgggttagtttttgtcgattacgtggttgttttcaatgagtccactcccctttcattgatcgagatgataaaacccgattatcttttcaaaggcggggattatgatacagacgtaaccgacagcaaagatcccagatacattgtgggcagcgatatggtgagaaaaaatggcggacaggtcatgaccattcccctggtccagggattttccactaccaacatcatcgaaaaagcacattccgtttaaatttatgttgctgctttaccgtttatatgtcatacaccgacaagctcagcatgacatttttcggtttgcatgcatgataacctgcaatcctgtatgctgatcagcggtaccgtcataagatcaaccgggagctggtacacggtcaaaaaccaggaaggccaacagctcgaggccaggctcaagg

SEQ ID NO: 57313 - DNA, 478 bp, Arabidopsis thaliana landsberg
cgccgtgccgggccgcgcctgaccggaaggcgtctagcgtcgccgggtcggcgaatcggccgatccggcgtttcggatcggcgcgcagcaccacggaattggcaacgtccagcgcaagcgcgccgccggagaagcgatgtcggctccaggaaaaggtcatgcgatattctaactggaaaaagcaattttgccagttctaatttcacgcacaaacgccgccggaaagcgccatggactattttctccagcagatcgccaatgccctgtctgtcgccaggctctatgcggcgctcgccttcggatattcgatcggcttcgccgtgacgcgccgggccaatgtcgactatggcgcgctcttcggcttcatcgcgcacatgttcgtgctcttcgccggccacggctggagcaggctctggctggtgctgtcggccgtgctcgtcctctgtgcggggatggcgctggtctacggcgtaagcgc

SEQ ID NO: 57314 - DNA, 452 bp, Arabidopsis thaliana landsberg
tatttttgctgagctggtggacacggtgctccatgtcgggctgctccgggtccaccaattattggcacgacccacccaactacccaagtagtagtagtatacaattattgcttaattaatccaacttgcaacaccccagtgattgtagtgtttgttacaaaacatgttacaatgtgattaaatccctccatttgacaattacttcccaagggacacacccattggaaaacactgtttaatcttgtatataacggaaccccctttgcaataaagacacacaacagtcactttctctcggtttcaaatctctttgccactgagtttcaacacgttatcagcactgctcaaagaaaatagaggaagaagaagaacacttgttgttcttgacaagaacagaggcagcggtctccaaatcaacaggaaaggtatggagcaaaccattttccttcaca

SEQ ID NO: 57315 - DNA, 275 bp, Arabidopsis thaliana landsberg
aaaggcccctccatcatcaacatatacatgctcagaggcagaacagagaccatacctcatagcccgcgcgtagtcacaacacaccacaaaggctataccgtaactttttgacaactgaaaagctattggcgtatataagcgaatcagtaaaggaacaagagcctagccataaacaaggaataagaaagcaacttttgaaagtgctctccaacacacgtgcgagtgattaataggccacgactgtccagcttatccaactactattattagttacc

SEQ ID NO: 57316 - DNA, 720 bp, Arabidopsis thaliana landsberg
  unsure (1)..(720): unsure at all n locations
ctaagcggctgatctaattttatgctttagcgtggttaaaagctcaagagcttaaaaccaaaaacaaagaatgctcaagagcttctttggttctatacaagaatgtgttgaccaagaccattagggatgaatacgaataactaaagtgtagtcattgacataaatcaaaatataggaaactcttataaagaaaatcaaaattgtatttagctctttaagtttacacgcttttagcatttaaattatttagctaaaagatctcccccatattattgtttctaaatatagctacacataagataaagaccctataacaaagaatggttggtaattgatcttgatatcgaggaccaaacatatattacttaaataatcgaataaaatctctcaaatagctttgggccatcttacatcatttcttcaaaaaaaaatatctttttacaactaaaagttaaaaacaagagaaattgaagccatccccttaaaaagtctttcaacccaaattctcttgttgatttgtattgttttcatacaatttgctctatacaattataaccaaaaagcatatgaaaaaagacttcctaaataaaatatattttttagtcacaaatacataagtacatatattggcactcgtgtgtagtataaatatacacgtactatgtaaccgtggccaacgccctaatctacgcnctctctctctcttctcttcccttccct

SEQ ID NO: 57317 - DNA, 798 bp, Arabidopsis thaliana landsberg
  unsure (1)..(798): unsure at all n locations
ggatctgaacgcacagccatctatcaaaaggagtgaaccatatgaacgtgcgatatttcataggaaatcccaatatttttggcttcatgctcaagcatgtcaatgttttagtttactcagccgcgtggggacttaacactgtttatcatctgtcttcctcaaacccctcgaaagggttcattcgttgttttttgtacgtggaatagattcattatagctttagccaaacagatgcatcgagcttctctttgtcttaagaatatatagttaaacattccaaaggcaacatatgtcacgccaaagttatataaacctccatgtatcaatatacaaatagtcgtatcgagaaaagaagactagaaaatatacaccgttttatcgatccagaattggccatgtttggtccatagatagaaagtgctatagctaggcagcgttgtacatgttgttccaactcacaaaggttatacaactgttcgatacatatatcatttggagatacaatttgatcaagaagatgagaatagagaaacacaataaaagtagaatacgaaacagatttgaaacagcattgtttatatatttgtattaattttgcacccggtcgatagatagatgataaatctattaagctgaggaacagtcctcgttgatgctgcacgtcatgggtgcgccattaattgattggcagtatttggtgtaggtgcaactttgactgtcggngccccagccattaaaacaggtgaaggggaaacaggggtcgtccaaaacaatagtgggtcaccatgttttaaacct

SEQ ID NO: 57318 - DNA, 256 bp, Arabidopsis thaliana landsberg
  unsure (1)..(256): unsure at all n locations
cacagatcacatgctatcccttttcacactccgacgattgtgttgtacgtaccataaacagcaaagatcaacccgcaaatcacaatgaatacgtcgatggatttgttccatacatttagtgatggaccgattttcgtgaggtgaganagaaccngcaacacaaanganatgagtgcgcacaaagtacttccaacaggagatgcacatgtaccaaaccctgggactaaactcgcgattgctgcaagtcctaccacca

SEQ ID NO: 57319 - DNA, 1320 bp, Arabidopsis thaliana landsberg
cttgtctttttccatcgtgcgatgtttcttcggtctactactactactactgcttcattgcttatctacttgctgttctactcttctcatatgaagcatcttccttagtttcttggcctacttcattgtttatctgcttgcttctctactcttctgctatgaatcatctgcatttagttgctcggcctggtgtgggaaaagttaaaccacggttgtggatcccttacatcatcttcatttagttgctcggcctgcttcattgtttatctacttgcttctctactcttctgctatgaatcatcttcgtttagttactcggcttgctatggggaaaattaactacggttgtggatcactacatggcttgcttctacttcatcttcgaccctagagatgcgctaatacttgaaaacttcatcagctttgatgttaccttctttgcatgaacttgagctgcatcactcagaagcacctcttgtgtggtctgaatgttgtgcattaggtttagcataattgtagctatgtgatagtgtttcgcatgcacattcttgtccttggatagatttttgtgcacttcacggtttatgtaggcaagtcaagaatttgtaaatgcgtatcagttgctaccatttggtgcttgtgttcatttcacttaagcatagttgtgaaattgttcacttttaagaacgtgaagcatagtaattgtctaagaggaagattgaatatataatctgatttgctcttattcgtgtaacaactagctatgggttcgtttcagtaactataaatcccaaattaagtaaaaaataaaagtatacttgcgaagtagacacggagacattgttttggcatgacaacaattaaaagcatagaaaagcaagagagacaagatcatgatcctagttcggtcccagaatcatcaacaaacccaccaaattaaaatctgtttggtcccattcttcacttacacatcattgaattgattgttatgtgacgtaaacctctctgacctctgctttttttctgcaatacactttatgcttctcctcattccacttcctctgccgacactttttttgctccacgtttcttcacttttcaccgacactaagttgagaatgtcctaagatcctcagagaatacaataaatattgctctttctcttgtttcagtttagtcagaaaactggttcttgttagttatttacagttacaatctctttccacaaaggttggactttaaattacacaaattctccgcagtgatttgacatgatcatagaaatttatacaagacagaagctcttttaactgccaacaa

SEQ ID NO: 57320 - DNA, 508 bp, Arabidopsis thaliana landsberg
caacaagccggtatataaaatttattttcttattgaaatactgaaattccttctcaaacaacttgcaaagtattatgtttaccaattcaagtccctgaaatgaaccatatagatatttaggaaccatataaaaacactagttaatatatcattagatactatttaccttcaatgcaatcaagtagcgtatggtcatgtatctatgaaaactacgcatagaactcaggatctcaatggccccgaccttaacgaccttcccttctttgttggtccacggtttgattgagaaataccgatacgctaattcaggaaactttgaatttttcatcggatttctaagtgaagaacccacatggtaaataatctcttcttgtttaccggcttgagcggccattgatacaagaatcgaatttactaccatatctgccggcatctggtcccattgtacatgtccgaaaaaacacaaatgaagatgagtaaatgatattcaaatattaatgttaaatgt

SEQ ID NO: 57321 - DNA, 1290 bp, Arabidopsis thaliana landsberg
tcttcattgtctctttttggtctcattcacacaattgcaaaaataagccaaaattaaattcaaatcctcccacatgacaagagaaaacgaattttccaaacccatgcattgccttacagaaatcatacttttttttcgtcacatactcccattaagcatatctagaaaaccaactcaacgatacaagtttttaaaaataagtatcttagaaccaaaccaaaagtccaagaccacaacggatacaaatacttccgttatacatacacacaaacacacatatatctatagtataacgtgacgtacaacattcatttccataaccagcaaacaacacacgtagtagatacaccgaaagtaagaaaaaaaaagcgatttaagtaaaaaattgattacctctgattatattgttgttgttgttcgacgatagtgatagtgttgtgactactcattctctgtctcttagcatttccagaagaagatgattcctctacattgctcttctccatcaccgctttcaaagcttcctcaatcgtccctatacagtactcttcctccacttcctcaccggagctctcttctccggtaacaaacaaaacgttcttgactcgtcccccaacggtggtaatctccgccttgagcgttttgagacgcatagctttcaatgttttaatcatgtcaggcaagagatccgacctgtcttcacagcaaagcgacgctttaattacaaatctgccatctccggtttcttcctcctccgtgaaagctaccgttaactcatcgctttccgttgggacaagatttgtctctgagatcactgaagtctctctcttcaactctttcacatgttggatcacttcagctagtaacgacgctttatccgtctgcattaaaaaaaagaagaaaaaacatatttgtatagtttcgaggagaaaattatgtggtcgtagaagttatgatttggtccggcaataagactttttatgctttttaagcagcgccggttgtttctctttattacatcaattaaccaaacgacgacatagacgttccatattccttgcttttttatttatactacagtctctgactgattctctctcgggactttaacaaatacccacaagatcattgatcaaaacagaaaacctttgaataacttacttctccttttataaaacctaaatgtaaaaaaataaaaagagacaaaatgtgacataaactttcatgtcgcagctactatgtttttccacttaaactctacattgttttagtattattttttatttacaa

SEQ ID NO: 57322 - DNA, 1466 bp, Arabidopsis thaliana landsberg
ctttgttcttcttgagctcgtatgcattattgagatattccggaagatagtttaaatattctgcattttgaatctttcctgctcttgacatacgattagagtacaacactggattctagctctgcgcggcgaataatcgttgattatcgtttatgtacttagagacttgtagagaaactttatattttgctaatagaaagtttatttatgctgcattttgaatcttagtccttatgacataagaatagagcaatacaaaaccggattttagctttgtggaggattaatgttgatgaggttttatgtgcttaaaagagacttgtagagaagctttctcattgacatgtgtttgttgttttactcttctagtgagcattgtttgttagctgaggaatttcaacaaagttgatttctttggtcccaaaaagcatgatttatcaaaactgtgtttttcccaaaatgtttggatctttggcatagtctctggtcttaaatatcccttttatggtatatcaaaaaaacatgagtacggaatatatggtcccatgatgactaaactccgtagcaattttgtatgtcaacggctaagtacaaatttgtttttctgttcaccgctacttttgtgacataataaggtgatatttgtgaaaaattgttgtccttgtcccggtttcgaatttaattgttttgaactcaaaacagtaaatttagaaaatttcgctcatctgaatttgtatttctctggtacattttcgttattagtggaatagtggttattgtcttattgatatgaaaactaagaactaattcggatttaaggtttaagtgtaactatatatctgtacttcttgtatacaaaatattcaaaaccgagtgctcgagttgctaataggagaggatatctaatttcttggttcagattgatttattttgtttgattataaaataatgtggttaaattaggtttagatcttttggtacggattcagcttctaagtgggccggcacaatgagaagtttactgagccaatttcgaccgacataattctccactatgtgcttaatgaaaagttatgaaatatagaaaagtttcgaattttgtgattattcactaaattttttacttaagcatgttcctagtatataatattcgttatttcatcatcctactatttacatttcaatatcaaccacaatcaacgtaaatcgtaatccattttcttcagcttttattatcttttaaccattttttccaacaaccctttttctcgaaggacttttatccttagtttggccgtcaatcatcaatccaaaacatagacttatctcatttcttttttgtttttccagtgtcttagttgattgattaattgactttttcttcctatccaagaatattcttcttacttatcgtttctgaatgataatttgttccaatccaataattttcaatgtcgggtgggtca

SEQ ID NO: 57323 - DNA, 1182 bp, Arabidopsis thaliana landsberg
gcgttttagatcattttaagtgttttggggtacatttgaaaacattgtaaactacagagggtatacctttagattaatttacccaaattaaggttgtactaatatttttaaaatgtatgcgttgtatttgaaacgtatgtaaaatacaggggcgttctgaaataaatcaaaaccttgaggtgaatttggccgagaggtttcccggggctatgaacatcaccgcgtttgctatgtcggcaaataaaccgtaaagattcgccgccgatcagtttagatctccgatccatctcaacggagagagatattttatcgggaccatggattctataatacgacaaaacaccgtcctggagtacgaaccaccgtcgtttccatccttggccgtagtttacccatttatagaggattccggcgacgccgttcccagaagctggtcgatcttcgttcgtacgaggaccagcggaaagactataccggagatcgtggttgtgattggtacgtgtcgaatgtggaatgtttaacgaagccgatcgagtcgtggttaggtttgattttgcggcgagtggagaagacattgtttgaaaacgttcgaagaaattagggttacgaatttgacggtagttgaaagaagggtgagaaaaaagatacagagagattggagagaattaaggagaaatcaatatttgtaaagtgcgagggttacgtgagacgcaagactgcttgaggtgctctgtttttagaaagaaaaaaaacacgattagaaaatggaagaaaattggctcatggtgagaatgaattggctttgtaggcttaaaaatttgtttggtgtgaaattgtgactttgaattgatatgtgaacttggcaacgacgtcgtttcaaagcacattgattaaacgattgcgtttttatcagtggagcatcgaagaaacgacatcgttatcgtgatttatattattgctgaagagagtaatttactaattttacagaatggaggaactatttaagacgagcacccaaaatgatacattccaatacaagaaatcaaacaagacattataagcaaacgtcgtttttccaaatctaacaattaacataccaatttacaagatccaaaagccgtagaatcatatcagcactgcttactaatttttttcttcaagaccttgttaccgatcctggag

SEQ ID NO: 57324 - DNA, 507 bp, Arabidopsis thaliana landsberg
  unsure (1)..(507): unsure at all n locations
tttcatgtcgtgactagaccatatcaaatgttttgtgtttggttttaattttctacttaaacgttgcttgttgtaatactgagttataaaaaattgaagttttgaatcagtatctgatcttatcggctttcaattatccattcagtgaacattacgttcggtaatggaatatacatatgtattaaatgaatcatttaatgttcttaaacttaaccttatactttaatgtttataaaagtataaacatgacaagagtgttaatgatattttgcttttgcttatagaaaaagcaaagtaattatagctcccctaaacatcatttataaagcttaaaataatttcttgttaaataaatagtttcattttatttgtattgctaaatactaattgttgacattntgcaatcacatgtacatgcataaattgaattataatattggtcagtcgtccacttataatattttcattaacagtntcgcgtataatctanaagtatatctatatata

SEQ ID NO: 57325 - DNA, 515 bp, Arabidopsis thaliana landsberg
gtcgcgctgtatacgggttccaccaacccaaaattgaagcggatcacattatggttagaagagaaacttaaatgttggtatggaaaaaatatagtcagtcacactacttgtcggcttatatttcttgtccactccgtatatatttaagtaattattttaccggaaatccattacaatgctaacaaatattcttaacatttgcagttatgtacgccatgatatctactgttttaaccgtgtatacataacaataaaataaagtagctagtagtaataaactaacgaaatttgtcagagaagaggactgatatgatttattggcatttggttagatggagatagaagttaatatctatcatcaatctacttcgtctctgaagttaattggcaaggcccttcaataaaagcagccagctcaaaagcctactagtatttgttcctttttctttttttttttctggacaagctaagctaactactatttgttcattttaatttgatgaaaagtgtatacg

SEQ ID NO: 57326 - DNA, 335 bp, Arabidopsis thaliana landsberg
tttgatgttcatcaagcttgggaagctgagcgaggggccggggataggtctcacagccaaagaccttgagatcgccgtctgttggtgcccggccatgccacgcctcataaggagtgacattcttcactgcctttgtcggggatcgattcaaaatgtgcacaactgtcatcacagcctccccccacaaccgagagggcattcggcgctgcctgaacaaagctcgtgccatggtcaccactgcttggttcctgcgttcaacatcaccgactctgtgtggtgaataatgggcactgaaacgccgtttaataccttcgtcagcgcagcattcatcaaac

SEQ ID NO: 57327 - DNA, 468 bp, Arabidopsis thaliana landsberg
ttttatttttccactttctcgaaaccatttctggtcaggaacgtccgattaaataatcgttgttttttttggatactaatctcaaaagacttttctattttcatacccaaaaaaaaaaaaatatatatatgaaaagcttcctaatggataaattttaaaagaggaaagacagctcaatcaagttgtattcctggtaggcctctcctggtgggaaatgatttgaagcaacttgattttttggattcttaattaatttttagggctccacaacagttaaacctaatccaccctctttttgcataaataataatatgaacatagatttgtccaaaataataatagtaatctctctaataatgtgaacatagattatgattaacttggatgtctttgcgccatcatccattattggttgtcaatgatatgctaatcacttttatgcttaccgagtctgttagttttaactag

SEQ ID NO: 57328 - DNA, 1276 bp, Arabidopsis thaliana landsberg
tgaacattttgggcttgtatttaggttaatttggatttcaatatacgtagtttgtatttgtttttggtgagtacattatattttgtatttgatataaaatataattagggtagtccaatgcgtttttcttaacaagtctaaacacatttgtttttttgtttttcctggcttacaagttaggtatactctcttttcattacctataataacaaagacatcatataaagcaaatggttaaatttgtttgtggtgtaacttatgagggggaaaaaaccaatagtgattaggaagacagcttgtttcgtgtggctctgcgaggatgatctagttgtatattaagatatcagaagttataaacaaaacaaagataataaaagacatgaatgcatcaaattaacggtatatagtgttggaatcaaattagtggtgaattatcgggtttgcatcaaactaatttggttattcttgagattaggaatgtgtgttcacctaaaagctagtaattgattactaaaatgtaatgcatgcaacaagaagagtcaatcgaattttatagagataagtcatataaaatgattaattatcgctagaggaagctgcgatgaaatttcttacagcttttgtcttttacccatctaatcatttaatctctgagcctacgccatcacacatatctaaaagcaccttcttcgaaattcccttggaggacaaaacatggacctcttttttgttcacttggattttctcggaaaatgacttgcatgtcttcttactatattttatgtatcccttcattctatactttttcgaaattctaatttaactctacatataatcccactcccaccagctaaagtttagacatgacaagtattttatcaaatgctccttcaattcaaactactgaatattgtttggataagtactttttggagacgtaagctatattttccaatccgaaatgaatgaaccaaatgtccatagttctgtttttttcctcctaaagtgaatatattaagagacactaaattctagaaaatatgtttaaaatataataatcagtaattgtccaaaaaaatgtgaatacttaaatcaaaatcaggatacgattgtcacaagaaacaaactttcctagataatgtatattttatattataaatttatcaacatggtgagtctctcatgttatatatagaggtgatttaaaggctaagtagaataacacactacaacatataaactcaatgatatggcaactcaaaaagagaaaccgcct

SEQ ID NO: 57329 - DNA, 1496 bp, Arabidopsis thaliana landsberg
ttttttatgttttgagttcttgacagagatgctcccatcatatttagtccttttcctttctctttgtgtcgttctcttctggatgtttccttttgataaagctttacttcttaacttttttccagcgacggtgaatttattacgtatcaatcttcattatccgacttataatttaaagaacacttagctagatgtttcactttttgaaaatttatttctatcggaagggggaagatggatttctgaggcatgtcctcgatcatttaccgtgattacaattgtattgcgttgtttgttttctagatctggctcactgctacgagctggggattggatctagatgggtcatctagatggattcttggactggatttacaaagctggattagcatgaacttgaacttctgtttttacggtctggtctggtctggtactccgcgcgtatcagctgtaggatctgatcgcaaagttttggactatgattactctgattcctcaatatatttatctttttgacaatagtggattctgtgttgagttcttttctaggacagcatttaagctcccgggactagatggcagatggtcagtaaatttctttgttatgccacacttacatggggtttttggtcttgctgcaggtcccaatcaagatcaaaatcaagatcaagatcaagatcgaattctccagtttcacctgtaagtctaaaagctgaaccttctttaattcacaatccatggtgtatgtttaaatacctgctcactttggttgttcttcaatcaacaccaacttaacgaaatcatgagacagactataaaatttgaagagtctgtagaacgactaggtctcaccaacctctgtgtgcactaaaaatcgcctctccaagtgtttcagcaacataatctacctctgtcatgtgttatcatttcttcttctcttaacggtattacatattatgttttacaggtgatatctggttgaaaatgaaaactggccactggctgtacccgaatcgtctcaagcttctcaggctccactgctaatagaatttgattccgatttgggattattatactggtcttcttgtatgggacgaccaatatgtctttctagttttagttgtgaacctggaattggtctgttattgtgtcattaaaaagccggaaactctgtctcggctgcataataaagttcatcagacgttgtgttgggtgtggtgaggtttttccatacatatacatttacattacaactactggtgtcttttatgattatcttaaactaaacttgcagtgttaaaactaaacttgcagtgttaaaactaaacttgcttttgtttttggataagatcactctaaaacggtacaacccctgcctgtatcctaccaacagtaacaacacactacagctcataggccatagcaccagagttttgtgttaacgaaatggcccagaataattgcaatttggtccgaaagtaaagtctattgcgact

SEQ ID NO: 57330 - DNA, 461 bp, Arabidopsis thaliana landsberg
agaaaatattcatcaaattacaaatattagatgagtcaattatctatggaactgcaacaattcgaggtgagctatacctcttgagaactctgccggcgctaccatcatcaacggtgaagagtccaacggctatatgctccggtgcgatatattgacaatccatagtcctagagtactcaaccgcagcttcaaagactcgtttcgtgctgatagagaaaggcatgtccgtcgattttgaatacgaagtagaagaagcttcctcctgtttcgaatcggaattagcttcgtcccaaatactccaaacagcttcacgagccttgtcgatggtgataccggatccaaggaagccttgaggatcacgatcctcagcgatcaaacctaagagaagatgctgcgtgtaaaccatatcttttcccaacgatttagcttccttctgagagaagattatagctctgatcgct

SEQ ID NO: 57331 - DNA, 1298 bp, Arabidopsis thaliana landsberg
gtgtgttgcgtggtgttctgtttctgtgggaggcagccagtcagtaccacttgatgacgatgctccttttgtcctagctgctactacaaagacacgtcataaagctcttatgtatcacaggctcacgtgaacacgaaagccacattcacatttttctccaaaatatttcttgaaaatgattattagtactgtagtagcttatatagctttggggtatctctctttttgttactgtgcttataggtagggttaatttaaataattagatatgtcagagagagagaagtcagacatcagagttcgcacgtgtataaattttgttagatatggaccaatgcatttgttcaatcaaaacgacagaccctaagccttgtcacgtgaaaggaaacacagatttttttatttatttttaaataaccctaaaaccaaacaaaaacatcttacaaaatgtcaagaaatagagaagttaaaagacaaattaatctaatcaaacttcagttgataaaacaaaaacaaaaaacctctaactaatttgttttaattcattgtctattactgaaaattataagccacttcaattgctataaatttttgactcctatgattactatatattttacacaatataaagacttaaactacgtcactttttagagggaaaagaaagagcctatgtaatctactctattagtatagactagagagtatagtaagtttgcataagatgggctaatgaattttggacaaaaagaaaaacaaaatcagtcagagctaaagatagagtagttgtgtcaagtaactttatttaatgatctccttgtagccttgtcctcgtgcatcataaatatatatgggtgccaataaaaccccaaaagagagcatttaaatacttgtcaaataatagagtgaaagatacaaaagatagagagagatggctattatcagtactagggattacgtcagcatccctatgcgacaggttcagtcaaagaggcggcccatttttctttcctcttcgtaaatgtacaagattatttatttttagttcttttttctttgatcattttgtatcaatggttgctgtgagaaaaagcatcgagattgttacgatcgaaaacaaagtacttgaattatgaaacaaatgtttggagagcctatgcaaaaatgatctttctatcttctttttataatagcataaatttcatagtatggcattatcgtcactagcaagtaatgagttaatttaccataagttacaacggtaatgaggttgtttggagagtagaactaaaaatatt

SEQ ID NO: 57332 - DNA, 499 bp, Arabidopsis thaliana landsberg
  unsure (1)..(499): unsure at all n locations
ctgttgtcgcagagtgtcagagtgttgtatnnnnnnnnnnnnnnnnnnnnnnnnnnnnnnnnnnnnnnnnnnnnnnnnnnnnnnnnnnnnnnnnnnnnnnnnnnnnnnnnnnnnnnnnnnnnnnnnnnnnnnnnnnnnnnnnnnnnnnnnnnnnnnnnnnnnnnnnnnnnnnnnnnnnnnnnnnnnnnnnnnnnnnnnnnnnnnnnnnnnnnnnnnnnnnnnnnnnnnnnnnnnnccagaccagtccagtgcgccaccggaccgtccagcgacatcagctnnnnnnnnnnnnnnnnnnnnnnnnnggagaggtggtccagtgcaccggaccgcactgttcacgatctggtgatttttaaagaaaaaaaatcccgagagggcactgttcatctgggtggcatggacccagtgtagtgcaccccagaccagactaagttagactcttttgagcctaacttctccaaactttntcgctcttttggtagcttcgagcctaact

SEQ ID NO: 57333 - DNA, 1195 bp, Arabidopsis thaliana landsberg
gttcatagtaatattgttctttctgtgctgattcagttttgagtaaaagttcaagttacatcaaatgtaatcacctagattcaggttctgattttagttcagtattatgtcgataagagatatatgaaccaaaaacaaagagagaaggtaacttgttttagtatattgatccaccttgccatatggagaaaccaagtgctgcaatgttgtgattttttcaccaaccttttctttcttgacctatttttatgaatagcatttgttaattactattattcacccaaatagctgatccattagataagtatacataaatatacacacttttaaagccaaaccttagcatttccaagcgatgacttcttctgatctcgcttgcatctcttaccgggttttggatcgcaaacccggtcgtgcccatcagccgacccggttttcttcttcaaaacaaagagacaaacattaaacaaaataaaaattatacattataatgatcttgtgtttgacttgttgcatgcactgatgcatatactttttaatgatcttgtcactttacttaatgaccttaaagcttggctaaaatttcaaataatattaactgtaggaatgttttacatatatataacttacattggatctaaaagattgatcattgaccacacaggcgttattgcgtgaagagagaggggaagcgggagagaaagagggttgtgagaagagcagatcggtgtcgttttggtttcctccgccgaaacagagcatttgaggagcatcgtttccggtgaatctgaaaccaaagctgtcttcttctacttcaccggagctaaggacatcatcagacatcataagaacatcagagaagttcatgacaccgtcttcttcgtccgttgtgcctctcatcgtagagtttttttttctttttcttgcttaggcttgtttgtggaattgacagagaaagaagaaaacaagtgaaaaggtgagaaaccagaaaagaatagtatcaataaatgtattttaatagtaaaaaaagaagatgaaaaattgcataatttcagttatagcaagtagcaacaatagttaactatgatattacatcaatgggataagttggtaaaggagaaatcagaaaaatggtaaggcaacttggcccaagaaaactgttggtttctatttactcgaaatgatgaatttgtaa

SEQ ID NO: 57334 - DNA, 941 bp, Arabidopsis thaliana landsberg
aattcctctcctgattgtgatgtgattaagatatattgtttctgttaaaccactacttaaacacgcatattacaatgtttaaaatcaatgctatagcttcacaacttctcaaacgtatattcttattgttaattaaataaaaatcaagttttatcataaatagaaacaaattaagagcaaaaatgatagcagcggcaggtcttaggaggaaggcaaagactagccacgggcttcttcaacttctcacatgcagatttacattccgtaaaaatacattttccagatttgttaggaataacagtatggcattgttctcgtttcacttgttgcacatttcccattactcctgtttgtgtcatatttagaacatgtcttagtaaatgttaccatcacataattatgtatcgaaaagcaattgttacatagattttacataacatatatagactatagctgaattgatatttttaacaaaattgtatagttgacagaatgaccttttgaagaagtatcacaatactgtcaatatatatatatcacaatattcgttattatttacagttgaaatatatatttttaatatattaaggcgaatttcaaatgtaaatacaaacctaactcaagaaggatgaaaaacgttagaatgatgagtgaaagttgaaattggttcttcatcataggtgttatgaatgaattgatggtgttttgaaagtgataaacaacttacatagtgtactcctcctatatatacttttttttaagaagttctatgtaccttaaaccaaaaaaaaaaggttctatgtacctcacattcaagcttatctaacttgagctatctatctccttaaatttcggttttacacaatttctatatttttctcattctttatgggaaagctgtagactcgttcgttgttgtaacacaatttcctatttaaata

SEQ ID NO: 57335 - DNA, 1005 bp, Arabidopsis thaliana landsberg
tgaattatggtacttcagtaatgaacttttaacaaagaaaaaaaagtattagaaaaacggttttgggtcttggtcttataaaatattgaacccatatcttactttctcaactaatggacaaagaaaaaggtgctcatgaaacgtataaatgaattttgatctcaacttgatatataatattggtgatttgatgttgtttggtcttttatgatttgtcttttaccagctaatttacattccattccatgaaattcccaaaaaagttatcaaatatcatttttaagtccaagaaaatgcaatgcaaacgactataaaaagaaaatcaaatcctggaaatttcgtttcagtcatcactcaatttgatttcagctattaaatccggtttgatttggttttcggtttaaccaaaccaaaattcaggcctcctaataaataccgaatccttctccctccctctctctgccactacgaatttagcacatagccggagctccgatcatgtcatcttgctccgacgaagcgattcccggccaaccaatcgtcgtgcgtatctatttctctcgtttcttctcatgaactgataaaaactgattagattctctgcaaattgcagctcggttgtggtcaactttgtctagattacttagtcacagtggcgtcttttccaattcccgatcaaaagatccgaggcacaagcttcaaggtcgatgactatatcatttattgttaattcttcgttgactttaatttgatatcgaatggttctggagattttcatttctatggttcatttttcaggtccaaggaggtggtaacactgggaatgctttaacatgtgttgctcgtttgggtttgccttgtcgaatcttggctaaggtttattacaatttttgcgttttaatctttgaagaaagtttctttgctttgatttatgttcttaaatttgaggcatagactgcagaaatgtagcccttggataaccaagatcaactgaattagatatat

SEQ ID NO: 57336 - DNA, 1159 bp, Arabidopsis thaliana landsberg
agtataatatatactcagtaattacgtagtcatacctagaaaactatctcttcttttcttatagattgtaaagagtcgtttgaagttagtagtgactctcgcttatgtgtttcttccttgtgcttatggatagggttaaataaatagcacttccttgagataatcaaatgatagcaacccatataataagctattcaacaagacttagttttacttttactcgataattatttgcttggttagtccaaatcacaagtcgatttcaaacatatatattcttttgttgatattacatcttttttcttagtcatttttatataacatcaacatctacatgcaccaattaatatgttggttataagaaaaaggtagttttaatttggtggcaaattgtcgatagttatttatatcagttactagggtagtgtttactagatgattttcaaatagtgtacatttcattaaaactaaactaatgtgaatatatatatgatgttattagtgatttggatttcagtgtagaaaagaatattccatttagaaaacatgataaaaagaattatatatagaaggtagaaaaccaaatttggatataactttggaaataatattatagaaagaactggaattattgtaaggaaaaatgaacttggatttggtcggcgatgtgaagtccacgaactcacgtaagcaccaacgcagcaacacctggttcccacaaataccattcgttacatttctgattcatataggttgtcgtcacaagaaaagagttataaatattatttaaaagtgatgacaaaagaaataaaatttaactcagtaaagcgtgaccgtgtcatacgatggcaacttcttatgaatacctatctatgatctgctgatcgatcaggttccttttgctactgataagttctgtctattatctggcactgaataaactgctggaagtagaaatatcatagcgaaaatcacaaaacccattgttcattgcaaattgtactgtgataacgaagacgacaccatcataagcttcaatatctttcttttattttctacagttttaaatattcaaacatttaaaaataaatttaattttctcactgaataaatatagtactaaaattatattcaaaataaaccatttttattttaagct

SEQ ID NO: 57337 - DNA, 1286 bp, Arabidopsis thaliana landsberg
caaaacttttaactttattttcagtacacacttgctacatctgaaaattcagttctagttggctgtcaataaagtcaaaccgatatagtatagttacaaccaaaataaaaactctctttttcttttgacgagataattaagccggatttgtgatcatggtgcccactttgttgttaaatgggttttggattaactattaagtgtatattggtcaacccaatgataaattgctactagtttgatttatactaatgaacaatggaatgaagaacaaaagagcaacgtggttagtggtttgttacagagtgattgtgtaaccatcatacaacgccaccggagtaaatgttaaatactaaaagctctgagaatccgtgactccgtctacttgtcgttttccttcacagtacactacaataagaatggacaaaatccggtttagctcaccaactacccggtattatctgaggaccatcggtttatcttatggcctctgattcaatgggttttaaaaaaaggccagcctattactctgagacatacgtttccaggcttcaacgagcccaacaagtttctgaacaaactcatcatattcattcagctatgaattttgatctttccccctcttgccgcagaatttcactgcagcgacgacaaaacactgataactagagccatgattgtttcctaacggtttgtgtgattattacagtacaataaacatttaaaatggcctaggttgtagttggtgttagttgagcaaggaacgagagttttgtaagaaagtttcatagtgaaattctgaatataatccatacatccagattccacatttttggactaataaaacccatcaaaagcatcatatttacatacggacattgcatctaagatcagaaacacgttccaaaagtagttcttctaaatcccaaaacaaaaaaccaaaaaaacagtttgaatcaagcccttgatgcgcaaaggaaactaccatattacagcagcgtggcagtgtgttgccaaccaaaaagaatcaatgagttccaaggtcttaagctcgtggtagttttgtttagtcaatcagtctttccagtcccccaagcgagaaagctgtcctgtgatccaaattcctaaacacagacataacaaaatccatttggcttttgtacctgattgcattcaaaatgttttaagagaaagaaaggggtctaagtttaccagctggctcagacgaaactcaggtggagtatcaagctctatgttagagggatcaagaacgattttctgacatt

SEQ ID NO: 57338 - DNA, 644 bp, Arabidopsis thaliana landsberg
gcagggccgctactggcgatgttgctgttatatatggagcatcgtttgagtctggtggttggtttgatggggtgggggcaggcgattctattgaggtggtgggacttatcattggagcagagattggagacttccctggacttgtagtgggaggggatacaggggaagttgcaggcgtagagacaggagtcgtggatgtagtcggagaggaaacaggggaagtcaccggagatgaaacaggggatttcagaggagacgcaatggtacgagatgtaacaggggaagtcgccggagacgaaacaggggatttcaatggagaagcaatggttcgagaggaaacaggggaattcgtcggagtaaaaacaggtgatttcgatggagatgcagtggtccaagatggggaagtcgccggagaaagaacaggggatatcgatggagtcacaaaggccgccggagaggaaacagaggatttctccggagactttgaaggcgatgtttgcttcgtcgaagatggtgcctctggagatttttggatcaccggaggatgtaaagtaggagttaaaggagacttcgacggagaaataacacgatgagattttgccggcggatgtaaagtgggcgtttgaggagactttgtcctatcc

SEQ ID NO: 57339 - DNA, 1165 bp, Arabidopsis thaliana landsberg
ggggcatgatctctttgttatttatcgggtcattatgattttactatagtctataattatttatactagtcttaattgactcttacgtatataaccaaacaaacatatgcatgtgaagataataataaggataattatgtaacagtggtgcttggaacttggaaccaatagttatcaatttcataaatgtcacctctctttctatataatttttttttatgttgataatcttttttcttagatattgatccttttgtagggtcccacttaccatacttattcatgtattttgttttctaaaacaaaaggttttatttattacgaataaaagagatttgattgttacagcgaactttgttccatactaaacagacatgcaatgaatgaagaaaagcttacaaacgtagatttttcgagatactagttggaaaataaaatacttgacatatcatcaattttggtcctttatttcattgttttattgcattatacggtcatacgaaatttcatattttgtcatgggtattatttcattaaattctttttattacttgaagatctgaaatgaccctaaagatataaacatcgttctgaaaaaaagaaaatacattttactcaacaaacaaaaatataaatacaccgataatagaaaacattcaaaagcttgagaaatctttcgaagactcatatgatcctacactgtcaaatacttaagaactgaagagcgtatcttctccatgtaatctcctgcttctttctgcaacaaatacatatgaatttcatacgatgattaaaagctttatcatatagtcaattttacggtttggcattcgattttccggtttgattcgggttacttgagtttcacgttttggaaaaatgggttcgagcaagaaccgaaatacatatgttaatcaaaaacagaacccgaatcaaacctaaccgaacttcgaaccagaacaaatttcttttgtcaactcaattattaaccgggtctaacctggtttcctttgtatgcattggctatgttttcgtcgagaagtgccaacaaagatctgttgatttggtttttctccaccatatccaacaactgtatcaaaagaagaatcaacaaaatgtctcaagatcatctcatgaaatcatcataaaatgtttttgtgtttat

SEQ ID NO: 57340 - DNA, 1505 bp, Arabidopsis thaliana landsberg
ccactggggaagatcggtttgttcatagaattgatattgttttttttacatattttatatgttacattttttgattagtatttttagttgtgggaggggtgagctggagaacttaaagtaattattgaagaatttagtttgagatgcaaaaaccaacaagtaactaaaaggaaaaacagaaaaaaattataaagtttaaataggttaaagaagttttattagtgttattgatttaatataagggaaatggacggtcagttaagacgaataagtagagtcataatccaataacatgataaaggttcatttcttgacgagttactgctgttttaccattttaaaacgtggattacaaataatctaagttagtgttaggtactaatgttaaattttctaatatacatgagtttgttttcttttgtcaggatcttaacaaattaattaaaaaaaaacaataaagttaaaagaggtggatatacgaatataccatgcttttcaattatatacggtatttatccgtttaggtcaaaaaggcttaaaccatagcttcgaatctttgagttatataaatattcacatcataatctaattttcaatgcaactcaaaaacttgaacgtcaatataaggatctcataacagagagaaactgtaaaattcatggttacaacttgcaacaaaaatttctttcttgataagatttcgttagagcatattgtatgtgtgcttagaacacaacaatatttgagtttagatagaaaaaaaaaaaaaccaaaatgtgatttttatctattccaataggccagtgaagtaggcccataactactgcgcagcccattattctacctaacatgtttcattaactaaaagtctgaggattcttgttgcaagtgctggtgatgtttcttaagaacaaatcaattataacttattagcgagtaagattgacctgtaaatcgagtctgttcataaatgataaatctcgcagatactttatccatttttttattcaaaggagaaataaagataattcacaggttatctaatgtgacattttggcttttttctttcatacttcacatgctctgtactcaaaaaaggtttatacttttatagtccattctgtgatatcttctgccacattcaaaagactacaaaatgtaccaaaagatacagaatcataactcaacactctcctccacttttcacaaaagagagtaaattgcaataaatcttgaaaacttcctttttttcttttatatatttctactccataagcaaaataagtggtagcaaacaaaaccaaaaaatgaaaaaacacaatcgttacaagcaacgatgaaaatccgccagtaaaaacgaaaccgaatgatttagcggatatgttccttcttctactttgagggtttcattttctggtaacgacattcttagttctaccgcagcacatcaaaatctaaaggtttttacatatatatgtcttgtctggtgttgcccgtctcatgga

SEQ ID NO: 57341 - DNA, 596 bp, Arabidopsis thaliana landsberg
gaggctcctagcacgctttttctctcggatataaaacgacatgttatagatctccatagaatatacgatattgtcgcatgaataagcccttttaaaccattacattcgtaaatattcttctcatcaaacccgactaaagcaaacttgagcaggatctgttcctagagttgtacgctgacactatcacaaatttcccgaggcaaattatgtacagtctacaactccagcagattcacggaaagtagtggtagtaatccagatccattcataaaaggtattggaatttaggtagtttggcctacttcatcgaggtaacgaaagacaaccggtatcaatccacccataaacatcagcaatacacaaaccgccaccaaagaagcaaaaatccctccaactcgagaaaacgccgcgctagacaggccggctgtccaccaaagacaaaggtagacccgagataagatcaacgcgcgaggcattccccacctcgtatagacaagccatctcgcataaaacaatcaccctcattatacattgatcaagtcatcagaagtctcattctcagaaaacgcatacgacgacttcgaaaccatcgacac

SEQ ID NO: 57342 - DNA, 1314 bp, Arabidopsis thaliana landsberg
gttttcagggtcatcaagaactaatatacaaaacataaccaaatcattccattgaactgaatctagagatctcaatacatcaaagactaaaatgaagtttgcatcttaattacctttgaatatttcatccatagaagactcatcataaagctccaaagcttcattaacgagtctcaaagaccgttccctcgaaaccgagcttctttctaaagcctggagctcagagtcaagctcaacagacctctttcccacctgaaacaaaagtacctcaccttaaagaaacgaaaacgtaacagaccaaagatcaaaaagtatcagtctttttctcaccacattaagcttatcccttaaagaatccaattctgcatctaattctagatcatataacccatcctgatgcacagacgaagactcctcctgacgaacagaaacaactcagcaaatcacagtataacagtgagagacgagacaatgaaggacatagaagagactcacactctttggtaacacaaatccatcaggaactgcgaaacagaatcgaagagaatagctttcccacaatttcaaacgattgtcgattacagatagtagcaaaccacgaacacgagcaataccctaaaaatgtaacaagagtaagaagctgaacaaagaattaaccaaaatcaccaaaactcacatttgataaagcttgtgacttttgtttatcagatcctttgattttgagagatttggatgcatcactgcaaaaatgtaagtaagaaccaaataaaaccctttgttagaataagctttgcaacaatagcgagagagacgaaccgggcatagaagtcaaaagcttggtcgacataatcttcgacggagttgattgcttcgttgatgaaaatctgaggatttagattcatggaatcgaacactgcctcgcttttgcttccttccattttcacactctgctacgaattttctcgaactcagaaaccctaatttgcctgtagttggaggagaagactagaagttgaatttcagtaactgtctttttgaatttcataacaatgaaccataacagttaaagataatgaactttcaaaacaaaaggcccaacacgtgaagcccattaaaaaaccgtttggtttataaaaatgaggaatagagtttagattcttttgataaaaaaaaaaagagagtttagattctataattaaataaaattaaatattagtttgagtttataaaagagtatttaaagtataaattttataattaaataaaattatatattagttcgagtttattaagagggtttaggtttaatttata

SEQ ID NO: 57343 - DNA, 503 bp, Arabidopsis thaliana landsberg
tctctaacatgccaccgatatataacggtgtacctgggagttatgttgaaaaaatcatcgccagaccaacttaactagcatgcatcctaatctgctcatcatgtttgtcacctatacatacaaaatgcttctgttatctttattccaacatttagtgatcggaaacaatgtggtgtaatgttgaattatgaacttcgatgaaatagttgtcatccattctttaaataatctatttaggtagctatatgtgcctgctcttgagcttaatgtgccaatagaatatttgtgacctgatttgctaaccctaaaactaagccatgttcttatttacgtaaccataaaccaaatacgaatttttcaatatcccccatgaccagactcatgcaaatgaatgcttatataacttctttgctggacctaaagttttcccggacttgaaacaagaatctaaagtcatgccttcatcctaaaccatattcttattcatttggtgcaaactaatg

SEQ ID NO: 57344 - DNA, 597 bp, Arabidopsis thaliana landsberg
acacccattctaccaattcttcggtctccggacgggggataaggaccgatggatttacgttaaacggcaaaccataaatttccgtgtgacctaaaatatatcgcaccgggcggcctgttttgagttctgtaagaacagcggccatttttactgattgttcttctgttagttcaagctccggaaaagctttgactttcgcgttgcttatgccgcatatatcgctgataaccaaaagggtagtggcgcttatttcattcacatcatatattgctgataattcctgccggtaagcggtaaaaacatcctttatagttttcatgcaacaaagtaacataaaagctacttttgcagcatggtgcaacatgaaaaatatatgcagcgctgcctggagctggctcaattaggcacaggcagtgttagccccaacccgatggtgggcgccgtggttgtgcaccaggataggataataggcgaaggctatcatcgcaaatatggcgaagcacatgccgaagtaaatgccattaaccacgtaattgaacgctttgacattgccagcgaattactcaggcagtcaactatttatgtttgcctggaacc

SEQ ID NO: 57345 - DNA, 277 bp, Arabidopsis thaliana landsberg
gatatcctaactacccctataaaccccattatgatcatggataggaagtgaatttgagaaacagacataaaagaattaaatgagaaatatcctaatgaaccaaaagatattaatcataacaaaacaatactcctatacatgcaaattctctaataggaggatgattaatataaatgttgagagagtatagaacacaatacaaaaaagatatctgagaacaagaacattatatattaaatcgcttacaaaaaaaatggggagctatacctttgaattt

SEQ ID NO: 57346 - DNA, 910 bp, Arabidopsis thaliana landsberg
  unsure (1)..(910): unsure at all n locations
aaactaacttgacgccgtatcctatgttccaacagttcttgttattcttaaggataattctgaccttggcctgtggtcctttgcagaattgagtcaagaagagtctgaggatgttctcttcaaggaggtacagaattacaagcccgttctcgctttctctcatgggcttttccttcatctgatccctccttcatgttcccttttgtatcgacttttgttcttctatgtatcttttggatctattagagataattttgtcagctcatcttggcctttctccattctcaaagctatgaaatttggaacatttggcaggcttggctcacnnnnnnnnnnnnnnnnnnnnnnnnccttggcatagaagtggacactgcgagagaacgtcttagattttggatcagcaggagcgcacattctccatcttcacatgacgccatggaaggtacaatttaccttaccaaattccttttagccaagaggattatccataagacaactcttacaattggttcttattttcagttgagcaaggactaacagagctaagaaagctgcggatagaacgtagattgtgggaagcctccaggtccagccagtaagtagtgaccttggggacctcgggatcccagaacagtcttgctaccacagctttaacagtactgtatatcgtacatgctttcttctcgtgtggttggggtactttgcagtcagaaaaatgtttccagttttgtaaaccgaagaattgtattacacgcactacttttgacatataatatatccacgttttcacgtcctaaccatcaatttgcagactcattcttgttggataagtatttaatgtaaaatatctactgatacagactaaagatcatcagtcaccagtaatcgttgcaagaacacgttccctcct

SEQ ID NO: 57347 - DNA, 308 bp, Arabidopsis thaliana landsberg
  unsure (1)..(308): unsure at all n locations
gtttatgtccaccatgcaagaaaccaagcgagatgggggatcttcactcgcagtagagcctccacacaaccccatccatactcgacttcgcctccatcacgcgaccgtgatttgtcctccataccgcaaaaaacaaaaccccctccttctgaaagcgacgctgccttttcttattaacgcgatcacgccatctgctcctcacgaggtataatacattaaatgcagtggacttggtcatgtacgannnnnnnnnnnnnnnnnnnnnnnnnnnnnnnnnnnnnnnnnnnnnnnaaatggcacgcggccac

SEQ ID NO: 57348 - DNA, 791 bp, Arabidopsis thaliana landsberg
tgtgcttcgatggttgttaagttttttgttcacagtctcaattggttctggttcagccgttcatccgtgctagctcccaatatatttcgaaagtcttgtagacaatatatatgttaatagcttagtcatgattagaaatcttccagagacaaagtatggttgacgtagacaattgtagaacgataacaaacagttaccttctcggtatgctgcagtgaaaatccattagctgggagggcaaaaaggaagaggacagtaaagaataccgaggtaaagaagaggacactaaagaatactgaggtaatgaagatgacagaaaagaagactgaggtgagtttatgtaacatggtcttggcatggctgggaattactatcttttcttttccagaggctatttgtgtttaggatctcttgataccaaatttacatggtcttgccatgatggctttattgcattttgttatgattgatatggtcatttttttgtttttaggaagcttatcttgtgaaagtcgagcagcttgctaaactcaaacaaaagcaggaggaggataaagcagctgtgacactgcactgcttcaggtctgtaattactattgcatagtctggtttgctgtgtaccttgtctgttttatgctgatgtttcttcgatttgaacttgttttcagcaagaccagtgagactggtaaagatgtaattgcaccctcagaaggttttgagcagatgcaatctcttaggttcatagataattattacacggccagggattttccccttgcaatggcttttta

SEQ ID NO: 57349 - DNA, 1244 bp, Arabidopsis thaliana landsberg
ctctagctattatgtttttcaaaaaaaaaaaaaatattaaccaatgtatgccacatgtatgcttgtatatattttttacataagaaatatttgctcacacaagatcatgatatagtctccgtgtctttctttcttgttgttgcaatttaattagattccagtgagtttaatgacacacaagagagtgaacaacttgagtttgctgctggacaatgtgtcaatggatatgtctacaaagtggataaggaatgggtttggttagcagtatctcgcaacgtgacagcacgcatattcatattagacacatcatgcaaagctcatgaacttgaagagtttgaaaggcgttttcccatcggtaaagctgtttcaggctatgttttgacgtacaataaagagaaaaaaacattacggttggttcagcgtccactactgtttatccacaaaagcattgccaatggtggaggcagcaaaacggataaaccatacagtagcattcctggtgatgatgatactctatttattcatgaaggagacattctgggtggaagaatttctaagatacttcctggtgttggtggacttcgtgtgcaattaggtccttatgtattcgggagagttcattttactgaaatcaatgattcatgggtccctgatccattagatggttttcgtgaaggccagtttgccaaatgtaaggtcttagaaatcagcagttctagtaaagggacttggcaaattgaactgtcattacggacctcactagatggcatgagttctgctgaccatctctcagaagatttgaagaataagtaagtttttattttgcctatactcttcattactgtctgtgttgcttttaatatggattaaatctgtttgcgttaaatcaatgctggtaaacagctcatcaccactagacgataactattattgggattttcttatgcattaactctatttgaacttgaaattcgtatgtttgtgaaatattttcccaaaatgtttctaatttacttattcacctgatgattgttttcacttttcagtgataatgtttgtaagcgttttgagaggattgaagatctttcgcctgatatgggcgtccaggtatttttggcctaataaccatgactttgcaacctactttccttatggtaaaacttatgttaatttcaaacttttacagggttatgtcaaaaatacgatgtcgaaaggttgttttattatactttcaaggacagtgg

SEQ ID NO: 57350 - DNA, 514 bp, Arabidopsis thaliana landsberg
tttttttgttttcttgagattacaaactatgcatgcggggaagagaagcatgcttcgagacaagcatgggattactccctccattttcttctaagctagcaaatcgtctatgaaatttgtcaacaacactgcaaaataaaaattattcgagaactattaaggatgttgctcatcaatattactgcattgaaacaaacaaaataacaagagggaaaataatctaaatgaaatgatatagttaaggtaagaacctaggatatacaaagctcatttttttagagcagttcttcaagtgaaattgggatgcgaagagcatataagagaacatcaaatggataaaatcgtttattccaagtgtagactgctgctagcttgaattgttggcatgttccttgctcttggtttttgtacacatagaaggaaattcaatcaaagtcccatcatgccaaaatattccagtgaactacatatcaaatctttattctttaaatagtaaaagtttgcaagcgctacc

SEQ ID NO: 57351 - DNA, 1118 bp, Arabidopsis thaliana landsberg
tgtggcatgttgctgcccagctaactggtcttggttttttcattctgatttttgtattttacttgcttggtgaatcattttatcatatcttttcattagaagtccccattggatttcatctaaatcatttttttggtttcatgttaagcgtttgtatgctctaaattttgatgcaggacacgccgggccttgtaaagtcatttccgtttgtgttacttacatggacgagcattagacttgttcacctctggctacgctaccagtcgcttgcagtcctacaatttaacacggtatgagttttgaaatggatattcttacaatcccaacttgagaaaactcagataagtgataactttgatttgaaatattgacaggtaaatctcaagcgtgctcgtatcatagtagaatctcatgttgtgcactcagttgtaccaggtaagcatatttcttccctttatccagcttattattcaacgttcaagtaagactcataatactctctttacaggatatgttgactgcaacaagcgagaaaacattttgctgtggcagaggttcatgaaacctcgaatcatctttggtgtatcccttgaagagttgtctggtctggagaaatctgtttctaaggtaatcttctcctttcatcttaactgcatccatatgtactcttgagagaatcttctgtttgtaagtccaagttcttgaaactttgattttttcaggtcaaggcactccttaagatgtacacaaaggagaaatatattcttacgttgaataagttgaacaaggatactgagttttctgtgtcctttaaggtaaaacctatatttacacgacttatctgcttctcattctcctccaaaagggctaaatttaaaaccgagcaccatactgcatttactgactccgtcatgattttccttgttcttgcactgtgaagaaagaacctagaatacgttactcgtttatttgtctttcaagtaacctgatagagagttgggtatgctttggttagtgattagttgagagtcttgaaacccattcatgggtaattaattagagaatgtcaagttaggactgtgagagatcatagggatgacatactgtttgcttcttct

SEQ ID NO: 57352 - DNA, 906 bp, Arabidopsis thaliana landsberg
tctgtacctgaaactctcaaactaatcagttggtcagaaacgtgattcgaattttgtaccgtttctgcattccagttttacgtttcatatgtgcgtttcttttgcaggcacgcgtgtacaaatggtggaagccggattgtgatctctatcttaaactatctagagcaatcagattcaccccgatctgcttctggggagtttttgggtaagcgtatacctttttttgggtcacttccatttgtgacacttttgcctgcaagatcttgaaagaggtaaactactcccatttcttttctagatcaccattaccgtgtcgacagcctatgcatgtggtcgttggtaaaccaatagaagtcacaaaaactctgaagccaactgacgaagaggttagtcttcttcttgttttcatagcttctgcttagaatgggattgtgctactagacgttactatgcacaatgcttacttgtgagttcagcattcattaacttatgatgttttgggcatctcagattgctaagtttcatggccagtatgtgcaagcgcttagggatctgtttgagaggcacaagtcccgagtcggctatgatcttgagctgaaaattctttgaacaaaatctccaatggaaataattacttgcgtgtatccttcattaattggtaccttggagctggatttggacttaatataaatgactacatcatgtagtctacatgtattgcatgtctttagcatcgactgttgaagtaatggaatacgtttataaagcctgtaaattacatgtcgtcttgcacaagagtatgtggtaataataacacttgacccaaaaataatactagttaaatttttccttgacttctctgacaaaccaaactaatgtggtcatgaatctctctaagcccatgaa

SEQ ID NO: 57353 - DNA, 1637 bp, Arabidopsis thaliana landsberg
acaacaaattattaaggggatatagtttaatattattttgaaataaaggatttttgccaaagagaagcactagaacatggagaagacaaaccaaaacatgcctttatatcattcaattatttagttatataaatggaccttatggtctctctctttctatctttttggtggatttgcattatgcctcctcacttagttaaatattttttcttacttaaatatatcctgtcaaaagtgagaaagattaagctattggacactatagtagttgaaaattcttaaatattaaattagattcaatttatctcacagaaagattcatcatacaccatgccaatacttgatcttgaagtgacaaaaagaaactcataatatcatcaatgtgagagtgtaattgaatagtcttcaagtggaaaataaaataatgtagcaaatgctgcaactttactcaaagacctatttcctgtttaatatatattctagccttttctcttttaattattgtaattataggcatgaaaaggatgtgaagataatgatttacgaatataagtatgtattaaattatgttataactaaaaggggtcgcggatctcaaccttacatgattgaaacctaatgttgaatttgagctttttggaaaggggacatgaacttaacttctctagtgagcaactacacactataaggtacaactactatgtcatctcttaatatatgcatgcatgtttaaaaatttcacatattaataaacgattcaaaatattaatatatgttactataattatgattgttgaaaaccattgttttcatgattcagtttccgttcaatctaacttcttgtgccatactatattgttattgtcattcaagaccataaaatttatttgtatattatatgggacaagaaattttcagaaacttttcaatatgttagtgtaaaatatttacaactttttaaatcgactaagaatccatgattacattgagctggtcttgtggccatattgcaaaaagaaaaatcccaaatatgtatgtaatcctgtaatgtagattatgatttgatccgacatatctaggtcagtagagaaagcaagtaaacattttaactttttcccatggaccaaagtccaaactcatcattagtatgatcttatgtctattgattaagtgagtctacctttctttaaaaagaagcttgtgtcgatagcaatatgcaacatgctcaagaaaatatattttttctttctttaccatcttattctcaacgttacagtaagtcagtaaccacggcatataggggctttgacgaatgggcttagacatctttttacttccttgttggttcaatcaattttgcaaggtttgatgtgatttgtacataatccacttcaacttcctcatctttacatttagagaatttagaaacgagttctttaatagtacaacaaaactaattctccaagcttatattacaaaagatgtttaagtgtacaaaccaaaacccgccttgagtttctttctttatgtctcccaaaggaacaggaaacttactctgagtggtcttgtcattagatcttctatggaaccagtcagcttcttcttctggtatacatcagtcaatcatcatgctcagc

SEQ ID NO: 57354 - DNA, 1157 bp, Arabidopsis thaliana landsberg
cgaaccagctctccgatgatcattccccgaaataataattcgaccaatacatgcagtggtttaattaaaccataccttaaaaataatcaaggatgatttacatggaccagagaacgtaaccgctttaagcatgtaatctctattctttggagccacaatgtaaactattccggttgacgaacaagctgcttcccaagctttcatgaaggcctacggctcaaacatagatttcatttaattataatgttagagatattggattataatgttagagaaataaaaaccttagaatcgtcgttcccgttggctttagcaccgaaagtgttgacgttaaaagatcgaggagaagatctaggagcataaccatggcgatttttcaagtgactgttgcgtgtattgtgaccatgttgatgttgtcgattggtttcataataaacattagaagacatgaaaagatcatctctatgattaaatgggtagctgctgaaacaagaaggaagaaatgttaagataaatactgataagattatgatcttttcatacatttttttttgttggagtgggacttctctcaaagttagattatggttgggtttgacgtagaaagaatgatgaggaaagagatgagtgaatgatgtgtcatgaagaatgcaaaagttcgtgtatttatagagatgagagagagacagagaagtatttgatttaagagatttagttgaatatcacctattttttcttgtagaaaatcagaggaaaatgttcgttattattcctcattttcattactcaaatcgtttccagacaattaacataactaagtttatttaagtcgatcaaattgaacgtacattaaagccactttaacaaatacaaatatattttgtccaaaaataaaataaaaatacaaatatatatacgtaatgaagggttcttttgtactagatcaatacaccaaattgtataataagttaataattaagctaaatttttgcatcaatatctttattgacaaaagaatctaagatcaaaataacgatctctaaaatattagtattaaaacgaaattataactttccacagaaggtcgtttgtttttttgctggttaacgttttattatttgacgctgttgatgctgaccacttagttgtattggttt

SEQ ID NO: 57355 - DNA, 474 bp, Arabidopsis thaliana landsberg
gaaggaaactgtacaatccagataaggatagactggttaaaattttgtaatccaaaggaagaaaaatcaaggtggcttactgaattcaattggtcatgtatgaaatcaacgagttgttggcttgtcatgcaatccctgcagataagagatgaaccaagacaggtgtatcaatataactaccaagaaatgaacttcaaaactttttcaagctgaagtttaccaaattccatcgcaggcaagaacaaggaaatcatcatcatcacagagttcaacctgaagagaaaacagaaaattgttacaaaagatgtttcaagaaaaagagacgtggtgtcgttagaccactcacagtgttaacatctggactagcggtaactatttgcttttcagatggcaaaaacttattctgcttgaattccatgtcacctgtcaagaaacaatgagtagcttcaatcagagattgcatgtaaacaacta

SEQ ID NO: 57356 - DNA, 1361 bp, Arabidopsis thaliana landsberg
aagaatgtccactttatattaatgattagtttagtcgaatgatttagtgaatacagtatcattttatattaaaggagagctttaaaattgtgagaggttaattatgtttcgtatcacgattaacaaaaagttaattatgttttttggccgacgttccaaattcacaaggaccagtacatttcttgtatctatcatctcaaccttttcggtttatgtcactggataagatacatgtacaatatataaccaactgatataattagtgtcacgattattagacagtgttttaagtcacaatatttactaaactactaaaaagaattgtttaacgcggaattaatgaatttgatacccataaagaaattatctaatcaaatcaaatcaaatagtaagagaaaaaaaaaatactccaaaaaggagtaaaagagaaggcaaagggggagtctcacgtgcggatgggaacttgcgtagtcggcacggaaagcgacaaaacattggtgaaagccacgcgcttctcgtactagttctttatatcacccacgatcatcctttagcatcgtgacacgtcatgtcttcttaacacaaacgtgtactactattgatgtttgtcccaattatttgtagcgacattttatgagacatctctcgctaggccgtctcaattatatacccgacctatattaatcttacacactcatttattgcaattgtttgttttttgtatgaataataattgcaattgttatacattgtcaaaataagatatttagttaacaaaggagttggctagatttcataaaattgggaagtaattagaaacgaatgcattgcatggttggctaggtactttgattttgacacggaactcagcctacttgctaattaaatcataaaatatgatgtgtgttcgatgatttctaagtacatcgataatgtgttacacataactacataagcaagagaatttgaatatttttgaagggaccattcacatataacgattatagtaattatgcatgccccatatatggggaattagtcaacaaagttcaccgactaaaatatttagaatgttaaaatgctaattcccctccaactcctaactttttgactctgggggaggggttttgtgtgccgacccactttggctcgtcttgtttatcgtacttctctatgttattttctaggtaatacggaaaaaaaattggatacaatggaaaacaagattagtagaaaacttttttttctttttttaaaaaagaaaatttttacttgttgacaagaaaagataagtttttttattatgacatgcaccagtttttgtgaaggcaaatgatatacttgttcgtacggaaatagca

SEQ ID NO: 57357 - DNA, 519 bp, Arabidopsis thaliana landsberg
gcttgatcaacaattgccaaaacatattcagcgaccagcaatgacgttcaaagaatttggttgaatattagcgttaaaattaattctcttatttcattggtcaaatacttaaccacctaaataataacggttatttttggcgaccatcactaattatcgtagtggttatgtggtaattgaattaacatttgatatccaataaatttggctaccgatttagtcatcaaaactgtcatatttgtctaactattgttaaaatatacaatatatttttttattttcttactaattttaaaacaaaagttatactccaactaaataaaatataaccgtttttttaataattttaataaatggaaaaaagaaatacaacaaaaataaaatttgttcaacgattgatgaaaactgggcaaatcaaagcatctgccatctggtctggtggttggtgaaacccaacccacttcaatgccaaaataaaaagtcttatgtaagcccattaatttaaagcctactaaagga

SEQ ID NO: 57358 - DNA, 521 bp, Arabidopsis thaliana landsberg
tttcgattgtatagcaatcaatagtggaagttctaggattaacatcactggaatcaattgtggacctggtcatgggataaggtaattcataattttaagcttacttgcacataaaaaagatatgacataatttattaaaattattatcggaaaacagtgtggggagtttaggagcaggtggagcagaagctaaagtgagtgatgttcaagtgacacattgcactttcaatcagacgacgaatggagctagaatcaagacatggctggtattttctttctttcttttatactacgtcttatagttacactaatattaatcattcaaaatgtgttacatgtattgttacttttgaatttagggtggacaaggatatgcaagaaacataagttttacggacatcacactcgttaacacaaaaaatccaattataatcgaccaacattatatagataaaggacgtcttacagaggtaaatacttttttaataatttataaatacaaatatatttatattaatact

SEQ ID NO: 57359 - DNA, 777 bp, Arabidopsis thaliana landsberg
gggggggagggcagggggggggggggggggggggggggaggggggaggggggggggggggagaggggggagagggggggggagggggggggggagaggggggggaggggggggggagggaggggggggggggagggggggggggggggagggggggggaggggggggggggagaggggggagggggggggggggggggggagaggaggggggggagggggggggggagaggaggggggaagagggggagagggggggggggggggggagggggggagggaggaggaggggggggggggggaggggggagggggaggggggggggggggggggggggagggggagagggggggggagggggggggggggggggggggaggggggggggggggggggggagggggggaggggggggggggggggaaggggggggggggggaggggggggggggggggggggggggggaggggaaggggggggaggggggggaggggggggggggggggggggggggggggagagggggggggggggggaggagggggaggaggggggaggggggggggggaggggggtgggagggaggggggggggggggggaggaggggggggggggggggaggggggggggaggggaggagggggggggagggggggggggggggaggaggggggggggtagtggttgaggaggggggaggagaggggaggggggaagaggggggggaggggagggtgggggggagaggggaggggggggggggggggagggggggg

SEQ ID NO: 57360 - DNA, 471 bp, Arabidopsis thaliana landsberg
tttcgatgctaatcaaataaaatgtggtgtaattggaatttcttttaaaattattttactttttagaaagaattaaaggttaggtatttgatattggtgtgtaccaaatcttagtagacttttatggtttttgttctttcttttaacagaacgaacaaatctaaacggaactaatgttgggtttgcgtcctgatggctcaagaacctaacttcacattcatttaccaatactacaaactaaaagatcatccattgtaaatttgaatgaacaaatacaatcttttactattgtaactcaaaccatcagaattacaaaaacattattattccataacttgcaatacattcaacttctttataccttctctttttgcagtttaactaacgtaagctcttccatcaacctatctacctctagatctgaagatcctccttctttcaccgcatttttcgccatttctgctaactcct

SEQ ID NO: 57361 - DNA, 1357 bp, Arabidopsis thaliana landsberg
actcatctgtgcgcaggcaccgaggtccgagacgcataacgttatacatgaattgaagaaggagattgcagaactcgaggctgagaatacagcaagttggagacttcttgaactaaggaagaagcagcttgcattgttgttgcatgtggtatgtcgattttacgggtttcgttgtgtttttatagctaagattctaaacaagatttcgcctttctcgtgtttctttatgtttacagctaaatcctaacctttttggttttgtgaaaacttttatgtataggtggatgagttgcaggagacaatggaggatgaacagaagagtatggtggaagaaatgcagaggaacattaccgctgatggcgctgaagccatgtccatcgattagctcctaatcttagcaactttgtcttctcttgaatgctaaagaaacaaacctttcattgataagaagaatctgttttataaatttctggtttcttctggttgcctcataaccaaaattgctatgaaaataaggatatgtatgtttcattttaactcgcagattcaaaaaaaataatggcagatcttctcgaggttttgaggactatgtgaaccggaaaggtcaggagaaagtgatttatttgactaaaccaagtttggtaatgattcatcaggaaaataaccggtccagaaaattcaaccgactaagatttattcccgtaccaaagaatttgcttttaaaccggactaatatatatacagtacacgtatatcttctctattttgcaaaatcgttctcctctcttcgccaccagagagtctctccgtctctttccacggcgagtttgcgatcgtccgcggtttgctgtttgtcgtcatctctctcgtttgaagcattcttttctaaattcttcgcagttgctaggtctttatcttctaaaccttactattcgtcggtgtgctttcgcaatttatctctaaaccctcggaaatttctcctgcaattctgagctctttgttcgtcgatccgaatattcagtactttccattgaaggtttgatctagaggtaattcgaatcggaatttgatcaacctttgttttctttgatatttcgtttcagatgtttgcttcttcttttttccgatgaatttcgaatcgcttgaccttgttccgttttccgtttatcctccaaagtctgaatatgtttatagctagctagattcaggatttgattttaccttatttccccaataataatgaaatccttcttaggttagggtttttgtgtttttgtgttttgcactagtgttgaaacgaaaattgtcatcaagtgtgcaagtactttgtcagagtaatgccaatataatagttttg

SEQ ID NO: 57362 - DNA, 520 bp, Arabidopsis thaliana landsberg
tgggcatccaaacatataagcgaatatcaccaaaatccaaaatctaagaaatttcaaaaagcaagaagttatatatatgtgtccattgctttgccaaaatctaagaagttatagattagggtttctagaatagataagcatcgaagggatcacaaaactgtaaaccaaactgaaataaatgtttataccaaaaacaaaatttgcttcttaaccaattggttttataaaaagaataagaatttgaaaccgagtttaatgtaaccagtcgatcggactaaactaattgagataaatataatcataatgtacattttaatttattaatacaatagatgttagtataactatattaaaatattattagttcaaacattatatttatataatataaagttaatttcctaactaaaaccaaaccgaattcaaaccataatcaaactggaccaaactaatctgttttcacattctatataacccgaaaccaaacaaaccgatcggattttaaccctaccctatataa

SEQ ID NO: 57363 - DNA, 1139 bp, Arabidopsis thaliana landsberg
  unsure (1)..(1139): unsure at all n locations
tgggtttcaatttttgtctaagatttacgtattaattgggaatattacagcatttaccgcaacattcgttatcattctcaaatactattaggatcggtaggtgtgtaagtaatcaactgtgtatgatttaaatcaataaattgttgggttttccttaagactgtagtctaagtaagcatcatcagaaactcaccggcctagcgtcagacctaatattaggaattagggagacaaattataaaaaagcctagagacatcataacctaacatttttgttggatgaatctgaatccactaaccattacagtatcaaatacttggagtctaacgcagagttgacaagaaatgatacctttcttcaattcttttttacaaaaatatcaagtcatctattttatcattattcaatttagaccccatcatctttatattttcctaatgtgggtccttaattaacctcagccaagagtagataaatcacctggcccactgtataaaactataaattaatgtgctgatcgcaattataggattttacgtagcatatgtcagcaaaatgccttgtcgtatcttttttgtttctattcgctttaaatattagttcacgttcaatggtcttttgaacaaaaaaatctctgcttgcaattgtaattttaaattggttagtggaagttaatgtggtatctcacgatacgttcaaaattagggacttcatacaaaagaaaaatgtagatgttcagtgagatgttactagtccaatgtgtaactactacgaatacatattattggtttaatttatggccctttgtttggtaataatccataacctcaattagcaaaatacatcggagntgtttttttagacgttagttttgtaaaaaacaaatctagttgattttacaaaggaaattaggtgagagttctgttttcgaatatatcaatgaggaagttaagagagactagaagtagttgagcaaactttaaaatgaagcttcatcaaaaataaaaacttaataatgacgtagatatccataaaacaagaaggcaagtgtactgttgagagaagaaaatctaacactccaacttttctaaattcttgagctgcttgagtcattgagttttgtagctggcaaggagtg

SEQ ID NO: 57364 - DNA, 506 bp, Arabidopsis thaliana landsberg
  unsure (1)..(506): unsure at all n locations
gagggaaaatcccaactgcttctcactccaagggatagggtcaggttagccatttgtttgaaaaataagggttatttaccagaactctccaaagatgcctctggagagtttgcacactgtctagctcttcgtgaagcttatatgaatttacaatcgtctctgggaatgtngggaaatattatagcgtcaagtggagtattctgtctccaaacgtggttcttggttctaaagactcgggtattggaaaccgttcttgaactcgtcgaatgccttgggctgcttaaccaagatttacgcaacaagaatcaggtggaagaaatactcttgactgggtgcgattccctgcaacagcttactcggatttctattcagctacaaaagttggcaaaggaatttgatatgttggcgacgtgtttcatagacatagacgatngcagttctagcattatcacaacaatctcactgagctgttcagttctggctattgctgctggaatgttcttttc

SEQ ID NO: 57365 - DNA, 342 bp, Arabidopsis thaliana landsberg
taagaccacacatcgtttattgttgatcgaattttctctaaattttatatgctgcagttcacattacaatactattcaggcacatggttttctactaataatgagctaaacctactttgagctgaaaacaaattcatgacttgttaaatgtcaacacttggaagaaatttgctccgaaaatctttatagtttccatattaaacaatgattttgcatatattagtgaacttatattaaattcataacaaaactttttgtgtggttttaatcaacttcaacacttatcacatgtacaactagaacaagtaacgatcatttttataaattattatcaagattttg

SEQ ID NO: 57366 - DNA, 1295 bp, Arabidopsis thaliana landsberg
cttcttcatatgcatagtaatatcaaagggatgattatcttgtatcttattcttacgtatacttggattttcaatatttttactaagttgacgattgaataatatacttttattattgcaaaccgttatttgtaaacatatgtactcagcaccagcatcttttaaaagtatgactgatgctaaatttataacatcaggaaacgatttatgttacacgcatgattagtcatttagtccgaatttatcttcaaattaacaatcaaaatatattcaatatttttttatatatattaaaagcgtaatcatcttaagtcaaaggcttggagagaacaaggcatacaatacaagtatcgaaatcgaaccaacataacattattaattaacgagtaaatctctgaaaaatctaaccgaagttaattccttgcgctagaggtaactcgtttccatagttgatggtactgtcaaaagataaaccgaattaaagaatcaaatatcaaaaacttaaaccggaaattatgaaaagagagagagaagcttaagattgttaccaagtcgatcgacgcatgtactgtttccatgagtcgcttccagcttcacgaccaccaccagtcgctttctcgcctccaaaagctccaccaatctcagctccattcgtcggtatgttcacattcacaatgccacagtcacttcccagtggtctagtagtaaaaccatcacattaaaattaatttcagtagattatattggtcggaaagattgagttaagttgttgtttttatagcacttacccgatccacctgaagatgttttcagggttccgagtgaatatcgagctgcttagaccttgaggaaccgagttgtttatcgcaacagcctctccaaatgactgtccaaaagaaagctcatcttttcaaaagtctatttctgaagaaaatagatgatttcagagacttttctttttgtaccttaaactttagaacatatagaaccggagcaaatagctcttctttgacgacagcagcatctgctgatatctcgattatcgtaggctccacaaagtttccttcaccttcgactgctttacctcccgttagtattttaccaccctgcaaatgcaagattggttttaagtgtcagttgaaaagattaaactttttaagtggttcttgattatgcagcaaagcatagaaagagaggtacttgcctgggatttgatgacttcaattcctttctcaaagttcttttttgattcacgagtatgtaatgggcctaacaatgttcctttcttaagagga

SEQ ID NO: 57367 - DNA, 296 bp, Arabidopsis thaliana landsberg
ccacacaactaagaaactggggcgaacatacgagttacgttcaacggggtgtatggatggccgatcggactatgagaccatgagaggtatgctggctgacaatccagcccttttggggatataacggggacaaatcctaccacatgccggtgaagggcaacaacacgacgtgacctgacaccgaagagcgaaactgaaacggcagacgttctatgccgtgcacaaaaaccgcggtcacgctacagtggctagccacgctgttcagcaacaccgatatcccagacgctattgcgggg

SEQ ID NO: 57368 - DNA, 552 bp, Arabidopsis thaliana landsberg
atgctcaaccttagagttacttatgagaatgaaaaatgggttaattttatccaattggttaaaaccaactttcgaaaaaataaattaaaaaaagtagcttagacgcgacaatctgggatgcaccccttcatccggcctaccctgccggttcagcaaatgcatagcagacgcccttttatcttcctgttcaaggtccagccctaatttttggcaagactccacaaaggccttggtataaatatacccgggacaaatagtattgacgcggatattaaaagccgccaggtcttgtgcccagcattttgtaagccccctgatggcaaacttagtagcattgtaggtggcaaaatttgactggccaacgaaaccgcttaccgaagaaaaattaatgatacttccgccgccactttctttgatctgttccaccagatattttgtcaccagtgaggtccccttaatgtttacagaaagaatatcattccagtcctcgggggtggcatccaagctcttgaaaataaacctggcagcggtattgactaaaacattagttgg

SEQ ID NO: 57369 - DNA, 577 bp, Arabidopsis thaliana landsberg
tctctctgtttcttctcttgagtggagcgaatatccaaaagattttctagtttctttcatccttcacgagcttatactttttcttctccattcgtttgtttttaacgatcaaaaacaacggcgaaggttagtctccggcggtttcttcgttgagatgtgacgacttttttttttgaacgtttataaagattacatattcatgtatttagatttcttttgttatgttaactgtttcattgatgttcgagttaattttaatttgactcaaacacggtaatttttttttaatcttgatctgttttgttacgtaatttttgggttgattttagcctgaaatgatgattttttttctttctagcttatgtttttcgttaatcaatctttttcaatataaagattagcattttgttgaaattcattttttatttgattggctatgaggaatcagtttcttgaaatggaaatggtgatttgatttgatatgttcacaatacgaatgaagaagattagggttaatttatatttatgacacacgaaagtttgtttattaaggtcaatgattatccgttttgttgta

SEQ ID NO: 57370 - DNA, 893 bp, Arabidopsis thaliana landsberg
ttttactcttaggcttcaatcagatatcttataatgtaaatagtatacacctaatttattaattatactcccaaattaattaatatgtacaactagtatatatatatatatatatacattttgagttttgaaaactaacttaagcaccattcaacttagagaagacatgcaaaaatcctccaagtgacaaaatatccaagatcaatctcgtacgatctaagaaaattgcaaatcaaacaatgatcctatttttttttttaaaacccttaatctaagaatctaacaatcgtaacttgttggagagaacggaaaccacaatcgtttccaatcacaaccttaacgacattgtttacgtcaaggttaaattaacccccttttaaaaaaaaaatatgatcgaggttttattgcagtttcttaccacttcaactattaactaatttttaccacctactgaagaggtgaaccaagtgaagaaaagaatgttgtagacacgctcattgaatgcatatacaagtaggtatatgcgtatagctacattacatgtacatgtatatgcatgaagtacgtatttaggtataaaagtatacatagtaataaatatcttgtaatcacggaaaaagggtcgagagggagggaccaaaggttagaaggagaggtacgtggagtgtcttatgtgccgatggtttttaggatggacaatacataacttttaattccaccgcaacgtggttcattccctcacctatacgaagtcattttcaaaccttactatctttctcccttttgtcctctcctatattaatcacctggatggttttctctattctcactaactcactctctcactcaagggtccaaaagtggtttctctttttcaagttctctttctcttt

SEQ ID NO: 57371 - DNA, 1092 bp, Arabidopsis thaliana landsberg
  unsure (1)..(1092): unsure at all n locations
tttcatgtgcatatttacactactatcttaatatttatcgaaaataataattatattaggtagataaatacgtgaaaacattaaaattagttattttcatttgtaaagcacctctctgttaattatggtagatggtggttcaatttgcatggtcaaatgatcctgtaaaaaaagaaaacatacacgttatacattttcatgcatattancaatatatagcttaatatttatcgaaatacatatagagtaatggatatatacattaaaaatgttaaattaaactcttgagtttataaagcacctctgtgttaagtgttgtagtgggtggttcacgaccaccattgctatggctgggactacgactacggctacggtttcctccacgtccacgtccacgcctacgcccacgcccacgtccaccattgctagggctttcgttatcatcacgtccatgaccactactacgaccacgactacgatcatcatcaccagcacgtctttcctgtacaccaaagcatgggttttaggatatcggatagcatacatatacatatacactaacttaggatttaaaattttcaaagaactatgttaatgaaacacctctctgttaattatggtagagggtgattcaatttgcatggtcaaatgttcctgtaaaagaagaaaacatacatgttatacattttcatgcatatttacaatatataacttaatatttatcaaaaatatatgtagaataatggatatatacattaaaaatgttaaattagacttttgagtttgtaatgcacctctgtgttaattgttggaaagggtggttcacgaccaccattgctatggctgggactacggcttcgtccacgtccacgcccacgcccacgcccaccattgctagggctttggttatcatcacgaccacgactacgattacgattattaccaccacgtcttccctgcacgcacaagcatggatttaaggatattgatcgatagtatccaaatacatatacttactaagaattttacaattttctaagtacgctgttaatgaatctatccaattataaacttcatacgataaattaccat

SEQ ID NO: 57372 - DNA, 1088 bp, Arabidopsis thaliana landsberg
acgatttgcacatacgtgaaaagaacttttgctgcctcttgacactcagaaactcgcagattatatcctgggttggtggtcaacgcctgcctcaagcctgagaatgctaacaatatcctgaacggtttctccagttcaggagcctgtacaagctcgtggtccaaagtctgcatatttcaaacagtttttctgagatggcagtttctggaagaaaataaagtttccctatctatggctggttaggaaggatttctttaaggcctcctgattctaaccattcattttcattttaggaagaagtgaactcagcattgaaatacattaaaatcgaagcaattgaaaagattaaacacttattttctcgtgaaagcaatgagaatgttgtagatctgatttgatcgtgagtcattttcagtttagagatcaaaaacatcttaggcatcccattgaacagtcttggttttgccacatgaacaagcttcttgcttttttgcacactatatcacttacaaatcaaggaattttaccttgcagtccatgtatgttagacacccataattcgaaagcaaaatagctgattgatccaaaattccattccgcagacccagatacccattctcaataagcctgcagacgcagtaagtcacatataaattgaccaatttgcagcactaattgctggtttcacagagaaacaactgctcatgaagcaatacagaagagcttcttggttacattagaagggaatatacctgtcatattcgatattttctgttggggatacagtcaattcgtttgcattctctagagctagcaggtatgccacaccaacctgtcacatttctggcgatcataaaataatatacaagattcattttccaaaaatgacaagtaaacaccactctcatatgctaaaaatgtttagttactattaaagagcagtaaaaattgtctttccggagaaatttctgctgtacaaaaacaggcgggattcagttacttacagcagctgatgagctaagcccggagctatctagtccatttgagccactgaggtaacccataatgccctttaaagatcaaaacaa

SEQ ID NO: 57373 - DNA, 416 bp, Arabidopsis thaliana landsberg
tttgatccaccaaccactaattctgagagagctaagcagagaaaacacaccattgatccttctttttctgattttcaaccaattccatcttttgaagaatgctttcctaagagcactaaagaacacaagtaattgcttcacttaatctacattttttcatattggaagagttgagaaatcactgggtgggttttgggttgctttcaggggaaagtggtccattgatgaatctgggtcatgtttcttaaagttcccttttcggtcgtgttcaattttgtctgggaggtgagcccaggtttttgataaattaatgacaactaggtggtccctcaaaaatggttaatggcacaccattggtaatggtgattttcaacctccgtgttttacctttaacaccattcaccctgtgtcttttt

SEQ ID NO: 57374 - DNA, 1150 bp, Arabidopsis thaliana landsberg
cactttcagaaactttgtaagaggagaacggtaaatcgtttttaattgttctaatttttatttagtttcttcacaaatgtacctgtatttcaggggataatagcataaagtgaagttctaaattcattctaaacaaaaaaaaataaaaaatctagaaaccacttaagaataaaaatgcccgtatctcggccacatacaaacttctttctttttcgacaccaaaagattattgaaaatatatcttttttttttgttaaaagatatattactaaaaatagtcttcacgtaaccaagtgcattgtaaatgtcatagatcaagttgtggctcaaaccaaatgcaaatgtcaaaaacattttggtaggtagccacctaaaaggagcatgtgaaaacttaatttggtatttcatcattttcaatttatgccgtattgaattatttagagtcaaaacaaaatccaagacagaaaaaagttcccttgaatattaaaaagaggattcactatatatatataaaaaaaaacttgcccatgtcattttttctaccaaacaaaataaatatataacttgatcatgtttcgtaacctactgttgatgatcatgaattggttgtgacttatgactgatgatgacgacgataatgtcgatgattataattagacagagatatctatatattatccagatacatattattctgtgtgaaaaggatcaaaccgttgtttccaagtatcaaatttgatttttgtcttatatatatatatttttgttcgtgtgtgtagtatcaatatcagctaagaggcggcccaaagcacgccttaccatcagcacttaattacctaacaaagtcgtagtagcatataatatatgtaacaaatttatcaatctgagatctgtaaattttatcaaataatagctaatggtttaccaaaagaggaccaaaaataaatactataacattcaagctgacggtttatcattaacaaagaaaaaggggaaagaaagctgacgattattgaataattgatggagacgtcatcatgtttgatagctgattattctaagcaaatttgtcactttgtaacaaaataataagtcgaatttaatcatatttggtgcagctgaaatgctgatgaatctttgatcatcccca

SEQ ID NO: 57375 - DNA, 607 bp, Arabidopsis thaliana landsberg
catccagccagcccttctccaaatacggtctcgtggtaagtaaatttgggaaagaaataatgacgaatgcatcataaattaaagcttatgtgtttgtgaaagtgttaatggttttgaatgctacaggttatgctttccatgtatggaagtacagcaagaatgatcacatcaaagtggttgcgaaaacacggcattgcaactgttgaagcatcagactggaacgagctgactcagatcattagagacctcttggagacgggaagccgtgacaacagctttgattcacagcacaatatatctgatccactgagagcagagctttcaaatatagtagaaatcaagaaccctgtgtttgtcatagtggtggatatcggagtacttgatctcaccacaaatatatggaaggaacagcttaactacctcgacagattctccaacaaagcaaagtttgcttggctactgaagcatgacaccttcaatacagctaaaacagaacttatacgaaaagggcatgtcatgatggttaacaaaccgttgtacaaggccaaaatgatccacattctggaggctgtaataaaaaaccggaagagaggcttgtgtaatgact

SEQ ID NO: 57376 - DNA, 151 bp, Arabidopsis thaliana landsberg
  unsure (1)..(151): unsure at all n locations
agaggngagaacaaaaagaaagaaacaggacaatgaatgacaataaaaggtaacggaagacgaaaaacaagaagaaagggggggaaaaaaaaagaaaacgaactatagaacgaagaatgaagaacaaagaggaagcaaagaagaacaaagc

SEQ ID NO: 57377 - DNA, 833 bp, Arabidopsis thaliana landsberg
gtccgattatattacatagctgttacctggaactcgaaattacataaatttatgcctttgtctaccatatggcatcgcacatccaaacgcttgatttagaagtagaaaaacttggttaaaagagaggaagaaatagtgatttgtgaggtaatcgaggattggagatggatccaatggaaagaatgattgctaatcaggtgggattagtggtaaacataattaccacacgtgtctagctgtctaagctttatttaactcactaatttcttagaaatgtctcctttttagccccatacttttacaatggatcgaattattaatgagaaggtatcatcattttagatctttatagctttttaacccggccaaaatggatggcagcggaaagaagactcatcgccaattgacattaaaatatgcattttcaaatgtttttttttttttttttttttttgtgattcaaccttatttaggctattgagatatctccaaaagatataatattgtcgtccctaaatagagcagatattcagatatcattggtaataatactgaaaaagtggcgagtcattgtagttaaataatttgacatcttgaaaccaggaactcgattctactggatggttacagatggttcccataacgacaaagattgtgagatttgttttgattttcatcaatttatcttcgtcagaaaatctgtttaaccaaaaaaaggatcatgactatacaaatttattaatggtgtaatattcaaaaagcagaatataagaatggaccgaacaattgagattgagttcgacataaatgggccatatgattcattaattagg

SEQ ID NO: 57378 - DNA, 262 bp, Arabidopsis thaliana landsberg
ctttaaagggatctcaagaacaaactgatcagttgtgtcaaaggaagttgtatatataccagtattctgcatagttaggaataaatatcaggaaggttgtttgaccaccacattagataagatgcgaagcccttatgaaacaggtaagtatcctgaaccccacaatagaaatttgatgctccaaatgcagtctgtaacaaccattgtcaccattgctgttgtaacaaccaaatagatttttcagtctcctaactccaaatgc

SEQ ID NO: 57379 - DNA, 493 bp, Arabidopsis thaliana landsberg
ttgtaatatatgccgtgttgagtttactgaaatgatgaggctatctgctccaaatagcacccaaagcagccataatatcatctttaatagtgctccaacagaccttatagaagcgtccagtgaacccatttggacatggggccttatttgaaggtagctcactgatggttccctcatgctctaaaaaaggagagtcaagagcagatagctcatgttttggcagaccaagggcctctagatcagttgtcctttcgctgctcccacactgaccaatgagggtggagtagaagtcatccaccaccgatgctttttcgttatggtttattaggatacggcctccatccaccattttagtgaccaggttcttccttttgcgatgccttgcatgcatgtggaaaaacttagagttagcatccccttctttaagccatgtgatccctgatctcaatattgccatacgttgtttgaaagaagcaagcacatgtctttttta

SEQ ID NO: 57380 - DNA, 496 bp, Arabidopsis thaliana landsberg
  unsure (1)..(496): unsure at all n locations
tatcatctgctgccctgcttaccaaaccccacgggggggggtccgaccggcctcggcctgcctgctactttgtaccatgtgtcctccactcaactgcatcattggcgactgcgcgatgtgccatgccgaccggccggtctgtctactgatgggtcaaggactcaaggtagaacacacacattacgtttgagccgacgtttgctgcgacaactgacggacctacagatcgacgacgcgccgtatcctctggcagtgagctgacccgtgtcgcattagagcctgaaattagatgatagaatgtatacatgacgattcgcannnnnnnnnnnnnnnnnnntcgtgcgaagatatggacagctaaaccttgtacaccaccaggcacccatgcctaccttcggattctggctcacattctgagcaatgcaaaaactgcagagctcataacattcgacctgcgcagcatcgtatactaccctaacggacaacctcattgatc

SEQ ID NO: 57381 - DNA, 2251 bp, Arabidopsis thaliana landsberg
tttattgggtaacttttcaatatgtttgttcagtgcctcattgtactaaagttttaatatattaagacattatattgtgttcgatttatagatacgcattaattgttttgtagagagcaaaaacacaaccataagatgatttgttttgagaaaatataaaatggtgtatatatcaaaagattatcattggatgcatagtcatcattgagcgggactctttgactctttgtgcgtatatatcaatacttggtccccggaactagtatgattaattgattatggatcaacgacttgaatcgtccttacgtaaaacaatatttagttcagtttagacggatacataattggatagagcgactctcacgtccacccacttttgtttcttggaaggagtcgatcaaatttcatagttgttaatatgatttcgatggactaatatcctccatatcgagggtatgaatagagatagtgttcaaataggtccatctaggaaaatgatatgtgatgatgaagtgctatggggatggagaattaattgtttaaattgaatggcttgtgacttcatcatttcctccaatctcctacgctttccaacttggtggtctcagtactctttttattaatttaaaagaaattccactacgttgttaaatgttagtgttgatggtttttcatggaaaaatatcccaactgccgatgaattgatttatattcaaatgacacgccatcaaaacaattgtatctaataaataaagataagtcattgtaactaaacaaattttgtccacaacagtatcaattatgttagataaacaacattcaacgtttaagattttacaatggatcattcacatttcactatgcattgaggatgcgtgataggacgcatcaaactcaaaacttggtttacaagaagccaagaagtaaaaaagttgtttgaactcttaagcatttactaccctcggattttcttcattgatgttcattcaatgtataggaaagaataaaccattgaatttaaagaaagaatcctacaagatttactctcgcccactgacaataaatgaagctgattttgaaaatgaaattccgggaaaagaatcaattttgaaacagaaaatgatatttttccaaaacgttacttaaattaagtaacttaatatatattaaatagatttggtatattagttatttcaaagtataccacagctcaccggtgaatttaccggagcagaaaatgttaattcaacatttggtggttacatcactagaagagttctcgaaggttaaaagcactacacatagtatacaaacctcttcactttcttgctaaaagacattttggataaaggtttttgaccacgtcaaagatgttacataatattgaatttatacttcatctgtttcatataaaataaaattaacaaaaactaaaaaaaccaattcatatcatacagagttttaaattaataatgcacaaaaaaaaacattagttggtttcttaatagttaatataataaatgattagaattttaaaaaataaattaaataatatcactttgtaaaactacaattttttggttcgttttcagtaatagccaaaaatataagttgacaaattcttaggaagcattttaaaatatcggtcatcaactctttcagtaaaatttaaaatgcaggaaaagaaaactctagaatcaatcatatatatttggtgttttctaactctttggtagtttggaatttattaaacatgttcatgttttaatctatttagagatttacgaaagcgacaaataagaatttttccgcatttggtagcgagaaaaatgttgcatagtatgcgacaaaaaatgtaaaaacaaataggatctttaaaagatgagaatgtcggacaaaaagtgcgaacatcagattcaaattatcagattcaaaacaaaatacgtaaaacctgatatttattgagttattctgttgtaatttttctttttagttttgtaaaaaaatgtttttgaaataagaaaatatgtgatttaataaaatcacttgtttaaaataaaaccgagggtacattttaactcatggcaattttgttaattatgtggtaattcattaccatcttgttattctttgttaaataggtattatatattgcgtggcaactattgctatttatctgctattctgcttattattgagtaattcttttcagaaaaatgtttacataattgaccttaaaaagcaaagattt

SEQ ID NO: 57382 - DNA, 323 bp, Arabidopsis thaliana landsberg
aataaactgtctattaccaaaagaagagccgtcattagtcaaaattgagcaaacgaattcaattcccaattcacattccctaaactcgtaattatacaccaaaacaaatggcaaacaaatcacatcacagaagctgtcatcctcccaacttacttaaacagcctcgtcattgtcccctctggtcgttcaaacttcttaatatactttttgactacatactcacatacatgacttatcttatctcatgggtcattttctttttctctttctacccacacaaaatctcctcttacttctcatcttctttttacttttccctttcg

SEQ ID NO: 57383 - DNA, 1120 bp, Arabidopsis thaliana landsberg
cttctggaacttgaaagtggagtgatttttgaatctcctagttcacaggtggagtttctcgtttcccaacttgttcagaagtttatagagattgaggaattagctaatctcctcagaaaacaattagaggccaaggggaatgagttgatggcgatcgaggagagtttactgcaccataagactgaaatagctggtctcagggaaagtttaacccaggctgaggagtcccttgtggctgtacgatctgagttacaagataaatctaatgaacttgaacaatcagagcagaggttattatcgactcgagagaagcttagcatagctgttactaaaggaaaaggtttgattgttcagcgtgacaatgtcaagcagtcgttggccgaagcctctgctaaactgcagaagtgctcagaagaattgaattcgaaggacgctaggcttgtagaagttgaaaaaaaacttaagacctatattgaggcaggtgaacgtgtggaagcattagaatctgagctgtcatacatccgaaactcagctactgcattgcgagaatcgtttcttctgaaagactctctgcttcatagaattgaagaaattttggaagatttggatctcccagaacattttcatgcccgagatatattggaaaaggtggagtggttagcaagatcagctaacggcaactcttcgcgcccctctggttgggatcagaagagttctgatggaggtgcgggatttgttctctcagagccctggagggaggatgtacaaactggcacaagttctgaggatgacttgaggatcaagtttgaggagctcaaaggaaagttttatggattggctgaacagaatgaaatgctggagcagtccttgatggaaaggaatactttggttcagagatgggaaaaactcctggaaaatattgatatccctccacagctacactccatggaagtggaaaaacaagattgaatggcttgcaagtacaattacagaggctacacatgaccgggataatcttcaacagaagattgataaccttgaagtctattgtcaatcagtaactactgatttgaaagtctcacaaaaagcagtaggtgatgtcgaggcaaatcttcatcat

SEQ ID NO: 57384 - DNA, 1023 bp, Arabidopsis thaliana landsberg
aactccatatggtagaatcacttaaattggaggagcatctttaggagctaaaaccctgtggtggcaagtagggttacaagggtaaggacaatctatcttctgaaacaatgttctgtcataaacccaatctccaacagcttttgctattgtctgcaaattaagaagaaataatgaatcatgaaaacacaatgtaacattgattctaatgacattttgtttgacaagaatttggagaatgtttgcttttttttgtaccgttcggtttagaattggagaatcttgccagaaccatgaagtttgtgtctcggtttggcagtgagtgtagcaagaatctatgaacatccctcttgatgaagatctccctaaacctatcactgcactcaagaactctaacctgaaatctaaaaggacgcaaacccgaaaattgtttagacccttttcatgcattgatgttaagaaatgatccagcaaaatcatatcataatttttgcttctatactaaccttgcataactttgatctgacttggatggcaattcttgatgtctagttgacaactttgccattttccgtaaggatcagctgctcgcggagccaaaatgttctttatctgataaagaaatgtgaaactaatgatgagtttttgaagttagattatggaaaatacttcattcaagctgaaagatctgttctttggacaaatcttgcagtaacaaagagttaacccacctgccaagagtcataagcggcattaagaatgaacagaggagttctaatctggcgagccacatattgcggaaagaaacactgcagatttttggtgattgattatatgggtaaaaatattgaagagaaacaaaaaatggctttataattataacatgaatgctttctaccattgcaggagttaatcttgatgtgcatgacctcggcaagttctttgctgataccctgcaaacaaaatttcaatgaaaagttcaaataacaggaatgagcaactgaatcaactgtcactagataggaa

SEQ ID NO: 57385 - DNA, 1398 bp, Arabidopsis thaliana landsberg
attggagacacttgttacgagcgtatgtccatagagctctatactaagaagaccacaagggagttaagtattacggtttcaggagatcaatgtggaggaaatggtcttatggtgaaccatcagtgtgaaggattttcattagaaccaggggattccataaagtttctctttttctaccagagtgaactctcttgggcatctggagttgctgtttttgcagtacctatgaaggcgaccgcacctgttttgatgcttagtctctacaaaaaaccggtcttttgggtgcggacgaagaaattcgcaattgcggttcttattgctgcagctgtactcattctgatattttgcttcaatgatcacttcatcgaggagaacaacaagagaaacaatagcaaccacatggagtcgagagaagttgagaaaccatctacgatcacaatatcccctgaaatggattctctgctaagatccataagcaaagaaagcctgcaagtgttcgatgaggttcccaagaacagcagcagcgttaagccagttgcttcttcacacgaagaagaagcatcagaagctgtgaatctcactgtaaagacagcgaaagacaagaagaggcgccgtaacaagaaaaagaagaaaggaggaatcaacggattaacaccagagtgcacagatgtttcaagcagttacagcggaaactcaactcctaggtctccaatatcaccagaaccacctactactcaagccgcaacgaagctagtaaagcctcctactaaaccggtcctatcgcactcagcaacgtttccggtttcaggggttaagtcaatgatcatacaacgaagctcactggctccaaatgtgagagcacctggagcgaaatcaagaaccgaagtgaaagaagagaaagcgaaagagtataggtactatgatatctggggagatcacttgacagggcttaatttgatggataagttaagggaaggggtagaaggtaaaagctcaggttttgatggagaggagtgtgagagtttctttgttaagggtcctcagaacttgttagcagactctcacaccaggtttgtaagtttctgtaaccaatggggctaacaaagaaataaagaatgaaaaacaaaaatattttatataataatgcaaggcccaatgggctttctgagcagccaccaagccattccattagtgagatataaacacaagcaacgtcaaacctagataatgaatgtcacgtagacaagtttcgacgtctttataaacttgaagggcttggttaagattccgtcctatggcctctccgctactccctgggccaccggatcagagaagaaatctcgattggtgctggtcgaagctttcttcacatctcatgcaattggtatttgaccgcct

SEQ ID NO: 57386 - DNA, 862 bp, Arabidopsis thaliana landsberg
atgcgaataattgggacacggtctttcgattccatgtattaattacgaatttacggcacaagttcagaaaaatgattaggtctaaaaaactaattaagattaaagaaatgagatgctctcttattatcatatgtaaatgtaaagatcgagtggcgttgtcgtggcagaaacaaaagccaccaactgagtagtctacatttccttatcttccggttaatgtttttgacctctctctcagtttgttgccactttcatttctcatcaactctgccattcaagaattcatcatcatcatggaccaaacaatacattcatttagttttatcttcaatattaaatgtatcttaaaattgtctcaatagttgaatattttggtattgggtctctgtttttgagtcatgtttgattaattaatgaacaaaaatcaattttgttcgagtgagttcatttgaaaacagtcgggttggtccggtttagatgccattgagttttctctccaatgataaaagaaccagcttcctataaaacctaaaactaggtgacataaaacatggaaaaatgttgaaattagttgtttcataatatatagtactccataatatatagttgttttattttgcttgaaacaaaaataaaagtaagatggaaatagaagaaagagaaggtagggtccatgactgatgaggtagacggtgacgcatggctttcggatttagttgacgtgtcgtttctcgctactaaaacggcaggtatttccgttactacacaataaactaactcttctcgtattcgggcaaaacaatgatgacacaagtaacacattcgggcatgagaaacggcgtttcgaatacttttattaacg

SEQ ID NO: 57387 - DNA, 555 bp, Arabidopsis thaliana landsberg
  unsure (1)..(555): unsure at all n locations
ggtgtgcagtgcagcctgtgcaggagggcgaggcaagccaggttggacgcgcgtgtgagagtgatggccgtgcctgtgcctgtgaccagctcctgcgctcctatgcccctgcagccggtggcaggtggagacggcgtggtcgatcagggaaccagggggcagggcggcaggtgaggtgccgtggcaagcggcatggaggcaggcagacgcccgccgctcggagtggggtgtcgggcggaacgccgtgccggttgtttcatgggcagcgagggccttggcagtctgtacgcgcgtccggcgtcccgcataaaatttaaggctttgtacataattataagtttttgcgacggcttaaattggatacttcataatttagcctaaaattttggactggctccctgtttgactcttgttttttctctttatcaaagatattgacatattgttaggctaaacaggagtcatcaagcatgctngtatttatattggcatatctctctcagcagcagcaactactaagctctgcactaaatcctactagctcgggtctaaata

SEQ ID NO: 57388 - DNA, 584 bp, Arabidopsis thaliana landsberg
ttaatacaacctataaaaccatatcaatgcgaacaaactcatactaatgaatattataaaacacattttcttgatcaactattccagctaattaaccacaacaaagactatttcttatgtgtcacacacacacatacacacacacacacataagtctttctatattttacccttgattttctactcttattccaatgcaaaaagtgtcttgaacttgaacttgtaaatctctcttagtaaaacgtataattaaagttataagtggaggttagtaggagtcaagttttaattgggcaatatctaatgttataaaattcatgttacaactgtctcccaccttttaatgtagaaagatcatgtatgcatgcttatatgtatgaatgatccatgaattttaaagttaatatccaaaatccacccataactgtatttatataataaaaaggcaggaaaattaattttcttcccacataatttagagcagttcttatcttaaaaagatggatggtcctttttttaaaaaggactttgatggtacctaccaaccaccaaaaaccatgttttatgcccttaattttattttt

SEQ ID NO: 57389 - DNA, 891 bp, Arabidopsis thaliana landsberg
ctacaaccaccacattgttggagacattggtcactgcatttgcagggatctgtccggattgagcgaaaaacgaatgctggtaatggtttatccggttagggaataccaaaacaggggaaaaatcagcgatccatcgtgttccatttgcggaaaccatggcctttccggttgttgatttcagcatcatcccttctgcattgttttgatcaatcacaacttgattaatatcatgaaactctccttctagcttgacaatcgggaagttgtttttggcggtaccgctaaacatgttgttgacgatgtttacaccggaaatcttcccgtgtaccgatctcaagacgatgtttgcatctcctaagaacaaagcattggtgacgtgaacatggacaggatcttctatgactatacctgtgtaatcaaggtaacaattgtctatccttgttaaatgtgatttcactagaatgccgattccaccaaaccatgtagctttattatagcaatgcacacccgtaaccatattcgctccaccgtttaaagagataccgataccagccgagaaaatcactacatctgtaatggcattatcgttactcgagatatcgattcctgtcccggtaaatcctctttcttctctgtctcctcctaccgttgaatgttgccccaagaaggagtttgaaatgtatgtctcatgacctccttggactttaatcccttgcgttgtgaaatggaggaagtagcaattggttatacggatgcgagctgagtcaatcaccaaaataccacctcctcggaatcttgagtcgaagagaacatcttggaaggtcacatcctcatagaagatccctgagttctgatctttctgatcggagaacgaatcatcgggcgacattt

SEQ ID NO: 57390 - DNA, 154 bp, Arabidopsis thaliana landsberg
  unsure (1)..(154): unsure at all n locations
cacgtaacttgtttgttgaaatgccgcaattaattgctgaatttgcgcgtgcctttttgaatcctgttggtgtatgtgtcagcatttttggtcgaagtggttnttcaaacttctgagtcggcagctttacttaccagttntagagattctacca

SEQ ID NO: 57391 - DNA, 490 bp, Arabidopsis thaliana landsberg
aatgatccggaatggattgccgccgatcttctcagccaggcggagcatgacgcatcgtcctagtcgatcctgatcacggacgatgcggcgtttgccgatcgtgtggacgaagccgcagcgcgccagttggcgacattgccgtgcaaggccattgccgaaagaagctggggcgattatggcgccatcatcacggtggccaaactgaccgatgccgcgccgctggccgacgctttcgcgcccgagcatctggagatcgccaccgatgacccggaagactatgccaagctggtgcgccatgccggcgcgatcttcctggggcgctatacgcccgaggcgatgggcgactatatcgccgggcccaaccatgtgctgcccaccttgcgcaccgcacgtttttcatcgggcctgtcggtgctggacttcatgaagcgcaccacgcttttgggcctgaacgccaaaagcatggggaccatcggcccgatgcgctgac

SEQ ID NO: 57392 - DNA, 1239 bp, Arabidopsis thaliana landsberg
cccgccttgattttacaaagatctaaaccacaacgtaactctgatcggaaacttacaatcttcacttatcttttcgctcaacttccttgagctcccattatcaaatcggtccagtcgtcttcactcctcctgatcgatgatgcttcgagagggattgatttctacggaaaaattctctgagattttgagagggaatgttcagtttaatgctttcgagaatcgtttatatagctagtcattctgaacaaataaaccaatggatcggaaagcaaatgaagagagaaagcaaatgctagtgtattttaatacaatatgaaaccacaaagaagtaaaacttttcagcttgatcttcagacaaactagaaaatgcataaaccagattaccagaagtaaacactagaaaaagattctgtttttagaagcaaaaaatcacactcacatgaagaaatagctaactaaagaaaccacaaacaaacacaaaaatcctcttatagatcaaataacctatcgaatcatatacagaaggaaagagtattaattcagatggaaacactcccaagccccaactgatattccttgtaaacaaagaaaccatcaaaaaaccctagatcctcttaattaatcattctttcgagagaaaggcttgaagctccttctctatgtgttcttgagcagtttttttggccgcaagaaacggacgatagtgatcagtgagcatccataccatacatttggtcatcatcgcaaagactccaacgttggtagcttcatcagtgcaatcttcccagtcagtaaatggttccttgcaaccacctcctctcatgaacgctgaaaacacctctcctttctcttcttcttcccttacttcatttggggatacggattcccctggatctcgccaaacagttgacggcaagaaatccttcatcatcagttttcttcgcatcgagaaagggaagatagtaatcagaatgtctctccatacacttctccaacatcgtataacacaaagatataggttccttattcttcttctcagcttcctccacacaacctttaaaggccgtataatgtttccttggatgcaccttctttcataaacacttgtaatcgattttgccaaagacttcacgaatctcctactttctctggctagacttgttttttttttgagaattggtatcggaattctccggtttcagatccgtggatgacaattaatcagtgattatcatttca

SEQ ID NO: 57393 - DNA, 1231 bp, Arabidopsis thaliana landsberg
tttcactaatgatcaagttgtactttttatatatttcattgataccttgttgatgtaattcaatattttaggtctgttttgaagtccatgtagtacaatactaacaactattaaaatggactatatggagaaaaggttaggtcgtccacgtacggtacatatagctttagactggtgtagttattataattacaaatgtggacatcacatgtataactataacataacaataagatgaatatcatatattaaaggtcaattgaaattagttcgacgtaataataagatgaaaatatccaaaaagatgcaagtacaaattattgtgggatatagtcgttaagagaagcaaaacatgtcctacgttatacgtattattgcccactagattgtcaccgaattattagacgtgagctgactttagtcaatcaatatcaatatatttcttcggtgtaaatcaatcatgtagagttttgttttttttcttccttcttttgacaaaataaaaagtcattcatatatattcgtttaccaaaaaaaaagccatttatagtatagtggaagatttatacattataaaatgacaaaataaagcaccataagcaaggtttaacattttctaagggaaaaaaatatacagagtggatacaatgtgattatcgaagtgaggaggtcctacatgtagttaaaagaaacagacatgaatctacaagcaaagagttgttcgtcagaggttgttgtttttattgccatgtgactattaaagttaaattttgatggtccttttttaatctaatcttgtcatgtcgcttttatcatttcataaataaaatttactaattttgcgttgtttgaatttatatttcgacaaactttagcgttgttcaatttagtcgagtagaagaactcagaaaaacatctgcattagtgcatatctatttataataattacatttgttacttcacacacttcccgatttctaatttttgtaatgatatttggccatgtggggtgggggagggggggagggggagtggtatctatattagtgaaaattaattagtattattattggatttaatgaattataacccaaagattctgtgaattttgctttgagtaggtccgtatccagttgatgtttacactaaagttaatataatgataatcattgcagttaacaatcaatatttttccacaaatcaaaatgttaacgacgcggaaaacatgttg

SEQ ID NO: 57394 - DNA, 1318 bp, Arabidopsis thaliana landsberg
tccttaagcttgtgcaagcctctgatatctcatactgtctaaatacttattatcacttgattcaaatttgccgataatggaaagtaacaagatctttgcatacatgtaccaggcaaaaagaagaaaaaccagatagccagtggtgaaaaatctgctgattgtatgctagaatgagtgtcgtgtatacctgtaaacccatttcttctaacggatgatagaggtttctcaatgtctggttagattctttcaaaaatgtgaaacgtgtgtttttgcatccggaggatgcgaagcagaggaatggagggtttgatatgattttatttaagttttccgaatcctttaatttctcaatctaatttttgtcttatcaaaatatcatattttgtattcattctttctggtatgtggtgcctttgacggagagttagaatatggagcaatttgataaaaacccaactcaattttcctttctctcactgaaacagcaaaattaaccaagttaaagtaccactaatccaaactaaaaaagtaccattaatcctagagctttttctaggtgacgttaatatagtcgacgttagtcctatggtaacgtaatgtcccaagagactaaccacactacagaaatctgaagcccttgcagatcttatatgttttattctaaagatgttgaagagaggaccataacaaatacatgtatgataatcaaacttcaaacagagaaagtaccaacttaggaaaaaccataatatatactaacattagatactaattcatagatccttcatgacattgtatgataatcctcattggatttttatttacattaaattcttaaagcaaataaaaaacaaacaaagaaaccaaaactctactgaagctgattgaaaggagaaagcttccatgctgccgagcgcacgaccttccactccaatcccataagaactgagcaaaactcaagtaaccatcggaactggttttgctctaggtaaacccagaggccaagaaccgattttgctcaggggacccgaaaaaaaactaaaccccactaaaccggctggctgctccgagaactgacatctttaggtactgcaatatatccagctgctgctactactactatcacgcaaactatacagggaaatgtttattcagtctcatctccctgcggagaccaatgttttttcgtcattggagctcatcgaaggaagaggaacagggagacttgggtttgaatcaggagtggcttgctttttctcaactggtacaggctttggtgtgtaagtaaagttgagttctttgttggctgcaagtgcac

SEQ ID NO: 57395 - DNA, 423 bp, Arabidopsis thaliana landsberg
gaagaagagcaaaaaaagctgaagacctgtttcaaatcgacaaaagcaaaaccgttttcttttccaacatcagtcacgagtttcggacaccactcaccttgatccttggtccgttggaagaggtcatgcagcagtcacataccatggctgagaaagaaaggcaaaaccttaccgttgcgcaccgcaatgctgttcgactgttgagattggtgaattcgctgcttgatttcagccgcattgaatccggcaggcaaaaaatccgtttttcattggtggacattgtttcctatacccgaaacctgactgccagtttcaggtctaccattgaaagagcagggctgcaatttgtggtgaaagccgatacaattatacaacccgtttacgtggataaacaaatgtgggaaaagatcatttttaatcttt

SEQ ID NO: 57396 - DNA, 1133 bp, Arabidopsis thaliana landsberg
ggctatgaaatatggggctccccatccatcgattcgattgagattcgatgagagcgacggagaccaacgggcaacatcaacggcggcggaggttggtgatgacgccgggataaaaacatcaccggcggtgtcggagaaggcgtatgcaggaggtacaaaggacgtatcaacgcaagctaaagcaggcatctttatcttcaccctcttatcagcaaacgatcaacaatctcactttacagaaattctcgaacaaaacaaaaactttcgagagaagaacagagcaaaaactgaaaaatcaaacctttttttttctaatttcccagaatttgtaaaggtaggggtttaaaaaccgccgaggccggagcctcggctaccccctcaggagaagacagaagatgaatctatccccgccgtgaaaaccacctctcgcagcccttcccgatccgagaatctccacgatgaataattcagaagaaactcgaaaaaaaaggaaattttccaaatctgaacccaacaacaacaaaaattctctaacagattctcccaaccatgcagaagtggatttgtttatgaagaatttgaggtggtgaggaattaaaaagaggaaaaggagagaatgtgaaggaattctggggaaaatgcaagaaaaaacagagacggaaacctagcggaaaagacggaaatgaagaagaagaagaagaagagaaggcgtgagattgatgaaggctattggcacttgcttatatagggactagggaatcaggaaccaacgtgagaaggttatgactgaggcaagtttgatttgggccatggggcccatttacgattacgttttatacttttctttttctttcaacattgtattttttccctctattaaaagaaatttaccctacatttttttaggtgctttgctccaacaaaaaaaaaaaaaaaaagatttttgttggagaacgatttttatttagagaacaattttaaaataacctttatatatttaccggacaacaacggaagtggattttttttttttttgttaattctattttaatttataaatcttttcgtttctgtattccctacactgaaaagtgggaattactggcaacttgtgtaactcgtgttgtggtctc

SEQ ID NO: 57397 - DNA, 480 bp, Arabidopsis thaliana landsberg
aagagacatttgagacacttgaagagcaaatagttctgatggatagacaaaagtatgtgaaagaaagatagattgacttattgagacagagtctaaggattcttggaagcaagacgaaaaagaagacaggatcattcgcatcaatgaatctgttgatattgaacaccaaatgtgtcgaatgtacataaacactttttactcaaatagtcttctgcaaacagtcatatctcgtcagagaatcttgatccacaatgtgatatttattcctctttcggttattttacaatttttattttggagatatagtaaatcatagcactatgagttcaaaaagcacatgttccatgaaagattggcacaaatcgttttttttttttggtggagctagatacaattctttagcaataatgagaatgaaccatttttccaaagaacagaaactgtggaaaaaaacttactctacacttaaagtctaaaaca

SEQ ID NO: 57398 - DNA, 1466 bp, Arabidopsis thaliana landsberg
atccctcctctccccgaagtagctaaatttaactgcctcatagcaattttttagataaactagtatcagcaagaatatcataatgtcaaaattgtaaaccaataagcttatgattgtagtgaaaaatccaagaaaaaaaataaagacattgaaagagtatgtaactcaccactaggacagcaagagaaccaagggaaaaaagactatatccaaacaaatttcgacgtctggtattgagtcttgcctctttgtgaacaagaacactaagtgctccaatagaaaatgactgataaattatggtaaggattctcgatggatgataccactaggaagttaaaaacaaacaatcaagacgaggtaagtgacaagttgattataggcagaaaggcaacatatgtattttcataaaagcaaaaacgttttggccttacggggaacaaataagcgtaataatccacaattgtgagcatactgttccatgctaaaaggcatccaacgccaagaagccaacaaacagcaagagcatagtttttcccctggagaataattaaccaaaggttttgagacaatttcaagatagaattgtatttcgtagtgaaaatcaaaagatggatatatgtaaaccttaggattggtcgtcacagctagaatgctagtatccatctctcaagactgtcgaaagggagcaaacacaaagcaaagttaaaggtactagtgtattagagtgtgctagacataagcttgcttgaagctactaaatgggaaaccatatcaagaaaatctcaagatatgcatcaaaattaggtaaagaatccagagtaaacctatcctaatcggttcggctacaaaacacgcttatcggctaaaaatgtaatcctacttggttactatgaaatgtgtgtattggctaattagctcggcgcttcagctaaaatgttatccattcaacttaattaggtaaaaaatccttatgctaatcatgattggtccactacaaaacatgtcctatatatatgctaattagctttgggcttccctctgagtgtttccagggtgcgcttgtacccaataagtttgtacacctcgatattagttgggcttcggtccaaattatccgagttatatatattaaagaaatcttaattaagaatttatttttctttataacaagaaacttagagaatcttctacttttagaagctacaacctaaactgcaaaaacaaatacacatattttcatcctaaaggcgcgtcaaacaaaatgacgatgttggttgcctaattagagagaattaaaaatcacaaaacgcgtgttgtggttgatcttgaacgtcaaatatgaaacaatgtttgttttgtgaatgcttacgcagcatcttgagtcttgaccaagcatttccgttcatcgagcgtcttgtttgtatggtctctaaattttggagtcttgagcttttggattctcctcg

SEQ ID NO: 57399 - DNA, 568 bp, Arabidopsis thaliana landsberg
ccctcctaacttggaaagccattttaacccaatatcactgatgcttccgtcttgttctcgttaaccaaattgaatttcttgaatcaacagacctattcccatgcatttttctttgctctttatgtgcaatccatgacccaaaagaactgaaactagatttgtctccttccctggcagcttaaagtgaattgctaaatccttaggcatgaagttgtttgtggctccggagtcgatacgcacagacacatgatgtcccgagatagaaccaaagaatttcagctccttgtttttcattaatccgcaagtcgtaaagacctcttgattaccttgcaccatggtcatacacattagcttttcaataccagccctatagcctgaaactggtgctcttgtatctcctcctgtccccattatcattttcactagcttcctcaagccactgtgccaaattcatcatgcctacaattccattagatttaaatcgcctaacttgcatcttgtaaagtaggctttaaaccttgtttgaatatctcctcttaagtgttgtcctgttaaagtaactttaacc

SEQ ID NO: 57400 - DNA, 1479 bp, Arabidopsis thaliana landsberg
tttatctaagaaaaaaggtcatataactggtcaaacagtttattctgaaggttacatgctatttatagtctttcgaagtgtatatctctttaatctatcattcatttcacagtttaacattttaaccacgctgtttattactttgatgcaatcatgaaaccatctatatacacaatatcatccaagaatcgttataagatttattcgcagaaatgagtgtcaattagtaataatcatatatgtgtttatcaacttgacactcaaaagtttttccccaaaaatggtggctcatctctaactatgtacccacacatactctcgtttctaaaacagtgattagttaatctttggtaatgataacaaaattgtttaaacacaagcaaccaagagattgcatgaagtttacataatacatttgcagtaagcttaaataaggttatgctagctataatctgttgttactcacaaattgttattagtgcataaaattgaaaaacgacccaagaattcaaaccatcaaatcatacataaaggtaacgcgcttgaaattgattatggtacaatatttgaaagcaaaacctaatacccatgtgtaatagtatattcctcggtacttccaaggtcaaatcaattaattttgtttttttatatgaatagcaaacaatatacttgttatgaaaaaaataaatagataagaagtcacaaaccccacctggttcacagcacattgtggaacaaagcacgtgatatgcccacaagctttttgtgattagtacatctaaggacataaaccctcaaatcaaccaagacaaaatactaaaagacgacgacgactttattccatatatataataattttcttcctcattttatatgccagattccttaatgttgaatgattcacatgcaaaaagttattacatcatcttaagcactttatttaatacattaagcaaccgactaattgtttttaataatcagaaagtaatgaactttttgatctaatcgtttcttcagttttataaccaacttgtggttttgtccacaacacttaaaacatcatccactaaataaatcactctactattcgattagggatctaagagcgctgaaatatcacaatctttaactggttaaagtaattatgcatgcctggctataaattcattattgttatattgatttgacgcatactcttaacaacaggaaagagatgtatgagtaaaaagaaccttgcacaataatgtcttagtagccatctaattatagaaataggttcctttcatgatatttattggtgtttaatcgaaagaatcaaacaaatgaagttggcttattttttaatatgagatcggatacagtttccaataccaaattcatgtatgtatatataaagtagaagatgtagtctatataagctgtgtcgacatctagaaatcgatcttacttaatataatgttgaataacctataattcatc

SEQ ID NO: 57401 - DNA, 474 bp, Arabidopsis thaliana landsberg
ccgccgcattttgcactgcaaacggtatagagatgatatcaccttacatctcgggattgactagtttatttatagggagataaagacaaaggtggtgggtgataactacacgagtgcatagtacatgcacaagtcgatgaatctgaatatgatccggatttgtctaccaatatactaagccaacgtggtacaactctttctttaacgagaaggggatccaaactttcacttagttactagtccatgattattctagagagcataaacacctttttttatcttcgttacgcaaaacctcccttagttattactcatacatacttccgacctttttcggtcatattcttagtccttttttaagtcacgccttttgctacttaacactctcatttttaacttacttaacactatcttgctcttaacttaacatatacattgttagcccatctttcatcggtcatggagtgactatta

SEQ ID NO: 57402 - DNA, 495 bp, Arabidopsis thaliana landsberg
tttttctttatagctttcccagcgcacatgatataagcaaatttccacttttcttaatacctaacattttgtacattatgctacaaatgtcagaacaatagttttaaagagagataagtaaaaaatcaattgaaaggacaataaagagagaaagatagttcagagaaaagaagaagaagcgtttagttacaaacctgtcttgatgagtattttttgaagttacttcctaaaaaaaccacattacacttataaattctccaagaacccctaacaaagataataattgtagtagtaatataacacacgacgattataaaatataaattacattcaccaccaccaaacctaaacgtagagttaaaacactcagagaatgatctctggcccaagaagttcttgtactgtcttggattcaaagtcagtgtatagaatctatgttctggcttagctcttccagcttcttcattctcatcttttcgctttctcccaccaact

SEQ ID NO: 57403 - DNA, 494 bp, Arabidopsis thaliana landsberg
actacgctttacaatacaacatacactaaccccttaatgtaacccttaaacaattgttttaagctttaactagccagtgaggacttgacaaaagtcaactaaaattaccagtaaactagtactaattcaacggaattaagttctaccagcttatataattgtaatgtcatgccatgatcgaatacatttttttattatgtaaaccgtcgttatacgtataattctcgaaagttgtatataattgaccgtgcccttaaatttgaaagataaaaattagtatcattctggatacatggattacacgtatttttatttatcatatagtataatgttgtagagagggtaaaaacctaaatatacgtattttgatgtacatgtacgtattattaatttaaatagaaaaataatcagccaccacgagtgagtgagagaaaccaaggaacgatgtgtaattgatttgctataaataagcttaacacagaacactctccatc

SEQ ID NO: 57404 - DNA, 501 bp, Arabidopsis thaliana landsberg
ttttagaagaggcaaaagatggatatgagaatttagtaacctcgagtccggaatcgaaacccatatccagaattcaggactatcaacccaaacaatatctagtttccttgcagataacatccaacatttcttcccgcttctcttttccatccaaaagctctacattttcagaccaaagaacacttctataatttttgttcaattatttggttgcatgcatcgtccacatcacattcctctcaaacaataaatttctagaatatatatatctaaaaaacatggtcattaacctagtattttaattatgccgtcgtgtcaccaatcaaattcaaacccgcatattgcatattatatattgagcaaaaaaaaagaacatgggatagtgtaaattaccgttcttgcatcctcgatgagaagaggggattcacaaaaacgtatgaagagctgctcgttgaaaatctacataaagattatcgatcacatacgataatctgagggaag

SEQ ID NO: 57405 - DNA, 1158 bp, Arabidopsis thaliana landsberg
ggttcatcaattacaacaagcatccaatcatacatagaaaagttaatgaagcaactgttcactgagcaaaagaagattgaatcaaaatcaaattcaacaaaagaggaaaaggtgaattctcgaattcaaagtttttttttatatcgtattagttttaagctggtcaagaagccatctaaaaattttcaactttcattttcacggaatcatagataaacaagaacattattaagcacggtggcaacaacaaaaggggatgaggagtagtgcatgcactgcccaaagcagacactatcactaattgtttataaataataggaaaggacatattccagagtatattggtcagtgaaagcaaggttacaaattatttaaaagaatggcaacctcagacgatgtttagaaagcaacatgaagcaagcagaaaaatcaaaagcaactttaacttgcaggtaaaataccactataaatagtacatgcagtcatcaacaagactaatgactcatcttataaaagagcgaattagcaatataaaggagataagacttataagaacttgcaagttgccccacgtcaatgtcctctttgatgatatatacacaaccaagaaggttttaaaggggggaaagagaatagacatatctttgaaagatcatattcactaatatacaggagtgaagcaagacaataactaatgtacaggggtagctttggaaaaatagttttcaagataaaattatgaagatgctgaggaaaagaagactcgtaatctcaaatctagggaaatgcaaggtcattatgaacttggacggagcattatgctaattcttgtggaggttgagataactaactaaaacattgtcagaactgtcaacttactaagacttcactaccgtttagtgcagatgaaattatctagacacttgaaaaaccaaggttgactaagcactaaagacgctagtcgctagttgacttcacaaatcattatgagtcttccatagaatccgaaaacaacatccaaactccacaaggtaatacagaaggaagtgaggatatacctttgctgttgcccaaaactgagtaaaatcagctacccgcagattgcggtcatccactaagatgagtgacatataccagcaagaaacggtcaattcagaa

SEQ ID NO: 57406 - DNA, 480 bp, Arabidopsis thaliana landsberg
gcacattgttattataatttaaatactattaaaaactctattatattttttccacctatttattttggcaaaccttattaactctaatataaaataataatttgtttttgtaagttaggaaatatatttgcataaaaggagaatttaaaccaaaatgaaatcatatcaatccttcattctagattatgttttagttttgatacaattatgccagataatatttattcaatccaaaccaaaatattcaattccaaaaccaaactatatcttaatatagtttaatcgtattcattttcttatatttactaatctgaatatgaactaaaacccaaaaaaagatctaaaactaaaattttagttctaaattaagactatatttaaattaactaaagttcgaatctaaacaaaaattataaacctaaatcgaaaactaaaccgaatctgaaacccggtttgagcatctcaactttatttttcatt

SEQ ID NO: 57407 - DNA, 1067 bp, Arabidopsis thaliana landsberg
  unsure (1)..(1067): unsure at all n locations
catggaaaatgcgaagagcatcggcgattttctcattttttagataactctgaagctttagaatgtttttagctactgtgggcgtgataccatctctatccatcatatcatacactagtcttgcaagttttggttttcctgcaaacccagctccttcaatgaataagttgtaggcctgaaccttgtgttcccaaagagacaactnnnnnnnnnnnnnnnnnnnnnnnnnntttttttcaccactttccatctcacaaacacattgaataacatttcgatagagactacgggtcggggtgtagcccttttcctgcatcctgatgataagtttagcagctatgtctcccctcattagtgtgattgagccatatatcaaactggtgaacattttaaaggaggtgtctacaccacttttattgaatagctcattaatcataagagcgtcctccactttcccaacatcgcaaagagctgatataatcttgcaaccagctatacgtttaggcaataagtcccgttcagcggcagcaataaccagctcccttgccatgtcaggcttccccttccagcacaaggcattggttagtgtactaaatgtctttccaccaagaaaatgccctcggtcaattgcccctttcaagacatcataagcttgttcaacactttcattggcacaaagggtatgaatcagatagttgtaagacatggcggtaggagcaaacccaatttctgacctcgaccggtataactcgagggcttcatctacaaatccagctttgcaaaagaagcataaagcagcattcatcgttttcttattcggcgaaactccacgtaccatcatctccgtaagaatatcatacacactatcaagattgttctccttcaaaagttgaaagaccatagagttatacctgaaaacttcgagttcacaaccttccaaaggactaatcttctgcaagaaatccgcagggttattcaagaatccagctttaataagcgccctaatccaaatgttataagcacggtccatattcactgttcccaccagtttgatctcgtctggcaac

SEQ ID NO: 57408 - DNA, 1278 bp, Arabidopsis thaliana landsberg
  unsure (1)..(1278): unsure at all n locations
atacattaatagaactgctaagtagtcttctaatcctctccctcttcaacatttttgcaaaattgacattttgtttccgagtctcactataagctgtaataatgttcattagtgcattagtttcttcatttgttgcccaacaaaagaataagctatcattgacagttttgtgatattcggacacggccttttgaggcatttggatcaaaacttcggtgcacatactgaaaacatatggatatatcgggttgaatcgtcttatagaattcctcgagaagatatattttgatttggtggtggccattagtaagaatagcataagacaccagtcaccaagattactaatagtaaattgtaacaaagtnnnnnnnnnnnnnnnnnnnnnnnttgagatttggaaacccgtatgatactactcaatcttcttaccataacttttgtcactgtcttataagctataagattactggtctacttaactcagaaatatttatgtcctttgtagccaaaagctacactgaaattgacacaactcgagtgttgtccttttctggtcgattgaatagaatcgaatgtcttaatcgagtaccctccagcttttatttcgtgtaatttattttccaaacctaccactaccagtttcataactttcgaataaatttatcaaatagtcttttgagtgttcaaagtcttgggataataaatggtcagtgctatgtatcacccggatgtgaaacattatgggtggcgattgactattataaatttattgaaatatacgattgttactcgtttaatagcaaaagtagtacaatgtatatagtttctatcgagaacactttgatctatttaaaattcgaaaagtacatttaaaattcataaacatataaagatagtaacatgttagatctgcatagtaccaccaaaacaagaaaaaagaaacgcacatcgccacataattgctatgattctcactgtcggctgctttgaaatattacgattcttttggtaaatcacacaacataatataattacaataaatatatatatactaaagtataattaataccacattgtttaattctgttttgatcttttaagatcagtcagatccaccgacgttcctacacgcgcaggtccagatccaaacagcacacacacacacacaatgccactagtgtaaatgcttggtggctattgcatttgcacctattgatactctntcttcaaaaacacgttattgtttttatnttcacccaactttatacggattatact

SEQ ID NO: 57409 - DNA, 124 bp, Arabidopsis thaliana landsberg
  unsure (1)..(124): unsure at all n locations
atatatttatgttttatactaattnttaacttgcggggcaaggcacgggtacatacctagtatattataagtacagcttgtgctcacaacaattaataaaaagtaaacaaaaggtataaactag

SEQ ID NO: 57410 - DNA, 1318 bp, Arabidopsis thaliana landsberg
  unsure (1)..(1318): unsure at all n locations
tagcaagtgacttcgaaaaaccctataaaaaccctttattcttatacccagattagctccacaacgggtcttgcgagtttactccccagaaaacattaatcttttactctacctgcaaaaccgagctcatggctgccgaattataaaatcgacggcgaattagctacgaaggagaagaaaaaaacgaaactttcgatttttctccggctgtgttacaaagaagacggagtgatcaatcgccggagttaattaacagtcgtcgagagagagcaaatagacgagacgaacattcgctgaagagctaaaagatgaatcctttttttttggggattgtaggtgaatttgattctgattctttaacccttaagatcttaccacgtggattgataacaaccaacgattttaatgtgtgggacccagaaaacccaacttgagtttagaagatgttaatttgttcccttgtgttgttgtttgcgacttgcgtcacttgctcgagcaaaacaataaagacttttacttctttgataactaacttgtcgcgatcacgattgagacgtaacgtttagaatagtataacacgtaagtttttgagagatgctcaaaactgattgggtattttagtatttttcgcttatctgaactaaattttatttcgttttatcctactattttatacaaataaaaaaaaattgaccgatttctgattggtggcgaattgattcgcaaacgtatgtaattatatttgatttgatccaactgtacttatattaatattaatttatttaattctaaaattgatgaataactaaaatcaggtggcaatattctatctatctcaactgcatatcatgttaagctgagattagaagtgtattttagaatttatagtttagatttaggcagcaaggttaatgagttaatgtagtagacttggggtatgaaatggcccaaacatccaagttaaaagcctagataagagttacccacaggcccatgagggaccataaattcaccatttttaagtcagcaaattcctccacattgttaataccttaacatgatatgcatatgtatgtttttttgttgttgtcagattgcgtatgtatgtattggtttacagttatagctttctttttaggttaattgattagtatcatatagctttatagacataggtctggataaaatgaaataagtgagctgttataatttgaatgaaagtcatcattaacaaagctaagctcatagccaaataaaatttgtcaaagtgcgaagatgtgaaacactcanaagtggctgacttataaaatctaaaaca

SEQ ID NO: 57411 - DNA, 499 bp, Arabidopsis thaliana landsberg
gcatgatgtgctgtcgtcgctgcggatgcggggcgaggcatttccgcagctcatgcgcctcgagagcgtttcgcgacaattggtctcccccttttcacagacattatatgctgacgagaatttgctatccagagtgcaagaactctccccagtgctcccccgccaagcaccacttcgacgagtgcgttgagcgagttcaccagcaggagagcgagggcgaggccaaggaggactgcgtcgaggagtgtacgtttatacaccgtttccccttatcgctcccaaagaaaaagaaggggaatgcacgccattttctttggctaccctgatcgagctcaatatgtcgcaatgatcggtccagttttgctaacatgagagaatcttcttagtcttccatcttgctcactgcgcttccgcatgcgccgcccccaagctgtggtccaagctgaaataaacgtccttatggaaaagaaaggaaacaaaaaatgaatcatacgcccga

SEQ ID NO: 57412 - DNA, 357 bp, Arabidopsis thaliana landsberg
tggacatgttcattgtatcgtccgcgtcacaaaaagcagaaagatgcagcatttacttaaattcttacaacaacaacaaatgggaagagagtgtaagttcattgcatttgcgagagaaatcgttacgtcttctcttctctcctccttaaccagtatacattgtacatatctataaatttgtgaaataaatccctgccgttcattttgactgtttatttcgatacgaattaaactcaatatttggatataatgcaatctcaataatataaagaagcatttattcagtcggtattcagcaattaatgatacctaaaaggttttattacattttaatccaacttttaaaatcatctttta

SEQ ID NO: 57413 - DNA, 191 bp, Arabidopsis thaliana landsberg
  unsure (1)..(191): unsure at all n locations
acaaacaccgagagacaagancaagaaccggcnacccgcaanaaccgcccaacagcaaagagggacaagagcaagagacgacggcgaaggagaaagaaagccaagacaaaaacgacgcgaacaacacagagaacacgngngncacanacagcaagactcgacacaagncaaacaggaaagaacacagaccg

SEQ ID NO: 57414 - DNA, 139 bp, Arabidopsis thaliana landsberg
  unsure (1)..(139): unsure at all n locations
acgcgcatctccgcttactccttattttcccagaaaaaaaccacgacgttttgaaggtcatagcagaccaccaaacccagaccancttgacgaggagaagcggcacaacaaaacacaccaacccannnccaccagagac

SEQ ID NO: 57415 - DNA, 870 bp, Arabidopsis thaliana landsberg
cggtgacgttttgttagcgttttgcctcgctttttcttttttcttttttttccctctattattggataataggtattaggatctatatattttgttaagttattaggattagaaaaatcaaaatgtttttagtaggagtaagtggtttagattagtttgtaagaacttttttctcttcaggaactgttaatctttaatcgcctttatcatttcgttagcttttgtgttaatgttacaatcttatatgatcatggatgtattcggtattccagagatcagaattattaaaaagattttcatatcagaatctgaaattattgttgattacaaaaaggttctagacttccaccattgcaatccatatatatatatttactaaaagtttttgctaacttattcctttccaaaaatacaataaatttaaacatgattgatgttaaaaaaaaaaaaatttaaacatgatttaaatcatattgtatacaacaaaataaataataaaatggttagtaaaaatttaaaacacgaaatgaaaaagggatattcacccaaacaagttgagttttgaaacaacaatggtaattcaatctctgattagtccttctttagttctttacaagaattgggcttgtggtatgttggatttcggccctaattgatatatgtctaattttcaaatccaaataatgttcgttctactaagtaaattgagatctaagcaatagattgcttggcttgggcacaatctttaaggccgtgcccaaaaaaaatacagacacaacagatatgccctcagataataggccgggtctaggaacttttttttcttaaggccggtgggctgattctggataggaaattttttgtttaaaa

SEQ ID NO: 57416 - DNA, 468 bp, Arabidopsis thaliana landsberg
atgactggtgtcttgtttaagaaaatttgtaattacattccatttctagatattgctttccttaaatggtccgaaatatgagcctaaaaaatttaaacttgccaaggtcaataccatagaaagcgttatacattgacttcatgcatgtacttttgcagcttttaatcgcggcttcgacgcgtcattagttcattaaaagatttttaaaatgataaattaaattatcgtaaaaaggtaatatcatagaattacacacacgagaaacttatattaggagttgggttaggcctcaaacttcccttattgggcttgggtttggacttcacaatttaatcaaacctagaatgcaccattattgaaaagaaaatactttcaacgagtaaaacaaaattttaaaatggttgtagtgtcgaagaatgatgatgcccatcaaattacatctcgtttcaagacatattctgaggaagg

SEQ ID NO: 57417 - DNA, 912 bp, Arabidopsis thaliana landsberg
cttcactttcctcttgtggatcagcctcctgtgatcttgctccctctcaccctcactttctccaggatcaagttctacatctccctgttccccgtcagactcagcttcagcttctccgtgaacttcaacctcagcttcaccttctccttcaggctccaccccgccctcagcctcatcctatcagtgtttacattggaaatttcagccacaatttcactgatatcttagtctagttgatattaagaagaactgaagctgaattaggcctaataagttgcattggttcctgcaattaacctaaaaccctaaattcaagcgagaagaactccagaaaccattcgtattccaaggtgtaattgaagaacagtggcagtgaaaaatacgaaaactgaaacaatcaatagtgacgaaacgaaggagataaagatggagagagttacggaagcgtagttaggctgacgacgattggattcatgttcggattcgatctcttcttcctcggaattatctccgaacagattaagcatcatctcggatctcttttctcctttaaccatcttcgcctcacttactcaaaagtcactgcctcttagctggtgacggcggctcgtgatctgagctccgacgaagggttcactgttatcggcctttgttgaagaagctatttttttttcatctctacctcgcgattttatggcatcagaattattattattaaaaacaattgttacaacttacaaagaaaaggaaattttcatcgatatatcttttttaacgcattaccggattattaaaaatcattttttttacgtgtaacgacgactagagagggacaaaacgatgggattttatgggcttttttgagattggaattcaatatttttggcccacaaattttgggctatggatacc

SEQ ID NO: 57418 - DNA, 1110 bp, Arabidopsis thaliana landsberg
  unsure (1)..(1110): unsure at all n locations
acaaacgatcttaagcatttgctcaagagcatcaatgccaaatacctccacaacactcagagtacagttaaacttttacccatagtgactaactaaattaagtttcagatatctcaaccatttaggttccgggagccggaatgactggatctgcttaacgtttgcagccgcaaaactcccagcaggtgtccacatatcagtagggaaactcagactccctgacaagctaaactctttgggattcgaagagtaatgctcaaaatttgcaattctcaccgtatcaaccagtgtctcctcggcgagctcaatcacaacatacttatctgacactgaacagggatttcttagatacttatcatgatctttgccaagcacattgctagctccttttgcttccttgttgtgatccacaactttagcacccttcatagcagaagcgtagttatacccatttccatctggttctaacctataacgagtcccannnnnnnnnnnnnnnnnnnnnnnnttaactttgagactcttgtcttcaagattgacatatctaggatcacgagcttccagagttttcttgcttattcttcgttctggcaacacaactttgcagatcaacaaagcgttgttcacaagaacatgctcatacacatcttgtaactggccttttctcaggagacaaaagttgttttctttctcagtggcctgagggaagacagaactcgtggaattcagtgtctttgagactgatccatcagtgtaattcccaattctatctacaaaataaattgatttcttcagaggaacacaatatagcaatctctggaatataccccccaagttaaaagaccctaaatttgtttccttaattaacatttgaaatgataacggaatctctctcaaacaaggaagaacacttacctgcattaccataatcatcatggctttggccaagcttggagtagacgaggaagaggaagcaccagagtaagagaacgagagagatagaacgctcgaagaagctgccgcttctggaattaaaattatcagccttgtcggagattctgacaattcgaaacctttgcaatttttcattcaggcatatcgtcgaacagc

SEQ ID NO: 57419 - DNA, 1774 bp, Arabidopsis thaliana landsberg
tactcgtacaaatctcagcccgttaacccggttcctaaaccggacacatctccttatcggatacagtaaaagaagagattcatctttctccgacgacaccgttgaaaggaaacgatgacgttcaagaaacgaatggagatgaagatatggttggtcaagaagtcaacatggaagaggaagaggaggaagaagaagtggaagaagatgatgaagaagaagaagatgatgatgacgtggatgatcttttgataccaaatttagcggtgagagatcgagatgatttgttcttcgctggaagttttccatcttggtccgccggatccgccggtgacggtggtggatgatgaaaacgaataaaatctcaatttacaatttacaaaaagaaaaaagtcagtttttaattattatttttgtttgttaaaacttgacatttattgtgttataaaaaaatatatagaagagaagagacagagaaagaaagactaatcataattgttctttgtttagattcatagctaaaattagtaaattagtcttgatttaataatttggtcgatttgaattgacattgcatataccaaagctttttcttggctccaaatgtataaatcatcttttcatttttcctatttcatttatgaatttatctgtattactaaactagtgatactttaaataccaaaaagcaacaaattttgtcaaaccctctatttttagtgttgtaaaggtcaatacgggttgacaaaagaaaaataaatagaggctaattctgaaacgaattaaagagttaagctaatttaatgtgcctagttaaaaaaaaagttggcagcgagaaccatgctaaaaaaatcgtatcgtattattcactttcatttaatgtcgagataattaaaaacaaatcggtacagtttagtgtaataattgagaaataatcatgtgggaagagaagctatagctagacgacagttaatacggttcagaccggaaacaacgagtccggttttcgctggctttaatttcacgagacaagaccctaaatctggcgtctttagtcccacttgtgccttgccttctattaaatggtcaacctttttttattataaagttttttttgtcgtaatccgaagcgtcggtcaaacatattttatttcattatgtccgtcgtattagaaaaatcagacaattaaacgtctctggaattaactaaagtagggtcgttattgctataatttaaaataaggctatgacgatttagatgttacgaatttttttgtataaatatcatatactatggtcggtccagattctcatgacgagagatgggcatgcaagttgttacctctctcgattgtcttatctttattaggtttttaaaagtgttttcttattactttagtgaacaagcatttaatgtaccaaaaatatcaaaacaaatcgaggaaaaaaagtgtttctcttttagaaaaaaaaaatatccaacgtaagagttggccatattgtctaatggtcccgactcacaaaaaaaaagatattttagtagataaatagattacagctgaattatataattaacaagacgtaaaaaaagatagaatttagctatcattatgcttaagaatcaagatccatcatatgtcaatcacattaatgctaagcaacacactcctatcatttactaataaggcccattattttataactgggcccattcaattcaattgcggcccatagttgttatcgctttctgcatctgaaaagtgaaagctgacactgt

SEQ ID NO: 57420 - DNA, 267 bp, Arabidopsis thaliana landsberg
  unsure (1)..(267): unsure at all n locations
tgattttttgttggatcagtggactattctccattcatgggaattgagaaaggagcggttcttcaagaggctagagtctttaatgaccctcaggttgatcctagacgatgctcccaggtcattacgaagcttctttatttgcttaaccaaggggagtcattcaccaaggtcagttaattnttttgcttatactgattcgatgtcatgcttatggagaattgaatattgngttcttatcctctcgcgatggttgtttgtttcatatgc

SEQ ID NO: 57421 - DNA, 520 bp, Arabidopsis thaliana landsberg
cttaattcatatggattgaattgattgggtgagtttaaagatatagcaactcaaaatctctactaatctttttcaatcctatccaatctatgtggtacctacaaggcctaattcttttgtctactattggtgtgagggctctccttattttttatggtttaatttatttatttgctccaccaattttcaaatccatcctgacaaaacattacatatggtacatatggaacccaccacccgtcttgctccactaggagtcctcaaattactttgagggccgtaataggggtcctgctcgacttctgcttttgtctcaagacctcaaagtagagaccctgctttgtcttacaaaacattagaaatcttagtgaaagcagtgagagcgaagcaactagccacacgggagagttaaataggccctaatgtttaagagcaagggaattggaggagattgagggcccgttcgtttctgctggaacagaccataattaattcccaatctcccaaacttatagtaatt

SEQ ID NO: 57422 - DNA, 341 bp, Arabidopsis thaliana landsberg
  unsure (1)..(341): unsure at all n locations
tgatacaaacctaaaccagangnggcctcttgaccgtttaaaaccacancaccaaagaaggaccggggccgcccaaaagccggagccgccgcacccaaaccaaccagngaaancaccggnacgcccaccccaaaaacaacacccagcaaagcacgaaaccccagcaccgacgaacccaggccgaagcgacaaaccgccgcacgacgaccacacggggcgggaaacgaacaggacaaacgcaagacngccccgcccccggaccaaacagcgccggacaccgaacaagaccccaggccaccagagcccaccgcagccgggcaagagagaaggaacccgccccg

SEQ ID NO: 57423 - DNA, 1244 bp, Arabidopsis thaliana landsberg
tcttgaacgaagtttctctgttgaatatattttcctttgggtggatttactactaataagctggtgaattgtctctatgactcatcatcatctttcgctttctctccttcgactattctaagccttttattttaatacatatatacacgtacaaatgcacatatacattctttttgcatgtcgacaaggacacgtatatatgttatgaataaagttgacgaatttttttatttaagaagttatagttgaatacttgaatgttataattaacaaaagggtttatatatttttttagtctaaggaaatgtatacgtattctccattggtaaataagattcaattaaagaaggcaacatatccttgaagctgcagattaaaacgtgtgtatgtgtgtgggtatgattagaagtgtatatgttggaaaaatgggtattactggagtgtttggcgagtgaagatgttatttcaacgcaatcataaaacgcgcaagaaaatgaagaattatttatgtttggggtcaaataacacaaacaaaaaaagcgttacaacaaccacaatgaataaccaatcaaagttttctttttcttgccatgacaaataataaagcttaagaccgacaaatgaataaactatagctagttaatacctcattaggatagagatgtatatagtttaatataagaaaatgtctagatcaaatttaaatgtggatgtggaagaaagttaataaattaacgaaagtggtgtaaatataaaaggatatcatgtggggtttgttaaacaataaggactagtccaaaaaaaggtgtggctgtgagaggctctcgaatctaaaagctaatggtaagtgcctttgatccgaaacaactctcatctttataattattatttttgttacaccttgtcaaatgataagttcctatcattttaaatgtaataatataaaacccgacatagttacgatatatatgcatactcacaaaaaactaattaatataaattgtagaaacgttgtatactttgtataaacgagttttgaggtcgtaatctagatctaccatgacatttgttgacataccgtttttatgctgcgactactaataacctaaaaatagctaaacaattataagcaagccatgcaccataataagaattttaacgttgtttttatatcgtttagccgtttaggggtcatataagataagtatatatttcccttaacaaagaatgaaaaagagaaaaaa

SEQ ID NO: 57424 - DNA, 1294 bp, Arabidopsis thaliana landsberg
agctatttaaaatcatttcaagattatggtttagcataattggaaagccttttgtttatataataaaaaggatcaaatccattatgcaataagattgcataattatagaaaggaaaattttatttgttgaaacgagtgatgtattattattagccgaagaatcttgtcgtcccaagtggtccttttcagacagttgacaattaacatactcgctacttagatctcctaccgacactcccatttcctctaaaccggtcaccgtcaaaaaccgagttaatcggttcacactgctaaataatcattccattaaaataaatgctgaggtggatctttaaaacctaaattaaaaggttaattataaaggatgtaaatgtgacaatgtaaaagtagtttactctaaaaccggttaaagtcaatcgctcatgagtgtacatgggctcttgtcaagtaaacatatacactattcaggcttttaaggcccgccttgggtagacagaagcactgtttgtctgtaaagcttgcgctcactccggtggttttatacaagggcaccaacgtaaatattatgaagaaccatactaatatattactaaatgaaatgttagagcttcgtgaacaatcaacactagcaaagacagactgtcaagtcatgtttagataaatagagatctctcacatacaaaactgtaattgaaacaatgcaaagatttgagaggtttcaagcggtgtaagcgttctttgcattcctgtcgagcttcttcgcatcctcctgaaagaaaagaaaccaaaccaaacaatgagagatctgaagaaaatgaagacttttgaattagaatcatgagaagctttcttcttacatggatgatgaaacctatgctgttgttgtaatcgagaaactccttccattgttttccaatgctcacctgcaacatttgatgcagacgagaattaaagtcttatttttacacagagagactgtttgatgagttttgatgagaaaggtcttttctatttacctgagcagcttcgtttgaagcatttttagtccaaatagatatcctttcttgctttcctctaatgttgacaactgctccacatatttcatctccagtgatcaaactgctctccaatcaatgcaagcaactaaaccaagcatgtaaaaagaaaaaccggtgagattcaattggatgatgacgcaggagttacgagtcaaaataaaagaagaatagaaaccgtacagtgtagagccagctcttatcagacttctccttagggaaagtcatagtccattttc

SEQ ID NO: 57425 - DNA, 1170 bp, Arabidopsis thaliana landsberg
tgaaaacttagattgatgatgacaaaaatcatcaaaaccgaatgcaatgcttgagcttagaccaatccatgtcttttatttacaaaatagattccttcttttttctttcctcatacacacaaagtctataacaaaaagtaaagaatcaacatgcatagtgtttcagccaaatcctcagaactgaatgcggtaaaacgaatattatcacctaaagctttctctcaacatatgtccttgttaaggtgtagtaacagaatgaaaaatcattcttcttctgtctctaatttggatagacaaggcttacctctcagcttgttaatcttagatccctccccaattcaagaacctcttcacttcatcataaaaaaccaagatagcagccgaaccggtgctcctaaacatattagagagtgctccacggtaaaacgaagccaacccttcactcctatatatcttcttccaacaatccaatgtgctactgtacatcggacgctccatcccggattgcatcattatccgtctacgaactgtatccaacgggtaagaagccaaaccagcagatgtagtcacagcttgagccaaaacccatctcttccacaatgccaactcaggtttagtatcctctgagaaaatctccttaactgtatcaaaccctccaaagtataagccacggtgaataatcacaccatgtagagacgcaggtaagcctctatagattcctctaaccccatctttcttatgaatcgttgacaagaaatgatggattcctctaaactgacgagcctcaggcttcccaatgtcagcagctaaacgagtatgcgcgatatcaagcggataaacaacaatcaaagcagtacaaccagcagcagaaccagccatgaaattagctaatgcaccagagaagatatgattctcttgagagctactgtttctaagaatgcttctatatagatccttaagagagaaattaagagcaacagaaggataataacgaagcacactgcttccattccctctccataaagataaaacaccttcttctctaacagtacggaagataaaatcaaacattcctttaaaccttctcttccctgcgtgaccttcgtctccaacgattgcgatattgctctcttgtgtctgcaataaaagcttggctctttcgattggtgc

SEQ ID NO: 57426 - DNA, 668 bp, Arabidopsis thaliana landsberg
tcatcagtatggatcctcgtctgatataaagactttcaggttttctagatcagctattatcctttgaaactcattaacgtcctcaaactaaggaaagaagtgctcagtgagctttaaatgattgaattggactttcggtcagaagtgagcctaagctttgttgtgagctgtctcgtttccctgtactcgcattcgcttacatcaaaccaatcaagctaggattcttgtgggattgactcctggtaaggaaccgtctttacatctctaacttgttggctcgttaggaagggaagttaaagcttgcctgtaaggggaaggcaagctctctaagcaagctgttttcatgcctatactagctttctttgtttgacaggttgggggaatacccaattcaaagagatcaagcttacactgcacagatttgaccttattaagaaagtttccgggaaggggtagaagatgctagatgtttccctagggtcttgactagttcctacttccttgcttccagtgtagaaggtgtagctggcatactggagtcaatatcttaattcagttgttgcctccggttgtcatactggaatgagtcaatatcctagtatcgtctgtaatgtggaagaaatagctagatgtcttccctgtggttctctgctagagggatactttct

SEQ ID NO: 57427 - DNA, 1014 bp, Arabidopsis thaliana landsberg
agtaaaaaatatgaaaaaaacttcgtatggacataagatttggggaatcgttattatatatcattaggcatatcatattctatgatatatgcgtgtatataatttcagttgcgtgatctttattgtaattatagtagatataaacgattaatggttaaagtttaatcaataattagataaacaatgttagataatggaaactaaagtgaggaaaaagacgagggcactaacatgtaaatgctggaagaggaatatcatcgaacaaaaacaacaacaacacagctcaatcctcaaaatacaaatataagtaacatttttttgtgtgtgcatgtttgcatcatatatacgtacatttttgcatattgcgaatatctcacacaaaaagacagaagcatttactcttatatagctgctattttcccttacaaaattattattacgaattacttctgtaaaaccgcggcagtactctagttataatatattgtaatatgtcaaaaatatcacatcatatttctagtagtcctcttggaccattaattactaattagaactatttcattctccactaaaaatttttcttccgtacaagcgaatatgttactaacatagtgctcttggcttatgtgttagaactttactaatatggtgctattggcttaacattctttaaatatatgtattatgctaaaacaaacattatgttggttcgtttaatctagaactatattttttcttaaaaaaatcttggccttgatcacatgtttttaatgcacttttgttccaataataatttatatatagttttgttctaaatgaaagagcattcaattgagctgaattaaaagaaactctaggactaggactaaataatttagggaagaaaaaatattctatcaatatttaaggttgtctaacttttcttcttgtgggaattaccagttttgcttggttgtatgagaaaaaatatatatattacttcatatgtaaaggggacaagagcagccaaaggag

SEQ ID NO: 57428 - DNA, 1776 bp, Arabidopsis thaliana landsberg
gcgaatagcaacagcagtatccatgttcactgctgaaaattccttattatcgtcctgtcgtttatatttagctcatatgagaaaactggcgttacaagaagctagaaagaaacaaaatcatataactcaaggtgtataatggtgtatgcacctgccagtttttgcacattgcaataatcctatcgaaatctgtgtttatagcccgcaaaaaatgatctgatggactttgcattatcgggcacgggaatccagcatttgaaaaatgcttcaaggagacagacacataacaagcaaacataatttagagagtgatcatttggccatgatatgagaaatttttcaagttcaaacaatttatacctgtaagcaagccagtgtctccccaaagaagagtgtgtttccatttgatagaaggcagattctatcaaacaaaccaaacacttcggtactactttgataaatggtgaatacaagagtacatcccatacttgcaagcttttttagtgtcaccatcataagcagtgccgaaacactataaaaagagcaaaggagccaattttagaatgcaagattttaccttttagtagaaggcaaataataacataagtctagaaatggttagaacctgtcaagatgataaagaggctcatcgatgaataagatatgtggtcgcatcacaagttcacgagcaatagagacacgtcttctttcaccacttcgaagacccttgatgtaacaatgaccaccgatcaatttgtttgcataatcactcagagacatggcctgtatcgcatcttcaacaacactccttttctgaaagaggaaacccggaagctgaagcaacgctgaatagtacaagaattcacgaactgtaagtgaaccaatcaattgtgtttccctctcaacaaatccctgcaatgcagcaaaccaagaatcagaaacacatttcaaaccaaaaagaaaagatcaagaaaacattatacaatagtgactcacataggatccataaggcatatgtgactttgagccattcacaaacacctcaccgtacatttttgctgaaggaggcaatcttcctataaaagatgtgattagatcaaatgaaaaaacaaactaacaatgaataaactgacaaatgacataccagcaagagccctcaatagagtagacttcccggattttgcaggacccataattacagtcatagtcccgggaaacgcataaccattcgaactctttacaaccttatcagaatattttctctttcccttcatagtaacagtcaaatctttccaagcaatagaagcaccagcaatctttctaacaacaccagtcccagctcctccttcaggaacaggaggagaagccattgatccgctattcatcttcgacaccgaaggagaaacaggcgttgttgtagcgtcattaatagaatcaccaccaccagcttcatcttccattcttaaatcaacatcaggtgtgtcttcccattcaggagagtcttcaaaagatataggttgtcgaagagaaccaggttttcttacatagaaaaagtgactagatggaactctactagtaggactacttgcagaagacgaagacgaacggtataaatccgattgagactgtatctcctccatcctttgacacctcaagaacacaaaatgttccaaagaaactacaaattttacaataccatgtttagattccataatcaatgcaaccaaaaaaaaaaggccaataagtgaagagactactatatatagtaggaatcag

SEQ ID NO: 57429 - DNA, 870 bp, Arabidopsis thaliana landsberg
tttcgttttgttatcgttctggttttaatcaaacctaggaaaaaagctaatgtagagcatccaagagagcgtaagtctgttagatgtggttgtgatggtaagttgtatttgactaaagaagttgttgatggtgttagtcattggtatgtttcacagtttagtaatgttcataatcatgagcttttggaagatgatcaagttaggttgcttcctgcttataggaagattcagcaaagtgatcaggagaggattcttttgttgtcgaaagcggggtttccggttaatcggattgttaagttgttggagttagagaaaggtgttgtgagtgggcagttaccgtttattgagaaagatgttaggaattttgttagagcttgtaagaagagtgttcaagagaatgatgcttttatgactgagaagcgggagagtgatacgttggagcttcttgagtgttgtaaaggtttggctgagagagatatggattttgcatatggccccacttgagcctacaatagtacagttgcatctcttgactgagcttatgcgtgctctcgatcgaccaacgcctcaagttcatctgccattccatcgattgccagccccgcttgcaacccgactcccatggcaaaatgtcctttgcgggacccaggggtcgtgtgccgccagatcaggcgcgcccgcgccagaatgattgccttctgggtttcatcggtgcccaccccttcccttacgatctgacgcgcccagagcgatccggtcaacgcttggtcgagtagaagggggagatcctcggcattagcatcaagggcttcgaccagaccgaacaccgtggcgtctagtcgctcaaccaattgctgaagtggttcaatc

SEQ ID NO: 57430 - DNA, 978 bp, Arabidopsis thaliana landsberg
atatctgttcttcaatttcattccctttaacccaagattatttataaaaggttacatgattcatttacttaaagctatgaattataaccatatctcaactagaaaataaacttcgttttagaatgttttcaaatatttgaatgcgaagttgcgaactatataatcgactggggtacgtataggaatcattttctagataagaaaaacaaggagcaagtgcttcttgttgagctttagggaaacacaaggaacactaaagctttttgttttatactgtttaggtatagacgtatagttatctgttaattttgtgttgtcttaaattctgtataaccagatatacacatttcttccgcatatgatatttcttctttactacattaattcgactaaataaaaatgtaacataaatcaattaaaacatgtaaataaaagacagtctcgaacttgtaaattgtagagaatatcaagctactacaaatcatccatcaaccagccaaaataacatatacaaaagcataaacatataatatgcccaagctcgaatcctacttattattgcaattactatgtgcaatgtatctaaacttcctaaccatgtgaaaaaatgcaatgcaatgtcaactaagcataataaaagatcccaacggtataatgatccaaggttggggagcagagagaatttgtagctaagagcttctttaaccctcaagctatggctctcattgactcataagggatctaatcctcttttcaaaaggctgcctctccatcatctattcatctttagtagtctctatctctatctctaagtctttttgacattcttgatctcaatggtgtccattacttgaaagaaagatattaatggatgacatataatgattatggtgaacatgtcatgagttcctcaagtcccattaaggacacgtatatcatcccattcagtctctctattttttgcagtcgaattattcc

SEQ ID NO: 57431 - DNA, 545 bp, Arabidopsis thaliana landsberg
  unsure (1)..(545): unsure at all n locations
gagtcatttttgttgtgttttcgtgtttattgataggttcgagcttcttcataagaaaaaaaaagttttacggaggcaaaatacttgaaaattttagtataaatttcaaatttcttataagatttaaggtgttcaatcagattaatccttttttcctattgtttacttgcaatgatcatgtgaaagagaatgttttggcaaaaattagctgattcgtttagagcctacaaaaatatacgaatttgaataaaatatcgaataacattcctattatttattaaagtatcgataacagacaataatcaaaacatggctaatcgatctatgaacactagttttctagggcttgatccatgtgttcctgaagttttcgttaagtcttttgtttgtttgtatgttgatccctagattagaatctatgatgatnnnnnnnnnnnnnnnnnnnnnnnnnnnnnnnnnnnnnncactaggactctaggagttaatcagcacatcattaatagaacaaagaagctataataatggcggtcgggttatattaatga

SEQ ID NO: 57432 - DNA, 518 bp, Arabidopsis thaliana landsberg
tgggatcttactctaggcagcattgctacaagtaatacttttccatagtcctacggcactcggtgcactcaacctcattgggtataattccagcagtctcaggaagcatgaaccttgtgcagtgatgtggtgggagacgcattaagagatgatcattgagcgctgtaagaaaaccctttgtggggatgttgacttcccattcgttaaattcagccaaacccctagaaaacaagttccctttggctcgaaccatcatgtccgatgctttactcaccagtccccatccatctccttctcctccataacctaacatagcaaccacttcttgcagaacaaggtccttttcctcttctttaaacccttctctccccttgattccgtgggctttcagcatcctctgcttcgattcccacatgctctcgaccctggtccagaaaaaccagatctggaacaagtccggcaaagtatggctgagattttcctcccggattgtgttgattatcggctggattccattc

SEQ ID NO: 57433 - DNA, 1383 bp, Arabidopsis thaliana landsberg
agggtccatctttcgaagaatccataaggatcaatcgaagaaaaagaagaagtaatctgctgatcagcagaaacgaaacaccttctccgttgtggaaagtatcgatctttccctctgaattttcccgagaaaaaatttctgtatcagatcttcaaaactcttgcgcgtgtctgctacgtgatttcttctatttttgataatttctttcaaatgtgttttttaattctcaacgagcccgataactcttctctggcccaataatatttaaagaagttaggcccaattattcaaaaaaatggtaattacgatttcaccacaaaaacttttgtttcgatcaaaattatccactatccacaacaaggcaaaagaagagttaagaaagaagaggacgacaatggctgtaaatatgtgaccatgaaatggcgagaggctgagataattgtcttatcccttcaaaatttaagacttttaatgatcggaaggaacaagatgacgaggtcccacgaaccaccatacacacttcaatttcaaataagagcttttcttcagttgttgctcagagacttaaccaatcaaccatggcgaagatgatgatgttgcaacagcatcagccttctttctctctccttacttcttctctgtctgacttcaatggcgctaagctccatttacaagtccaggtctttttcatccttcgttctgacgactatcattatcaattttatcagatgggttctgcttttgtgtgtctgatgagccaaaatccgttcagcacatttcaaaactattccttttaaaatgggtttaagcttgtttgttcgacttcttgagctatggatcattgtgtctatattaatgaatgtgtgtctaaagtcttagtgtggttcttgtttcagctctgattttgtattatgagtaaagagttttatgagcttcttcgtcataattgtgagagtttctggtttgtggtttggctctggtttgagttgtcctgaataccccctcatttgtgtcaagtatgatttgtttctgtgacgctctgccttcagattctatcactagtcttagaattgaaactacagtttgtattttggggataagatttttcttatagagttggctttgttgttaaaattgcagtacaagaggaaggttcatcagccaaaaggagcactctatgtttcagcgtcgagcgaaaagaagattctgataatgggtggtactcgattcattggtctgttcttgtccaggatccttgtcaaagagggacatcaggttccactaccgatcaaactctcttttcagctaaaaatttagtttccgtttctgagtgaccaatggttgcttttgcaggttacattgttcacaaggggtaaatctcct

SEQ ID NO: 57434 - DNA, 223 bp, Arabidopsis thaliana landsberg
acacaccccgggacccccccacaaacgagcccaccacacgagccaaggacacaaacacaaccccggcacaacgacaaaaaaaacaaaaccgccgccacccacaaaacacccaaagggacacaagcgcgagagccaaccacacgcacaacgcaacacaaccccaacaagcaaaggccaagccgggagacaacaaccaccaaacaagaaacaccccccaagccaa

SEQ ID NO: 57435 - DNA, 1269 bp, Arabidopsis thaliana landsberg
aaagacgaagatgacttgcatgtaatgaaatcaatgaaacagtaaaactggataaaaattaaacctttaatgcgttatctcacttttcttactttcagtagctaaacccgaaagtgttacaaagcagagaacacgaaaatggtgactaatgagagacacagagaaaaacgaagaaagaagcaaaatttgtacggtcaaaggggaaaaaaacttaggtcagaagtcagaacaaagtaaatgcgtaaaaggcaagtaattgcgtcaaaagtaacgtcgccggagcatgaaattcacgcaccgtcgcagtcgaagaagcttcctctcgctgctgtgtctgctcttctcagcccttgttctccaaatcgaatctctctgctttcagaaagagaggagactcaacagtcaacagcactgtgacaagtgtcaaatgtgtactgtgtatggaaataataaaatggtcaaacaatattattgggcccatattagaaactggcccatcatactctagaatcgattcgattgcaagtgaattgacaagttttttaaactaacacataattgtcacatttagcattgttacagaaagttattaataacatattctgttactagagaggattggtctagtctttcttgacgaaatgcactctaacagcggtaaccacaccaccggagcgttcaagttcacaaaccacggaatctccgatattcagattgtgcctccgacatagaaccgaccagccactgaaacaaggtttcccgttatagattctattctcgccttcctcttttttctccccaggaagaagataggtaatggtggacttaacgggaccaaacttcaagcgatagctctgaaccaccggtcggctcacatacttgcacatacagcaggaaacaaagacaagctttagctttctaggccacaaatggaataaaaagctgacaatgtaaacacttgtattattaccagaacgtcgttcctttttgtcaccgcttgcacaaagtaagggttttcaggattcaagaggtatcgctcagggtttttgacatcactagaacgttgttttgctcggccatttgtccctccatttgctgagaattccaccaaaacagaatccaatcaaacattggcatagagaacaaatggatgattggagtttgatgattctatcgatctgaatagccttaccagagcagcgagagccagaggcaaaggaagaggcaggggtagactccttgtgaggtttcttgggcgtaagatgaaat

SEQ ID NO: 57436 - DNA, 487 bp, Arabidopsis thaliana landsberg
gtcttcgtggtcagcaaggtaacaaagtacagatttttggggatgctcgctagcgttcctatctgatggccaaaccttctcacaccttctctggcggtcccatcgccagtgggcattgtcctaccaccaagcgaccaaacacctgtttcagcacttgtgctcatgcacaactttcgggtagcatataatcgaatggtaccacttagggtaccatctgattaatcagatgacatctaaacaaccatcaaacatgttttttcaaacccttttcaaagtgctcaactccacaaagtgatctattatttcatatgtgtgagttagccttttcaaacattttcaaagggttttctcttgtatcttaccacgtcactaagtgtaatgcaaatgcacatgagtctcacacttggtggtactagataactgatgcaactaaagattttccctctttatagtacaactatccattctaaacccaaacgtgcactat

SEQ ID NO: 57437 - DNA, 904 bp, Arabidopsis thaliana landsberg
gttttgatctaatatgtattgtgctttgacacaagctaactattttcttgtttcacagagcgggatcaattctaaagcagccatgagtctggctcgctaaagaagcctatcgatgtggatcgtccaatggagagagagcatgtgacatgaaaccttcgttgtcttgggccaatatcttttgtaattgggctgactaaaaatcatgataaagtccgagggagactataaataatttactcattgttcctgccgacattacacgtggcgaaagagtagttacatgccagagagactcctctaaaatggggtcacgtgtagcctgtatcgactattcaataatgccactctcgctcggtgacaccgtgtctcttactttatcattagtctttcaaattaactatatagtccttcaacatgtaattcatctacttataaattgctgttacccaaatctcgagtatctaaatttataattttcagacattgaccaagtagtgaatcaaatcctcacgttacactatattgtataaaacacgatctaattaaattttgttttatttcataaacatagattagtttagaaaacgccatatgcaaatgtgtatcacctaattcttgggacctttcagaattcatatatacacataacaaacagtcttttcatttactttctctattcaatctcacacgcgctaaaccataacccgatattactaatgacgaactacggtgcgattccgacgtcgtctcatgcatctccgttggtggatgtcgagtctctctcacgcgctaaacaccgtatcaaagccgggctagccacgcgccgtgcttggagagtgatgttcgatttccactccatgggactgcctcacggtgtctccgatgcgttcacaagaatcaagac

SEQ ID NO: 57438 - DNA, 326 bp, Arabidopsis thaliana landsberg
  unsure (1)..(326): unsure at all n locations
acgctccgacattcacttatccaaaatctcaaagactcctcgccgaaaccaacccacgggcccattggcagctttaggcacccacccaccgaccccaaganagcgcaagaccaggaaaccaacaaacagaggccaccgaaccacagaggaaaagaagaacaggagcccgggacagagaagggcagccccacaccaaagccaggaagcagnagccacccacagcgaccaaaaagacagcagcgcaaccgaaagaccgccaaccaccgaaacgagacacaggccaggccacaacgaacccgggagcccccccaccgcaacgaaagaac

SEQ ID NO: 57439 - DNA, 1445 bp, Arabidopsis thaliana landsberg
cgcggccatctccctaggctcggtacccggttttcctttttttttccaagcagttcgctttcggtttctttttggccagtcaatggttttttggcagggtttcctttttatcaaggaaactctagcttatctcgaaatcggaaggttgtgtgttgcttgagaatatatttaccgggtatacgagattttagggtttatcatctcctgtttcttgctgctttggtgtcttttacgagccagttatctattttatccccgtcgtttgtctttgttgggtttggttttcctcggaagggtcttgtatgatatgtacgggttcaggtttggttcaggccttggttctctcagaggtttgctctggctcttgttgcaacaactctattaaagagttttttttggttttttttttttgccagagccctcgttttttttccaggcactgtattacaatctgtatgaacactgtactaaattatgtaatgccctttgggatggtttaatgagtattgaataaaattctcatttcgttgtatattacaaagtatacatctctttctcttttatggaataatcctttgagatctgagatattacacctttaagactattcatgtgtgggacagcgaatcagattgtgtgaacctgagttttgacttttaatttacgtttgtttgtgtccaatcaaaaagtgaatgtgatattcaatgaatgtggtagaggggaagaatctggccagctatgatttttttctcgatacgatatgatttgagtgggattaaacaaaagtggaaaaagagtcattattgttagtattcgttgtcgctattattgttattgtggactaatcttaattaattatgaagatgggccagatttccaaattatgaacccttaaagtgaagacaaagaatcattgtgaattgcgcgtcttgttcacataaccttgaccatattctcaagtgtagagtcacagttcccaagcatctaaagaaaagtttgaatatgcgataatttcgagattaattaataattagaacttagataatctaaatgactaatttgtgttatgtaaaaacggattaacctcaaacttggtgtacagtggtatggcttcaaagcctctatttggattcatgccttcaatcctggactgctcgtcttgatgggttactagtcatcaaaaactcacggccttatagataatgcctaattctcaaagcacaattatgttatacgataagcttttatgatttttattcaatttatttcatatttttataaactgaaatatattaaactaaccacattttatgaaagacgtataacgtttaaacatattaattttgttgataattaagaatatcttgctgataagaaattaacaaacagaaatgttattttctcaagctttattttggtttaatacttttcttattaataaagag

SEQ ID NO: 57440 - DNA, 449 bp, Arabidopsis thaliana landsberg
gagtctctcctgcacccctccgtctccgtctccgtctcacactacgaccggcgcggatacacccctctcatggcatacatcgagcatatccccgacgaccagtacgacaaagccaagacactgcagacgatcctcgagacgctggtccgcgcgggcgcgagcaccgaggcgcgcaacaggcgcggcgagacggcgctgctgatggcggcgaggctgggcaggaaggtggcccttgcggcgctgctcgagatgggggctaatgtgcatgcgagagatgtggatgggagaggggtgctggaggtaatcgatgccgagatgggaggggtgagtgcgagggcggaggtcgggttgtatgcgcggctcgcggcgtgcagggcgctgttgacggggaggagggattggggggtgaggtatgcctggggcccctggggatggggcggcggtgagag

SEQ ID NO: 57441 - DNA, 1285 bp, Arabidopsis thaliana landsberg
tctagtcaggaatctcttaatccatgctccaaatcgctggtttgaaaacataaaataaactttcactagaaaatgcattaagataactgaaaatgtgaaaaggtaacccagaaaattttacctggttttgtagtatgtaattcttttggtcttctttattagtttttttaataaatatttatggccgttacattttcatctgaaacattcaaatcaacatctgctaaaaatagtaacttcataatcgttttatttcccactgattcatcattaaataaaaatatccagggatcagattataaccgtccgatgcaaaacatacggtacgcttgaccacagagcatagctgtctcacgtgctcacgcaatcataccaaatattaaaagtcaaaaaagcccaatagcagctgcaactaccaccagaagcggtcgagggtaatatagtcattacacaaaaagttctcacctccccaacgcgtagcctcttaactaaaaccaaatcaaaatacctttccccaattttggctcattaccaaaaaaaaaaaaaatagttgtaaatagagagaaaaataaggcggggaaaaggatcacgattcacaaaattagtggaaaaatcataagtgtttcgtcttcttcatcggaggttcgttttttttttctaactgttcttctctctcgttcttctgtgtatgtattataggagctgtaatttaattttgtattattattttttcgtgttttgactttttatttttctctcttttcattaaatttatgtgtttccaggggtgatttctgcatttggatagattttgatttctattataggatcggaatttaaacactagcatttaagtagtaattttgggtaactgtagaatttctatggtcggaatcaaatcgataccttttctgattttcaattacgtttcttgatttcttgtttgtttttgggttgatttgcagatctcgtgctctgaattccagaattgaggtttgagatttctgggtgatttggtctaggctatataagtttttagaacaagacggagctgaaggaatcattgtgtttttggttgatgagtttagatttagattagtgccttagtggtttgtttctatatcttattttgaggagcatatgggaaagagaaacacgtcttgggctagaaattctaatagaaaggttagatctaaggataagggttcagatgagtcagatgaggattatgtgatttccggcgaggatgaagaagagtctgagactgatctcaaggaggagtatg

SEQ ID NO: 57442 - DNA, 1333 bp, Arabidopsis thaliana landsberg
acatagtcgaccctgagattgaagagaacattgaaagttagaatgtgatcagaatccattgatggtcgaagctattatttggaagtttgagtttacccgagaagactgaacaaatcttgtttgttccggacagcagcagccataagcttggacttgtaaccatacttgtgaatgtagttatatgatcttttgaccaaggccaaaccgggatcttctccagatttaatagcagattcaatctcgttatcccctgaatgattacgcgcccaatcctgaagattttaagatattaactttggcatatcactgaaatcacttagcagcatctgtttaaaaaatggttaccctgaggcgaccgacgaaaatctgaatgacagatgcaccggcttgagcagctgctgcagcttgagcaaagctgttgatgaatgcaaaacgaaattataaagaacactaatcagatggatagacaattctaaaataagagagtcaaaaggtctgttttctggtacctgtaaacaaaggtgatatgcgtttggattccctcagattccaacaatcttgcagcttcaataccctatgagagggataagcacaatactaagagaccagtaaaaggtaaagctttgttatttgctgaaaataatcttacttgccaagttgcagggattttgaataggagccgctcgtgtggtacatcgatttcgttgtatagtctcagcagatcatgaacctacacacagaatcacatcacaagttagtgatttgaagatacaggagacatataatcaaattatcttatatatatggtgtagtaactaccttgcggataatgccgtttgtgtcataagcaagacgtgcatccacttcagtagaaactcgacctggaacgagtttgacaagatcgccacctacgttgacaatagcctgcacttttctcatcagtaataagggcaaaaaaagcttttaagcagcaaagatctggaagtggataaacagataagggataagaagatcaaccttattgaaaaagcaagagagtcgagattcagtggtttcaagccctgcacaagaagaatccgccaaagccatgtccacagcattctaatcattatgtaaaaatgtcaaaaataaatgagcccaaaacaagagatgtcatatactatcatctaagattcacaactcttgaaatgcttacgcggaaaatggtatcaggtagaccacagatacccagaccaagagcagagctaacagtagctgcagtcggcggaaacctgcagatcagtaaaatacaacaaaggtatcaatcccgcaccattagaaaaccaaaaagtta

SEQ ID NO: 57443 - DNA, 472 bp, Arabidopsis thaliana landsberg
ggacagctgataaaatttcacaccaaactaaaaaatagcagaaaacgaaaatatatgaaggtctacacgtaaaagtgagcacagaaagggcatgtgcaaccaaagacattcaaagtgcattaggcaggggatttgccctatgaattctcgggcttatttattccaaatcttgcatagctcctataatttgaacccaaactccctaatcaaaacaagccccagtgcaaatgcatctctcttgtaccagtctactagtatatatttcttgggactacacaatagaacagaaagttcagctccaggacaatagcgagtgaaaaatcttctccagcataatagggagtcatttgtcttaaccaaataaaacagtgggcaggcagtgtgcagcaatgagaccttgccaaacagataaacagcaatgggagactagaaagcagcagcatgcaaacacactacaagcccgtatatgact

SEQ ID NO: 57444 - DNA, 594 bp, Arabidopsis thaliana landsberg
  unsure (1)..(594): unsure at all n locations
gttataacatccatcaggtttttacgttctgatgatgcataagttatataaaggcacttcttaaatgtgtaactngaaaataaaacaatcaattttccaaaaactagctaactattgttcgtgattattcggcaaaatttgttcatcccaactctcaaatgctttccgctacttttatcatttcactatttgtcattacactattttatattttgagacattttgtggtagcttgcaagtttgttttcatgtatatggtttaaatcttgaaaaatgttgtgtatggatagagctttcttctgaaagtagtcatctcatttagtgtgatattgtctggccaaccttatttttaactaatcaccaactaatacaccaaactactagctataagaaataatattttcatttcctacaaaaatgggtagtgaaatgtgaaaactactgtgatgtaaacaatcctcgctagacttggttaatgttttactgaagaaaatggtgttttagtgagatattgattgcacggctttaatcaaacggcttttgtctactttaccaataacngatcanactggacaatgttcttttctcattatc

SEQ ID NO: 57445 - DNA, 1022 bp, Arabidopsis thaliana landsberg
catacaaaacgttcattagattctttaaacatcatctttatatacacttggtcatataaatcgctttcatcggagagtcaaccaatataagttgatgatacatctttggccgaattttttttttctttttttaatgttaaaacatgatcacaattaggtttggataggataataacaacagcaactgaatttggtaatgataccgatgttaatatttatgtacgttaaacgataaatttgaataagaaaaaaaaaagcacaaaaatcatacaatttgattaaacagacagtttatataatgtgtactgttggtaatcctaccgctagacaatgtacttttaatgtgattactaattacaaaagtggtaagaattagtattgcgctacttctatgtcaaactaatcataccaaatagatcttatcgataaaacatagatatattatatatatatatatatgtggattgtggtgatcatagatgcatagacttttgccccaatcatatgttagttaatcatgcctgacgtagttttatacaataattcttttgtatatcagctggggccacgtaagaaccccattcttacctcaccttgatgcaatgcttttactatactatcagataatcacataaattagattagaggtgtgattggtgtttattactagagcaatcagtactattcagtagaaattaagaaaagaaaaaagtttttttttttaaagatagagaggaggagaaaagaaaaggtaaatttagagaaattttgtttcttcgtgtaatggcaaaaactacagtgaacgcaacaaaatttgcaaagaaagatgaggctatgaggctatgactatccccattgaaacagagcaaaaccccaagaacatcactgagtattttcaatgactatcgataaagtttcacattgttgttttcatacattattatatgcaacagaaccagttttcagtttgatttttcacttttgtccttttgtctgcctctctgagagataagtagacagag

SEQ ID NO: 57446 - DNA, 923 bp, Arabidopsis thaliana landsberg
caaatttactaattatataattgattatgagcgtagttggtaatttatagtattaggtatggtggtatacacctttccggtctcaaagcttatcaacaacaaaaacggtatcataccaacaattcttatcgttatcacttcaaaactgtatcataattacctcatatcacttcgaaaatcctactttacacacttcagtcaccatcactcaaacctatatattttattatacttatcttaaaacaactaaataccctacacttcatttgtaatgttccaatgttgttattgatcactgttatgtgttgttagtgaaaaacaaataattttagccccgctcctccaaaagtccaaatggctctatccgccgcgcaatgaaagatttaaaaaggttaccagaaatacccttcactggatactctatttacattatcacaccgccaataaagatttttggagccgttttgttcttttggattcttcgtcgtcaacgagacactctcacacttcttgcacttctccctttagatcaaatccacgttatctagcgctgttattaaatctgcgtttcagtttcttctccattcgaattttcgatttgcaaaatcgctgttttatggtatgttcataaattctaaagatcttcccttttgaaaatttaaaatttttctctgtgtttctttggttttctttaaagccaattgtgtcgtcataaaaagctgtcgcctttcagttttttttttttcctttttctttcagttttccaactattagaagagagtagagagagtagagttggattttctggcgacgaaatcgattgagatcgtttaaagagagagcctttctagattttgttagtgttcaagtaatctcgccgaacataatcttcatcaacttctccgcaagtaggatttaggttc

SEQ ID NO: 57447 - DNA, 983 bp, Arabidopsis thaliana landsberg
ccctctttaatttattaatcagatcttgcccaattcttcaatttcttcaaccctaattcttctctctttctcagatctaccaaacttgatctccaatggcttcctcagcaccaccagtcctcccaatctccaatccccaaaccgttccctccgccgctccttcctccgtcgaatctcaaccaccgatcgctactccagctttccgcaatttcatcaatcagatcaccgaaaccgttaaaaacggtctctctaagcgtcgtccttgggctgagctcgcggatcgttccgcattatccaaacctgagtcgatctccgacgctgctgttcgtatccgcaagaattactcgtatttcaaggttaattaccttaccgtcgctacagcgatcgtcggattctctctcgtcactcatcctttctctctcgtcttcctcctctgtctcctcgcgtcgtggctcttcctctacttgttccgtcccacggatcagccgatcgttctattcggtcgtacattctccgatcgtgagacgttagggtgtttgattttgttcagtatctttgtgatcttcctcaccgatgttggatctgttctggtttcggctatgatgattggtgttgcgttgatctgtgctcatggcgcttttagagctccggaagatcttttccttgatgagcaagagcctgctgctaccggattcctctctttcctcggtggtgccccctgttcagccgcgcctgctgagatcgccgctcgcgtgtaaatgcgattccgattctaccattccctcgcctggtaaatctttctatatgattcatttgttgaattttatacttagattttgtttttttaatctgaaaacaataaacgtgaaaatgttgtggatctggcctaattttggttcttgttcatgggcaatagctatagatgaaatatatatctttgcatgattttgatttgatgaagttttactaccgttttgtgttat

SEQ ID NO: 57448 - DNA, 338 bp, Arabidopsis thaliana landsberg
  unsure (1)..(338): unsure at all n locations
cgccggagaaccggacccaaattagactgagccaccgaaaaatcgaagcttttacaccagaaaaaanaggagggagaaccaaaaaagacaaccccccggacccacccccgacaggggaaaacccccgacaagaacagccgacgaaccaaaccgaaggaaacaagagaaaaggcacancccanaagacacaccagagccggctcgganacagagagagcgaaaagaaccgccaaaaccagaaaacagccacacgacccgcggcgcaacgagcacccccccctcacccgcccatggaagagacgaaataaagcaaaaaagggacagccggcaagaaagaa

SEQ ID NO: 57449 - DNA, 1263 bp, Arabidopsis thaliana landsberg
  unsure (1)..(1263): unsure at all n locations
tacccctgcgccatattatgaacatgattcctcccaatccgaaaaagctataatcctaaacaatttgtgaaataacaaatagatcggccgataacgactaatcataatcataaaagtaaaataaaaatatagacccgagatttacattaaatcatagggaaccgtcttccgacatatcatgttaatatacaatttcatttactcatcccaactagaaaatactatcaagttttgagtagttgtcgtggttgagagttgaaacagaacaatagcaataattcttttgagtataaatgtgattggtacaaacataatggtcattgtgaagaattttgaattcgtgtttgttagttgttacagatgaggctgcacaaccatggaaaacaaattccactactatttgacaaacaaaactggtgacaagagaccatcataaagacgtttgaccattttattaaagggtttgaaacatattaaaagattaagtgatgaatccttttaggaataccattttggcattgttcttataactcattgggaaactttatatcatttgagtgtggttagaactctaagctatcatagctggcttacttagattacgttagtgagtattcaagatagattagacccttatcatccctaaagactacgtacgtccatgcctttacctttacagatagagataaaatgtccatagaactccatatactcccgattataatcatcgtttagtctccaataacatcttatcctccattctttcacacaattcttaggaattagcttagttgaacacaatttagactagtaccatgcataccagcatttataaaggctctcaattcattgtaaacataggttttctagtgaattagatatctctttcttgtgagaccgttctttaattagccatcgtctttaatttaaccatgcatttgtggtcacataaaatttttcaatttaggaaactagaatagaacttctctctcattaggaaatgtaatccaaactcattatcctatttatatcaccgttcaaaaccaaaataaaaaatggtagaatattaaaatatatgtcatctaactaagttcaactagttttctcaattgttaaagaactaaacacattttttccgggcaaaatttgctttgaacatatttctatgtatcaaaaagtatttcttntaaatgtatcaaccgcactagtccatgtgcggccatgcataaaagattgtaattcgatagcgtagggatataatta

SEQ ID NO: 57450 - DNA, 356 bp, Arabidopsis thaliana landsberg
gcgccctctcgacgacgacaacgccatcaatgtgtaggcctcggactccggacttctggctgcggcggcggaagacgctcccgtctcggctcaggtgccgttctgccctggctggtcggacatcgacctcgccacacacgtcgacggcgtatttcgttgggtaaccgaggtgggtgccaatcggcgactcgagcccccggtcggtgacaagcgacgggcgctgatcgcggatccggaccccacggacacgtcgggagtcatcaaacgactgcgcagcgcaagcgacggcgtcaccggcgcattggcggactcggatcccaacctcaactggtggacgatctggacgccaaccggat

SEQ ID NO: 57451 - DNA, 1207 bp, Arabidopsis thaliana landsberg
  unsure (1)..(1207): unsure at all n locations
actttgccgtttcactgagaacgaggctcgctcactcactctctcgctttctctttctctttctctttctctttcatagaagaagaagaagattcaggacctaagtagaaaagcttaaaccaccactctctcttcaaatcacacttttgtttgtttcctctctctccaaaatctttctcattgtcttctttgcctcctccttcaagaactcttgtctcttccaacaacttttttccttcttattctgaaaaccaatcttcacttctcatttgtctcaaaacactatacccatttcctaattcctgtccctgagagcattagtagagagacacaaaacactttaatcctaatccaacttgtctttactttagcttctgtctgattcaatcaaaggacaagaaagaagccaaatcttgtcaattctttttaaacagtgattcaactaaaaaccccaaattagttgatttgatctctattgtcttcttttttttggatgggttgagtctcaagaacaaacagtgaatcaaataagagcaagaatgagagacgataaaaccaagaaaagcaagggttgtttttatgtttcttcaattctttgccatctttcatgaattttacagatgaacagtttcatttaccttctttttttttatgcttcaatgaagttgtcatggtccaagaagatggtgaggaaatggttcaacatcaaaagcaaaactgaaaagtttcaagcagatgtttctcttcctcaaggtaaccaaaagtctacttcttgtcaaaattttgtttctttgttctgttctgcagagctttaatttgtaatattttgtcttttctgagaaaacaaaacatctcagtttcactttctttcttttcttttggggtcaattgacagttactgtttcttttgctttaaccactcttctctgtggaaattaaagaattagcaattggcttgttatgtactgatttcaaattctgatcttttattcaataaggagttgaagttgagcacagaaacagcttctcagagagagagccctgcacaatcaagaagagcaaaactggtatataatcatttaccaatatgatcaaattctctatgagagagttttcttctttggtctcatgatttctgagtttcacagaanaactcaataagaactgggagcagcaagctagacaaaggaaaatgaactatgaaaat

SEQ ID NO: 57452 - DNA, 407 bp, Arabidopsis thaliana landsberg
  unsure (1)..(407): unsure at all n locations
cggtcggaccaaccccaacttttttttaccgacccatccaaaaagtggtggggtgaagcttaaaggtggcccgccaacatgtgaaaaaaagattaaatacttactcacatttatgagaaggatatattggaatattgtctaaaactgcctatagatttcttaagaaatgctcacaagtatattcaaaatacatatagctgctgtatctaaaatgtatgctgcttctatgatttgagttgttagttgggtggcgtctgttctaacaacgctgctcaaggggagtggtgatcgtgatacccttgtggcactatggggctcgatccattccatggcacagtnagttcctaattacttatatggaagcttcgtatgctctgctgatttcaaacgaaaaaagggaaacagac

SEQ ID NO: 57453 - DNA, 490 bp, Arabidopsis thaliana landsberg
  unsure (1)..(490): unsure at all n locations
gtgtctgccccctaacttatcttgggggttacaactttagtcccctttagcctcttaactttattaattatgtatacatacatatatatataactatattcatatatggattaatcaaaataaagtggtctcgtaccatctatgttattatatactgccatgcatcttttgtaggtttcatccaatttagtaattttgaattcctacttggtctcaagttttaccataactagaatatcaactcgatgatatttattagatactagctaatccataaactagtgtgatttgttacataattgatttaaaaggaaacaatacaagcaacttaaagaagcaactagttaaggtggggatggagtctttacaaaattgtttagatactagctaatcactcctctcttatatgattctagctaatcccttacgactcattntctcaaatttccgtggaactcctctcttatatgattcagaacacacttatgat

SEQ ID NO: 57454 - DNA, 432 bp, Arabidopsis thaliana landsberg
cccgggctccagcggggcgtgcgcacaggatctcaagtgataccgcgcacagtttttttaccgttcgagtgctcgtacaacacacacgggacttgtatcgcggtggtgggctctaggagtctaataggctgcacatgtctgctcggacgaggctacacggatcaaccgccggcataatgattagcgagcaaggccgggggaggggtggcgcaaacaactgttgtgtcaccctgatgcaccaagctcactgatggcgtgctcaccagagttactgtttacatattctcaccaacgcttctgtcagattatgacgacacaggcattctgcagatgacgcaggcgggggcgtgcgtcatggcaacacctgacaccgtcggtatgaagctgcagaaggggggcgggtgtggactgggcaccagactatgcacacac

SEQ ID NO: 57455 - DNA, 946 bp, Arabidopsis thaliana landsberg
tggtttatacaatggagactatatagcacatatccataaatttggaaatagttaaaatgactttaaaaatggacactattaggatttaattttataaatgtgcaaataatttatgaatctacttattttgaaataaaaataattataaaaggtaacaagcaataaaagaaagataatataatgttttgtaaatatagtggttgtttggtgtaaaaatatatctcacttgaacaaattatttacgttactataaagtatatatactagcgttctaaagcttccgtacgtatagatttattttacaaaaaaaaaaaggtttcttcgtagacgtaataattttggaaaatattaaatgtaccaacaagaaattgtttaacaaagaaaaagaaaaaaattatttatcaacatacaatcaaatcctgagtaaaaaatataaacgtagatattttggctttttaagccaagatttacctttttgaaaagtaactgatttctttcttcttctaacttagtatgtctcacaataaaagaaaaataattaaaaagttttcgtttggccacctaacctaattgtaaaggctgacaaatatagtttagaagagccaatgtagagtggctaactaccctatagtttaatcaaagtcaaacaaagagttatgaatctctcttggatattaaacaaaaataactataatacaaattattgatgataaatggaagtaaaataagggtggctgcttagttgtagcgactgcccaactatctaacgtgtttggccatcgtagtcaaatcaaattatttgatcctacattttgcatgcaattattttatcaattatcacatatatacgcaactactaagttggagttcttttcgtttgacactttaacatatatacgaaaaatatatacaactacatagttggagttcaggtatatatgtaatc

SEQ ID NO: 57456 - DNA, 112 bp, Arabidopsis thaliana landsberg
gggcaaaaaacagagaaaaaaaaaaaaccaaaaaaaaccaacaagaattagaaaaaaacaaaggagaccaaaaaaaaaaagcacgggggggaaacaaaaaaaaaaaaaaaaa

SEQ ID NO: 57457 - DNA, 142 bp, Arabidopsis thaliana landsberg
  unsure (1)..(142): unsure at all n locations
atcggagttggtcaggtggtagctaaattgtcggagcgtaggatagcctgctgnnnnnnnnnnnnnnnnnnnnnnnnnnnnnnnagatcgggagtccggtggaggcttgtaacggatcaagtcccgggatacagctgtactc

SEQ ID NO: 57458 - DNA, 1460 bp, Arabidopsis thaliana landsberg
taagcatcactgaagagtgtttgtgattgttgcttcctatatcattatttataaaaaaaaaaatgaattatgagggaggggcgactgtttaactttctatggatagcatgagcctgtgtctgcataccttgtgcggatgctttagatatgaagaatgtgttccaaccaaatggtggcacctttgctttaaacacgagccaatactttggacgctgcagggaagatattcctaaataagcttttgtgtagaaacttctgaggttgctcgtgacattatccatggggatgtattgagcatcaagggtgtttccagatgaatcttccacacttagacctgcatcattgacctgttacataccctaactctttagtaatacattaaagaatttgatctcaaaggagcaagtaaacagaggcatgaaatataaccggaatcctgatgatttctgtacggttccatccaagggagttatacgccaccagaatctgaagatcaaacactgagatagttggagaatctgagctatatcataatgattgatgagagatgtgatggaattaccaagctcttctggcctggaagggtttcttctgtcgatgggcaatagctgatattcatcaacgagcactgctgatttgattccaagaaagaatatataaaccaggtgattactatatagagacacacaataatcgtttactctaaatagaggaaagaaataactcccacactagtcatcaccatgaaagggattcttcaatcacatttctgtaaaaaaaatgaaatccaaaatgagtttcttggagatttaacctggctgaatgctattgcaggctttgtgcagccaccttttggtgctttgttcattaggcatgccagcgcagaattcaccacagcttctgcctacggaataattagatgattactgatataagaaaaaagacaaaaaagaaaagagttttcatatatagtatcttacctcagaagcaccaagagcaaggcgtttcatgtaatcatttgttacatgctgcttggcagttccagtgacagcatcatggtgctgcgctatccctaaagcatccccaagactgtaagtgtttggacctccagagttcttgcccaccagaaattcaagttgccttgcagcctgttttggaaaaaaaacagacaaatgcaaggccatgtaaattcattttgaatttcactaagaaaatgggaaatcggactccgtaagatgcagtttgataccatgtagtatccgctaagagcccgaacatatcgtttaagagcaggacggctggtgaagtagccagtccagttagcgtatgcccgatccgcatatctgcagagagtagggggagattattgactattgagaaaatcaagtcgttggacaaaaggaatatgtcaatttatttggtgacagtactaaaggcactcaccggaaaaagtcatgagt

SEQ ID NO: 57459 - DNA, 433 bp, Arabidopsis thaliana landsberg
gagctctccaatccgaggttgaatcttgcgcctaggatgactgatctacggtcaggatttaacctccgccgagtggcagcgctaactaatctaagccgtcaattctaagatccagggatatcctgacatcttctatctcgcgacgccggagttaaactcctcccgcggcagcgccatggtcggtcggactaataccaccccaaaccccgcacgaatcatccctccggttgcggtaattcgaagtagagttgaaagcaagactgggaagggatttctcaccaagctctatggcgtgaatcgacccggccacgacggcggatgcgcccatggcggagcaactactccgacgaagaatcggtgatcccccagctagtaatctgccacgtagagttcgcggacacatatgacaggctgagacgaagctcacggagat

SEQ ID NO: 57460 - DNA, 716 bp, Arabidopsis thaliana landsberg
taagcctgaatttgttgagtgttcaacaaaaggacaatggcatctaaagaagcaacttcttctctagcttctcacttgcctcagactatctcttgatttagaaaacacacatcatcattttgttaaaggtacatttcagttcaagatctgtcattgaaactgatctctgagcacacttcatctactgttcccatcaacacctgattgattctgtggagattccggatatggaatcactggcggaggttgactatctaatgtatgttccaaactctcagaagtcagagtataagtctggtctaaagataacaacatgtctggtaacactgatcttggggaagtagcagactcgtctgatgtgacattgttcacatttgaaacttcaggttccacaagttcttgcaactcttgagttgattggtctccatcatttcccccaaaatgttcttggggttcttgatttgttcttctttcaaaggcttcaggttcatcagagtcatcatttatcttcatctcatcagtcaagttttggacacgttcctgtcataacggtacaaggaatatattcaaattcaacattttgagaaacacattgcaagtagcaatcatatttccataaaacctgacaagaacaagaactatataacctcttctcttctcgaaataacttcattgatgtgaggaactgttgactcttcatgtatatagaatccttt

SEQ ID NO: 57461 - DNA, 1257 bp, Arabidopsis thaliana landsberg
atatattccgcgcatttatatttgttagaagtaaactaatttttcttgttttcatttttagtaagaaaatcttagtcctagtttcagttttgtctcaaaagctttagtcgtatagttagaagttcaatcttataaaaaaaaacaattatatatgatatagttaaagtatatttatcgaaagaataagtataatagatgcattgagataattgagggcacagtactttatattttatgggaaatctgtaaaccagtaattctcttctgcaggataattaatttgtggagtggttagacttccaagtttgaaagtcaacactttagtcaaagtgctgtcagaaaaaattacatgcgggctgtaagaaataatatacttacaaggatacagaaattgtaagataaaatattttgaaaatactacataatttcaataaaattttatccataatttcagtaaaattttatgagtaaatttttagaaacaaataataatatatgtttaaatatagcataaacatatgaattcttataaatgttattgaaattgtaaatattgaatattaaacatgaaaaagttaagtcaactgaaagagaataacctttgttgaattatttttgctacaggttacgtctagtggtttatttgaaggtaattacttttttcgtaccgaatatatcttctcaactcaacccactcggatgctacgttgtactatatgtactagtgttgtattttctattttaaacgttttggaataagcttaaaaacagcatcgtattgaaaatattatcaaaacactttattttagtttacaatatatgaattccgtgattatttttgggaaatatattagaaattttgctctaattttaagctttgttttggattatattgatgggaagggagaccaatccagcaagaaaccatgtgataagtggcgtatagtttataaaaatataagaaaacgaaaggataaggaaatatataaaatttgatctaaatcccaaatgatatcctccatagatggtgatcgatagagacacatgggcttcttcaaacatttcttttatgcgacgaaacatgtatgcatcggatgtgttcctgtcgtaaccaaacaattttatttttgtagttaaataaatatgattgattgagttttaaaaatcttatccatattccatattaagaaaactgagtaacacattgctgtcacctagaattcacaatttgaagtaaccaaatgaaaatgatttcaa

SEQ ID NO: 57462 - DNA, 535 bp, Arabidopsis thaliana landsberg
ttctattatagttcttcctacattcatttattattaggttgggcattgccacgtataatataagcaggggcagatataagtaacatcatatcattttacgtacttagaaaataaaaacaatatggaagttagtcccaaaaggaaaaaatgatagtgatattgattttagatagtaatattataactacgtctatatagttcactcaatatccgattcattaagattgataagccaccatgtaacaaaaggataaattgggttatctgtctatacgctaaaccgatccaaaccaaattagagagaatagacagataacccaatttttcttttccatatccaaatcagaagagaaataaagatttttttttattattatacatgtatttgaccatctaatgatgtaaagcagatgaatcaaagtgaaaaacatgaacgaccatcataatttcataggtgacaaaacttattcatttatgagccacacaaaaaaaaagaagaagtcgaaatatatgtcgtcgacaaatattaataagt

SEQ ID NO: 57463 - DNA, 1298 bp, Arabidopsis thaliana landsberg
cctatcttttcaggccaaaacccatcatcatcattcaccatcaacaacttctcattatcaactagattttgtattatcttaatcttacccgaggcacaagcatatccattgctgccactgtcttcccatcatcgttctcccgcatatagaatgctttgatctccttcggatagtctcttattatcacaggtcgacccccaaaagcctcttctgttatgtacctttcatgctcactctgcagatccagcccccacttcacctgcaacatacagctctatcaggcaaccaatccgacgtttctactcacatgcgatcatgaaataatctcattttaaagaacctacccattcaaaatagatatataatcacagtttatttaacacagaaaatacaaaaaacacaaacaggtagactactagctcagaggtcaaaagcagttagaaaaagaaatgcctatgcaagtttgcatatttagtccaaaagttcagttcaaatctgtccgaaaggagaaaataaagcctttaccggaaaatcgaattttttgtttgctttcagaagaatttcaatggcgtctgtgtaccccagctgtagaaactctttctcagctacgtcctttacaagatatattgtaaattaatcagaatatcagacagtgcaaactgcatagtattcttttctgatcacagagtgagaataggcgaacatacactcaaacggcgaatgattcctttctcaatccatgtatcgaaaaactccatgtcttccttgcaattatcaagaacgtactttacctatcagaatatcaagagatagattacaatcaaattaattctaaatgatatttacagtttgaaaggaaatataaagtgaaagagcaacatactacgtactggaggtaggcagtggcacaggccatgtcatcatccaggtcggcaaaagcaagttctggttcaatcatcttatatggcagaaagagaggtcttcagaaaatcaaacttaggtaagaaatttaattgtgagtttggctggaggatttaataatgctgacccagaattcggctaagtgccttgacgtgttggaattctcagctcgaaatgtaggaccacaatgtgtatacctgcaatgtcatacagatgacagattcagatacttactaaccaaaatctacctcacaatcactcgagtagtcaacttttacatctgagagagcggggtgcataagtttctccattaagttgcccagagacggttaagaatgctggtttcccaaaaagtccttgggagtgatacatccatg

SEQ ID NO: 57464 - DNA, 1328 bp, Arabidopsis thaliana landsberg
aggcctacttgttttttaaaacagtataaaatgctggtacttcttatctgttggatcctaatttgaaatgctggtacttttacagggtgaccagatacgcaagcgtgacaagtggtctgactggattcctgcatctaaaaagtcaacctctgcggagacaattggagacggtgacaaagattccccaaaaagtataacaagcggggataattttggaaacccttcaaaggattcttcaaagcctaccgtgtccgatttctcttcagaggtaaaaaaaaatttcttttggtagagaaattctgtaagactgccaagccaatgaaattttagtttttgctccagtcatagtttttccgttgtgtggtacagggagctcagtcatcaagaaccaataattataaaagtggtaacctgaaatcatcagcagacgaaaaaagaaatgtggaggacttgtcaaacgatttttcaaacactttcttgcttgacgaggaactagatctggagcacagaagcccgagaaagagtggactgtccatgtccaaaaggtagtgtgtgcaccacttaattagtcctgctatttgctttctgtccttttgtttccaatatgccttcttttttttatatgaatcttaaactgcatatataaagtactgcagttgatgcttaggtttatttgacattttgtagcattgagtatgaagacgatgatatggctgttgatgatcaagatattcagaaacttgtaattgttacccaggtattacacagaactttttatatatttccttgaactctatgtttggtgaaatcaattattcatgttccgttatatgctggacagaatagtggtaaaagtgatggcgctggaatcggtgggacggaagcaaaaaatattcctaaggagcttgcctccacaatcaacgatggtctttactactttgagcaggtaaggaatattttcctatcataatatgatttacctctttggagtccaatttctaatctttacctatgaaacaggagcttaaaaaaaaacgatctggccgtaggaagaacaactcccatttggataccaaagatgggaaaatcaaatctggggaaggattgaacactaagttgggcgaaaattccgcagcaaatgatggaggggaagagcatggaatcattacttcacggaggaagcaaaataagggaacgcacaaacatgatacagcccatgcacggaggttcttctcgagtaacataaggaacaatggaaatatatcagaaaggtccgctagtagctccattggatttttctttggttctacaccaccagacagtcatgg

SEQ ID NO: 57465 - DNA, 136 bp, Arabidopsis thaliana landsberg
aggaagccggaccgaacaaaaccggcgacgccgacaccccccgacacgaagccgacacaaaacccagaacaagcgacggcgaaaaaagcacaccgcgagaggcgaagaacccggagaaacagcccaaaggcacgga

SEQ ID NO: 57466 - DNA, 530 bp, Arabidopsis thaliana landsberg
gatttatattatgattaataggcatttaaagctgttgtgacattatgtgtatatccaatgtcctatgccaaccaaaacctaactttttgggtaatatgtttataagaaatagtagacgctgttaaactttctgccccgaattactcttcaatcagacgaaatcaattttccattttttttctctttcatacgataccataagagagtttcctcctacggtgcgaccttctcatttatgtaatcgaacaactaaagcaatgttcctttaaaaaagcactcacttacgcattaagcaactacacgtacgcactcgcatatatacacttatatattttagcaaacaaaaaaaaatactagcatttatatattttggtgcaagaaaatatccataaaggtcttctgcaaacagagtcattgttctgtatgctatacacaaattaaagcctctcgtatacgattatacttctttaagatttttaactattattcatatttggctgagaaaacattaattatacacatttttcaag

SEQ ID NO: 57467 - DNA, 480 bp, Arabidopsis thaliana landsberg
gaatggacgaaaatgatatggaacactctataaacccaccaggcattttttctactataggactattttataacctgctcgaaggaccagttggtaataccatgttctgtcttaactcacacatcatatacggttcacagatcctcgcctgcttatattggaatagtaacacaatacacgagaactgccacagggattaaaggaagggatcttttgacccctgatcgctttgggggtaaaacaactctattcaaaggtgctgtctaacatcctgcataactaatcatgcaagaagaccagcaacaccttaaaggctaaaggacgaaaataccatttttgagtgccttatacatcagtcacctaacagagatgatactgacattgaaccctatgaatatgtaaaaataattgtgcaatctattgatgcactacctaacggcctactttattatgacctaatggaaccctcaggagctccta

SEQ ID NO: 57468 - DNA, 1811 bp, Arabidopsis thaliana landsberg
gttttttgctctcatggagtatatctctttgctggggcaagtttactaatacaatgatgctttacaagtcctttctggagatttgggatctcttttgatgattgaagtcgataaactacggatacaggtaggttataagactttttggctggagagaacagaaaactttatgctttttgtgttatattctccgtagaccacagaaattgtgcattttccctagtttttggttgaacctatcgttatacatatatatattagtatgcggagtctgttgaggtatgcttacacaaactctctcactttaagctgacaggggagactccttgctagggcaaatgactattctgctgctgttgatgtctataaaaaaatcttagaattgaggcatgttttcaaggctgcttctcagatatcagagcctttagagttggatatgtttccagtatgatttctgataggtcattcgattgtttctatatctgaggcctgtgcatatcatatcagcatgctaacataaaatttctcttcaattggcagtccagatgattgggagtgtttcctacactatctcggctgtctgcttgaagatgacagcatctggaaatactttgacaatattgatcaaattcatccgacaaagcacatagaatgcaaattttctcaccttacggaagaaatggtgatcatattacccacttgccttgcttaatgtttcagtttgtgttttcctttgcttttttcttaatttgtggcttatatataatctattttctttcccaccatgcagtttgattctcgtatatcaagtgcctcagatttggtgcagaaattacagagggacgctgagaatagtaatttaaggggtccgtacttggcagaactggaaattgagaagagaaaattcttatttgggaagaagaacgaagacaagttactagaatcgttactgcagtattttcttaagtatgtcgctgtatgaaaccctttggagttgatctagttatttataagtaaagcctactggttcttatatccctctgagctcgttttgatttgcatgcacatttggtcatttagcttgctatgcttccgacgttgaggcatacctacaagtattatccccaaataaaaaggcaggatttgtggaaatgttagtgaaaaattctgattcttctgcgtcagcaaccaaagtgctcggtcaaacaacaacaattctcaaagtccaagaactgacgggaaacatttttgggcttcctacagacggtgtgttctcttagcttacatagtttttctgcaacttccttgttttctgcttatagttttttttatacaagccatgttactgtatggtgataagcctttttgaatgagttcttctgaatctaattccgattcaatttttttcttccaatgtctagaaattgaagcctctgctgtcaaactggcaaagttatactgccaaaatctttctctttctaaggacttggaccctcaagagagcatgtttggggaagaacttttatctttgattagcaacatgttggtccaggtgacttggctttgtttcaacagacttgcttcccttgtactggtttacccattgttgtatattaattaaccttactgttggttccagttattctggagaactcgagattttggctatcttgctgaagctataatggttcttgagctgggcttgaccatcagagggtcagtacatcatatttttgccagctgctttgttttaaatgccaaaggattcaacatggctttgataggtctcaacttgattattacttttgttt

SEQ ID NO: 57469 - DNA, 2193 bp, Arabidopsis thaliana landsberg
agatacgttggtgttattagtggttcatttgctctcgaggttaacagttttctgttgaatcattggctttacagaacactgattccaagcggagtgctctctgagacctgtgaagaatcacaaggaacaaagtggaaagcagtacaaatcatgtagatcagaagccattcatataagcatagaataaaactatcagtatttgtatatatatacaaactcatacattgtatctagtttcacattcttgtgctgttgggctcattaacatacagtaccagtactttacatagtaagaaaatgggctcataaaaggcccacaattgaaaatgagtacatgatgttctactgtacatgactaggggcctatgaacctaatttagaggaacatatcacggaggtttagacgaacaagtttattattttaagcaacaaatcgtttgttttaggctagcaatcaaaattgtatgtataaataaggaagctaaggtagctaaattgatgtgtgtttgattaaataaactagattaagggtcaaaaagtcatgaaatgtgtgcgaatcacattaaatggagaaacaaaaagatggctagtaaacgcgtcgaagcctttgaccctttccactttcttgtcgcattcgttgatactttgagatttctggtaatggggaagagacctgatattttatattttactcaattaagcacttcataattgttcttgaacttttagttgtataaagaaaatgtaaaaattaccgcaatcgttatgccatcaaatccaaaatggatatgtttttctacgaaactgctaatttcatgcattaatttgtgtgaaaacgaaacattcatttactttttacttactcataataatctctctaagcaaaaatgttttatattttgtaatattaaataaaactcttgcggaatacgtcctaataaatatcaaaaaccaaaggattgtgttttttttcttctggatatttgtatatcaggaataaaatatatatgaattttctaaatagtttcgcacattttttcatgtctgaatagtaaaaacgcatataaaaaaataaaatagggattgttaaggagatgacataaatgtaaaggaagaggaagtcaacatgccaaatagccaagactaaaatttttaaatggcagcttttttattttctttgaccagatcactcctttttgctccatccctttctctctctccttttcttcccctaatttatcttaaccttcacccccaaaattccaaaacctctcacttttatcccaaagttcctattgttatatctacaccctcattttactttaatacaacgcaaatgtatgttacaaattcatcacctaaacaaaactacaatttaaaggttaagcaattattgttacccaaattaaataatcgaaatctattatagtcacaatttaaaattcattcatatgaggcgtaaagtaaatatttatatatatgaaggacgttgatgcaatattaaaaaaatacagatagctttcaatttttatttttctttcaactgaataaaaatatatatatatataatttcgcgtaggaaaaagacataaacgaaaagagagcgaagacttcgtcgcatagactttgtagatttatcgttgagagtacctcaaacaaaaaaaaattgaaaaccaaattagggtttttaatttccaggtaaaaatcccctctttcttatcatctcccagctgctcaatgaagattttaatttcgctttctgaatttattttttctgcagattgttttgtttatttgaataaatctccgcaagtttcaattaggttgcaaaaatcgaagaaattttcttcgattcaaaaaaaatgggaaaattttgttgcttcacttccgcttctgaggtaatgattatcgaatttttggctatataacaatttctttttttttgttatgagatgaaataattgtgtcttagaagtgaaagatctgagagctttgtgttttgattgatcttattggtgtgggtttttaggttgtgggaggacaatcatcatcacgatcaggtaaaggaagaagtgatgaagggatgatcaagtatggttttagtctagtgaaaggaaaagctaaccatcccatggaagattatcatgttgctaactttatcaacatccaagaccatgaattgggtctttttgc

SEQ ID NO: 57470 - DNA, 907 bp, Arabidopsis thaliana landsberg
ctatgcaatccctgaatctcacccccgtccctcttcaaatgattcactgaatggctccttgagagaaatctggttttgtcgatcacgggaattgagtccaaacccatgagcctcgccacagctcctggcccatctcctctgcctctgagtggctcggggatgaaatcacgagacttgaaactgggttcagtaattagatcagatgggtaggtagaagaggtgccggaacagagaaatctttgaagaatgatagagatacagccgaatgaccgagtcttttttccgtttgagagagaactagccggagaaggcgatgacttcatcttcatggtctatagtgtcagtgtttcgaaactaacggagaagtaacgcataaggaaaataacttttgtctttacttttttttttcggttgagtgatgatagagagcaaaacaaaaagtgtgaacaaactcagagcgggatctagaatttgaactaacattctcagtcaaaaacaaaatgtaaatcagctttttttgttgtactttttgtgattgagaaagcaatagacaacagttgagacgctgtgcactgcacgcgttttgacaagtcaattcccggagaaattcatgtcgtccggtgccgcttttttataacaaacctctgtcacttttgttctttttagttcttgaaccaagtcaacaagaaaaaatagttgcggatcaaatatttgggccgttttgatacttttcagtgggctttatgctactgctattcatttaagcgggggtgttagtgcaagatctatcggtacaggggtatttaagcataatatgctataatatacgttgtctacaacaaggagcaggggtattatttgcgagcatcctaccaggtataactgaattctatcgtttcttgtttta

SEQ ID NO: 57471 - DNA, 454 bp, Arabidopsis thaliana landsberg
  unsure (1)..(454): unsure at all n locations
gcaatattcattccacctcctaacancgacaactcatacccgcatgagtgggggcgaacattaggtggggttattgacgcggcactatatccgannnnnnnnnnnnnnnnnnnnnnnnnnnnnnnnnnnnnnnnnnnnnnnnnnnnnnnnnnnnnnnnnnnnnnnnnnnnnnnnnnnnnnnnnnnnnnnnnnnnnnnnnnnnnnnnnnnnnnnnnnnnnnnnnnnnnnnnnnnnnnnnnnnnnnnnnnnnnnnnnnnnnnnnnnnnnnnnnnnnnnnnnnnnnnnnnnnnnnnnnnnnnnnnnnnnnnnnnnnnnnnnnnnnnnnnnnnnnnnnnnnnannnnnnnnnnnnnnnnnnnnnnnnnnnnnnnnnnnnnnnnnnnnnnnnnnnnnnnnnnnnnnnnnnnnnnnnnnnnnnnnnnnnnnnnnnnnnnnnnnnnnnnnnnnnnnnnnnn

SEQ ID NO: 57472 - DNA, 365 bp, Arabidopsis thaliana landsberg
gaagacatgtacaaatactgcctatggggaggaacgaggaccagaacactctctctgggagagcgcatcacaacggaacgtgcactcctgcatagcccaaggatgcatccaccgctagaaggcatacattgatactctcccaattgctcgcaccataggtgcgatgatacacttcactgacgaggctactggtttaaatgccacacgggccaattgagccatggaaaggaatacttgatggatcacactgcattacacatgctccactctgctcgggggatatcattcactagggatagctccggtttctgaactgtgtccatgcaaggaccggtactgcacctaattgtccaggcggacaacac

SEQ ID NO: 57473 - DNA, 964 bp, Arabidopsis thaliana landsberg
aaagaagaagatagtgaagatgccatttgcaccacttcgagaaatcggtttgggcaagagcttattgagttacctttcttcgttgatacggtcggtccaagaagaaaaggagaagatgataaaagcgaaaaaggtttaggagatgaagaaaagaaaaatatgaggatacttcaaaaggctttatctcaaagtgcagacgtgatagatcttgagctccgtctaggattagatccttataaaaaaacaacaagtacaagtacgtaactaataactatatatgtgaatactttaatccccaagtttgtaattatgtgaataatttcgtttgattagatattgatttgttaatattacacaaatattagaatatactgtatgtacataatggttactgattgtgatgagtttttaatcattaaatttgtgaccaaaatttgtgtaaatggtatttagggtttcatcatatattttaattgtgaatcttatgaaacatgaatacaacgtactaattagcatatttgaaacaaaagtgcaacttttatagacttgaagtgattacagaataaatcagaaagtttcgaaaaatgaaaaaatgaagatattaagcaggacatgttgtcaatgaaaaacgaaggaaatataacactttttttttgttttcctccgaaggaaatagataacaattatagttgcagaataggtaagaaattattgcttattgattagttagtagttaccataataaatgacaaactacataccaaaaaaaaaaaattcgagccttctactaattaaaaaccctagtctgttctagtttccacccatgcacggcctattcttctcttccttttgatcactctatctctccaagtctccaacctcattccacctacacaatgatttgaacaaagagacatgagttattatactatatgagaagacaaatacatacattgatgcagag

SEQ ID NO: 57474 - DNA, 368 bp, Arabidopsis thaliana landsberg
gagcggggatatagaatcggcctattcatagctttgtgatcctcatctgcgcattgatcggagcgagcggcccccgctgcgtttcgtggtcacgatcaatagggctactagcagcacattcgacactgtcgtcaccctcgatatcggctgttcataatccttctcactagtcgtccatcttcttcaacggaggtactgtatcgccaggtacgttcgattaagtacctaggtggatgaccgactcagtccgtactggtccgattcgcccgatctcttttgttctcacagagggggactgtgcctcactcggctcccacggtcaagacatgatgactgaatcccgtgctaccatccccacacagagcatt

SEQ ID NO: 57475 - DNA, 479 bp, Arabidopsis thaliana landsberg
caaattgcgatatgcttccgtaaagttttggatcacatgacgaaattactttgttttactggagcatgatagggacttagcaaggatgatacacccatctgtgcatataatgtggatccctagtacatacaatagactttcctatcacaatctaaaaatggttccagcgtgtaaattaccttgcggaaactcttgctaaagtagaggttttgtgtggtgtctaaagagcgtggatagatgatgatggggtatccacacgtctatcaatgcaatattgtcatacaaaatatttttggtcaaccctcgtactacctatgaaagtatgttgactacacgaattctaaacagatatagaccatcacgctggcgacgaatagatggatatgcctaccttcacacttcaagtcttgatgcttgctccattctgagttcctgtgaaactacagatggttacgttcacgttctcgactatgtcatct

SEQ ID NO: 57476 - DNA, 372 bp, Arabidopsis thaliana landsberg
gccgcacagccaatatctagacttgaacacaaaacctatttttgttgtttagaacacaatcacaccattgaaaggtattgataataatgagtgtgcgtgtaagcgtgcgggaatgagcagtgggattccaatttattggcagatccaactgtggcgcctagagtgccacaccatggggccaaaatgggttcaaaagaatgatccaagacaggctacacttaaggctaacaatcctcaaaagtcttcatctacaccgatccatgttagtaaacacacaataaggataagtgaacagacatgactgtggagatctaatagggacatagagacaatggcggccttaagagtgctgtcgagccattcatgagctga

SEQ ID NO: 57477 - DNA, 1047 bp, Arabidopsis thaliana landsberg
aattggggtttctaattttgtaacacatagatattaaccatatggataattttagaatctttatatgaagatttcaaagtcagttcctttgaaaattgatgaaatcgttttgcccaaaataaaaatcttccgttgcttaattttgtaatgctctgttcttttggattttttttttaataaaaattttttatcgttgctcataaaaatgctctgttattctagattttatattctctttactctcgcccttggtgtttcttattgtagcgaaccaaagtccaaaggaaactcctatatagacgtgtcctttaccacctcgccctacaaatgggacgcatccatcgtcatcgtctttaccacctatcaagacacaagtaccaagaattcaccaaacaggaggcgtaataatctaaactctgatcaagcatcatcctgttctggtcatgctactcactttcttaacatcgctctgaggcactattacgagagaagcttcccgcacttagtacccgagcctcaccggatgaattccctcagctgggtggtgctggggtattgcctcacggctgggctggagtttaacagcatttacgcttaggtagaagatccagagacttaaccgcacggttctcacttatttccatgctaactatgaacgccctctgtgcactcatcggagcaacacattattagcccgtacgaatccaagacttgtcattgcactggatagatatggggtagtagtagtgtgacagattctgtcatagctgctaatccggcattaccgttacctatagctgtagctaagttatcagctacaatattagtatatgttgttcaacaatttatgtatcacttaaattatgatggaatgtaacccgactctagtaatatatatattatagaaagattttatacattttgggaagatttcctttgctaatttgatcacatgggaatgttctgatcgagttatgtcttataaacaaatattgagggaaaagtttagtgtagagtaatgactttcaagaaattcgctctagttta

SEQ ID NO: 57478 - DNA, 849 bp, Arabidopsis thaliana landsberg
caataacagtgtagttggacaacaggtttgttttaacttttaatcattagtatatactgcttctgtttattattcaaagttggacaatttctaggaaattcaagcagtgtcaaaatcactcccaagtcttttgtttgaaagtataaggcttgctttaagatttgatcatttctctcattaattgcatagtttgagtatctgaatgtaaggttggttgttgtaccttgtggtgatcaggctgttctggaaactgtagcccgagtaaagtcgaccaagaaaaatgagacaaaagaggagaagtacaccattctattatagttatcgtttatatttctaaatcttcctttgtatgaccttctttgatgttctggaattgaagacgtattaagcgttatctaattttccataggcgttttcaactccatgatgttttcaacttgaacaatgataacagagctgaggacactccaactctcattgatcgaaaagtaagtttttacacaggaagactgagtttggatttgttgcattacttcttacatggaagttttggccttgtgtcaggacaatgtcttcatcatatccaattccaaatcaaagtatccagtattgcagctagacttgaggcaagattcttggtcttaaacatgattcttgaaaaaaagactataattttcaatcagtcatctgatttctgcttcttatggcatgtagactgatatcagacctggtggttgtcattgtatctgcaacttgtggtgggatcgcctttgcttgtgctggacagccggtctgatttttcgtgctactcttattctctatcagtatgactttattgtttcagtatga

SEQ ID NO: 57479 - DNA, 220 bp, Arabidopsis thaliana landsberg
gcaatggaagacatgacgacacagtttctttttcatattggagtaaagactagacttattgctgggatgatacacagcggagagtctcatctggaccacagctaaaagggtgaagtcaacatccatatgaaaatgggccgcacactaatctggctaaattatgagagtagtcacgcacatgagcaagatccattactatcatagctaaacactattgttt

SEQ ID NO: 57480 - DNA, 1019 bp, Arabidopsis thaliana landsberg
gaggtttttttcttcttctgaaacttgattgctatctattaaatacttctcattcctgcgcgagaattagagttagagagctagattataagttatataaccatataatattttgtgttcgattagtgtaacaaaaatggggttagagaggaaagtgtacggtttggttatggtatctttggtacttatggctattgcaacgatgtgttgtgtccaagctacgatcgaggaagaagcggctaaggatgaatcatggactgattgggcaaaggagaagatcggtctcaagcacgaagacaacatccaacccactcacaccaccacgaccgttcaagacgacgcttggagagcgagtcaaaaagccgaggacgcaaaggaggcggctaaacgcaaagcagaggaagcggttggagccgcgaaggagaaagcgggttcggcatacgagacagctaaatcgaaagttggggagggtttgggttctgtaaaagacaaggcctcgcagagttacgactcagctggtcaagttaaggatgacgtgtctcacaagtcaaagcaagttaaagatagcttgtcgggagacgaaaacgatgagtcttggactggttgggccaaagagaaaatcggaatcaagaacgaagacatcaacagccctaacttgggagagacggtatctgagaaggcaaaagaagctaaggaagcggctaaacgcaaagcaggagatgctaaagagaagttggcggagacagttgagacggcgaaagagaaggcgagcgatatgacgagtgcagctaaggagaaggcggagaagttgaaggaggaagcagagagagagagtaagagtgcgaaggagaaaagtaaagaaagttatgagactgcaaaatcaaaagccgatgagactttagagtccgcgaaagataaggcgtcgcagagttacgactcagctgcgcgtaaatcggaggaagctaaagataccgtgtctcacaagtcaaaacgtggtaaagagagcttaaccgacctta

SEQ ID NO: 57481 - DNA, 923 bp, Arabidopsis thaliana landsberg
aataatttaaaagacactattgattttctattgatttttagaattaatcctttacaagaacaatattctggggttcatgtatctaattcttgaacttcgattactaaaacaaaatccgcgtttgatacaaaatcttcctagaaattttgtaagtcaaaattgttatagcttccgcactccatccactttcgaggatgaaatacacgtaaagttttcttatgaacgattgccaaacgtctatcgcaactttatcatatagtcaacgagaatggcacatgcgatttaaaacaaacattgactcctaagttagtggaattataacaaatgtacacttccccctactttaaattttcaaattatgaattcgttttacgtaaattaaattcatatgataaattttgaaacaaaataatcatggttttaatagtacgttagaatgtatttctttttaaaatatcaatttggagtttgattttaatttcaagttctgcgctacttattgttaccccacagactacgaataaattatgtaaatcttaagaagaatatatggggaataacaaataaacactaatgaataaaatagatttggtaaaattccacaataatagtaaactaatatctttgaccctagatccgcgatttcgcacacacgatcatgtgcatagttgcgaagtaccttaaccagtgacgccgagtcaataacacgtattaacagataaaagaaccatacaattaaacctagtaaaaataaacatttgttaaaggattcaagattctcaatgcgataagacttttctatcactatattttcacaaagtcaacactcaacatgaaatgttaatgttagatcagagtatatattaaaaatagtacaatgtttaatcttatatgggacttaactcttgaatttttttcctgag

SEQ ID NO: 57482 - DNA, 550 bp, Arabidopsis thaliana landsberg
tccttttattttgtttaatgcatggtaaagtttagatgaggactgatgtgttgccttatgattgcttgatacttgagtcagagctatttaattgtaaaaggcgtgcttgtgatcacggttgtagagtagtcacgtcgtgtgaaggttaggtttagatgtttattatgcaatgaatatgtgggtaaactatgtgaggtatgattgagttagtaacgtgaaagtttagattacgacttatgtaatgaattgtaaaaggccgtagcatttcttcaactccggattgggccatttctttgagctcgtacagcactaaaaggtccgaaataaacaacaccctcaaacaccgttgagatgtctgtgaatgtgagggccggatctgggcatgctgctgctgcctgctcgtacccagttgcatgttcgttagctttatgccactggctcatccaattataatttcttttatttgtggtttgtgctgcactgaattaaacatctttgtaatgtatgagtgagtttgaatgcgcattgatgtgtagattctgttgagcgt

SEQ ID NO: 57483 - DNA, 511 bp, Arabidopsis thaliana landsberg
gcttatagggttgactttgctaaattattccaacgattgctttccaatctattttcccttaaatctgtaattgaattttggtatttgtttaattaaccattaatcttgtttaccaaaccgcatttaaaagtggatagagcaatggttagtagactcttttcccactgatttgatttccacactattggcatttagctaattggatcagctaaatgacatcacacaaagaaactattgctgaaattgaatattgatattatcaaattttggtatatctccaacaaccattgtcctcaacaagcatagtaaatctagttcctaaattttcaatatctaacttttttttttttaatatccaacttagtaaacatattgttcagaaacacgtcaaaaaaaaacaatcaacacgtctcataccatcattatccagaagggtacagtaaatccagttcctagttttcaatttctaacttccataatgctccctttctacacacactttttacaagtc

SEQ ID NO: 57484 - DNA, 205 bp, Arabidopsis thaliana landsberg
ccacaaggagatggaccgtattcagaaagaacttctgtgactattcacctacacagagacgttctgggcgggatttgtcatagagttgggtgctggaggaaccaccggagcccacatagaaacctcatctatctagcaatgcagtgctgcagcttgcaactttatgataagttcctacccgatcatgcgggctctccattcaaca

SEQ ID NO: 57485 - DNA, 1100 bp, Arabidopsis thaliana landsberg
tagaaaccttggttgcagcagcagaaagaagggaaaacgcaatcgaggtactttactattttactactgtctatgcacattcagaattatttgcttttggttttacattgcataaggaattgtcagtatgccaaatgtctactttttagtataagtgacaataataatgtattttttttttccaggctccaccttcagatgttcaggacaaagtttcgttcataatcaataatatctctacaacaaacattgaatctaaagggaaagagtttgctgaaattttgccccaacagtattatccttggtttgcacagtacatggttatgaaaaggtactgatagttgtattcttcatgcaaggtttctttcttattttttccctccaagtgtgtaatacctgatagagcgatgtgtttaatacctgatagagcgagcatcgagccgaattttcatgatctgtacctgaagttcttggacaaagttgattccaagctgctgtttaaggagatacttcaaaatacttacgaaaattgcaaggttatttttcttcacacaagtgatttgcggtgataagtgtactttttttcagcaaatttttctcttcttaatttcttttgttttgcaggttcttttgggctcagagctcataaagtcgagttctgaagagcgttctcttcttaaaaatttaggcagttggcttggaaggttgaccattggaaggaattatgttttaagggcgcgagaaatagatccaaaatccttgattgtggaggtaattgctgctatttcctttaaattgatctcgttcatttgtaatacacagtcaaattgtagatatgaactttgttttcgcatcctttgacaggcctatgaaaaagggttgatgatagcagccattccgttcacttcaaaggttggtgatggttgattggcgttcatagctgttctagggttgatttcctgagttctaatttactggttattcaggttctggagccatgccaaaacagtattgcttatcaacctcccaatccttggacgatggctatactagggttgcttgctgagatctattcaatgccagacctacaaatgaatctg

SEQ ID NO: 57486 - DNA, 2082 bp, Arabidopsis thaliana landsberg
  unsure (1)..(2082): unsure at all n locations
ttctttgttttctgtgattaatttgagtcgttctggtactcctctccaaatgagtcgttgtttataagagttctccacaaagtattatggggtcattttcagtgtaagtaaataaaaagatggaagtgaatagcctatttaacatgtacctccttaacaacgaaagtcaatgtgttggagaactttccaacagcagggaccccagctggcttctcaaaaaccacaaaggcttgaccgggtgaatcgtaaggaagtgagtttagggcctttgaagttacttcactgaattcctcagcttctgaagcatctacaatgacattgacctacaaccccatgccaaattaattaaatgaggaaagaaagataagatatgcttgacactaatattctacaccaatgttcagtaccctctccaacaactgctctggtattgtgttagtgcagttgtactgaaacaccacctgactgtcaaagatatgcttaacaacattgacagcgtattctgtttctgcttcagttagctccacaggtaaagaagactgaaaaagaaagtacaagttaaagcaaacaagataagccattaacattagaataacacagaagacaaatcagcccctaaccttgaaaagttttccaaaggcggcaaactctggaatggatgagagaagtctttcatagccatcaaaaccagaagcaggtgcagctggtggtgcaccaagaccagtgggctttttaccctgggctttcttctctgcaaggggctgagatttaacttccttaggtacggagttgatatcaaaagcttcttcagagggctcctgcaggaatcccagatataagataactgatgtcctaagaatattgaaaaggagaaaaccgagaaatagattaactcacataattcttcagactagtttccatgttgactagaggaacctccagggaaccaaataggaaatccttgctctctttatatgtgtcaacagtaccatcaccaccaagaacactcaaatatagtgttgccctatcacggaccttaagataaaaagatgtctgactcatgagcaaggaaggaatcatcaaacaacttgcattgcatgcatccgaaaatgtttacagaggcaaacacatgcatgcatgtttgatgatgcaacgactcaaaacaaacagacatacagaaacagcaatgcttttctagactaagactaggaacgcacctcatcatcactgtcatagatgcaacgcttcaatagaacagtaatccggggctgtcgagcattatcatcagtcaaagaagataaacggaaaataaaaataatggttgttatgatgactataccttcaaggattcaaccataaacccaaactttgcaatgtgtggaaacagcagcagcccggacagtgggcgttttctagatgcacacgaattatatatatatcgtatatacttgcttggatatgaggtgttaggcccctcaattcccagaaaatgaagggatctgtgcgagaatacacatttcaataacacataagtttttaatagcaaccccagatggatgatggaataattacctgtgttgaaagatatgtgaattcacaatcttcaatgaattcacatagatgaagcagtccactttcctttgcatccggaatatctctgataatggtcacaatagaatctactattgctcttttatactcaaagccaccttcttccctaagaatgttgcttaagaaggtcatcctacaaatgaaaaggtgatagatcaatcataagccaaatgctaaaaagataccataacatatttaatcattcanaaaaatagaaatgctcgagaccaaaactacaaataacanaccctaaaactttacttacaaggatctgtatttcagtgggaatttcacacacaacgatcttattgcgtccacgaccacaattttgaactcatcagcaatatctgacataaaattagttatctgcttcatcaaacgttctacacttgattcgttccctgttttcaatagtgtggtattgcgagtgtagcaatgcttctattttgatcagagattaaactctccata

SEQ ID NO: 57487 - DNA, 458 bp, Arabidopsis thaliana landsberg
  unsure (1)..(458): unsure at all n locations
tatncacttcttaggcattcgagatcgcattctggggaggggtagctcttatatctatactatctccacatggatgcctacggcccgtcccagaaatatcaccatggacttacttagctagacatgcaactttgcaacgagtacataagactaacgcatgctcttcgacctaacttatgtaagcgtgtgcgtcaaatagcgtgcactagcacacaaactaactatttttgaagacagaaactcacgaccaaaatgcattaacagtcctcgcatataacatgatgagtcacttgactctttagaacttccagtgttggaacttgactgaccatgttaaaccgtcctgaacactacatgaaatggctcaccntttatggccagggtcaccgaaaatagattatcttttacgacaaaaggtattttagagagtcctaacacgtagatggtatttaaccgaa

SEQ ID NO: 57488 - DNA, 498 bp, Arabidopsis thaliana landsberg
  unsure (1)..(498): unsure at all n locations
ccctttcctttgcttggtgatgacagacagatacgacttatattttaatgagcgttattttcggtataagattgagcggcgtttagaatattttcctggagttcttttctctcgggttgcggcagtcggaaatactgcttgattttttcagcgcaatctgctacttcggttttacataccaagaaatcacttgcttttaatacgacctcttttgaaccggtatcttccgaaaccaaacacggaagtcctgcgtgcatggcttcaatggaagttgtcggaaaggcatcaccacgtgctacatgcaggtaaaggtctgcaccggcataatagtcttccaggttgttgacataaccttcaaagaaaatacgttcaatggttgctgcatgcagctgatccaggatctgcttgcggtttgttgtcccgaaatcacctatcacgaccagttttaggtccgggaattcgcttagtgccacttcanatgcctttagcatgatatca

SEQ ID NO: 57489 - DNA, 389 bp, Arabidopsis thaliana landsberg
aaggaaaaggatctgaatactaacacctcgcaaacatatctttattttttatgtgcggaaaccaaagaagagtgctggggttcatcaaacatctcttaagacagaaaagcatgattctaacacttactcgaaatgtcacttaaactatatcttagaggaaaacacaatttgttgtgaaaaatttaacgagacctatctaatgcatgcattatatcatgaagagagggttctcatttttgactgctacctattatcctaaaatagggaggaaccgaatctaaaggtatcagattgagatatgtgtgccctgccttattcaagaaccatggcatacatgttcggcatagattccatacagagagagtagaaaaaacactatgactggaaag

SEQ ID NO: 57490 - DNA, 716 bp, Arabidopsis thaliana landsberg
  unsure (1)..(716): unsure at all n locations
gttcgtcattttgttttgtctattcccaacttgtttgttatatctaaataatatgctttttgattctcaagattcaagatataaccatgctcctttttttaatttaaatttttaccaaaatgtaaattttctatatataaaaaagatatattaattgctacttgaaatttatacaagaaatttcacccataattgctacttgaaatttgaaaatgatattttccaccaccaccaatgactgattaaaaaataaactgatttctaacacaccttaccacccaaaacctaataaaaactattcgaaaacagccagtacagttgaacagaggcatgcagcaatgattaataattaatagttagataattaaaatgttaagtggaaaattgttgtatttagctgactttccagtttccaatagccatcgcccatcgaatgtttatttaatcaatattctttaaaataatgagagtgttttgcttacttggcacgtgattaaagacttctgacagaaaaaaacaagattaaacatctaacagaaataacatcttttaactatganctgcagtatatatatatatatcagaatagtttgagaaattactgaagaatcaattgaatttccacacacacaatttataggttttctccttcgacaatattacgtttagaatttaaactaaaccgagatccatattttacatttttttttttaatt

SEQ ID NO: 57491 - DNA, 643 bp, Arabidopsis thaliana landsberg
tcacgtagtctatgtttgccttttttgagttttaattaaaatcggatgaaaaaagaaaagttacaagataacgttttaaaatgttagtctcaatagttacaagatttaacattaattctttttaatttggtctcagtacttaatattaatggctagatgccaaatgtcatttgaacggaatttaatcaaaagttaaataataaagacgaagaaacaaatctcatattgtctaaaataaaatttcttaaaaaaatttttaaacagaatctataactttttattattattttaatctttctagatttagctattgaataccccttcctaaattaaaacatatggattctctcaagagaggaaacaataatggtataacttaattatggagaattcacatattcgtttttgctttgactatattgattgtccatattttagttgattacggattcatctagtcaatgtgatgcgttatcttcataattacgattgactactatatatctctgtcttcgtatatatgtgtatctcaacttatactataaaaatcaattacatatcaccaaaacaaaacaaaaatgagagaatctgacttaaggatgaagctagtgatactagtatctttcttgctcgttctcccaat

SEQ ID NO: 57492 - DNA, 110 bp, Arabidopsis thaliana landsberg
gccttccccataatttagacgaaaagaaatcatcttaaacaaggggaaaaacattattaaacaccgacggaggaaagcgtggttctgagtggcggcatcactccatgaat

SEQ ID NO: 57493 - DNA, 1173 bp, Arabidopsis thaliana landsberg
cttttggaattgcaatttcggagactctggtctcgttgccataactgatcctagtgagttttatctatctcttctttttcactatacaataatctatgttttgttcttttgtttgatctcaaattatttttgtttccgacaggctatggaagttgcaaatatgaatttcgtatgtaaagcatagaaaaattcgcgatcgtatctcttacaagacaaagaactcttggttatgatatctaaactttgaatcattgatcagtttttctattatctaaactttatttcattgtccaaaccatcttatttaatatcataccaatatgtacctctctacttaattacatatggtcgatgttggtatgttaattaattatctctaagaaaaaaagtagatataacttaaattttatgtccaatttctgactgtccaaaccaaatcaaagaatgtgttctggataataagcctaaacttatgacaagatttttttggagactaagcccaaaaaaagagaagcatacgaatgatactgcgaggcaaatgggtgaagtgatagggaataatctcacaggattctcctatcactttataaatttgagaattctatcactttacaatgaaacgagttttcaattaacaggagtctcctaatcaatcgcctagggctttagaatacttaactgcatatgttatacaaatttgcaataaaagaagattattctttcggtttcaggattttttcctctgttatgttgagtgcgatacatagagatatacagtttatgcaaattaagttagttaaccagtcccatacttggcatctagacgcagaaattaacgtcttccattcttatattgtatcggtaacaaggcaataaaagtcaccaatatctaaagaggccacaaccagtttttttccatcataattagaccaaatactaaaaagaaatcaaataacaacgtccacaactcagttcctcttgcataagaaaataacaataaataagaaacaagggaaagtcctctaactgtgctcatgacgtctagatccgatgcagccaacgcggaagaacaaacgggaggtatgtgatatgctgccattcttcagcaatgctaacaatgcgaccattactggtttattgttcaaaggtggagtaaagcttaaatatgccttt

SEQ ID NO: 57494 - DNA, 944 bp, Arabidopsis thaliana landsberg
gatttgggtctaaaatccagtatattcgatgttttcccaaaaacacaaccactactgatcaaccatttgactaattccgtaaataatctaagatatttagattatatatcttatatattgtattatgtttttgacaaaaaaaaaatatattgtattatgatataacacttgtcctgtataaaataacaaactttaattaaacgttttagatgctggattatgggtgactgcctacattatacagagcacacccatttgttaattaattatgcatctatgtatttcgaaaatagtgaaaaaaacatattaatagatactgaaaatactcgaataaacaagaaaaggtccaaaaacataactttggtcaaatgtgttcatttcattgagatctcaagtctttaagttatactatgatgtaagaaagctgattgacatctctggtacaaaaatggctactaaaattttttatacaaagtttaacacttatttgaacataacattttgtttagagttaataatggttttataagattgtgaaacattataaatgtcttttcagtttattttttaaaatcatacaatgagtaaggacacagttttcgtttgactttcaaatattttgactattgaatttgatttagataattcgaaaaataaaccataaagaaaactaagaattcatattaagatctagttagaaaaacaaacaacacataaatgactatggactcttaactctcattctagattttaaaaatggaaaacgaacatatgacctacataagtttttatacgaatcattccccttatgcaaaactacatatagttttattgatatagcatatatctaatacattatgaatctaaaagacacggtgacttcaataaaattgacaaagactttattgctactttaatcgtagatcaattcatccgcaaaggaa

SEQ ID NO: 57495 - DNA, 900 bp, Arabidopsis thaliana landsberg
agcttcgcgcctccgtcaaatcacgtgttgtttcttctcggcttctccgttaaagtaaacgtcacaacaccgccgttaatcaccgtggtctgtgggaattcaacccagaggcagagaagaccctgagagacgccatctggtccttcttttgcctccatctgtgtcctctctctctctcctcgatctcacgacgatcttcataaaccctacgctctgcttactcttccatcatcttttgctcagatttcgtaatttgtggtttctcgatcgggatattagtactcgatcgtgtctccgattgattctgatcggaatatcaaattcggattccggagagctggagatagagagagacttaggtaaagtttggtggagatgatgcagagacggagtccgcccaagcacaggcatgacggaacatcgccgcttccattaggaatggattggagtcctccaccgcgcaaatgggtgagttcttttgttgccaaaaattcgaactttattggactttaccacgttaccttttggaagtgccgtgctagaattcttcagttgcctgctttattctaatgggacttgagataaatgtggatgtctttgttattagtcccaagctatggggatagctagtgtagttaccagcaagtccaatggtagactcaccacataaggcattagaagtcatttcctacaattggagaattctgttgttgccctctattgaattgatagtttatcttttgtttaacatcaggggtagctaaatctttatttatgcagctttggatagctgcagactataaagtatcattctactcgattgaattccatatatgtacaagttggagaatttgagatatttatgtttatttctgcagaatggtagagatactgtttggc

SEQ ID NO: 57496 - DNA, 1155 bp, Arabidopsis thaliana landsberg
gtttggggtttcgatagtttcgaaggctcagactacgagtcgcctgatgagcctcctgaggatgatgaggaaatgtagttccgtcgatacacgcgctattaccacgagagcaaggtttgccgtaaaattagatctgctctccatcaatcttggtataaagcttgaacctttgtgcggaggttacagggttccaaagtgcataagctacctaaacatgtttgttacggaatacgccctctctatctggatgcccccttcttcaagccaaacatgacggggcgtgactacatggagattatggccaatgtggctattgacaaatacaaccaagtagaggctagtactactactactactactactctttttagattttttttgtgtcatcattatatcttcccgataagtagaggctatatgaaacttgtttattttattgtagaataagacgttaaagcttgatcatatcgtgagggtgacggtgcaattgagctatggatacaaagcttatattacattcatggctaaggaatctcctcatggagagcttgtggagtatcaagctaaggctgagcgcaaggcatggcaaagaaacattcaccccatcttttgcagaccagctcgctctggtgcttgattttttcttcctaattaattggatggtatgtaatggttgacacagattattatattcactcttttcttgaaatatccttattagaggctttaatctttgtgtttattagtatcatctgattcttataatctatattcgatacagttcctcgaatgatatgtgttctctttttctaattgcagggttgatggtgtccttgggcgttcccaatgcccagaccaggaagactaagtagttaccgattttatctctttttcaatgccctatgtactcaagcttttatgatcagaactcgatttatgttgtttgtagtgggggttgggttaaattattttaaaaggagttagaccttctatggccattcatactccgtttcagatcccactattgtatccaagttgttggtttaatgctaatctcatcaatttcttcacttatagttaggtggatgtaggagatttttataatcaataagctgtgacataatcggtggaaaaaaaataaatgattaagcaaat

SEQ ID NO: 57497 - DNA, 1138 bp, Arabidopsis thaliana landsberg
ctggtcttctaaacagacagaaaactttttacccacaagcataaacttaatatacccatcatctagttctcttccgcaattatcagaagctaagacatatgtgacaaatatgtttaagaccatcaaaaccaatgtattccaggacaaagaaaaactcagtgttgccatttccgaatcatcttcttacagtggttatgcagtcttaaggttgtaaagatgcaaagtgtgtatatcttcaacattcttacataactcaattcatccagatttgcaacgggacaatcaataaagtttaacagtaatcataccttcgatcaggtccagccccagctgagacagtatcactgacggtaagaatagccactttatactcaggcccaggtacttcatcgtacttcttttctttccgaatagagcctggttctgataatgaggctttcttgtctattgaaaaggcactaatatcagaaacaattatagctgatacagaacttccagcagaaagcacatttcccgtagcaggcaactccaacaaagcattagccgacctcatacttaaaagcctactgctcatctgatgtccagtgctctcagcaacaaatctgacaaacaggtatatcttattagcccatttaagatagtaatgcatactagaacttccaagaaaatctaggaagatccagctaagtttttgactcacaagaagacataattatgaacaggctcacccgggagtccctgatccatcgttgtctttccatttgattatggcccgatgaaactcggggcggatgggatcagacttgatgggctcctgaagtcgaagtcgcactctgagcagagattagactgtaatctacccttttctcgacgatcattttagaatgaattcatatagagaaacaagtataataaaaacttcagttacctcagtggatgggggcttgtccatcctgcaagctggcggattgtaggcacaacaacgatattgaaacaaaccaaacagctcacaggatttccaggtaatccaaatgcaaggactgttttccgccagcatactttcagttggttttgctctaatctcggcgaaggtcaaaggtttcccgggtttcatcaatacctgcaaaaaaactaaaat

SEQ ID NO: 57498 - DNA, 403 bp, Arabidopsis thaliana landsberg
gatgggcaagtactaccgcaattcggcgatttatccgaacgaatgcatgttcttcattttcgcctatttcaaggcgctgatgtgggaatcgcgcggcgtgctgccgaactaccgcgactggctgttccagcaggccgacctgacgtcgacgtacgaatatcacaagcgcttcctgcagctgctgcaggccgatgcgccgggcatctggaatctcaagcagccgtcgcacggcctgtggctggaaacgatcctcaaggtctacccggacgcgcgtttcgtctggacgcaccgcgacccgctgaccgcgaccggttcgttctgcagcctgctgtcgctgtcgcacaaggcgttcatgggacgcgtcgacgcgaaatggctcggtgagaactgcagctggcaggcg

SEQ ID NO: 57499 - DNA, 1541 bp, Arabidopsis thaliana landsberg
cggtaacttttatagaaacgcataatgatataataacggcaataatacaacgatcacatgtttttataaattttaaattttgcatatcataaaacctttaccacattttgttttttttgcatattatagctaacctaatacatgcatataacgcatgatacgtgtgtaaccaaataaataatatatttaattgacatcatatatagaatttaattccgaaatcatatatagataatacataatagaataaaggttgttagaaaaagcctgtcgtgatactttaccaaatcttttgatatgaatatttaattggtagtgcatcatactcgttacgaaacaatatgttataattcttattcgacagaaaacatattctatattagacattgaaagctaaaaataatcaaataaaaaatcagaaaaaattaaataataacactattttcatcattaagaaaatacactattttcagtttattatttactagtttttaaggtttgaatttataaaaattggctaatatttgtcattttcctcacttgcaaatatattttaataaatcttcttccacctttgttaattaatgatttaattctgaaaaacattgtgttgcagctaaggcactaaacgaagctaggttagaagcaaacgtgagggtaaacggagaaactagcttcaagaacaaatggccgagccctttcgccgtagtttccggcttacttctcctcctatccttcctaaagtttgtctactcgcctttacgttggctcgccgtggcagcagttgccgccggtatctatccgattcttgccaaagcctttgcttccattaaaaggcctaggatcgacatcaacatattggtcataataaccggtaataccactttctcctcttttctttatgctgtcgttataccacttttttttttagtattcattattagcatctaacattatttctctatattactccgtgacttaagaatgatgtgttctataataatttgttagtttatgggttatccgtgatcgatgtaacaactagaaataatattgttacttatctaagatttgaaaacttagcaaattgtggttaaggtaaaactattaatatatataatttcttaaaacttgtgatcgagtctctatccctttttcggtattttaaaaaagcttacatactgctttcctacaaacccaacactccacgaaaccttttagaaaagtttcctttattttgttcataacatttttaaataaattcatatgggaaaactactaaagaataggtattaagaaaaatattgtattatgctcaacttattttactgaactccaatataggaaaaattaaatacgtgtagcagtttgatatgtttgttatattggagagtttatttgagttataggttatagaggaaaactaaaacaactttatatttttgccgtaagcaatgcaaatttgagttatagtttataggaaaaaatcaaaatgttcttaggatataggaaaagtgaacatgtgatataaacttgaaagt

SEQ ID NO: 57500 - DNA, 544 bp, Arabidopsis thaliana landsberg
ttgaaatcaaaattaagccgttaaatagtagtatggtaatgacatattaaatcaacttttgttttactttaaaatattttaacctgaaaaatttaattttaatacttactaaagacaaacctgtaaacctttgaatgaactaatgttaattttaattttttatctgatgattggaatcatatttaacaatcctatcagtattcctcatctctagtgataagaaatagttattcttcaaaatgccacactttcaaattttgttgtaagaagtatcactgttagtttaatgttccaaaaataccaccaaaagttttgatttttcaaaaatacctcaaacaccatacttgattttcaaatgttcaaaattttaaatttaggttaactattttagataacttaagtgatatttttggaaaaccaaaactttaagtgttgtattttttggagaaattttaaaagtttaagaattaaaaataacttgtttaaataaaaacaaaaaatttgccaggtgtaataaaaaattttttttaggaattaaaaaatt

SEQ ID NO: 57501 - DNA, 352 bp, Arabidopsis thaliana landsberg
  unsure (1)..(352): unsure at all n locations
acaaaatttagataaatgtcatgaattttgtcctcttttattagaattttatcttgtatattactaaaaggtaaacataataacatttgatttaaatacaaaattggggtttatcatgtaaaaccaacctcacaagttttggaatgaattgttttgtttcttctaattttgnggtattacatatttgttattagaggggaggtcggaattaaggagaatattttagatgagacagcaagcaataataaaacttagattctaaacccacttccaccgaaaatatgtagtagacaagtcctttatgtgagatntgtttggtgggcggaggaataaataaagctgattttttttt

SEQ ID NO: 57502 - DNA, 600 bp, Arabidopsis thaliana landsberg
ctcgatttctcactcgctctccatcggcggcggacagcgcctgacccaggcaatcgcctcgtccatcgacttcacttgccacaaccagaagccggccaccaactccttcgtctccgcaaacggcccatcgatcacctgccgctcgctgccagagaagcgcacccgcgcaccttgagaactgggcttcagcccttccccagccaacatcacccccgccttgaccagctcttcattgaactgccccatcgccgccagcagcgcctcgctcggcatcgcgcctgcttcggaatccgtcgtggccttcaccatcaccatgcatcgcatcgtcgcctctccggttattggatgaaacctgacgactgcataggcgcagcgccggtttcatggaggcgacgaatgggggatgggtgaatcgacataacctgctcaacctcgtcgaaagaccatcgggaggacgacagcctgcacccgacgaaaacctcgccgtcgttcgatcgcgctgcaagggatgccgatcgccaaagccaggtcgaccggccggaaacgattcacaccggacgctgcgatcgcggaaatcgtgccgaactccgaacctgtctt

SEQ ID NO: 57503 - DNA, 549 bp, Arabidopsis thaliana landsberg
ctgcactcctccatatatcattaaaatattttaaaaacgtaaaatttggtatgtatatgttatattgatgattctggtgcatagtggatttttttatatatgataaaatcaatagtcacttgttaaaagcattttatggtggtggtgggctaccgtctgttttttcatttatatttatgtgttcacagttcacgtgaaatatgataacatatatatatatatatatatacctatcataattattttttatgctgtatatatgtgaaaaaattgtctatatatagtagttaattaattatgtatatgaatacagcatgaaaaattattgagagcgagcgtgagtcttgttgttcttgctttgccgagtttcaaggtctcatacgaattcatttgctctttaacaatcatgcatatcttgcatatatcaaattgttggagatacaataaagttggctataaatatgtataggggaactcgaagtaagaagatttaaacaaacatgtaaatttagttggtttaggtaacgttcactttacttgtttggcgtt

SEQ ID NO: 57504 - DNA, 1640 bp, Arabidopsis thaliana landsberg
aagccatatagaaaacggatattgaggacacagactcaaatgtcaaatgaaatcaaaccaaaaactttagattgtttcatctttgtcttcaaattcacactcttgcaagtgggatatttttaaaacaagtaggagagaaaaaaaacccagcaaaacatttggaggaatctcttattaaaacaaaaatcaaacagagtataacccagaaactgttgcattcatctgtccaatcatataataaaaaaccagcaattgcccaaaatcgatttaagcgtggattatcaacaatgcaagctgattaattacactaagtatattcgcagaactactacattacaaaggctaatccagaaccaaaaattgaacccaaaaaagagaaatggaaacaatacccaagcttcgttgaaacactccggaggatgaaatcttgaaatgggtttcggtttgagctctttaagcaaaaaaagattttctttttattatctggaattaaaaataatagaaaaggaggaaccgacagagaaggggaaggttcgttggtaatagagaagatgagaagtggataggctttgcttctttctttctttgtccaatcataaacactttcttctctgaagaacaagcttttttatcttatttcgcgccaatccgaagttaacatcatcttccaccttcttcattcgctatccctaatcattcattgtctactttattattttagtaatcacacaatagttaggtttaaaagatactactactagataaattgctcatcttttttgtcgtcttactaaatttatgtttttaatggatgtgcatactgagtttattttaatttatcatcaaacaatcattcttatactaagtttatttttgtgtaaaagcagtttgtagctagtctcccataaattataatttaagagtaattaacaaaaaaaattgtctaattcgcaaatggatttgctcgccctatatatttgaggtcttatatgaatttacaaacaaaaaaaaaaaaatctacaaagctttgagaaggttaatggtttatttatttattttaaaagccaaaaactaaactgaaaagtgaaaactacatccacttaaggtatgtagattaatctgtgagccatggcgcgaaggtcatggctttgtgtatgccttgcaattcaaaatctcaattaatacggcacaaagacattctcaaaaattcaaaattgtttcgtagataaaaaaagaaagaaaaaaagttgaaccgtagatcactaatgaatcaaaaatttggagacaacaaaatattggcaaaagatgtgtgatagcatttggctgcatcttttttatttttctatttacaaagttagtggaactttgatatgttttcaatcttctatttgtgactgtcttaaagcaatcactttatgaaatatctcacaatctgccattcatagagattcattaagatctgcatatttcatgtacacctaactttgtctgtatagatcttattttaaaagcacgaattgacaaataaataggaaaaggacaaaaacaatgtacagctttttaagtgatcagattctgaggataggccaatacacaatttgggatttgcaattatcaagtaacatctttatttttaataa

SEQ ID NO: 57505 - DNA, 601 bp, Arabidopsis thaliana landsberg
gcaagcgtgctcaggtggcttttttccatgccgaggagattcggaatgatcaacatctccggcgtcacctgacgcgcgcgatgcgcggtgtcatccacgcctcgctcccccatgacctgcagggcggtcgcgtccatggggtagtcgcgcatggcggaaacaccagcgctgcccacctcgatgccgcgatgggacaactgctgccgaaagaggtattcggctgtggggctgcggcagatgttgccaacgcagaccgtcaatatccttttgaacaccttgacttgactctccgaatcatcgccgacgcaggtgcaaagcggcacggccgccattccattgactgtcgttccgaagaagcaccgtttcggcatggcttgggttgtaaccgacccctccccctgaaacgtgaggttccggccgttcgcaccgctgatgcaaggcaacagaatatgcggcagtttgtatccaagaaaggtctgggtaaccagcttttggttcgtcattcctgcgcaagcaggaatccagtgccttgtgtctgctgacctggaggcactggatcccagcctgcgctgggatgacaagctaaacgcttagactatac

SEQ ID NO: 57506 - DNA, 1108 bp, Arabidopsis thaliana landsberg
aacgattgtataaaagtaaaacccttaatcggatcctccagcaatttttctttcaaaccagaaaaccctccaaatctgagcgggcggagattccttctcttccgactgataatggcgtcttcttcatcaacctctaccggtgacggatacaatgaaccatgggtggagaaatacaggccgagcaaagtagtcgatatcgttggaaacgaagacgccgtctccagacttcaagtcattgctcgcgacggcaacatgcctaatcttatcctttccgtaagattttactcttctgttgacactctttgatttaaaccctcctcgaatttgctaaaaagttttaggtttgatgaaaacttgatcaattagggcattttgggtttgtttactgtgtagatttcatgataaagcttagattttgagggtttttaatcaatttctattgtctgccaaagttaatgaaggtttgatttttagaaaatctctgtgtttagtattacttgtggagatttgatatatgattttgtgttgtttggttgtatatccttagggtcctcctggaacaggtaaaaccacaagcattttggctcttgctcatgagctccttggcacgaattacaaggaggctgttctggagttgaatgcatctgatgataggtatgtgatgccaatcttttacctatgggatgttgttctatcttcaatcgttgtttggttagacatcttcaatgttctgttatgtttgtaggggtattgatgttgtaaggaacaaaattaagatgtttgcgcagaagaaagtaacacttcctccagggcgtcataaggttgttatcctagatgaagctgacaggttagtgacttttacttgagtattccttctcaagttgaattgttccagttaagtttttttttttctgactttctgttttcggtttctaaaaaactagtatgacatctggagcacaacaagcattgaggagaacgattgaaatctattcgaactctacgcggtttgcacttgcttgtaatacatcagccaagattattgagcccattcagagtagatgtgccttagttcgattctctagattatctgatcagcacatactag

SEQ ID NO: 57507 - DNA, 251 bp, Arabidopsis thaliana landsberg
  unsure (1)..(251): unsure at all n locations
gcaccaacaacgcaaaccacganccaaacaacacacaacgaacccggaagagcagaaaacccccacaccagaagcagagcacgaagcaccaacaacaacaacacaaacccgcaaaagccggaacagacggcaacaacaaccacacgccgacagcaaccagncncaccacaaccaccaccaccagcaggagcacaggcagaccgcccaacaacgcagaccaaccacaaccaccgggcaacgggcaacaagaa

SEQ ID NO: 57508 - DNA, 435 bp, Arabidopsis thaliana landsberg
aacaataatcattgtataactcaagactggagatgtaatcgcggattgtgaaaacaaatagatcattatacatattaatgattcggtaaaaagaatagattatctcctaacctagaatgtttgagcttctaactttgcttatgcatcgtcggttggtagtgcctccaatcaagtaaattaaattatattctttaatcttatatcgttcctcgtgctgccggaactaaaactggaataaggttcgacttttacggaaacctatttttggattcagattttcttagtttaatcaaatatgtgaaaaatattaaaaaaaacaaatgaatctaaggatcgtccccaacattatctgtcgatgtatgggcttaggggacatgaattatcaaagggcgttttgggaatcaaatcttggactgtctatcggtgtcactaggg

SEQ ID NO: 57509 - DNA, 461 bp, Arabidopsis thaliana landsberg
atgactatgatgctaatctctacgatttattacttgcagtctgcattggtttcgcttatcagaaaaatggccattgatcatccataccatacaatcttgcaggttctgaagtgttatccatctcttgtactctttctatttcttcttttctgtttggttaactggcatcggacttgctagaagtgcacacggtaaaatccttgagtgtcctatgatatcccgaatatgttgaaagaatggaaaaacagtaaagtatgttgtgctgtatagcatgccatcgaaattacattattaccaagtgactttgtctatcttattcgaagtcaagtttctgaatactggatatatgtctcgtatttttctgttgcttttggatctagcttctggctttggcaaacggtgaccgtatcaaggataaccaacgcagtagaaattcttttgtggatgatattgataaaaac

SEQ ID NO: 57510 - DNA, 1051 bp, Arabidopsis thaliana landsberg
cagattgaggcccgacttgttgttctagaagttttgcgattgatcaaggaagactatatgcgaggtaagattcaagacaccaatacattctctctctcatgtattaactttttgactcggtaaacatttcaaacgggaatagcatacatgcagcttaagttaggacaaaaaatcaaatgttgttgaattttatgccagtagagactaaaaaacacttgtaactaactgaatctcctttgcaggtgacgttgtaatagatgatgtgttgattatcataggagccgatgaagcaaataccgtttcaggaaagcaagagattactgtgcaagaagcgctagtgaagcttctacgagatgaattgtctcttgtggttcttcctgctggacaaagaaatatcatacaggatgcacattgtgtagatgatgcagaccaagagaacactaagtcatttgttagtatatcctcaacgaggagacctgcgattctggagaggttgatggttacaaaggcgtctctgtatcagtggttgcagcgcagaaagtagctgcctctgactgttacattactaatcagtcatcattgtattttatgctaattcaaaccatatgcagaaaagaatggggaaagattgcatatcatctcaatgcccatcatattgtatacaatcttctaaataaacaaaagagttgtcttctaaataatcatctgacagctatctttccagttctgtgtagattcaaccataacttaaaaaccaaatttcgatctttgcaataataattcacatgctaagaaacaggcaattacattaccagaaactcgaaatttgtagagtacacttgttggtctctctaattgaacaggaagacagcaacctgatgatcagagccaatcctgctgctgcagtttcaggggcaagtaaacttccgataaatactggaaaccaaaagagctcaacgcctgaatctcagccttttgaatcgtttatcaccatcaggttaagttcctcgacccacccgggatttttcttcacaaaatcctcctctagcat

SEQ ID NO: 57511 - DNA, 594 bp, Arabidopsis thaliana landsberg
tattgttatgaccccaacctgcgcatcggaggaggcctgactcgcaacggtggacgtaaagattgtgtctgtttttggatcttcaatgaaggagatgctcgtctgaaggggatgggaaatattagcagcgccctcggattcaaagctttcgcgtcctataaattgggcttggtcaaggtcagtggcacggtgaccaaattcaacggaagcacgagtagcaatgggcctccgacgaatgacggggtattggtgggtatcgacgcggcgatgccctttcacctgactgacaagctcatgatcatgacgaaagtgggtgccacctgggccaaccagaactacatgcagacgtttttcggcgtgacggccacgcaggcggcgaattcgcgattctccccctatacggcgaacgccgggctgaaggatgtggacgtcggcatcggggccttctatcgattcaatccacgttggtcgatcccacgtactcttggatgtgaaggaattgaccggcgatgccgcgaaaagcccgatcacctttttcaagaccgacgcgtccttcatgaccacgaataactatcacttttagcgaaagcatcg

SEQ ID NO: 57512 - DNA, 1493 bp, Arabidopsis thaliana landsberg
ccatgttatccgaaagagcaaatgtgtggataagtatcgtgtatgttactttcgacggtttaatccttctctcttccatctccttaaccatcttagctgctcctgaagtatctctttttctacagaacccggaaattaggatattatacgtgacgagagacggagacagacctcttgacttcaaatctctgcataaactcaacgccttccctaattttcccacaccacaaaacccatcaatcaaagtgttatacgtaatcagattcgggttgattccatcactcttcatttgatccacaactttatttgcctcattcaagttcatctctctacataacccaccaatcaaagtattataagtgacaatgttacaagaaacccctctctcacgcatttcgtcgaacacttggaatgcatcttttgttcttccatctttacaaagctgattcatcacacagttataagtatagagattagggaaaactccatcttcctgcatcttctcatacatctcaaacccttgtttcttaaccccgtttttgaataacccattaatcaaaaccgtgtaagtacgctcattagccactaatccaagtctccccatctcaaaaaacaaatctttagccttctcaatctcacctttcttgcaacacccatcaatcaaagtagtgtagataactacatttggagaaaacccaaactctgtcaattcaataagaagatcaaagcttttctcaatctcaccagcttcacaacaacctttaatcacaatcccaaagctatacacgtccaaaacaactttgcttttgttctcgttgaagaaactccaccattgattgaaagaagatgacccaacaacgaaagttaagagatagttgaagcaattcgatccaggaacaaaaccattatcgaccatttcgttgaagtaagagattgataactttagggattgagattgaacatagaaattgatgattacctcgtagagacgaaactttgtttttgacgtttctgattctgtcaaatagtgtaacagagaggaagatgtgaagaattgggagtggatttttccggagattacttgtagaagaagtgattgagcgtgagagaataagttcccagagagaaggagacgaagaaggattgagattgattcgtgtgtgtgttgaaattcatggaaatttggagaatttaagagagaaaaagcttttaatggaggaaacttgattagattcgctagcagaacgagggttttctgggattttgccgccatggtagatacgtttaaacaggaaacattcaggcgccgaagacgaagacgaaagaagaagacgaagaagaagccatattaagcatcatgagcagtttttattttcttaacaagaaaagcccatactttatgggctagacaaaacgtaaggcccatctttatttcaagtgggtttgttgacccatttaaacattggttcacctactcaactactcactctact

SEQ ID NO: 57513 - DNA, 1237 bp, Arabidopsis thaliana landsberg
attttgcagcttttagtgcttcaattactgcagagaaatcttcattgctcaacccataagattttgcaaccttgtaaagctcgttcgcagcggctgcaatcggagtagattgcgatacggattccgctagtccaagtgcgagtctcatatcctatagacggataaaagtcaattacagtctcatcaaactccagagtctttgtgagaatctaaaaaaagaaagtaacacaattacacaaaccttctgctgatgctttaatggaaaagccgtcgggtacactgacttgatcattgaaggaccctttagtgagtacattggcgcattgatagctccctgtgagacaacctgcagaaaaaaatttcccggggtttatagcacatttggtaagaaactttctgctggacaatggtgttttagttacctcgacaagtacatttggatcgagtccaactttctggcttagaagtattccctccgcgaatgatgccatcatactgcataggtaaagagaaaaagagatcagaagaagaatctggaatttgccaagaaatgaagcgatagatggtcaaatgataccttcccatgatcatgttgacgacaagtttcattgctgctccattaccaacttcacccaaatagaattttgactggatcatataatgcaaactagtaacgaaaatggttcatttgtagaagaaaaaagaactaaaagcaaaacacaggcaaaagagatacctttcccatgatgtctaagaaaggagcagctttttcgtatagcggcttgtcacctaaaatgtcaagtgccagatagtcataaatctccatttcattcatgattcaaccatgttagaaaatacaggcaagtcacccgcgaagacaaaataatctgatatgcaaaagtgatgatcgattattaatacaagctcaataaggagtaagctgttacgaacctgcagtgaggaatattaactgcccatcttcggcaggctttttggaacctgaaactggtgcctatgaatatcaaaaatagaaatgacttaagccaccagatctgttacaaggttttttagtgattctagatatagattaactaagagcctttacctccaagaacaaggctccggtatcctttatttgcttgctgattagtattgatgagcccacatcaacggttgagacatcaacataaaagcaaaagcaaggcaagtcccatttttaccagaaagtatcgaccac

SEQ ID NO: 57514 - DNA, 482 bp, Arabidopsis thaliana landsberg
  unsure (1)..(482): unsure at all n locations
gacaatcagaagttgcaagcgtgaacatgaaactgatgtcttgtcatttactccacacttaactatttttttgttntggttacgagatgttataatctttagctttntagtgttttggatcagtcattaacaatatactgtatatgatgatgccgtaatttgtaaaataatacttatataaataaggatgatccgatttatcagaacagatatctctattctctactctctctagncgattgttatatgtgtaagacaggttttttttttttgataaatgttaaagacaggcttcattaatggggatggcccatttcagatgggcttaatagtaattaacaggcttcattatttcctgtcttcacttaaaattccatttctgtttaattctggttcaatgcttaagtcgttttttactatgttatcaaactaaaattaatacatgatcatttaaacctaagattagttgggatttatatttt

SEQ ID NO: 57515 - DNA, 260 bp, Arabidopsis thaliana landsberg
ggcttggaagcgcttggggttgggcacgagcctgccgttcttgtcgcgctgccagttggcctagcagtcatcgatgttgacgtagcgatagccggcgtcgcgcaagcccaggctgatgaacttgtctgcgatgccgcggatcatcgcctcattgaattcggcgcggcaatgggtggagttccagttgttgaaacccatctgcggcaacaccggagccgtctgttttgccaaggccggcgtggtgctgcccacaagggcca

SEQ ID NO: 57516 - DNA, 547 bp, Arabidopsis thaliana landsberg
  unsure (1)..(547): unsure at all n locations
gaatccagctttctttttaaccaaataaatcatttcttttcccttttgtcaacatacaatgtttgttatacgtattttgatatgtggagtcgattacattaggtcatttgttttataactagtgaataaacttggtttcttagatcaaattcttttcttgtttcgcatcagaatggtaatacacacacaatttttgctggagtaaaacataagccactcacttaccaaattcttaggctaagtatatattttgggcgccaatataacaatcgacaatacataatagctgcattgtcacccgatacttaaataattgtctcatacaaataaaagattgaagacattcaaacaatatttatatgtgaagacaaaaaaaaaccaaaaaaatgaaccaaggaccaaatataatatgatatttttttgcttaaggacaaaaaaaaacagcatcatcacaagcatcctaaagaaaatagaggagataaaacagagatataaaactaaagtacacangacttcttgacacaanccataggttctaaagagaaaa

SEQ ID NO: 57517 - DNA, 576 bp, Arabidopsis thaliana landsberg
  unsure (1)..(576): unsure at all n locations
gattaaacaggctgcaggcatccatactaagatcaatggctgcagaaagcgccacgtaagcagccgcatcttccatacagctaacgtgctgcacactcacctctacacaaggcttactacatttcccttcaccttccacacttgctgacatcacaaaccctttgtacacgttccacggccacaatccgtaaccgtaatctccgctccctcctctcggactattcgccggcgatgctcctccaccgcttccactactcccacctctacggcttctcgatcggttcaccacacttgttggcgacgatgaagaaggcgacgatcccaactcgattgagaatttcccacctctgtgagaacttatggttgattccgcaagcacgattcctgcaccgcttgatccgtctgggatgagttcgaattttgaacctagaccattagnggctccaccgcgttcccgccatgcttcaagtctttcccacggtctccaggtacagtcttcgtgacgcaatataagccatgacccaggggttgaccggcttacacgatcggttccaggagatgcaacgaatggagtga

SEQ ID NO: 57518 - DNA, 556 bp, Arabidopsis thaliana landsberg
gatgcttgcaggctgtttaatcaacggatgaggaaagagctttgccatgagtcactgagctgaagaaaagacaaggattttcattttttgtttctgaaaattttagagtcacaaatggccttgggaggtttttttcttttttgaaaagaaacttccggtaagggcgctaacaaaataggatgtacatagagtgagcttctattttggactttgtgtggcttcgttttgggtttttttttgttgggtttgggttctacgagtgaggtgaagagtgaattttttggtcacccttcttttgcctttgattttattatgtaagtgtataaattagaaaaatcgaatttagaatctctagatgtaaaaatacacatgagattgttgcttggtttactttttttccttttttgtgttggatgttcaatgtccattgtgggtaagacaattacctttagttggttagaaattaagttagttacaaactgagttgatattggtggatgagaagatggtctattgcaaacaacagcatttaaacctattttgactcttcttatac

SEQ ID NO: 57519 - DNA, 717 bp, Arabidopsis thaliana landsberg
ggagctacgaagaagctgttgacacaacaagtgtgaccgaccattaatctcacgaacgcattgtttccctaagagacttcaaatttgacacgtgaaatcggaggtgtttaaatagctctgttttaaattttcagcaggtctcataagcacaagtgttggtcgttggttaagcggtcgaagagatagtaaactctattatcataccacagtctcatagtaccacgtgaagcgcatgtcagtcaaagtcgcgtgatgtacaaggttataaaatccgaagatagatgatatcatcatatctaagtcgagtattaatttgtcgccatctttgtctccactctcaagatgttatgtaaactctatgatgcagttacttttctttggtttcattaactatgtggtcgtagaatgtgaatcttttgcaaatgggcttttaggttgcatcatatgaagtttgatgactcttctatattttgaacctggactccacaaagacacagataaggcggtttagtagcaaacttggtgttggtattgataactcacttactttcgatttgagttctctttctccaatacccgaaaaaaaatgttatagtggatctacaattatagaatttatcttacttctttttcatctgaatttttattgtatatttataaaattatagattaaaaaatatacatacagataacgaacgatccgaagaataaaatata

SEQ ID NO: 57520 - DNA, 797 bp, Arabidopsis thaliana landsberg
  unsure (1)..(797): unsure at all n locations
tatgggacagtttgtccctcgagctccatcatgccacgagttctaccgcaattgcaatccattcctttaatttacatagaggtttaataacaattattcctaaaattaacccaaagcaaaaagttgaaaatatataccaagtcatgaggaagggtnnnnnnnnnnnnnnnnnnnnnttaacgacaatgatatcgtttgctgttgcattaaggatcggtccagggaacatgtcgttgatcactataacctatagattttttttttggtgaatactataacctatagattgatcatgcatctgaaatttcatataagatagctaaaaccatattattgtaacaaataaaaacatattcaaatgaaaatggttacctgcttgttgcctccaagaatgaaacgttgagaatacgagacgacccattgatacgatgagattggtgcaaacgcatagctcaactccaagatgaccaaagagatcagaaccaacacctcgacaaagacatgtctcatcgcgaaaagagtgatttaagaaattttaagatgcttgtgatgtgaaaaagaggtgttagaggcaagacgtagctacatatttttctttggaacaatatattaattagacgacaactattgttactctgtttggagttaacgtttgttttgtgctatgttttttgaatatgatcgaaaagttcatgcaatctgcattttcaacctaatttatgggcagcacatttgtgcttttgttaaaatttggctgggcttattcattatactaaaccatgcataaaggcccatta

SEQ ID NO: 57521 - DNA, 583 bp, Arabidopsis thaliana landsberg
ggtatggcattgccgcattggccaattacatgagtggtaagtcctaaaacaaattatatgaatcaaaacatcatttttttttttggctatataaaaagccttcactaagaagatgctatgtggatacaccacttggtaaaccatataaacgacacttcaggactacgatcgaccaatctctttgacaaatgtgtccattggactccataaaatatgatgtacctcgcacgcaacacaagtcaccccaaacggacccacaagttatatcatcgatgtacctcgaaatgacattatcaattgacacattgtgtatatgtgaatgaacttaatgtgtaaatatggtcaaataaaatatcccattgaagtcaacaatatttattgggagttggacccgtctttgaacatttgtacaaggtaaacaaacctactcaattttgttgaaaaccaaaataatgagaacatatatatatgcatagctagatgaagaagatgcaagaaaagaatcattgtatgcacggtatacattatatttttaatgtactttagtattctcatcattctattatttctcatacgtaaaata

SEQ ID NO: 57522 - DNA, 288 bp, Arabidopsis thaliana landsberg
ttttttttctggctgcctgtctctaaatgcccacggcaggggttgaacttaaagtctgtagtttgagcacattaactgtactcaacttggtcctaagaaagagatatatgttcgtactagcataaaattaacaggatcggcttgtggacaagcggaaagaatagaagcatacttgcctgatatgagaccacattgaaaagacagatcctgatttaccgcttaccctaaactatgcaataccctactgaagcacatgatggagtgatatatgccaacaatctgatactg

SEQ ID NO: 57523 - DNA, 1144 bp, Arabidopsis thaliana landsberg
atctgttttccagtttcgatttcgaatcaaatatgattctgtaagagtttttctgaatctttatcttgggatcggttatctgaattctattcgccatggaagctgtgcttctctgctcgaagcttgttcctcgagcaacgtcgttggaagataaccgaaagttttcgttcaggcatttgaacaaacaccttaagtgcaattcccttcgtgctgattccacaaacactccgttgctccgaggttttgaagcgataaagagtccgtctagctggagttgtgcgccgttcccagtgagaaaaggttcatgggttccacccagatgctcgatttctagctcgactgtttccgattccgataacccattccttagccaatttcgaaccttctcgtttgggtcagtagtgaagaaagttcgtgagttgaaagtgaagcccatggatgttgtgaagataactcttttgctatcgattttgactgtggctgcgaaaaagactttgactttggtcttggacccattcttctggatgtatttcagctggacatggttgttctggccttggtttatcgctgtgggtcttgcgggttatggaatttactgctttcgtaaacactggcttggagaagccaatgcctttgagcagcttggtattgttacttcagtcttcacatggctaacacttgtgcctcctgcttatttcaatggttatcttgaaggctggccttatgtgttcttcttggcgtatcattacttctttttcttcaatgttagtgtgagaaaacgcctctatggagattactatgctcgcactcatgatcccaaatgggatgtgaacacgcctctgtggtctcggattttgtttggtgttggtattatggttggacattggcttgcagcttttgaagggcctgagcttcaccgattaccagggggttgggccaatgtagggatatggattttgattgtgattacaatgcttatgcattatgattcaacgctatatcttgctagatattctgaaaaggttgttgttccaacggctgttgtgcaatttggtccttatagatgggtcaagcattcgatatatgcttctacgatgcttttttttgctgcatactgcactgctctgcgtgcacctttgagtct

SEQ ID NO: 57524 - DNA, 547 bp, Arabidopsis thaliana landsberg
  unsure (1)..(547): unsure at all n locations
ttttntggatgggtgttatttttctttttcttttggtattgcctgttttctttctatttgctttgttttcagttttcaaattgacgtaaaaatccaactttgaatttatgttcaaatgccacaatccaaaatattggcatgaatgcaaagtacatatttttatgtatttatattaattattttattcctttgtttacgtaaaggtttaagataagccatgcacatattttatttcactttaggaaaaatattacatttgagtatgtgaccaaatttccagttaattaactaagaaaaaaatgaatatccattaccttacttatttaggaaagaataatttttaccaggaatcatttttcttaatatactttntaaagagtgttatagtttataaaggaaataatgaataaaatggaactctttcttctagttaggagtgaaaacggaaacgatannnnnnnnnnnnnnnnnnnnnnnnntgacagtttactgaacattaggtctaaatggaaacanaaactgttaccgaaaatacggaaatggaatc

SEQ ID NO: 57525 - DNA, 1377 bp, Arabidopsis thaliana landsberg
gaggttatatgtaaaacaaaaggtcgaatatttatatgttacttcagtttgttaatttttatcaacaatcttatattatcgctcaccttttttcatcacttttgtttttttttcttttgacccgaagaagaaaattctcgtaaacaatttaaaatgtaataaagtcacatgaatcacttttttgggtcagcagccctttaatcattaacagtgatatatgacttcttcatctgaatactttcggtcacccagttttcctgagttaaaaactcgaccttattttaattacaaatttcaaaaattcagtggactaagaaattactttaaccagatttaaaaaatttcagtaacaaagttagtcactacaggggcaatgtaaatgctgaatcgggtgattaactgtgctacaagttttttcaacatctaaatatacgtttaatgtaaatttaatatttgatcggagtcgatctcattcaaattcgtatgttacattgacaacaaaaggtaacacagaaatgttcatgaatatgaacaaggcaaatctgttagcagcataatagaaacaaagttagtcgttctttgtttttgggatccgaaaaaaatctaacaattaaaggttaagtctatgaaaacagtcggcatactatatatatgcattagtagttggtacattaattggaggattaaattaagtacttgccgactaattttatcatggcatagaaaagagaatgatcatttgttgacttgaccaaacaaaatgggtatgtattgagaagaaataaaattctaaggtttcttttgaaacttcatgataatatggggattgattgttctacaagtttccacttttttacttggcatgccatgggattgtgttgcacgttgtaggaaaaagaatgttcagtctcatttaaaagttgaaataaggttttctgatcctctttgttgattctacaatctttgactaaataatactaattgtatattaattacattctgatcttctttaaatggaatcttgatgtatctaattcaacgatatctatttggatgtcactcactgtgagaaggatccgctagattctttattagatatgtccatttgataaactattaaatgagttactctagtgacatattcgcatagtagtatcttgaaatatcttttggttgtattaagaagttttcagacagaattctcacacactaacttgttcacatgaaaattaagaaaactatgcagtcataaggaaaaaaatatactcaaaataaaataaaagtatatcatgaacttttgaatcacttttttatttttagtaaagttaacatatatataacagttaccaagatcgaatatataggtatcgtatacac

SEQ ID NO: 57526 - DNA, 244 bp, Arabidopsis thaliana landsberg
ttttttaatacatgcactggcacgctgattttctcgggggtgtatgtgaaaataagcgcgtggacacatctcgcaaagataatgctaacatgttatattctgacacgcataggccttgttaaagccatgtcatcccactcgtgaaacgcgccttcttctttgtcactgagctaaacctgatctataactgctggagcaacttggacacttttatactgcctacaaactaacgcattggtgaact

SEQ ID NO: 57527 - DNA, 149 bp, Arabidopsis thaliana landsberg
ctctttgaagacgaggaaatttccggcggcgtgcgtcccatttaaagcgtggacacccaaacaccaccaaataatcataaggagccactccctgaccaaccacctgatgattgggggcacactaaacagaaccacaaccggagtacact

SEQ ID NO: 57528 - DNA, 926 bp, Arabidopsis thaliana landsberg
aaaatcacggttattgaatgtttttgacataaaatgccttgatttccatcttcgagtttcctgatccaattgtagactgaaaaattaagtttcttgccattaatcaaacccgctacgtctctgttatcactttcaaaccaaacttttttgtagcatttactccaacaattctgcattgatatgttttacatatgattatagtaatattttaaattatcaattttcaaatttcttaattaaagaaagtgaatattccgaaatgaacacacaattgtgaccacgttcacatccacatccacatccacgttactcagtgtccatgatcatatatgccaaatgtggttccatttttatcaacgttaaaaaaattctgatttttatttccctttttatggttcatttgctcttaattacccaaatttcacttgattcgaaaaaattcgactatatttataactttggcgaaatctcaaatttccgattactaccaaattcgattccttcatcttcttctccaccatttttcgatcgcagacgaagatctttcaccggttgatttctctatcctttaatctgatcggttaatctcggttccgatgtgtatttaatcttcgtttcttcgtagatatcgtctttgattaagtttttgtttctgcgaaatcgaattctgaaattagatttgagaaagaaaaaaaaatggatgaaacagtttcgtattattgaacatttgtggtttaacaatctgtttatagtgatgatgttgttgtttgttgttgatagattgtgaatggaaatgggagttatggagaatttgatggtacatacggagatatcaaaggttaagtctcagagcaatggtgaggtggagaaacgaggagtgccacttttggagaccggcggtgtttgcacccttcacccaatgagtg

SEQ ID NO: 57529 - DNA, 128 bp, Arabidopsis thaliana landsberg
ggaatatggaggcagagcaggaattaaaaggaaggacgaaaccgagcagacaacgcaaaaaatttagaaacccaaaaacggtaccaggcataccaaaaaacgaaacaggaaagaaccacaaaaaccgg

SEQ ID NO: 57530 - DNA, 528 bp, Arabidopsis thaliana landsberg
  unsure (1)..(528): unsure at all n locations
tttgatttatgatgtattttgagtgtttaattagtgacaatgatatattaaaaataatttgaaaggcatctatttaaaaccttgtcctggactcctagtaacatttatatgatataaaacaaccatagcaaagcacggacaactggctagtatacattctaagagaagtaaaatctcagttttctaatcaattaatgatatactagttaggtgctcgtgtattgctacggttttcatatatcacatatcacatgaatgaagattaaacacaaacatatacatatattcgaacaccatgtaaaaaatattaatacatgcaccaaaaaaacactacaaattatcgaagcttatcaaacataacatggagactcacatgaaacatcaacaaatcaagccaaataagcataagtcctcattaaccacaaatttaatccaaaacttgatttgacgaatcatactaatagcaaaaaaactcaaacaaagctaagaaaaaatgaaccatccaagcanacgtaaagaaaattatag

SEQ ID NO: 57531 - DNA, 1825 bp, Arabidopsis thaliana landsberg
  unsure (1)..(1825): unsure at all n locations
tataaaaaacccaaaaactatctctatcgatcccacaaagaagagagacccctcctcacactttttttctcttatccgagaaaattaaaataaaaatccaaactttttccagaaaactaaaaagaaatcaaaaacccttaaaggatctcgtttttttgcatcactaatcggcaaattcttctgagttttataagagagattgaattgcgactgagaaaacggtaaaagggaaagagatttcttatagatagaaagaaaacaaaaagttgagattttttacccaaatagagaaattagggattttgtttttgagtttgtgttgattaaacgattcatgaacatttggtttcgtttaaagaaacttctcgttaccatttgcaactataagaaaatttgttctcattagtcattactctctctatctctctcctccacatgataccttttttgaactctctctctctctatctctaggttttttattttcaatcggccaacgtatggatgggttagtgcgcgggtatgaagtgaagtttgaaaaataacgctgaaatccatgtgtcctcttcctcttctttaatgcttttttttttatgttattatttcatattttttgttattattacaactctgtagaaatgtatatgtttttggtttaatgtgaaaattagatctgttatgaatatagaatacatgaatgctaaaaaaaagtgtggtattttcaaaaacttgccttaagttacacacaaacgaacgtggtgatttttattatattacggtttagagttttgtggggaatatgattactttttatgattctctaattgctggcacacacaaaaaaaaaatgattctcttattgaatataatactttttctttttttgtcatagtcttaaaattttcaagagaattttttgaaagtgggatcatatatggtttgatatattagagttttggtttatgataaaccataaatgatttggtaattgtaatctcgtattaataaaccagaataaacaggatcttggttctcattctatgaaacgaatgtaatcagaacaacattcattaatgagaataacagaatttcttgattctctctctaacaaacttttttctaacatggtatcagagccaagttagaagaaatttgttacagagagaatcaagctttgctagtttctccaaatttaaacaaatgcagattgggcatctcgtcttgattatagacgatctacatctggattttgtatgttcttggggacctctntaatctcctagaaatacaaaaagtaacaaactgtttcacattcatctgcagaatcataacacagggtaatggagtttgttgttcgagaagtagattggcttgtaaacttgttaaaggagtttcatgcgcctcaaacgaaatatgtggctttcttttgcgactcaacggctgcgattcacatcactaataatgatattttccatgaacgcacaaagcacgttgagctagactgccacattgttcgtgacaaagtaataagcggtttgatcaagaccttacatgtcaagattgatcaacagcttattcatgtcttcacaaaacttttattccctactcagtttattagtaagatgtcacttaaatcgatttacttgccatcttgaaggaggatattagagtttggtttatgataaaccataaataatttggtaattgtaatctagtattgataaaccagagtaaaccgcatcatagaattctcattgtataaaacgaatgtaaacaacattcattaatgaagataacataatttcttgattctctctctaacaac

SEQ ID NO: 57532 - DNA, 415 bp, Arabidopsis thaliana landsberg
ccggaatctgaaactttctctcgccgcaactcgaaggttgatttggcctctgctccacctggcttttagaattctttggcaacctatggagaggaggttggttcatattttccccaatcacttctactgttggattgtcccttttttatatctcatttaggttgattttctaggacgatgaaatttcttctgatagtcatgctctcattgtttctccatcacctggccatatccatagggttcatcaacctcattttcctgaccccgctggtaagctatgttctctgatttggggggacgtgtgtcatttcctgttattgttgatggagggtactaagctataggtttgctatgacacagcacatccaagaccaacggtacctcataaagaccttgcggcctatggaatatggaa

SEQ ID NO: 57533 - DNA, 987 bp, Arabidopsis thaliana landsberg
caaaatgataacatgtaggaacggttaatgtttcttctttagtatctgcgtaatttataaagtacttcttcttgcgtaagatacaactactaggtaggggggacgaaatatattcgtgatagataaatacatttaataattggatagggagatgatagaatagagttaatcacgatttctccgttagcgatcaaattctattactcgagttcagtttttcacttgtaaattttttttttacatctgagcttggaaaatcttgtttacatggatgaatcaatatagattgaaggttacatgtttaactgtgtgtttgtttttgttggaagaggaatgctaatctcgttgaataaaaagtgaaaattcataaactgaaaacttttcgctaaactcgaagtttggtatgaaactttttgggaatgcactgaagaattttctggatgaaaattagaagaaacagaaccaaaggtgtacagcttgtgttagatatcacataaatcatatctataaccaaacttatagacatgtttagaaataaatcatgttgaggtagatagtacgcacacggcacacttccttaagtgttcatttcaagctagtagataaacgatagggaaccaatgattcaggcatattaattagatgaggtaagtatacagttccaatgcaatattaattttaattaattaatttaacttcattgtgggtggtaacacaataatatgattattaatgaaataagtcatggttacaaaagttgttgctctatatccaccagtgaaccataatagtatattcatggctcttatccaattaaccaaataaaattttctaatcaaacggtttgaggacataaacaagtttaaaacaagagatagtggatgtgttttgtcacagccagatttctatagctttttctaataacagaggacaaacaaatagacgttagacttcccttcatcagatacatggtttcacaatgagatg

SEQ ID NO: 57534 - DNA, 466 bp, Arabidopsis thaliana landsberg
ttgttctttttccagaacatctaaaagtcaaaggtggcatggggtatatatatggtccattttgcccaataccgtataagccattttaccaaatgctcttttatagatttggatttttcaaaaaagtactttggatggaaaagccagagccaaagctctgtcaagagacctaagttgttaagtagaaatatattttattgatacataaaatcattcctcacactttgattcatagtcataggtttatatttaatatttgaaaagcgttagaatgttaaattccatacatatctgtcggagtcattatccatggcatagcgtctgagccaatatagacagccaccttttccgcgcgtccttgggaaatccccgtcccggtctctgtgtcggccatgcatcttcgactctttattcacctttgtctttaagccatttggaaccaccgacacgaagtcgactttcgctc

SEQ ID NO: 57535 - DNA, 291 bp, Arabidopsis thaliana landsberg
tttgatccttttctctatccatctctatacgtgctgggggtgcagggggggagctacttctcaaaaaatgtgaatctaacgcacaggcactcgatcttctcgggctcggttagctctctatacgccaccccacttgtcgtacgcatccatgtggctgagcgaaggtgtgcggaacgaacgacctgccccaagacaaggagaggaaccctcagaacgagcgcttcgtcatttgttctaaacatttgcgcagaagatccccccgaaatcgtggcctaatacccctaacatgca

SEQ ID NO: 57536 - DNA, 1048 bp, Arabidopsis thaliana landsberg
atattttgatgctaaacgtataggactatatgaaggggtttatttggaacacctgtgaccatgtcataacaccagccaagaatgaaagagtatgcagtatttcattctctggatcaaggcccaacctcggtaaaacagctccagacatctaaggtaaaaatgaaaactttacaattgtaatgtaacaactctatattcaaaatgagatactgtataccgaaaccagatatgtaccttccaaaaccaaggcaagatcccaaagaacaaaattgcagagtccataagtatagttacaaactcatgaacaaagtgaaaatagctgcatatattaaagttctcagtgatgatatcccctggcaattataaaaaactaaaatgatataaatatgatcaagacgaaaccttttgtcaagactgtatgctcgtgatttctcaaacttctcttggctaattacaccaaccaaggttttcgggagagttggaagcttgagagcagtgagttgcctcagatccaaatacgtctcaaaaatgtacatcactatcataaaacctgtaagaaaaagaataaaacagaagatgaaatacgaatctactctaaatgccacaacaacagatactccatcactgaaaattcaataacatcatctacttttttgatcaaccagatataaaaagatctcttgtgctgactactgatggaaacattggagcactgaaagagttttgatgcaacattcacatacggttccacaacacaaaacccatttcaaaaaactccagaaaactctagttgcagtcacgaacataataataccctgacaagaaaacccaaaacctcaagctgtatgacttgaacaaagaaaaatttcaagattctcaatttccaatcgggaatggagtaaaaaaaccaccccactattttccccaaaacccagatttttggttaacaaaaaaaactcccgtcatttctaaaaccgaggaagagatgatgaaatcacataagctcaaaataaatcaaacgcacgaagtagacaagaaactagtagga

SEQ ID NO: 57537 - DNA, 413 bp, Arabidopsis thaliana landsberg
  unsure (1)..(413): unsure at all n locations
caaaagtattccgctgcgtgaactttactaaatcgggtccacgggtttttgccagagtctcaagccattgcncttcatgcttaaccgtatgactcggttaggatcttcattcaagcaattcttcaaccctcctttgcggttcccagcgtgaatcgagattaagtctctgtattcaatcgctacactctcctcatcttcttcttgaacttgttcttctgcatccgaaattttctgtcacaacacaagacactcagaaaacatcaagaaacactaatgattactttatgtttttatttcttactttagctctagtggattcatccgttgttgaaccttttgagatttgggtctgaagatactcttttggtggttttgctgagatcaagatcctattcttgagtgattccggtgac

SEQ ID NO: 57538 - DNA, 489 bp, Arabidopsis thaliana landsberg
ctctgtagtacttcgacgtttctaatttcggtggtgcaatgagaatatgagtcattacatgtgatgcaaaagtataacacactgatctctatgtgttttataagaatggcaattaatattgtaatttggaggaatgaaatttcaactagatgcgatctagactaaagattttctttttattttgtttttgggtaccctcgctagtataaaatttttgctttgcaatatgccaatatatatgtactaagaccatgtgccccaattgttaaaaattatacaaagattcttgcaataaaatacgaggtaacgtgcatcggattaaataagaacttggaagaaaagaattttgtctaattgaatgttacaaaataatcctacaaaccaaaagaaagaaaaatattgtaggagaaaacttacacatttactcgttcaaataagagatgatgaaattaaaggatatatatatatatatatatatatacctcttta

SEQ ID NO: 57539 - DNA, 465 bp, Arabidopsis thaliana landsberg
  unsure (1)..(465): unsure at all n locations
gcattctcactatgttttgagtatagatgtatgggtggggggcagtggagtcataaactgcanagcgcactgcatgtgtgacacatgattagcagttcacatagacatttggttcagcttaacttatactcctaggaaatgcattaacagtttctaaagaatacttaatgctgcaatcagataatgcaaagatccataaaattcaaaatatcattttgaaagcttattaatggcactaaaaatacgcaattatcgaattttgttcaatgacaactgcctttgatgtaacttnnnnnnnnnnnnnnnnncacacaatgtaccagcaattgatgactcctgtcatacacgatatctgattccagtaaaatcaagttaggccattactcaaaactttcttgctaccattcatgagctgcatagaagtaatatcacagaattaccaaccatataactactcggctcatg

SEQ ID NO: 57540 - DNA, 995 bp, Arabidopsis thaliana landsberg
tattccattaaaaaactatttttatttactttctataacgttagtatgttacggttgaaggttctaatctagatgagtatttggataacttttcgtttaaaacaaataaaaattgctttaacctttaagtgtttgttgtgttcttccactttcgataaacatatgctacatgcataaaaaacaaaacaaaagcaactttttcgtttgctcagcttaaaaatatttaaaatgatgaaacgtttgattctttaccaccaactgttgtttttataccatttggctatcgttgtcgccttgtcggtgttggagcgttataaagctacgatgggcctcaccaagcccaacagctttccttatcaataaatgatgaccgtttcattttatatttagtcacacgatgaccgttttactgaaatgataaaaaccttttcactcattacagaatggaactatcatttcttatgaaagtttgaaacggacggatttagaggaattaatttttttttctatcacatgcttgacttcactgaatcacatgtttagtttcattctgaaaattttcagtctttttcttctttcatttgcttataggaattaacgggggttgtagcctaatagtttgttttagtaatgtcatgattatatgccataacttggattcaaacctgcatgtgtgcattatgcatatgtaagttaattactttacaaaaagaaaaagaaaaaagcctatataaataatttgtcattttagcaaacataattttatcacagaaaacctattaaaattcaatattaatttttaaaaatatgattgcatatgttttaaacatgtttacataattatagatatagattttaagaaatattggtttattccgtttggatgggtttatacttaaaatatcaatatgcttcggttcaatatttcggttttgtgattaatggcaatattcaatattaatgtatttcaaataataataaatacatttataact

SEQ ID NO: 57541 - DNA, 1021 bp, Arabidopsis thaliana landsberg
aaattttattatcatagccttgaaactttgaatacaacaatgaagagttcattaagtttcatattatgtgtagttgtaacctcttacacaactccattaaggctgatatgttcttaatgtctgatgattagacacttttgttcttacctttgctttactagtgctttttatgttattgtctgttttctgatataacactgaagaaatgattagttatcaataaactcctctttcttggtaccgctcatgcatacccaatcacctattgtggctacagaaatgtcctccaagaagggagagtaccgttctcttacatttggaagctgcaaaaagagcattgaattagtcagtttacagtataattttcaattcctatgacttgcaggtagcttgcttgcttgttataacaatacagtactctttatttacctgttcagataagataccagaaatgccaatggttgccccaggtttcgcgaatgaaaggatatgatccgccagattcataaccgggttcaagagtatgtttgcaatgactacatcaaactgttccttttgcaatggtatttctcttccagaagagctattctcaataggtgcaaggtgcagctccagtttctccaacggaatgttgttcagagctgcattatgaattgcagagtttattgctagaggatcaatatcaacaccaacggatgatgcagcaccaaactgcaaatttaaatgagcgatgcacaaagatttaaataagatgatttatgttgtaatgattggtttttgaaagatcaaaggcgtgagatttttaccttgagggctgcaattgcaagtattcctgaaccggtaccatagtcgaggaaagcttctccgccttttatcaaactttgtagaagcaatagacacagcttagtagtaggatgttctccagtcccaaacgcaaatccagggttcagaattatgtttaccgcttcagcgaccttgcaaaggatagtgaaagagtctttaaaaccacacataataactt

SEQ ID NO: 57542 - DNA, 1193 bp, Arabidopsis thaliana landsberg
ccgacattacatgtattattgcaaaacttgataaatacttagcaaatcatttaaaaagattacttcatcagcagtcaaaagagtcgtaaggggcttactttttattattagtcaaatattatctaaacattgatacttaaaacatttatatttataacttctaaaacatgtaaattaacaataatgttagtttgactttagcattataatgaaattgacaaacaacaataataaatgtagaagacacgtggttaggtctaatttgatgagcacgaaagcagatgtacgtcatacgtacatcgatcggggaaagtcaaaatagaaagtcaatgtgcattaagaaacatgtagttaacgacatttaatgcagttatgtgtttcttaaaacaaaagaaaaaaagtgatcattattaatcaaatgattcatatcgaataaaacgaaaaagtaaccattaatatagtttcgggaacatgaaacattgaatataggcaatgctttcgggagaggtaacgggtacagtacggatctgggagacttttttttttaataagttactaattaatcattcatcaactcttaaccattagtattattatatgcttttgaaattatcagtttaatccccaaattaaatcattgatctaaggcttttgtcacaattaaatcattaatagagaaaaggcccaatatataagagaaaaagccccaatatataacgtaggcccaataaaatacccaattcgtagttttacatgctctttcgccggcgccgggaaaccgccgatgttgttggtgatggtaagaagttctacgatttccccgaaaagcctgagactttattgttccggtcacataatcgactctcttaggcattcaatttctcgctggaattctccttccggctattgttctaattattacttcagtaagagaaaacatgagcgacacttcacgtcctctgttttgtctccggatactcctattgtccataacctgttcgacgaattgcctgagagagagaataggactatggagtcgagatttatgttcttacgagatgtacttagatcctttatgatgagaacagagacagagactccgaggagtgtccattgtttcgctctgaagtgtggtttacttcaagatttagctacatcttcgacgcttctgacgcttacggtagaaccgggga

SEQ ID NO: 57543 - DNA, 1487 bp, Arabidopsis thaliana landsberg
aattataagtaagaatcacgttaatgaatggcagtaattacaactgattttataataatatagcaaaggttagaaaattaaaaggtcacactgtcggttcaaagattaaaccaaggaatcggcgactgttcggttttttctggtaaccccattgaagacccctattttgtagggttttaaacttttaattaacaaaaaaaaaagagtccatagaaatctcgtgaccactcagagaattttgaataaagctgacgtggcaattcagcaggattcggcagatttattcagtcatccgtccctctccctcctctccgtctgacgtaacggattttaacagttccgtcttcttctccgtcagacttcacgagttttcattggtcagaagaatcagccgttaacgacggaaccgaaaccggtttataaactgaattggataataggtgattttcccgcctttttgatatttttagtgatagagaaaataatttaaaaagaaggaagtgaaaaatggagggtggggtcgaggttaacctgctgaaaacgacagcaccgttaagtcaaaagagcgggaacagatcttctttctcttctttctcattttatattgaagacaaaactatattctataattgtttttcaacgaagaaactcaaaagttttaaattaatatataatgtctagttacgcccaaaaaatgtgcccctagttggcttctcttgtctcccggagtctactctgtattgtcgatagaccttatagtattgcgtaccagatattaagagcacccacaatactataatctgttaaaaaaaccaatgataaagctggttttgtaaaatgctttattgtgtgaggtggaatccaattttttcccgtaatttactacgagatttatcaggcttggcatatagaaagaaaacaagcaattatgggcaatgagagtttatggaagtgatagacacgcgcgaggaagagagagtggtgaggtgaggcaagtgaaggtgggtttagggttgtgtctgccagcaaatgcttttacagaagctgtctttctctctgccttcattccacaaaacatttgaaaccaaaatatattcattttcctcgtcaggtttattaattaataatgaatggttggttggggcaatttaccctgtccgagtgatatgttgtaggatgcgattaaaaaccccaaaagaaaaaaagatataagtggagtggacaaacaaaaaaagaaaaggaaaaaacaagaaaatctgcaaatgtcatttcgaatttcccgccgaaaggtcataaggatggataaatagtgacagggagatatcaaccgtttatttcaaatgccaagtctacttcctgcttatatatatgtagcctaataagggggaccctatgtaacataagtaagtctactttccctactttacttattagatattacgtgttgtttttacatataagaaagatagtatccagttcgtaagaat

SEQ ID NO: 57544 - DNA, 222 bp, Arabidopsis thaliana landsberg
taatttgcaatttttacagcaactaaaattacatggcgagctcaggggtggacaaataaacatcagtatccattgtctaataaaatgatattgctcactacgaaatatcaagaagacagaagatctcggagtacgtgctaccagcagaccatgatgcgcctgagatagataaagaagcatactctgaacattggctcaactatgaagaggttcatttacttt

SEQ ID NO: 57545 - DNA, 120 bp, Arabidopsis thaliana landsberg
caaaaattacacactaaacacacatcaaacaaccaaaaacactacaatcataaccaactaaaactattcatacatataaccatcaaaaattttaacatatcaaccaatatcacaaacaat

SEQ ID NO: 57546 - DNA, 1121 bp, Arabidopsis thaliana landsberg
aacctgccactcgttgctttttcttatatcacaatctgatgaacggacaagcatcaccagaaaatggaagaagagtcttatatagcactcgattcatcatttgtttagatgtttgtctggctcttatgaaaagagaagttattgttaaatgcctggtagaatttttctataattgtttattctgacagttcctgttgctcatttctcttaccgatgattattttcttgtctcttatccattttcttctgcgtaaggacgcaaattttccttttttctgatggttcttcattttattcaactttttttttatttcagtatgattgtgttgtaaccgttaaatacatttcttcactttctccaacatctctgtcttttaccatgcaggtgaaattcagtgtgagcaaccaaacaattctctgtacacttttactgggaaccttgtagtccaaaagcagacgttacctctctctccggaccagcttttattgcgtgtatgattgactatttctgctgttggctgttttttcttttctgtcttgtgtttttttgcaatttcatggttttctttgtcttagataatggtgatcagcttatgagatatcttgtattttttggcaacttttatatcctcggattttaacagtattttgagcagatttccatgcatgttgtgcagagccttttatatccttagatttaataatattctgagacgtttgatatctgtattatcagggatgcagtcttaggaacacagaatacatagttggagctgtagtttttactggtcatgagacgaaggtaagctgtcatgaagcttgttttatgggaaactagctttgcaaacgtgcgtttttagcttacaggattcatttattttaacccttctatgctttctacttcgttatatagttactatacacataggatctgaagctattctatggttaattctacatatgtaggtgatgatgaatgccatgaatgctccttccaaaagaagtacgctggaaaagaagcttgacaaactcattattacaatcttttgtgtccttgtcacgatgtgtctgattggagctataggctggtgtgatttctcgtcaatcttgtgaattattaa

SEQ ID NO: 57547 - DNA, 212 bp, Arabidopsis thaliana landsberg
aaacaaaacaaaccgaaaaaccaaaaaaaccaacaaaaaacgaaacaaactaaaccacaaaaaacaaacgaaaaacaaaaaacctacaaacaacacagaaaaaccacaaaacaaaacacaaaaaaacaaaacaaccaaacaaccaaaacaacaaaactcatcaaaaaaaccaaaaaaccccaacaaaacaaaagaacaacacccataaaaac

SEQ ID NO: 57548 - DNA, 1101 bp, Arabidopsis thaliana landsberg
  unsure (1)..(1101): unsure at all n locations
aaaccaaagaacatgcaccaagaagtgcatataacatttgagcagagatcacctaccaataccatacatccattttgaaactactcaattttctagctaagtgcttccagatgaaactattatgtcactgaatctccattgaactactaaagaacactaaacgtaactagaacttaccatgatcagcccaattgcagtaatatccttattcattttggtgaagaatgctctgaaagtcaatgctactgataaaggaaaaaagagaacaaactgatttgaaggtagatgaaattttaaaagtgaatcccacaataggagaaacgatagagaaagatcaactttgagttttctacatctgaacataaaagtgtcgagccaccaaagagataaaacaacaagaagaagcagatactgcaaccaaaaattcgtagttctaaatctgtagagcttcgttacgaatctacattccatttcaacaacaacaaatcactaaaatcagtacggagttaccaaccacaattgacgagatctgaatcaaatccagctcttagactctccctgagacagctgcagcagctgaggtagcagaacctccaaggaatgagagtaatccagcattcgcaggctcttgctcgtccaagaagagatcatccggaaccacaaacgcaccgtgtacgcaaacgattgcaacaccaatcataagcgcggaggttaagagagatccaacgctcgtcataaacacgacgacgatcgtagacagcacaagagcaagcagagtctctcgatcagagaaagtgcgaccgaagacgaccagtggctgatctgagggacggaagaggtagagaaacatccaaccgcctaggagtccgatgaggacaaggagggagagaggatgagagaaaagcgaaaaggcgagtacgagggagacgatggcgacgtagttaaccttgaagtaagcgagattcttccttatccgggacaaggcatcggtgagagattcaggtctcgccatggaactacgatcgatgagctccgtccatggacgacgctgtgacaagccatcacggatcgaggtggagagacgtgagaaganagtangaa

SEQ ID NO: 57549 - DNA, 333 bp, Arabidopsis thaliana landsberg
  unsure (1)..(333): unsure at all n locations
aaagatccattgatcagtattaggaataaacttgctagcttcctctattcctctcttaatctgcagaactgattctgcagcactaaacatactcctgacaagaatctcattcgctggctgcccgaattgctcacctccacgcaacatgttagaccctggaaatgacacaacaccagaatcaccaagatgtttattatcaaacaacacttcattctcgatgcgtacactagaattgctgctgttactataatcaccactattactactactactagtagtaatcgaattattaggtatagaagactgagtctgcgagtcgctgatgactngctg

SEQ ID NO: 57550 - DNA, 387 bp, Arabidopsis thaliana landsberg
ccgatcgtcggaaaagtcgccggaaaagctttcctgttaaaactccggcggccggactgtccatcagtgctacaggaatggtccattgccatgcctgaaacactacccatttgcatgccgaaaaacggggaacccacggactgaccagactaccttagctacccacttccattatatattgaaaagctctaacaatagcattggaatcatcgtaccttgaaatgagtgaacagacacggcaccccccttcaacaaattaccgggtcttagctggatgtttaaggcatgcacaagggggatactaaggactaactctgggtacaaacgctgatgcatctgacacatatagataggtcatctgaccggttacaacatccgatccgcctg

SEQ ID NO: 57551 - DNA, 532 bp, Arabidopsis thaliana landsberg
  unsure (1)..(532): unsure at all n locations
acttatatatatatatatatatagtcaatcttaaaagcaaagcactctagtaaaagaaacgaataacttcgtatatagcgtaatatgaattataattaaataacctaatacgtatcattgttgaatgattgaaaaacagccttgtcctcaaggctggactcagagttcattctaaagcaagcccttccaaaacaataaaatcatcctcatcaaaatccaaataaggccgcggaaggtcagtgaacttttgttgttatctacaaacaactttgggccaacgtttcacaggaactggaggttggagattcaataagactgcttctacctttgtatctaagttgggaatcgctgttgcttgaccctttatggcacagtggttgttggttatatggaccacgacagaatctggtgatgnttcttgagatacttcagataccgtgcccccttggattgcagcaaccattgttgttaaactcataattgcatcgaaacattcttcaaaccagctggatactatccaacttttacacag

SEQ ID NO: 57552 - DNA, 591 bp, Arabidopsis thaliana landsberg
  unsure (1)..(591): unsure at all n locations
taatcgtcgattatgcttttcacaaacattaaaagactcaaaacattacaaaggccaacaacgctcctgaaagtttaccaattgtacaactatttattgtcaatccaattgtaatactaagaatttaccataatcgtgaaacaaaatatactcttctaacctgtttaagtgtgagcatgctcgaacatcaattaatgacaattgacgagtacactaatcaattactctagaagatttgatgactttttatgggaagatgatctagaagcacttgacttttaacaactctaatccattaagtaaacacttcctcaaatccggtacgaatacgatctgcaaattaaattaaaccccaaaattggacagcaacaacaacaacgtcctcatattaaatagggactatttaaccactctgagaacaacgtgacgttttaaattaaagccccaatagcaaagatagaaaaaagaaactttatttctcttagtaatacaataatccttatagaacgggtcaagcaagatatctattttgtntgtttcccttgttaatcgttataaacttgtttctcaataaaacattgagtttttaaa

SEQ ID NO: 57553 - DNA, 242 bp, Arabidopsis thaliana landsberg
caagagacgagacctcgcatgagacccggtggacaagtcggatcagatggcgggtcaggtacgactacccgctcgagtagctgtagagcgaggagcttgtcggattcagagacggatgtgaggtgaagctctgcgatctggaaggtttcttggagagtggtggtgaccggaagaggcggtggtggaggaggtggatgaggaggaagaagatcggtggatggattttgatccatatgatgagg

SEQ ID NO: 57554 - DNA, 1225 bp, Arabidopsis thaliana landsberg
  unsure (1)..(1225): unsure at all n locations
atgtcatattcgcattttagaacaacaatgctcctatagaagatggtgaatcttttattactggtggagcacgtaacaaatggtgggatggtgaaaaaccgtttccagatgatttcttccgcgtttgtactgtgtggatgtataatttcgatggttctaatgaagaggaatttgcattagcgtcacgttttgtgacacaaggaacagtgactgaaaagttgatgataaagacatcgacgtatcctccagtgaagcaattaatgacagaagcaaaagtggccaagctaatggaacttcctaaaggttacgagtatttggacattgaatgcttttgatgatggttttggttcgaatctatccattggtactctttcctttattactctgaggattatatggttttaaatttcaacaactgtgtttttttgggtatttgttctctatttttaatgtgacatttggatatgtattggtttggatattatttgaggtttttgttttggtcaaatgggattatgttataattgcataacaaaaccatattgggtaaaagctgattcaaacaaaagagtcaagaggatttagggcaaatcatgtgtgttctacatttataataagatcatatctatatatgaactattgaagatgatgaacatatatgtggccaacaaagctaaattgtaatcatcctcttttcaaaacccacaaatttgatgatgacttagccttccatgggaagacatctacactgcctaaagtgaagcatccatcttcatgttagtagatttctccttgacatgccacttgctctgtttttctacgtattgctgttttacatgggatgatgatgatgatcaaagtcttcttgagcatcactgggaatcaaagtcgggtttcgaagggtattcaagtccctgcagctccggcattcgccttagatcttcttctgtgtatcctgggattaaccagtatctcttatccattccaaatacctaaacacgatgaatccccaaaaaagaaagccatagcagtgagggagaagagaaagcaacttaaaaactttgaagtgctacattcagatggaagaagaaactaagccaatgactttaactagctaacctgttcaaagtttttctttttaccgaggtcataccgccattttgtagtgggtttcttttcatatgccctgtacaattcaacaccaagaaagnttcatgagaaagag

SEQ ID NO: 57555 - DNA, 1822 bp, Arabidopsis thaliana landsberg
aaaatttatgtaatcggggggtattttagatatcgatttttttttttttttttttagatatcaattttctttttacatataatttcttgtctgaaatatttaaattttggaattgggtaacatgacgtttgagtttctattgatggaagcaagttttatttatttatataaggaaaaagtttgttttaaataataagagtaaataacaaaaaaatgtgacattttagctgttttctttgggagaaagagaaacattgaagccttgaaggtattaccattttctctttaattgttttgtatattggtataatgcatattgtttatgaaaatagttcttgagtgagaatattatatatgaagattttattttattatgcagtttcactcaagaactattttaatgaacagtatgcatcttccagtttattaatcacataaattgaaaaaaatttaagaatatatgcaacaaaataatttaaaagaaaagacaaatttatgatatgtaccacaaaaaaatcactctagatattaataactttgtacaactattgatgcgttttgtagtaagtgaggatgttataatgtagttggacgtaaacaaagagagaaaatggaacgaaggaatatttttagaggtcgcaaaaggcgtttggcgttttgagaaggagtttgagagacaacgtccttgacttgttgttgagaagaaaccaaacgtggcctaaagtcacctcgtgccatgaccaacttcttcttcaaatcaaccacgtactcttcgattcctgcagccatttctctttctttggtcaaacacatacgtaattattttctctacttctctgatttttttaatcaatgaatttgattcttaaaaatcaatgatgacagctaggattaaacaaaaagatcgtggatggttcttacttcttaagagcgaataaggatgatggtaaacagttagtagcagccacgaaattagaatttaagcatatttaaaaattgattaattaagtagcaagtagcttgtgagtttaatgaaataatctttggtggtaacgtagagagctcaccggtcatcttggagacaatcttagagactctgtcttgacaagcaacacatcccacatctgcgtttatctctatcacttgaaactgtttttggcctcccaaagttaatattttgctcaacatataaattctatatacatgtcacaccaattaaaaaaaaaacaaagtgatgatccaacaacaacgatggtttcactcaagacaacttacatagacttagggaaccaaatattttcattcattagctttcaaattagagagaagaaaacaaaagatcttcaaaaatggaaaagagagagaagaactgaaagatgcatgaagtgattgatagaagagaagtctaagtatatgaatgtataacgtaccgatggaagtgagagtttctcgcagagcatgagggtgcgccttcgcatcattggctccttcattgccgtcacacggcagagccaagccggcgagtttgctgtaaatgttatgtataaatattgtttatgtatctagaggtttgtttatttttcagggaggctttgacaaattatagggaatgtgtgttttgtatgtatgcggaaagtgattcaattcgtttattttattgagaagtcccatttttacacgttttaaccacaatctctatctaacatgcaataaactaaaaattaaggttactagcaagtaggattaataacatctggtttcataataccattccatcgagataaatgactatttgtttatttaaacattaggagaaattaag

SEQ ID NO: 57556 - DNA, 869 bp, Arabidopsis thaliana landsberg
gagatcaatcaaattcagtttggtccacatagtaccaattttgttatggtcgtgtccaataattaaatttttgtatatttgcatattggtatttaacggaaactaaagatttaagtttaagattttttttgtaaaaaactttaagtagaacaagatttgagaaatttgattatctaaatatatttcaaaaattctggctggcttaaattttcggtttgttgtttcaaaacttcttcttttgaattctggactttattttttatttttttatttctgcatgttgtttaagatgattaaaaactaatcatttttcaacaacaataatcatgttttaataaaaaatataactttgattagaagcatcacgtgtaaacataatttctatcaaattcatttgaccactgcaccattcgtactaaagtttactctttggctcatgagttaaactaatctaaaataaataaagttgattagagatataaatacaacatgattataaaattaaagggaatatagcctaaaaagcttcaccatttgagcttaaactaaataaactttaccagaaaaataaatgattaattactgattgatcagctgatcaaaaggttaaaaaaaaaaaaaaactttacattatattagggaataaacaaaaaaaatatcctttatctttttaataaaaataaaataaaattgttttattaccaaaaatgtcaaaaaataggtctaagttgtaatctttctttcttcctctctataacagtgaacagagtggtgttggtttggacacgccttggtggcttggcttgggtctctttccttttttatttactctcaaaactttcatttttcgttttgtttatcaaggaaca

SEQ ID NO: 57557 - DNA, 214 bp, Arabidopsis thaliana landsberg
ttttacttttattcctaccaaattattccattccggtttcttgtacttattcacaacacattactccccaacccaatatactaaatcttataaacataccttcattcttgatcagcacttcttaaatctttaacacaaatattacccaaaacattatcatagagctcttaatcaccaaaaatctcatagaaaatttcccaacattacatttacc

SEQ ID NO: 57558 - DNA, 523 bp, Arabidopsis thaliana landsberg
  unsure (1)..(523): unsure at all n locations
tnnnnnnnnnnnnnnnnnnnnnnnnnnnnnnnnnnnnnnnnnnnnnnnnnnnnnnnnnnnnnnnnnnnnnnnnnnnnnnnnnnnnnnnnnnnnnnnnnnnnnnnnnnnnnnnnnnnnnnnnnnnnnnnnnnnnnnnnnnnnnnnnnnnnnnnnnnnnnnnnnnnnnnnnnnnnnnnnnnnnnnnnnnnnnnnnnnnnnnnnnnnnnnnnnnnnnnnnnnnnnnnnnnnnnnnnnnnnnnnnnnnnnnnnnnnnnnnnnnnnnnnnnnnnnnnnnnnnnnnnnnnnnnnnnnnnnnnnnnnnnnnnnnnnnnnnnnnnnnnnnnnnnnnnnnnnnnnnnnnnnnnnnnnnntgcttgaactgaagaattagtgactcatctacatcagaagagtttatgctcagtatggagaggataggaggggacatgtagagtgctacttccaggctaccaattacagattactagttacccctctacgatacatagggacctatctatcacttcatgcataagactattct

SEQ ID NO: 57559 - DNA, 722 bp, Arabidopsis thaliana landsberg
tatgttgagaatcagttccattacataaactcgcagtaatcaatcattgtctatcgccataacaatatataacgagtatgaaaatatggcaaagcagcattaataattattgtcatggataataatcatgatctaattatattacttaaaaggaatattagtatagtgatctctgtttccatctggtactattggattccacatatcccacaaagcattgtttggaatcgttcctgcaggaatcatgttcatagctaacgccgcttgtgtttgaggcattagcgttgtcgctgtagtcgccgcagccaccaattgtaacgcgtttgcgttagcattttgttgttgagtatgatgaaactgttgagcaatttgaaagtattggtgattgatgttacctccatctgatatttggtagttaactagtctttgaagatcgtcaacaatggcagtttcatcatcgtcttgatgattactcgtagagactatcaatgtgttgttgcttgtgtcataaggcattggacgatatatgttttgattggctagagcaatggtaacgtcagagttactgtttgtggtcgttgttgttgtgctgccgtcgccggaatattcggtggagagcttctcgagattgttgttgatgttgatgttgttaaggttgttgtcggaatgattagaggatgatgaatggtgttgttgttgtcgtaaggctaaacgggatatgc

SEQ ID NO: 57560 - DNA, 1213 bp, Arabidopsis thaliana landsberg
actaacacagcgatatgcacactctattttattctaatttgccatattatgcatcaacagggaatttcaaagtttaagtcagtcaaatatttttaggtgttgtgaatttcacattacaaagttataaagtagttttaaagtcaccagatgagaatctatgagatcaacaagtacagccaaatgaatatccagtctgatgaattaaaaaaaactatactacacatgttcaacataaactatagtgtttcttgaatatatgtggtttcctcaaatagtaaggtgcatcagtaaaacccgaaattagttattgaaataaacaagctccattattgtataactttcagtcgacacccaaaaagtctatctaaagaggaccaatatcaatatgcacatatttttaattaacattgcctttctatggatggattattataaacccatgcatgcctaagtttttggttatatttatcttaaagaaagatatgtttttaatagtagaatagtagcaagaaagaaaagaggagaccaaaaaaacgattttttcaattctccaatcattaattgtacaaaactcaaaaacgattttcctaaagtttgatatcgttatataaaaatccagacatctattctcttaatcttgaccaactaagagataacactcgctcattttataacttagttagttagttaaatcaatgaattttcttttggttttagtttgtaatcactaatcaatgatcattatacaagtgtgtgtggttttaaactaaataaaaggtattgttttaagtggttgttgagtcatcggctcctcaattgtattatagcctctgccttagcctttgtaatgaacatcataaaacgacaaggcaagcctgcctaacacatcttgctttcctagtgcaagtaaggagtttgtttttgtaaatagtggtctttgaccatatatctatatataataaaagaagagttgaattaataattctgttcttgtatcaatatgatcttctttgtattgattctataagtataaaaacataccacttgagacaaacaaaaaaccataaatagggttaaaggatgaatcatgtgaatagaccatgcatggttcgagtatttccattgcgctaaggactgaagactggaaatgttttcaatgacaagaataaacaagtatttcacatatctctaagataaatagtactatatatga

SEQ ID NO: 57561 - DNA, 578 bp, Arabidopsis thaliana landsberg
cacagacacaggatcgggaaaaagtttttttttttttaaactttgcaaaaaagaaaagttcgatagaaatgagacaaagaaagcagagactttaaaatcacatgtgatatatcagaaaaacacagcaagaaatgtccacatccaaaagaaaaggtaaagccgggggaatgaatgtatgggctccatgcaacattatcaaattcgttgctctctattcgttttttcctactatataagtggccgagttcaattattaaatgttcatgaaaatatccaaattaaatgaagaactctgacgagtgctataaataattcaacaatattatgtttgtttttctaactataaaacatacaatttgtttatctgctttcttttttcttatatacagatttcaattttcacacatctaattcaaatcttttcaacaaatcatgactattcaacaacttcgaaatgttttcaaaacttattgatgcgacaaagtttatctagagcacatcacaatgaacgtataataaacactactttcgaagacgggcataccaacgcccatgcggctgcatcttcacgaactctg

SEQ ID NO: 57562 - DNA, 1029 bp, Arabidopsis thaliana landsberg
agacagacagcaaaagaaaaagattcacatgtgtgaaaagtgatttttgttttataaatatgtttttggtttgatgggggttaggggaatggtaataattgagagagagagacagatttacatgtgtgaaactgaataaagcttatatgaaaaagaagtaactatttgagaaaaaggtggatttatcatttcttaaattaggtatattgactttatctatcttaaaagagaaaacaatcaaagctatatattattacacttttgaaagtatattttaaaattagtgtattggttttcaattttgattaccaaatgtgagtacaagataatgttgatttaatgagttaatcataagaaaattttgggaagatgagtaaatgacacacaaatttacaaatacgctaagtgtctagttttcttatgctcttcttatcattactgtatttaaggtgagtaaaagataagtatttaataaattaaacaatataataataatttacacacatatttcttaatttgaagatatctagatagttaaatttcattatttttcaacatttcgataacatttatgcttttagaaaattatgaacagcttataatgattaaatttaaagcttaaaaactaacaattcgcataaaaaacaatcttcgaaaattaaccagaaaaaatctctagtaagaattgcaagaagtaggtgaacaaaaaaaaaaaaagaattaccagaagcaataaccgatctagcattctaaaggctcaaaacattcgtctcttgtttttttttttgttctcatgtgttattgaaaacctttgcgtttatgatagatgggaacttctacatgaactcacataagtatacttttccgaacttgggtatacacgagaacttgtacatgaacttacatggctatttttaatactcaatcacatacacgagattttgattcgaaggaggatatgcgaactcggaaaccttataactacacaaactctatattacttgcattttttattctaggacactgaga

SEQ ID NO: 57563 - DNA, 999 bp, Arabidopsis thaliana landsberg
  unsure (1)..(999): unsure at all n locations
ctgggtttgtgatattcttctggatgatgctaatttgaggggtgaggagaagacttatgtgtctgatttggttgtaagtctaagttctagttctgatgatgaggaagaccctttagaggaattagggactgattcaagagaggaagttagtggcgaagatagagattctggtgagagtgatatggatgaagatgctaatgattctgactcatctgattacgtgggggaaagttcagattcttctgatgtagagagctctgatagtgatttcgtttgttctgaggatgaagagggtggtaccagagacgatgctacatgcgaaaagaacccaagtgaaaaagtataccatcataagaagtcgaggacttttcgtaggaagcataacttcgatgtaattaacctgctagctaaatctatgttggagagcaaagacgttttcaaggaagatattttctcctgggacaaaatagcagaggttgattctagagaagatcctgtagttagggagagctcaagtgagaaggtaaatgaacatgggaaaccaagggaacggaggagtttccataggttgagggagaagaaccacttgaatggtgagagtttttatggtggcgaaaaactctgtgatggagaagagacaataaactactcgacagaagattcacctcctttaaacttgagatttggctgcgaggagcctgtgcttatcgagaaaacagaagaggagaaagaattagacagcttgtgggaagatatgaacgttgctctaacattggaaggaatgcactcatctacccctgataaagtaagactactaattcttctatattgcccaggctatgcctgacaatcttgttgcgtgctttttggttcgtatctccacctttttttttgtatcattgattcaccatgaaattaaattacttgctctctgatgtattagaatggagatatgctatgtagcanagggacacacgactttgtcctggatgatgaaat

SEQ ID NO: 57564 - DNA, 480 bp, Arabidopsis thaliana landsberg
  unsure (1)..(480): unsure at all n locations
ggattttttttctcacgtgttgccaaaaataaatagatgggttaannnnnnnnnnnnnnnnnactcgcgttttctcgatcacgcgagaaagaaactgagacgaccaacgctacaatcgagggatctcgcgttaaccttaagcaagtatgagctagaatatttaattcgacgtcgccatgccaacagacatttcaaagaaagtatattaaaataactacctagctccgattaatttgttactctagtatttattggtccaataaataaataataaattaatctatgtgagagcttctatatgaagcgaactaacgatgcgtggtaaagcacgcgaacagtaatgaggtgagtcacgaacgtgtgcatgtgagggggtagacgtggggtcctaggggtcgacgcacgtcgtctagaggtagaaggacaccgatagagtctcgactgcgcgccacgtgcaagcaaaggcgaggacgcgctatg

SEQ ID NO: 57565 - DNA, 1439 bp, Arabidopsis thaliana landsberg
  unsure (1)..(1439): unsure at all n locations
gtggctttgcgttttctcattcgacgatttctggatttggggatttcaaaaccatgaggaagaagctcgatactctgttcccagctgtaagcttttcgtctctaattgatcatttctgaaattgaagtccaatttctcggaaattactttgatctgttgtttttcagatcgaatttccaacactatttgggattagattagtgttctacgatgaaaattagattaagtatctcatttctggcgaattagttttagcaaatgacctactagtcaatttcaccctaatttttggtgcgcttgttatatagctatagtaatatgtgttatgaagatccgctntggaatgtttcatgtcaattagagaattcgagaatttaggtgactagtgctcgaaacgtgttctttatcaacaaaccagtcagctattggttagatagtgttgattgaagcagggatgttatacacgaattgttttttcataggcttggaactttttgtagagcttccaatttggctagctagattttgtttagctttattgaataaaacgtcagatgatttcataagttggttattgttgatggtggtttattttgtttgagctgaggctagaatattagtttttcacagattttgactttccatttaattttttaatatatttttgtttgtataatctgattggtgattgtacagagcgtgcttggtgtttctcagttctaccatttgctttataattcgtttagtagtctgtaattattgccacacacactgtgtgatggttgctgtttcttcatttgatgcatatattacaatttttcaggctcgtattaaaaagattatgcaagctgatgaggatgttggcaagatagctttggcagtgcctgtcttagtctgtaagtcatcttgctatcattgacttcagtttgaaaagagaattattggaaactttaccctttggctaaatttcatgttctcttattacagcaaaatctttggagttgttcttgcaagacctttgtgatcgtacatatgaaattacccttgaaagaggtgccaagactgtgagctcattgcacctgtaagtaacagattggtttacctttatttttgctttaactctgcatgctagcatcgtcattatctaaagagcatgaaaggtttcacttgaatgcattttaaattctagagctttcagatgttgtaattattgatattgtggtttaagagttaacatgatgttgttaagcggaatagcttccaactcatagggcctattttcactgcatccaacaccgagaggatgttgtttactgttacagaaattttatagccacaaatttgggataaagttcttatttttgctcatccatgtttatagaagtgatagttgttgcacaaaacattgtgggaaagatatacgtgtttatttgtaggaa

SEQ ID NO: 57566 - DNA, 1139 bp, Arabidopsis thaliana landsberg
  unsure (1)..(1139): unsure at all n locations
acttcctacacaaaaaatgagtggcccatatttggtaggcgattaatttatagaacttaattttgcctagatgaagaattcaatatcattctatgttcctaaacccaatacaaatccttttattcattcgttagattcagtttggataactgtagtatcatgttatcacgatattaaatgcgatcaggtccaatagcttttccttgcacatcatattttctgcatattagtcaaactgtatttgcatcacgcatttttttcttgttaaatgtatctttcatatgtcagctaaacaaagacaacaaatgcgaaactttcaattatactgtacaataatttggattacatttaaagtggtagttgcaagaatattaatagaaatactttcggcatttaaaataatcttgccgtgaatgtctactcgttgaactttgaaccaaaaaaaaaaaaaaatctaagaagtataataattagagactaatagagtcaataactcattctttaaaatatatagaactagctggaaacaatagatttgaatggtactacttagaatccagcagggttctttaaagtcatcatgaagcaatgcaaagtctaccactcttggcgtaattgtnnnnnnnnnnnnnnnnnnnnncaaaagtcttgattatcgcaatttttcttatgatgcctttggtttctaacatcagaggataaaaaaagaatttcacgaacaaaaattgtgaattttgatatgcatagaggcgagctatagactccctaacgtgctattgcgtcgagccgtggtgcttacctagttacacagtataacaagcctgctttagttttatttcataaaccaatataatgtaaatcacttactatggcttttcgtatttagtaaacaattttacatttataattttcagttgacctaaattaaaaaatatgtactacaattaatcaatagttactacgtattactaaagaatcaatatttgttatgtggtaatcaatgatgtcacgtcaattcttgacattattttgtacgatttagaaagctaccggctactaaaatatgtgcataatttaacgttcattattttagaaaacagtttgcttgtctattttttctgagtgtcaacttttattta

SEQ ID NO: 57567 - DNA, 353 bp, Arabidopsis thaliana landsberg
tgctgactggtatgggggacgtgtacgattcgcaagcgcttaaccgtgatttttttgtattactaaggtttaatctccttgtaaaattgatgtaagtatttagataagctcgtggtttctgcaactattgtaacatgaagttaaatgcaattttttttacaacaaaacttatacagaagcccaaatactataccaaagaagaaggtaaacttcaaggacgtgtcttacgataaagatgagtcaatggacagggagtgatccaacaacctttgggcgaaaagagcccaaggctaagtgaattgatagtcgacgggataccattcctaacaaccaagtttgtttgctcaccggtg

SEQ ID NO: 57568 - DNA, 1745 bp, Arabidopsis thaliana landsberg
aaatatcccttatagcaaatttgttgtacctacataatctgttttttacattttttgttttacaaaatatcacaatggtctacagatatatccatctacttaaatgcgtaactaattttttcaaaaaattatattacaaaaagatagcactttttaattaattaaacatctcatataatgtgacaaaatattttacagttctttctaattaaattcaaaatcaaaacttttatattttgtcgcacatcaaaaactatatacaattaaaaatataaattaatagttcgtaggtaagttcagacaaaacacactagttcgtaagaaaagatccaacaaatacaaaaccatatttctcggatttcacataaaagaaaagtcaaagttatatagtgtaagaaaaaagagatcgaaccctcaacaagactattagaaaattgggttgaggacgaaaccatgaaacctcaaaattaagtaactattaagcatatttgttggattcaaaatcatgtagttatagttgcatcctttgacgtttctcactttctatccaacatccccacgcaaactccgttgacgctctcccacgcatttctcatattaccacagttattactatacggtatgcctaaactacataagatattttaaatattacaaacttaagggaaatttattttaaattgtaagaaaaaaaaaacggagccgcaatacttacgaaacgaaacccttatttgatatttctcaatttagaccattgatgactaagtcgcaagtggggtgcgtgtgcctgctttttctttttgcttgtgggaatctctcatctatatttttccctaaatttcattctttcttaatgtaaaaataagtaaaggtaacaacacagatataggagggcaagcaatatgtatattgacttctatcttctttttgagaaccaatattttcaaatttttaccccgaaattacatattttacagaatcatttgtagggaaacggaaagggttgacgattagataattaggttgagtctctgagactcaatcactagagacctttttgttctttgtgtaaaatatattagaaaatgtttttaaatcaatcattcgaatagatttagatgagtatttcccgaataaaataggtcgttgaatatattggagggtagttttgtcaatttggaaagggaccattcattgaatgtgattagaaaatttgagacaaagaagatttgggaaatcggggagagaaggagagatcgtatatagagatggtttggttgcattgcattttgtgtctccaagagtttaaatccgacgtgtgaggctgtcgttttggaagcatgtaggacccttccctcttttattcccttcatccacttctgtcatatattaaccataatgcccctcatcatacaacaatgtacatactaaccaatagagaaaatttaaaccgcagcagcaatgactagatactctttaaactgacatcaatcaaatgagtagaagtaatagtaagaaattctccgttttgccctaaaatttattataaatacctttgttggatctcggcatcaacaacatataaatattcgataaaccgtatgttaaaagattatattcactgtaattgctactgaattgtaaaactaaatccaacttttggcagtattgttttagaaaaaatatcaggcttaaaaaataaaataagggaactatcgcgaaataaaaccccaccaccttcatat

SEQ ID NO: 57569 - DNA, 1150 bp, Arabidopsis thaliana landsberg
catgatcagtgctcaacacctcattaaacagaatgacaaaaaaaggagtagaaagaaggaatatgagaatctgcaagtcttacttgtctgctaaatagtccatcataaaagttgagggttttccaacaacaagaggctcacgttgagtggatccaacaagagcaccaaccatagagccaccacctgagaccgcgtaatcacatcttaattggtcaaggatgaaaaatatggtgaacatagacaacaaaataacggtccatgaccaaacttacttaggcactacttttttttttttttatcctagccttttctcttataggagaggaataaaatccaaatgctcaaactaaagctaaatgaaaacagttttaaaaatgcacataagaagccaacctgcccattcttgagcatcagtaaggtgagtgacagcatctcggtttgtagcgatgaaaagacaccccgggttttcacggatacagagtgttccataccttccattaaaaagaagctgttagatcaccaaacgcagaacaaaaacatctataacgtatagctcaaccataaactatcaagaatatcattcctgaagtgtggaaggaaacaaataattggagagacctactgaattttgtagtagttgaaatagcgatcaaatccaaccacaacagctccaacctgcaaagcattttcagtataactatgctcagtttcagtctcaagaacaacaatttcatgttttctatagaaggtataagaaggatgtcatacatcatgatcatgctccattagaaaacctggcttcaattcaatctgtcttttaccatcatcctgtatttgaagaaagatcacagagaacataaccaagaccgggaagttaagtatcagcccaaacacaaatccgggatgctactaagaaaggtcacaatacataccggacctccaaggtattgaaaaccagcaagctctagctctttcaagataccttcctcaccaatcacatagacctaaacaaatatgcatcagaacttgcaaagacataaagagatactcttgatatgacattgaaacaccaaaaactgaatcttgagcattttgaatgaagtttaccttcttatcttttggggaattaatagactgcaagtatgcagca

SEQ ID NO: 57570 - DNA, 413 bp, Arabidopsis thaliana landsberg
ttctttatacattatgcatgcttctctgcataatgatggaaaaggacattagatttcaaactgatctcatagtaaagcaaatgaaatgtttagtagtagttacattacataccttaaccttgaagccccgaaagcatcagcaaataaaatgagatcatcaatactatcaatttcataaccagcaacaacccctcgtgcataagccattgcttgctctcttcgaagcaatgttcttctagtttcaagaagacgttgaagttgaatcctaataaatgaaacaaacacaaaaaaagaaattagtcaaaccaacactcactgtcagttgcataatgcaccaaaagaaatgtatatagttccatagtaagaagagttacttggaggtttcctctcctgccacctcattgccattctca

SEQ ID NO: 57571 - DNA, 666 bp, Arabidopsis thaliana landsberg
ctggttattctctctccgtagccaaccactatggattctagagctattctcgattccgctttgtttcaactcactcctactcgcactaggtctcacttttgatttgattgattgatcttcatttgttgttgaattttgattttcttttgttgaattctggttttggttttgtggtttttgtgttgaagattcgatctggttctattctgtgggagtaagaaggagaagctagcttcagggatttttgaaccattcgtctctcatcttaagttcgctagagatcagatctctaaaggcggttactccatttctctgactcctccttcttctcactcttcttggttcaccaaatccacttttgatcggtaatttcaattttgataatccggcttcgattttgttgacaatttccaaattcagattcgaattatgctaattcgagttgaaatctggtgtttatgtcaagtttgtgataatgactttgtgatgataaatggtgtgtggaagatttttgttactgtgtagagacaatgttgacttgttattgattaagtttctttaattgtaggtttgtgagatttgtaaacacgcctgcgattatcgaaagatttgcgactctggagaaagagattttgcagattgagaattctattcaagctaatgaaa

SEQ ID NO: 57572 - DNA, 841 bp, Arabidopsis thaliana landsberg
agaacaagaccgatagaagatggagggaagaagaaaatcactttcatatgtttgatttctatttttgtacatactacctaatttcaccatttatgcatgataattgctatatatgctagaaaaacagggaaaattcaattaacctaacaaaattggaaaagttaataaatcagataaagcagcgaacatcgcattcaaaacaatacgttaggctgtgcgtactgttttattaattttaatttctttacaaaaattgaagataaataactcaaaaacaaaaaacagaagtgaatttacagtctcatgatcttattttacattatatatacgaatatgcattatgctatagttcttctattcaagttttctcgaaatttttcactcagaaaaaggatacaataaactaggactatagtatgatgattgcgtcatcagccgcatctgggcttacgtggatatggttaggacaaaagtaaaactaaccaatcagatgtcatcccagaggacacagctgtctcatttgggtccacttctctaacaaaacttcttcaattattcacacacaatacaatgacacatataaacaatttaaataatttattaaatattgaaacggaaattttgtgttcatacttaggttcttactatgttattgtattttttggaaaagcttgaggactatttctcataagtatataaattttttgtactcaaaatttcggattcaatccctagaaatacatttatcaaacaaatccaatttgagttttatttacaaatacacatttgcaatttaatatgacatgggtctcagacttacaaaataataaagtctagatac

SEQ ID NO: 57573 - DNA, 625 bp, Arabidopsis thaliana landsberg
cactcccatcgaacgcacaaaagatcctccactataaatatttgtggtgaagaactttttataccttacaaaaaaagctaaataccaaataaatgttggtactcatcatacatatataactaactcacctttttggtgtgtagataaatatatctaactaaccccattacatattccagtcatttgcttataaattataaccgtgacacttaccaattcagtcacttaaccaaacatgtatgaaaaggggttgataaaaaaagaagaccacatgtttcaagaggagaagagaaagacaaactatggagcaattggcttggctcgcttcatttcttgtttctttgcattccaattcatgaaaatcgcaacaacacaaccttcaacaacaacaacatcatccattgccgttatcgatagcccaatgtcctcccataaactatctgataggagagaaatatggagagttatcccaccatctacctattgtctcaaaatcgaatctttcataaaattcgccacttctccaaacgccgagaagtacgaatcccgtccttttgaatccggtggatacaactggtaagtagtattttatcctacattttgcatatgtctttgcataacaaat

SEQ ID NO: 57574 - DNA, 323 bp, Arabidopsis thaliana landsberg
tataaaggtcaaagcaaagtggccaatgggatgatgttgaggtcttcttatatatacttttttttttttttgtgcaacatatttacttaatttagaaattaaaatcataacatttgctcttcttggtggcagagaatcatcctcagatgtccacacctctccctctcttattatcgtctcctttcaatttagttgttcatttttatatatgtaaaactttaaattttagtaatcaattttattgttgttattgattattaaagagagaaaaagaaaaggtaatgttggtttggttggctaaaactttatagaaaggttaatat

SEQ ID NO: 57575 - DNA, 1113 bp, Arabidopsis thaliana landsberg
tttcatttgcttcttcctgccacaaaaaggaaaataatcatgaagcagtaggacagagacaagtcattcacaaacgtaacttcagaatgagttcccaagaatacctgtttcttctttgtttcagcagctctagcatctaaaaactgctgtggaacaccacttggattattctgtgcgcttagaagaagtgtccaaagttctttcataaatttgccagtatttttctccatgaatccagtcagcgttatctgaatctccttaccattcactacctacatacatagtgaacgttcaattacatattagtccaacaaaaaaaattcacttgtatcaatggcatgggctacgaaatcatactacccctctgtcagactgtcacttatttacagtcgaataaaaagctcagaaacacaaaatatcagtaataagcttaccttcccatcaagcagaccatagataaagttaatcagcacttcatcttcaataccaagaagctcagtgactctagtcgcaatccaaggtttcataacatccatcttcactttagtgatatccacctaacaccaagccaagtagaagacatcattaagccctccccaaacttaatttcatagtaacatatgtatcgaattatctagtaatcgaatctcaattaagtaaattcaagctacgaattcacaaatcgttaaaatggacgagtacacaaagagaaaactcaccagattctctaactccggagcaaatttctggcttttcatcaatttagcttgcttgttagaaaaccgagtatcctgctcggcggaagtaccctaaaagctcaaaacaaagaagttattaaaccatgggaacttcaacaaaacttttgaattgcatcgatctggatctaaaagatgagagatcaattgaggaagtagatgatcggaaaactaacccggaagaaaccgccggacatagtttagggtttgtggaagcactagctcgtctctagaagaaagatcgaagcttgagagagatttgtgagatttgtgcttgtgtagatgtgaaaatggggcttccacagagattttgaagagcttttaacgagccctagctatattggactcacttcatttt

SEQ ID NO: 57576 - DNA, 1217 bp, Arabidopsis thaliana landsberg
tttggtttggatttaattttggttagatttccttaccaatgttttaaaagatctaccaatcggtttacaattttggttcaagttcggtttaaatcaccttatcattgtctatttcacaacattccaaagtcgctggttccatcagaagttataatatcaaggcaaacaatatggctaacaaataaaccaataataaatccccacgtgtcagtatttgattgattacaaataaaccgaacttgatctattgatatttcccatcacataagaaaaaaaaagagccaaaaaaaaaacttttaggcttagctttaaagggcacacacacacactcgcgagtttctctctggtgcgctctttgtggcggctcgtcttcttcttcttcttccacgggactctctctgaatcggtgattttcgatcttcctagggtttcgatctgaaaccttgcgatctacttgaaagagagattcagaaatttccaagtaataataatgtttgcgcctgcgactcaaccgcaacagcaacatgagcagaagaagcaatcagagactgtttcatctgctgaagaagatgctttgaagtggaacaccgattgcgtttactttctcgcttctcctttaacctgcaagaaggtaattgatttttgattattgtttcgcttagatcttatccagtttctgcttcaattagggttttggatttgagatctcaagtttctttcacccgatttcaagtttctctgtgtttttgtgtccctcgaagctatctatacatacttcacttctccatctgcttaattttggtgcgagatttagatctggtgatttcgaacctcgtgattctaagtattgttgtttcttagggcttcttgttagctagattgaaaattacatatacaaagctttataaggatgttctgataaaggagattttcatgttctgtgaatatgatttttgctcgatgtgtatgtttatgctgaagaacgattcttatggtttcttccttttttgcttacagggacctgaatgcgagtatcgccacagtgagtatgcgcgtatgaacccgagggattgctattattggttgaatggaaactgtttgaatcccaaatgtggatttcggcatcctgtgagtttactttaatcctcaatagatagtctctgcttgagcatcttgagttgtattatcggagtgtgtttacctagtggttttggttt

SEQ ID NO: 57577 - DNA, 1672 bp, Arabidopsis thaliana landsberg
attgctccatacctcattcattgttcttgtacgacacaggcctttgttcataataatatactatatggtatatggttaatatatactatcttatttcgtaactcaaaaagaaatatgattaatcgtcaaccatatcacctcgttacataaaagctagtggttttgctttttctaaaaaaccatcgtgttactatatcgtatctagtattttacaagatctatagtttaaatactgatattttctgaaaaacaaaaaaaattgaaatttgtatacttatatactatagaagaatgcagagaatagttattttcaaagagttgaggacaaaacttacggggacaaaaaagtggatcgaggagattccagtggtccaatattgattttggatagtggatatgaatatgcgcacgcaatagccaatacatctcaaaaagtcatttttttgtcaacatctcaaatgttttatgcaccaatattcaaatgaattctcgactctacgttgttagtggatacatctgcggttaattacaaatgtaacatacacgcataccatggaaatatatatatacacatatggaatttatggtataaccaccaccatgacatttgtaccattataccataaaaatcatgaaatcgtgtccaacaatatgatcattttagattggactatctacaattatatgtatgaaacgtacgtggtactcgatgagtacgtacatggtttaaagcttacacgggatgggaattttgaaaaagctatgatgggctcttaaattcgttgaaagcttacaatagatgaaacaaagaaaacctgcatacatcaagtacgtactataattacactaaggaatgaaaagaaatcatcaaggctttcatgaagtatccgtatcaataatttgtttaggttacagaaattgactacaactaatttttatttttacggttccatgcaaattaatccattttaaacaaatcctccattgttttgtataatgttggagattagtaggattagtcggataatatggcataaacataatatgatgctaaattctaaagaaacgatatgaataaataatgcagcagtataaaaactgtaccattgcgtgggtggaggattttaggtcattgttagggcactttcatggggaccatttccgccttaacgaagacttattacacacaaccgtcaatgtgggctggaaacttgcagtgcaatccggtctgtgtcctataatttatggccggttagggtttacaaggttttaatctatcaattaaatgagatggacacaaaatgtaatcaccagtggaaaagaaaacattacgagacttatacaatgtctacaagaaagactcgagtggggcaacatgttgtacataatccgacgtcgttttgggagtcagtaaataaagttcgagaaatgacgtcgttttgaagtcatccgagagaaaatgacttaaagtgaccgacgttgttttgaagtcagcggaagagtatagatgttagaaacgcagcctttttgaagacatctcttcatatattgtttgttctcttaaaatttgccacgtggcaattactttgtactccaaggcttgtctattattttttaccatcttaactcttctttttatttccatttatttcttttttttttgtttcacttt

SEQ ID NO: 57578 - DNA, 1023 bp, Arabidopsis thaliana landsberg
  unsure (1)..(1023): unsure at all n locations
gacagaactgtaaaaggaaagaaacaatttcctttctgcaaagaggtaaacgactctaaattctgttgcatctcttagaacaaaagaacagaaataagatcaaagagctaagtgaaaaaaactccttagggtgatgcaataaaggaaggccaagttattggatacttacatcagttgggaacagaacttccagtgacggtaatatcttaactaatatatccatctcttctttgaaactatctaatcagactcatcgatcttgctatttgtcgagcagtcagatgtagctnnnnnnnnnnnnnnnnnnnnnnnnnnnnncggaggtaaacatttgagtattcaaaccgtttcatttagtatgaacattcagaaattatataagtgaatttatatgaactcatgcttcgtgtgcaaacagactccgtaggttatggagatcctctggttgcagtcttgccatctttccacgacatcaacatccagtgatgatggtttcttcagcccaattccatagcaaatgaatagtctttcatccggagactgtactattcatcttctcctgtgtttgttcaatgaagatttgtaatctgtttagttgcaaagagtctactttgatcttgctctcatcatttgtcacgtaatgtggattttctgcaccagagaaaaaaaacaattgtggaatttttatagaaatgacgtggctatcttatcttctccgatcatcaaataaaatcaaggctcaaaaattcagaagaaaattgacgaatgtttttaacagtgaaggaaaatattaaaattcttctcttattcgtatcggtcttagcaatgtatgtaatacgctgacgtgtacaaacggagctctcttctcagctctggcctctgagaatgaaactcaccacgaatgatctcttcgcttctcaaccattatttcactgcccttgctcctcctcctcccgtcctcgccgccgacgtttctatggccttcattttccgatcaacctcaccagcgagaagaacaattct

SEQ ID NO: 57579 - DNA, 389 bp, Arabidopsis thaliana landsberg
tccgatgcaggttgacaaatgtggggttgtcttgtgttaattcgcgaagttttgtaaggacgataataattgaaacattaatatggaagttattgaaacgagtcgtacaacattatccacgcatcacaactgatttaatccacagagacatgtcaccggaccttttctttatgtctaaaaaagttgattacaaaaaaaaaaagttaggggaaacaatcaaataaaacaaattcgagcttatttgtttggccaaaaagaattacttacttaactacatttctagccataaattatttattttgcattgactttaggtgaattaaacccaatgttagtcacatttaactttttggaacgaaatattaaatgttaactaacattaaatttga

SEQ ID NO: 57580 - DNA, 1112 bp, Arabidopsis thaliana landsberg
  unsure (1)..(1112): unsure at all n locations
atgttgtaaaacacattaaatattagttatttaatagcggtatcacatagttataagcttaccatagatgaagcatgtagacctgcctcagcaagactactgaagaatgataccatcgcaacttgaaaaagtggaacgctggaaagcaaacctaagtaagaaatctatgtaattaaatcttgtcttagactaagaagataaaaattagttgattnttttcactaatcatcaaatcaatcctctaccgtcaatccgtcacaagttataagtttaaaataaaatataaaataaaaaagagtaaggaaaaagaaaacacacctacttctcattagagaagccatttcatgtaccaaacgaattgctctaaatatcctatttctatgtcctggacaatcttcaagtaaaggagaactcaatttctcatttataacaatgggagcaccgaggctattgtctcggatcgaatccggtaggaaaagcctcatatacaacgttgataaaattcccattgctgctgcaacctaacaagtcgcgataaggatgatcttaactgaaatatattcactaataattatacatacacatgcatgtaactccgagtatataaagatacctgaaatgtcacgccaatagataaaaatcgagcagaaagattggcgcaaacgaatgcacatgatgtaatcccggtaagtatcccaaatgcggaggctcgtctcccttctggtacattatcagcctgaaagtccgccgaaaatactttcatatataaaattattgaacttcactaaagatttcaccagttattcaaaataaatacttttaaacttttcaagagatttaattagaaataagtttactaaaacatatttcttcttgattattttatatttaccttcctcaatagttttagttcagaagaggtcaacatttacattaaaatcctaaaaacaattagcaccaaggagatgctctaaacttcacataacaatattttaaaaataattattacattgttatagtattattattcttttaattactatatgtgaagatgacatatatttgaatgttctttatgctacccaaaagtaaagaccggcccaattaaaaac

SEQ ID NO: 57581 - DNA, 728 bp, Arabidopsis thaliana landsberg
aagcacatgtcatattttggcgtaatctacacttgaacattttctgtttatccgctgttacttctctctctctctctatcccaaaagacgacacaagtacaaacacaaatctgcaaatcttcttcttcttctgtcttcatgaatttcaagtctaacaattcctagccgttaacaatttgacggcacaattcttcattccttgtcgtgcccggaagtaaaaagatgatctttttggtttctgatgagataaaacagagatcttgttaacacttataagcagacccaactcgggaagctatggccgctattcgttttgcggcggcgattctgatttgctgtttattaccggcggcggttttgtcttacggtttcccggcggcgttgaaacttgaaagagttattccagcgaatcacgaaatggaacttagtcagctcaaggctcgtgatgaagctagacacggcagattgttacagtctttaggtggagtcatagattttcccgtggacggaacttttgatcctttcgttgttgggtaatttaaagttttcatctttatgttcttttttggtgattgatcgatttttggcaatgcctgtaaggtgttagatacaatatctgagtaaatctcagtcattgtctgttaaagttttgttttggtgcaagtctcaatcaaaagttctttttttggttttgttgctttctgcttaagtttggtgtttgactttgt

SEQ ID NO: 57582 - DNA, 1118 bp, Arabidopsis thaliana landsberg
tttatgcaataaatgttggaaaactgatcagccttatgatgatttaactctcttgtgttctcttttgtaagcaatggtgaatgttctgaccacaaaagtgaaggcatgggaaaaagaaagaggggtccccttcttatgcgataaggtaatcctaactatgcatttacttaatcctcttttatgttcgacgtatataatttatgccttgtattccagcaaccgttattacaaacactagaagatgacattgttatccgtgctcaaagagaagaggaaaagcgtcaattccgagtatgtcttataaaacagaaacatacatttgtagacgatcagtgtgttgttgagctctaacaaaacaaaaaaaattcccctcttttgcataaacaggagcagaaacgactacaaggtcagcttgctacagagaaagaagcaaagtatggttccaagtctgcaaagaagaagccattgggacagagtcttaacacagacaatgtgactaaaactcccattggtcggcgcattggaaatacacctggacgttctgttacttctggtggcaaagattatagaggcaatgcggtgataccattgaactatgttgctcttcagaaagacgattgatgatagataaatcaaaaaaggaaggttttgacggtttagaatctttacataagctacatttacatgttaatgagctgagacttctaatgtgtttctttttgggattatgcttccattgctaatgaagttctacagatattaatattaagtggctcatttcactcacaggtattgatatccagtcacattactagagccttagaggctttgctccagtcacattactagagccttagaggctttgctccagtcacattactagagccttagaggctttgcttcagtcattagaccatcaagttattgctgctttaaaaatgaaagtaacatgatctgacaaatagcttttgttaaaatacaatcataacggccatagatagcctcaactgtagtatttgtaagccgtaagaagttgacattttaaataacccacaatgggatttggcttctgtcacaatgcctaagtttaaaactaataagctatgggctctcataac

SEQ ID NO: 57583 - DNA, 1171 bp, Arabidopsis thaliana landsberg
ttcaagaacagctctttcgtaacattaacatctatgaaaatgaagctcattcacttatatttccatcactcacattcgtatttacaattgaattgatttttaaaaatttaataaatcacccaatctttcacaagtgacgtatatttcttttggtacaaatgatgatggaataccaaacaattagtaccaaaatatagtaacaagttaatgacgaattaaaagatgtatatttcctcatcgatgtcgacaaaaatattaatgagatattagttttacggccgtctatcaccattattagtgtgggatttttttcctgctgtagtgaaataatatgacatgatcagaattatagtagtacttgtttttttattggcagtaaatgttctttccatgcaaatgaaatagaaatttgaatgtgaaaatgcttaactacatgtgtaaatagatcttctcaactgtatgttacgtagatatctctagcattcagttaccaaaatatatatgttggaattttttttttctattgtcaacaaggaatttgaaagttagtcgtaagatttacatactttttggttaaactcatgcttaattgttatgatctaactacgtgacagaaattgcagaaaatgtcgcttttgtaaacctaaaccattaattaaacgatagagtaataacaaaacttgttaagtgagaaaacatattacaattcccacaaaagacggacttaatcaaacttttcatcaaaaactttaatttggtcaagctcacacgaaactcatgtgaaagctagccttttgacctttgatcttgatatttacttaaaactctttctgggaaactccctaacgcttggttggtagatttcacatcattcaaaatttatattttcaatggtgatcgatatgtaattttgtggttggagctgcagatatagttgtaataactttatttaatcattattcacaaaattttgtattgttaccattatacatataggcgttcttttagaaaaagaaaactgaaaattaatacactaatttaccttggaacaaacatacaaatattaacaaaaaaaattgaaagagtttaatatgctaaaatttttacatgaattatattaaactgaatagttaaatttttgctaaatggtatactatttcaaatcacattt

SEQ ID NO: 57584 - DNA, 1159 bp, Arabidopsis thaliana landsberg
  unsure (1)..(1159): unsure at all n locations
ttctcttttgaaattaattatttatatgatattaatttccaaataaaacctgaaaagttatcataatcagatatacatttttaatgtggaaaaatcacgtaataacattataaatatatatatgtaacctaatattgtgaaatctaagactctgtatatatagtactgactactgaacaagtatataaattttatgtttataattataaaacgaatcattaaagatatcaaatctgaatctcaaataactaacccaaaatcatgatatctatataaatatattctaatgaccttgcacgacggtctacactgagcttgttgacgatgacagatttagaaattctgattattaatttacaaataaaaactatagtattattattaactattttaaatttttaagaaaaaggcaaaataaatgacgagtttaagactttggtagttagctccggtttcaatgaatggtccaagttggagagattaggttctttttcttcctttatgtgggtcccattcttccttctgtgggtcccactctctttaacgtttcttcaccgtcctttagtgccaccgttatgccgtgccgtcaactccgttgacttcaggacaacgctgctcgtcttttactgagtcttactcacgtcgtctttctccgtcaactttcttactaacggccacttaacggaaatccgtcactgttaacaattaaattaattccgctcgacatttatcgccgatttacacgtcacttttttctatcttaccctggttatttaacacgtgtacatttatgacgctatatatcgaggaatttatccatctcaaggcattttctcaattatattctggctgcaagtatccaaattttataccagttctaaacaaaattagaaagaaaacaaaataacaataaagacatacttataatattgagatcaaatctgacatttaagaaccactcaagatcttcctattttaaaaggcaaaagaaagagtcagactgatacttatcataaataattttcaacatatatatcaaatgtttgagcacataaaatataaatatcaaatataaattntaaatgcaacgctgtaaattttcgttttatgtatgtcataagaatngattagataaaatggcattttcgcataattacgt

SEQ ID NO: 57585 - DNA, 1296 bp, Arabidopsis thaliana landsberg
  unsure (1)..(1296): unsure at all n locations
atgtgcttaccctttgatgggatagatttcttaagaggtttatttggtatggattgcttgtaacaactacactagaacagaggctatatcacaagaagattttgaatcgaatgttttagtttattaggttttttttttttcatttgagaaatcaaacttagaaacattgcaagactcactaagtctagttgtttatagcattcaacttatatgcaagaacagatttctagcaggggagttgatccttgtagatgttcaaacccgaggtggatgcagtaattgggcatagcctgagagaaaacgaatactgtgcaggcggaatcagaaacttatcgtgcacacatggagtccagctatcatctcccccaagacccatgtgtttgtggtccagatgcacctgcacaatgatcaccattcaaatgacaaagacttaactaacaaaatgacaactgatgctcaggtgtttgataagtcgtttccattcttgaattcaaatatatctggtcaagaggatcaagagattgaggaaaagacaatagattactacctcgatgttttgtcctttgataagatcctcttcatgcgttgcacggtgaagctcaccggttgtataataactagcattcatttgcattagagaagagctaccatatgttgaagcatatattcctacaccatctttgtttcggaatgttacccacctaacatctgttctacctccattttctcctggaacaatataagggacatgcatgtctccaacattgtgttcatatatcgccacatgggctgctgcttttcggtctgggtaacactcaaatggacctttgccataccattctacacggtccagtgttttttcaatgtggaattctatacctacacgtggtagcggtggaagatcagagtttggttctacaaaccaattggtgatgatatctccttttccatagatcagatatgtcacattgactttgaataaggcatctgactttgaagagccagaagctgaagaaccaaggtaaatgaactctatctctacggatttatcagtgatgctctttactgaacagctttcaacaaggaactccacattatctaactgtgccgctttccacctcgaaaaataactagagtcacctccacctttatcattgtctgtaggtgctcgccataagcatggcagtatagcttcgttcataaggagaactccttgaatctgncatttntgaaatgatcttaagaacagaaacattctcactcaagatgaaaaagtgtccgcattactttcactaa

SEQ ID NO: 57586 - DNA, 1114 bp, Arabidopsis thaliana landsberg
catatttcagttactttgttgtgcttatgattctgctaaacatcaaaacgagattcttatttgaataggtcgtttatgagaaagaaggagaagaatctttcatgttatctcctgatgatcaagagttctcaccatctcccagacctggtaatgtctcttatgttggagcatcattgattatagtgaagggcttagtattaattactctaggcattttcctttttagttcatgcatttactttcagtctaggatcccttagtttatgcttgtgatttttgcataagaatgcgctagtcagtgaaattgttcaggataggattcgtgttggaagctaacttggtaatatcttatgttggaacatcattgattagtgatggactcagtattactctatgcattttcctatttagtccatgcatttactttcagtttaaaatctgatacaaatgaaaactagtccttgtttgtgatttttgcataagaatactctagtcagtgaaattgttcaggataggattcgtgttggaagctaactagttgtttttgctatttttagacaacaggaaggagagaactctctggctacttgcacagaactttgtgaagctgtttttatgctctgatgtaagtgaataagtgttacggcatctctctaaacaagtctgaccaatgaccaatttattgacacctctattgttgctactttgatgtcaggatgatctggtaacatttgatagcgctacaaaagcattgctgaatgagtctcaggatatgaatatgagaagtaattctaattccttcccttaatcttttttgttctctgattattacatacataagcaataaccaaaccccatttctgtaaactctaagcagagaaagttagacgcctttacgacattgcaaatgtgttttcctcaatgaagctaatcgagaaggtacaattactatatgagcctgttcctaaaatattacaatatgcacaatcttggatactcaaatctctctcatcttttgtgttcatgcagactcatgttccagagactaaaaaagccgcatatatgtggttgggatctaaaaccatatttgaaaacagattcattgatggttctg

SEQ ID NO: 57587 - DNA, 959 bp, Arabidopsis thaliana landsberg
cattttttatcatctcctcaccgaatgtctcagcgatcagcaaagagcatgctgcgactgttcccactgccagattgttcgaacttccgaacacggcatacacaaaaggcggcacaaaacttgaatctgaatttccataaagtttttaacaaaaaatggtattattagttttgtttttttttaacatcaatggaattattagtaatatgttcaatattaaaattaaatttggaataattttacagccttatatatttgaaaaatacaaataattaaacttatatagaggagtttacttgttatttttttatatgaacaaaatagaaagagaaataaattgagactagtacagttgggcaacacctactgtcagtttgtgtagacaataaagcactctgccaatatcatttctattttaggttcctctactattttagttacacaagaaaaacatggaaaacttgtctagatatggagcatttagatttcaatttttaaatatatatatatatatatatgtatgaaaaatttcagaaatactttatgtaaaaagtaataattttgttaaaaacaataagaaaatcatcttgtatattaatctttaaaaagaagacacttttgaaaaatcaaactcaagtggattcatactgtatattcagaatcagtattaattttacaatatagaaacgttttcattaatatggagataaagtggtaggtaacatagtagcatgagctgcatggctaaacggtagactatacatacatatacagagtaaaaccatatttggaaaacgtaaattcatatttaattaatatgaaaacagaaataagttttttgttgtattgcaaaatcgaaattacacctttctccgaaatcactttaagaaatatgattttatcattttgtaagattatatttcgtgatgattgttgatggatgatgcataattaaagaa

SEQ ID NO: 57588 - DNA, 506 bp, Arabidopsis thaliana landsberg
  unsure (1)..(506): unsure at all n locations
acaccgagcatctgagtattacagaggatcaaatcaaaagcaaaagagaaagagagaagaagtagaagaatcatcatctttaaagccaaaaatatcaataaattagattagagaatacttaagcttgaagcaatctcgtctttagcctttattgtcgaattactaattaatctcgaagcagagcactctctgttccgatgaatggatctcatctaaaaaatcaccgtgtctctcgtccctggtttggtccttcgagaagtgtgaacaaaaatgggttttctctttggtttgttcataggaatcgcggtttctttcggtttggtcgtcgcatttgctcgctactctagtgtcagatccactcgtcgagctgatttggtaaaaccaatttcatattttcgtattgtgattaatccatctaagaagattaataaataagaagaacaattttttggttntgaataggcaaagaccattgctgcatttgcaagaatgacagttcaagattc

SEQ ID NO: 57589 - DNA, 590 bp, Arabidopsis thaliana landsberg
aaccctgtttcaaatagatttcgatactgccgtttctgaacaaagccataagaaactcttcctgctctgataatattaggtcatgcatgtagatgcaaatcagaatccctaaaaaaatgtgatttttagatttaatatacaatttttttttttgtataaatgaaaaaccatttaagaaataaatgttaccttatggattagaccatcattgataatagatgtacttagcttcttgaataaatcgtgtaaagcctcaatctcattcacggtgactgcatacatcaattatacataaactctataaatagcttcataaaatgcatctatatacagctcatattcgtttatagatgatcgtttattaactcttctttatctttcgtaattaattatgttattcaatttttacatagagatgttgcggtttttgtttgtttggtttgacttacagggagtttcggatgcaagaacatgaggatcctcatatccacgaggatgctttgctcgcttcaacgagaagcatttcacgaatgccaacattcaacaactttggtaaatatagaataattttttgtgctgctaaaataacc

SEQ ID NO: 57590 - DNA, 1419 bp, Arabidopsis thaliana landsberg
acgaacctaaacctaaattcggactaattcaataactgtatatgctcagtgttggttcttacatgtttggggtcggcttatttatcaagacagttgattgcaacagtagctgttcgcaagacaacaccaagctcatctctaaaagcttcagtactgtgtttgcccaaatcttgaaacagagcattgcagatcttgtcttcgttgtctttaaccatctcgtatatagctccgatctgtgccttcctccacttcagactcctcgtcctcccactcgcaaacgtctctctcatctctctcaagctctcctccacagtctccttcatagcttccatggcttctctctctttgactaactctgttcagaagcagagtttggttataaaaagctagaccttgtttgtttggttgcctcttttagagatagagtgtttctatttcaagttactagttataaccacttatagggtgatggttaaaagtggaaaaggaactagttggggaataataaggtaaaaatattaaataggtttgctgtcttacttacttttgaagatcgttatcaagaagatggaagtccatatcgttgaatttaatgttgtaattgatagattttcattagttcacatgttagattttttcaagaaatactttagattatatgaagtatatgtatcggtgacatttattgatgtgtctctattcattgtctcacctaacatagtccgaaacgtctggttactggcaccggtcattaaatgcttccgggcaactaatatcaaattcatatgtacagtaaaatatttggtttgtcaactatcaaattcacatctacaatttttaaatatgcttttatgtcgaataaactagagtatagatgatattatgtggagtgatacgattaatattgtaaatgtagttgggaagctcaataaaagttagtgtgttgaaacgtgaatagtactacttgaactatattattacaggttgtctagtgaaccaaatgttggggccaatagtagatctgtaattaatctttcagtaggaaaaatagttgggaaaatagtcgaaatgactaaaatccgatatggaataacaatatcgttttttgggtctaagatattgatatttatggagcaatgctatattggtttcaagtgtacatttttttttatccgagggttcaagacttaaaagctcaaccaaatttccgatatacaaagaatgtgatatttttatggctatcacttacatcgttgctacatttaattaatttctattttctctgaatgcaaataacttaaatcgaagttcattttaaattataaacgtaaatttcatgaagtaattttgtatttacgctttttaaaaaaaaccttgaaatgggtttttcaatgtaaaaccttaaattcattcatatta

SEQ ID NO: 57591 - DNA, 926 bp, Arabidopsis thaliana landsberg
ctttgcttgttaaagtataactttcagttcataatttcttaaggagtcttggggtgaatttatattgatcaaacaggagttgttgggtacttctggaacacttcttgaaatttctttccacaaagcggctatatgttgtacagctatgcacagaggcgctgctttagctgcaatgtcatacttatcaggtaaggttgcagtggtttacaaacgaaaacagcattaatttttggttataagcatacttaacacaatgttttcgaactttataggtttcttggaggtttcactttcttccatgatcgaaaccgtgaatagcatatcagatggatcattcagcgtggtctctgtccaggtcgtatctcactgtggagagggacttttgtctaatctggtctatgctctacttggagttgcagctatgtcaagggtaagatttttgagtaagatctctcaaaaagtagttgatggattatgatatttgattctgtttttgttttaggtccataagtgttcaacgatactgcaacaattagctgcaatctgcagtttatgtgagaggacttcatggaaaggaatgttgtgttggaaatctctccaaggatggctaaactcagcggtttctctctttctcttgtgatcacatcaacaccaaactccgcctctgtgttgtttattctaatggcttttttttgtttgtttgtattcaggtttgggcacttccgagcgagtatctaaagcaaggagaagcagaaagcatagtgagggaatggtcagaagctctaggaggtgcagggatcgattatcttgagaacaaaagctgcaattttggaagcaataacagttcaggaggacatatgcaagggaaacacggtcgaacattgaagcgaatagtgagagattttgcggattctcatcgaaacgat

SEQ ID NO: 57592 - DNA, 419 bp, Arabidopsis thaliana landsberg
accagtttcctcatttttatacctaatcataggggatgcccactggttaatttttcaaaatttaaccattgcggcctaattaattcttttatgaaaatacgaaaacatatatcgtaatatgattcaaaaccaaaaaatcaagttggataatgctaattcatccccttaaaagcaactgctactgtgtcctatatcttgctaacatttggaaagatttaagtcactcttattaaaaaaaaatttccaatcctaaattttactaataaaatcgaattatatttatatataaaaaaaaatttgttaaaacactaaatgacaatgtcattgagatcataataaataccaactccagtatttattagctaacagcgttgctaaattttatatatacattacgtctatagataataataaaacca

SEQ ID NO: 57593 - DNA, 532 bp, Arabidopsis thaliana landsberg
  unsure (1)..(532): unsure at all n locations
taatgtcttctcagtgaaaaaccataactaggatcttgaatggtcagatcaaacaagcaagaaccacgcgtctcttctacttacatccgatctctcgtgaagcaacaacttgcttattccaccactatgaccaccaccaccacaacaacaacaaacgatggtagcggcggcggaaaaacgcaaacgcaaacgcacaagaaacaagtgaggaggcgacttcacacaagccgtccttatcaagaacgtctcctaaacatggctgaagctcgtcgcgaaatcgtcaccgctttaaaacaacatcgtgcttccatgagacaagccacaagaatcccaccgtctcaaccacccccaccaccgcagcctctaaatcttttctctccgccgcctnctcctcctcctgcggatccattttcttggacgaatccatctctcaatttcctcctccctaatcaacccttagggttaaacctaaacttccaagatttcaacgacttcatccaaacctcctcaacaacatcttcatcatcatctt

SEQ ID NO: 57594 - DNA, 439 bp, Arabidopsis thaliana landsberg
  unsure (1)..(439): unsure at all n locations
cttnnnnnnnnnnnnnnnnnnnnnnnnnnnnnnnnnnnnnnnnnnnnnnnnnnnnnnnnnnnnnnnnnnnnnnnnnnnnnnnnnnnnnnnnnnnnnnnnnnnnnnnnnnnnnnnnnnnnnnnnnnnnnnnnnnnnnnnnnnnnnnnnnnnnnnnnnnnnnnnnnnnnnnnnnnnnnnnnnnnnnnnnnnnnnnnnnnnnnnnnnnnnnnnnnnnnnnnnnnnnnnnnnnnnnnnnnnnnnnnngctgagaccacatcacgagcacgtctcacagcgataaagctcgcttagccgcacgaatcggtcgtcacgccgatcgacgggacgatgtccgtccgatcgacggaccatgcggccatcgttctccacattcagcctttgactttttagtctttatttactgcgactgtcgttcggcttgcgttacctgacgattacg

SEQ ID NO: 57595 - DNA, 526 bp, Arabidopsis thaliana landsberg
ttaatctttcccaattataccaaaattaattttagttcgtatcaatcgatattcggtttattcggttcagtaataagtttaaaattaattccgaattaaacatgagtaatggagtctatcgatattccaatttattaaatgaatcaaattggttttactggtataaatatttaaattcagtattaatcagccaaatcgtcgagtttaatgtttttttttacctttttaataggacatcgtttttaactaagcaaaaaaaaaagacgtgttaataattaaaattgtaaaatatgatttagttagtcccaatttggtgttaaaaaaaaaaaaaattaagtcccaatttttttttttgtcatccactagctattttagttctcatgtaaataagtgtgaataatgtattaacaagtaggtaacattatcagctttccttatattttaaattgtatttttattataagatatgtaaataatttattaacccatacattcctcataaactcttacaattactgtctaacga

SEQ ID NO: 57596 - DNA, 430 bp, Arabidopsis thaliana landsberg
ttcacacacctatacacacaagagtgtcaggaaccgtatggaacaattgattagaactaggccgtttcgctaatccggatgtgcccccccccccctcgacgtgtctctcacctctctgtgttcaaacaggtaagcatataactcctacgtgcagtggcgaagctagagcgactttaacgggggtgcaattgcttcatgggtgcatagacattaaggcatgagcacgcatatatggtaaaaatttgcgcactataactgattctgtatcgatagggggtgcacttagaatgaacctagcttcgcccctgcctacgggtattctcgtctcgctgcacgtacaatctgttagcaatcatgagcggaatgagtagatggcggcgcaaagtgggccatagttccacctcatactctgtctctttatatatacatt

SEQ ID NO: 57597 - DNA, 283 bp, Arabidopsis thaliana landsberg
  unsure (1)..(283): unsure at all n locations
aaaaaaataaaaaaaaaaaaaaaaaaaaaaaaaaaaaaaaaaaaaaaaaaaaaaaaaaaaaaaataaaaaaaaaaaaaaaaaaaataaaaaaaaaaaaaaaaaaaaaaaaaaaaaataaaaataaaatanaaaaaaaataaataaaaagaaaaaaaaaaaaatataaataataaaaaaaaaaaataaaaaaaaaaaaaaaaaaaaaaaaaaaataaaaaataaaaaaaaaaaaaagaaaaaaagaaaaagaaaagagaagaaaaaagagaaaaagaaaaaaaa

SEQ ID NO: 57598 - DNA, 372 bp, Arabidopsis thaliana landsberg
aacaaaaaaaaggggaggatgaaggaggaaaaaaacggcgcaccccacaccaaaaggaggggaaagcaagggaggagaacagaagaccaaacggcccaggaccaacggcaggccaaaacagagagaaaaaagacagaaagggggagcagcacaatgaggagaaagaggagccaaagcacaaagcaaacaggccagaaaaacagcggaggagaaggagcggaaagccaaaaaagggcgcaggaaagcccaaccaccacaaggacgaacgagcaggagcccagaaagaacaaaaggccggacaacaaaccaaaaagaggaggagcaagaacagaaaagaaagggcaaaagccggaaaggacaagaaacagagac

SEQ ID NO: 57599 - DNA, 459 bp, Arabidopsis thaliana landsberg
  unsure (1)..(459): unsure at all n locations
aggggaaaaaacccgatttaataccgcccacgacaggaacccggaagagggggggcaacaggcgganaaccgaccgcacaccggaaaaaaagaagggaggaccgaaccccaaagcaaaaaccagacaaaaaaagaagacacggnccacacgccaanagcccggcacaacgccaacaagggcaaggccaaacgagagacgacagcccaaaacgcaaaacngaaagcccacgcgacgagagagcanccaaaccaaaacgcagaaaagcaccggaggagcagcaaccggcacccggaagaacagcagaacaagccaagagagccaaaaacgccaggccaaganncaaccccgacaagcaaagacacacgcacgaggcaccgncggaaaagacaaaacccaaaaaaagggcacaaaagaaggcccagccaccaaggaacagacaaaagggaacacgagagaac

SEQ ID NO: 57600 - DNA, 611 bp, Arabidopsis thaliana landsberg
tttaaaactagacacacaaaggggaattattgaatcgattaattccatatcctatgatccaccgaatctattttcatgtctacataaaaacatctatataatatattaggacccatcatgtccggtataggctaatgttacattatccaaagaagaaagaaatgaaaatttgtgtttgttgtatataaggaaaccttgcatccaaaatcaaatcatgaagttaggctaactttttagctgtcaatgattgcaatttgctcctttgatagccttctaacataatacggtagaccaaaggcgtgtttctgattttaaaacgatactatcataatatctacaccgtattgttaaacgattgtataacataatatctccaccgtatttttttgtataatttctagggttgtcaccttccaccgaattatttttattttgcatctccaaaggtattaaaatcttaataaattcaatttgggttgatatgttccacttgaaatagatactaattagtagttaaataaaggtgggttgaataaagaagctgcccactgaaaccgaaaagactagtggattttttttggttaaattttaacctcgtaattgggaagtta

SEQ ID NO: 57601 - DNA, 881 bp, Arabidopsis thaliana landsberg
tatattgctacggaagcagaaaccaaattagcattttttatttctctaagatatacttagcagttaacattgtataaaatattttcctggtaatactaataccttcacacattccaaaattgtaactctgtgcctttgcactgcttgatcatcgaaagtgatagctttcatcagcatgtttaatgcaacatatctgagagaacgaaagtatgaatttcataagggaatgcagcgtttttgagagaaacgaaatcaagattagaaaaggcaacgctggttagtcagaagagcattgtgtgcttcatagagttaagcacatccaaagaaagatgatagacagaagaaaaatacaagtaagctagttcctttacaaacatatataataccatactattatcaaataaaattgaggtgtagggggttgaacctgatgttattgtcgcggttagataagaatcttcccaagatattgatagcaagcacacgcaagctattggtgtcttcaatggccatgattgtttcaacacactcatagagtaccgcattccctgcgtttttgtttgattcagtttttgttgccacctacaatagcatgaaaccaacgagaataaatatcaaagaaccaggataacaaagtatctcgacagtagatccctgactttgaactcaaaagatttccaaaacaaagcatgtaacagacgcaggatgcattcatcatggtgagatagaaaaggattggcgcagcctacagatttatatgtccgtccacaaatcaacacttactatgacaacaaagaccggtatcaaaaaagggagaattcaagtacgggaaaaactcagtaaccaataagtcttctatctaccaaagaggatatagccca

SEQ ID NO: 57602 - DNA, 357 bp, Arabidopsis thaliana landsberg
ccgcgagacctacgatcgaccaaatctatttattgataataattacttaaagagcggggggaagcaagccccactcctagcactgcagcggagccctcgctaggaaagactgcttagggtggacagaatcggctgaaagacaaagcgggtggttggtagcccacatgagaccgaagtttccgggacactaagaaatcagatctacgagcgataccactgaaaaactgacactgggatagaaacaagcatttgtagttacgtggactctattgtgctactctaatcgagtttgtgaagaagaggctttataaaagagtggtgggtacggcacgacggacacagatgctcatgcaacga

SEQ ID NO: 57603 - DNA, 899 bp, Arabidopsis thaliana landsberg
ttaggctttcaattaatggggcctgtggttcaatgaaattgtttgatggattcacaccaaaaaaaatgaaattgtttgatggaaaaaaataaatttagttgtgtatagttcgttaaattttaccttcttctttttttttgagaaagaagtttagtatttacttacagaacataaaatatatgcaaatccaacaaattcagtgggccgttgctggacttttaagcatttgataattatatgggccttacagttattataactgtctctcccataactaaaagtaaaaaccgatttgactcccggaccgatacattcccgccgccgtcgcaacgttccactcgccgtcgcagcaaacagttcatctatggctacatcaggacgctcccacggctctaccacggcggctttagcctttacactcgccgtagtatctgtatccgctgccttctcgcgtaatctctttctctctacctctctgtcacttcctcttcccaatacctgttattgagctggtttcgagaaactaacactttattgagcatgttcttgcgaagtgtatagatggcgaagacgagaagaagatttggagaataggatcaaggaatttgagaagtctttgggatctaccttggaaaaaagtgcttctgagagaaaaggtcgagtcaaagctcagcaggtgagttttttttttaacttgtactagtctctgaaatataggaatttagattcaaatcattcaaatgcacatcaaaattgatacttgtcaagattggaggaaatctctatggatttatgttcactctcttgatgcaattgaaagctgtaggctttacgggaggcgttagcacagactgagtcacatgatttacacagcacaatatacccgatgcgacctattg

SEQ ID NO: 57604 - DNA, 460 bp, Arabidopsis thaliana landsberg
  unsure (1)..(460): unsure at all n locations
cggatccagaaaccgagatgtttattttttttctctcgccacccgaaaatgtggtgttatgggttattgtagtataagataatgtcccaccacgctggacgaggctggcattccaggactcaacgtaggcaaaagaataagataaaacacaggtaaccagaatgactgaatctgttgccggctgatcccgcgacacgcaataaatgatctccgtcatcagcgcacttcactgtgcggtacacatacaaatatacaatacatgagcgactcgggggggcctagctcatcgactagaactcccatcgtcaacgcattcacccacgacgactgcaaggaggtcactggtcacctttcgaacgccactcgactgactacactatgtatagaaagaagtacactgcacagcaaaccatgcatactacagnnnnnnnnnnnnnnnnnnnnnnnnnnnnnatctgaa

SEQ ID NO: 57605 - DNA, 930 bp, Arabidopsis thaliana landsberg
aatggtcgagacatgttttccttaatgtccaattttcttaacgatctgacttgtgttgtctcagtcaaagatcttgattctacgaagtgaaaacatgagttatcgccctgttttctttagaaaggttagttaaactaacaagacacagttcacctttgtccatacactggttacatgatcggcaagcttgagtcttggttgagttttgacaggaggacttggaaaaatctctaatacgagcgtccagccaacagaaccgacttaaccctgctctgaaaccaggcgatattcaggttccttgttatttaactttagtctccctatttcttgtcaatccataattctgtcatctcatattgacattcatgattttgtatttcaaaggttgcagttttcgaagatattgtcaagggaatgagggtaaacaatcaaacatgattctgtaatgcattttcctttaagaatgattggttttgctgaacctgttttcccgggcgaaattgcaggaaagcacgacgtcaaactgggacgacattgtgtttataccgcctggttttgaggtttcaactgagcaaacacaggagtaagtgaaatccttggagcatcgtaaaacctcaacacaatgcttctcccttttcatattcctatctcatcattcaacaacttgatgaacacagcgagttggaaatagcgttgatgatgttaactccattaacatccttctccagtctctgctttttctatgtcgtcttatgagttttttagtgacatcttcgctttatgtttactattagtactagaagagtagcttgtactaatagtctaatattactgtcatgtcttaacatttaagttaatctttgttaatttgcatccgtgacctaagtgggaaagtgggaaagtgggaaagtgggagagtgtaaagtgaaa

SEQ ID NO: 57606 - DNA, 839 bp, Arabidopsis thaliana landsberg
atgttattagttatgttatatacatctaaaaactaaaacttaaaagagtgtgctttctgaaaatttcccaaaacttatcatacttaggggaaaaggcttgtcatactttgaccaataagcttaccaaacatgtacatcaagttactttcataatccgagtttatccattggaaacgggaaaatcaggttaaacaaatgtgaaacaacttgattaaagaattaactaaaatagataaaaacaaaacatataaatcgagaatgctcttatttcaccgttaatttttgtatctagccacattcatcttaaaacttgttttggttttatatgtacaatcaaatgtaaagatattttgtaagtatttcgcatatacttttttgtgaaataagttatcaaatcagttaatatgaactgtttagatcgttgtttttgtttgttaaaaaaataattgtgttagatcgttacataatcttttgtagcttatgaggtatttattaccgaacaatgaagtcgtaatattgaagccttgaaggtaacaaaaagtaaaatatactccaaatttaaattgagttacaaaaagaaaaaggaacttcgtgggtttaggtaaaatacaaaccaacccaatgagtttaatttccttttcttttttctttatgtaggatttgcacaacactactgttttatgagagaaagagagccaaacaaccactgctaaaattcaatgaaatcccatagtagctttgaaggcaggagcatccggaggcggtgaaggcaacaccgtcaacgccaatacaccacttaccgctgccgcaatcgctcctaacacaaatgcttgaatgtt

SEQ ID NO: 57607 - DNA, 919 bp, Arabidopsis thaliana landsberg
tttcgcaaaaagtgctaaggtactattcaataaaaaatactaattctaacaaacaaggaaaaaattgatctcaagttggtctacgtgaataaatatgtacaagattcatggtcaactaaacatatttatggacaaaaatagacgtaagccttcccctgtagtaagcatcaacattacttttttggtttagacagtaattttcccttttgttgttgtagttgttctagttactaacagcaccatcaagacacagaacacatgcacaaataaagcatattaacaaaatttcttgttcaactaccgctgacgaggctcattctcctcaagccaaagccacttatgaattatgattaatgataaacaattttcacattgtctcaaagtaaagcattcagagtatactcatttcagttttacaccaaaaaaaataaaaattgtggaatacaactacaaataaaatcaagaacacataaactgaccttgttccttttggtcatcttgaaccgaccgcacaacagtcccaacaattcttctgaagaaagagctacgtttctgattctgggagaaaaaaagcatcagattattagctcccaaaatcatcactgaaaatatggcatattgtttaactaaaaactattagacagaagtttgagataacagcaatgaaaataagaactcaggtacccactcagaaaaggacgtgcagctgagcaaggaaccaagaccatggattgtttgctcgagaccgacaataatctctccggtcttaaataaattatccatagttttggttccatttacagcatcattattttatcagtctaatgtaaatatattgatgcatccctgaataaatacattcattttttctggttgtttactaatgcgaagaaaagtgtcaggatacagtcagttcaga

SEQ ID NO: 57608 - DNA, 399 bp, Arabidopsis thaliana landsberg
  unsure (1)..(399): unsure at all n locations
cgccaccggaggggggccaaacaaggccgacgcccatatgaataatggccgacccggaaaccnanancggggggccaaagacagggagaccaaagaaacccaaccccaggagaggggggggccgaaggagaacagacagggcaggggggngaagngangggcgcaaacancgcggcaggaanaaagagnaagaagaaaangcacacgccaaacggaggagngggcaaaggaacgcgnagggggcgaaggaaggaaaanaggaaggacaagcccaaacgcggggaaaggaaagaganacnnacgncgcaacagaaacgcggccaggaacacccaacagggcancaagaaagccaancacagacggacaggggaagccgccgacgcaggcaacaccggacc

SEQ ID NO: 57609 - DNA, 1443 bp, Arabidopsis thaliana landsberg
tgtgatgcgtatgagggcgaaggttttccgccgcccaaataaaattgctacgaccaattctcggtttaacggcatgtatacatagatgttggattgaactcttagagattcaaatttacaatcggttttctaattaattacgcttccaactacgtttttgatctgtcttattcaaaaatcagatagggtgtttagacacttcgctacggctccttggtttttaaaacctttaaaggctaaacctgaaactcaagtggttttgtccatatctctcagctcaacatatttataactattatgtgtttggtataaagcatgcacatattttatagagaatttgcatgttaacgcatctctatttgtagagtccgtagatatttaatgtatattatgttatcttcataaaaatagtgtgatcaaaaggtataaaagtagttgtatatgtagaaaggacaaagggtgtttaatctcaacaagcacgatttttctttaactacaagaaatgaaccaacctttagccaattgggtctgactcatgttcaagaaactttaaaagttactttaatttctttcatttaatcatttttgtcattagttttattaaaaaaatattagtgcacctattccacgatcgatcgagatctaggatcctaaggagagatgaccaaattttatgctcgagtaaacccgtttcctttagatgatcatgattaaaaccatagtcgatgtaaaatcatcagtgagcaataaatacgaaaattgatgtttgatattcagcgatgaacattttcgacttgggatgtctttttgtatgccaaaaaataaaagaaaataagaaatgcactagactgaagaagactagtaacgtaatgacgtggagataagttaggtcatagtgtaacatgtgtacataccatcatcgtctacaacaaacgttatatttcttaatttcaccttttaccaaaaaacaaacgttatattctgttatcatctctgtgacatgttccaaaaccatctaatctaagtcttgtctcctttatctacatatacggacaattagatatcacatgttcgaatatacaggcactgtgggacaaaattcaaaaaaatgtgtctaaaaggggacaagaggtcattaaccttaatttaaattacggccaaacgattagaaactaaataaatatggggccgaaatgaaaattctaaattatctcacaaagaggggcacagaagagaacactaataagccataaagagagatccaaaggagaaacgaaaagcattaaaatttaactcatatgaaatcagcgaaaaccaaccaaaaagaaaaagcggcccttgtaatacaaaggggcaaatcgcggaacaaagattcgaaatagcaaaaggagcttcagaataaaaatatggggaacaagggccataaaaaaaaaaaaaaacatc

SEQ ID NO: 57610 - DNA, 350 bp, Arabidopsis thaliana landsberg
ctattgctctctttaaaactacacacataaaactgggctagtgacactttctatgcctaaatccattcatccaaaactgaaaatacattatgattactgctactcttatacttaataaaccgacatgcttgtaatcatgaacgcacttaaaacaaccttaccatatccaagtgcttactctaaacctcatgccagaaaaccaaccatatacacactaatgatcttacacaaaagattagatcaaaaacacacaattcagaacacacaaacgctaacataactgttataaactcggaagcacactgaagcattcattttatgcacccaatatgtctagaaaaaaaacaaca

SEQ ID NO: 57611 - DNA, 1067 bp, Arabidopsis thaliana landsberg
tctctgaaaaccatattcactgagagaaaatgcttttttgtcttctattgtgtgcagttttacacttttgggaatccgtcggttgtactgtatatcaaaaaccttgccaaagatgttgttatcgatgatttctattacatatttggtaagaattagctctgctagtcaaaatcacaatcttgtacaatctagagtcgttaatttacaagttgttacctgcttacaccttacctttggggaagtcaattcatagctaaatattagcattcatgtagggtcacagtttgaaagcagcgaagtagctaaatcaagtcttggtgtgaggctaatgcaggtgatgcatctgtaaccttaaacttccctttgattattatcaatctttgatggaatgagtgaatgaaataatattacaggaaggaaggatgagagggcaagcttttttgacatttccgtctgttgaagtcgcacatcgtgctctggttagcatcctttaaacaacaacaacaacttcttgttctgcataaatgtctgaatactgtggaagaaattatcattgacaagtattcgtgttgtgcctgagctgaaggtaataagaaaaaagtgtgactgatatgttctttgtgattttgcagaatcttgtaaatggttttgtgttcaaaggcaaaccaatgataatccagtttggcaggactcctggagcagccaagccaaacgaatgatgatgatatatataacatcaacggtttttgaagagtaggtgcaaattctttttgtgtatcatcatgtaactctttgactctcagtttaaagtcaataaaatatatcgctgcctaattatatcaatgagcagttgaaatcaattcttgctagatttgtgttcaaacaaactatgttcttgttctcttcacgtagaatcacctctctacgctcttacaccataatcaaacattcaagttgttattcgactttggtttctgatggtaacatcttctcgattcaacacttttaatctcttatgcaaaaatatgaatcaaaccttagaatcatccaccagctccattcacact

SEQ ID NO: 57612 - DNA, 1327 bp, Arabidopsis thaliana landsberg
aaagttctggcttttagcctcctgaggaaaaatcaaggttgcaactttcagggtttcgatgtatcatccaacgagggagaggtgttcgcggtggtcgagatcgtaagtttcattataattcgttttggattttgcttctaattacaagatcctacataaaattctcaactgttagggttcctatgtattatccaacgttttcgttcttctctgctattttgatgattttttttgttggatctagtgtttgattgaattgtctataagcaatttgtgggagaagctgaaattcacaagaagctttgtcattctaattaacagatcgtttttggcaattagttttcaaatcaaagatgtagaacatgagctgctaatgatgagaactctattactaattgaatttgtttataaatgtgcagaattcagttgggatgaagtcaaggctgataaatatagggagaactatttgggtcacagtatcaaagcccctgttggaagatggcaaaaaggtactttttcttatgtacactctcggtggttgctaatttgtaagctaactagttttcatcttgacgatataatcctcctttgtgcttcattgctctgttcaatctcattggagtatgggcagtcaatggttgttttactttagttactcctttcataaatccactgccttagatttttgtagattaatcttcagtttagtgagttttgactgacattcatttgccatgtacaccaactgaataggtaaagatcttcattggtatgctagagataaaaagcaaaagggttccgagatggatgctatgaaagaagagattcaaagagttaaggaacaagaggagcaggccatgagggaggctcttggcttggcaccaaagtcctctacaaggccacaaggaaatcgccttgataagcaagagtttactgaacttgtgaagaggggttcgacagcagaggacttaggtgcagggaatgctgatgctgtgtgggttcacggtcttggatatgctaagtaagttctttttctttcgtaaaaaactctaatttttaactatgttaatgtttttggtggctttatggtttattggtagtttacctttgtcccttgtctcacatgtctttctccaactctgtacagagcaccacgaccttgggaagatccgagcacccttgcatcctcttagaaagaagatgcagattcagcacgcttaccagcagatacatcaagggtcaaaacctgtgaagatggaccggatgatgttgagagggacccaaaaaggataggcgtgaggaaaggaaaccctgcaagagagagaag

SEQ ID NO: 57613 - DNA, 223 bp, Arabidopsis thaliana landsberg
  unsure (1)..(223): unsure at all n locations
acacaaggcagacaaaaaaaaggggaaaccccaaaaaaaaccaggcacaacangnaggggaggcaannaccaannnaccacagaaacgaggangcnnggaaacgngangccncaagacacccagaacgaagacaggagaaacccnggcnacgaaaccaaccaccgagaaaaagccaagaacaagccccggggacgggaacaaccgagccancgggccaagagg

SEQ ID NO: 57614 - DNA, 1084 bp, Arabidopsis thaliana landsberg
tacaatactactattgttttgaagaatttttcatttttaacaaacattttagttttttttacaaaaaattataatctaagcaaaatgtgtttacatatgggtctatctatgggaaaatacattatcaactatttattcatagctaatgaaatgtaattttgatttagccaaaacatcattttaattaaaatttgaatggttacaacataaaattttgaccaaaatttatgtgacatatatatttttattctctctaatgatgcatactaaaatttatgaacgatgaatgtaaaatacaaattgatttgctccttcatgaaaaataaatttaaccaaaaaaaaaagaagaaatctctaattattgacaactcatgagagtccgaacataaaaataatattcaaaatataggttcatgaaagatttagattactctatttttggaaataaatatggtttgaacttttttttacatataagttgaatcgtttttaagttagatacaattaaattcagaataaacaattttaaagttctaaagatttaagtgtaaatttgtttccccagtaattattgtatatatgtttttctcaaactcttatgagtgtatataattagattttaaatcaattcttaaaatataaaacaagctaatctcattatcataccatatttttggcttaaggtcattttgaagattaataacatgtctattttatcgcgttgtgtccgatccagaaggtaaacatcgaatttagggtttttctctcccccgagcttgcttttccgttgggtgaacgactaccgttgattttcttcgtttttttggataccgattcgattctctctcaccgatttttgaggttctttctctatatcctctcgttttttgtttccgcctacgtttatctctcgatttcgagctgtatcaactagctagggttccttaattggtttatttcgtttgaggtgatactcctttcttcttctgtttgcgtgatacgattctaataagcaagcttcgcttggcgttccctggctgggttctctttgtttctcttcgtcgtggtagattaatatcggatt

SEQ ID NO: 57615 - DNA, 1413 bp, Arabidopsis thaliana landsberg
atatttgatagtttataagctacatactgaatttgaatacaataataattataccttataaattacaatatctagccaagcaattattgtcggcagcccataacttgtttgcttaattcgctttgttattatttatctcttatagataacaaaaagaaatttaagtatctaccttcatacagagtgtgggataggttgtgcacaacgtgaccaaacacgtcgtttctcaaattttaaaaattgcaagtcaaagtacaaatcctgacaaagagaaatcgtttccatatcaattatgactttacggaaacattgagacttgtattcaagctaagtctccgatttaacactaattaatgtagtataaatatacaactgccgtacaagccaatttgacagtttattgtcaaagcctgaaaaatattgttccgtctaattatcaataaagacaatttatacgtaccaaaaaaggttcggagagtggggttataatttagaaatgatatagacagtaggagaaacaagaaaaaaacaactggataataaagattggcaccatctaaacaaaagagagatttttttgtcgctaagattttgtggtcacaaacttcggtctaagctgaacgaatggcttttgatttaggctttcagggccgagtggaataactatgttgcattgtgtttgaagagatgttctcaactattcggcttgatcaaaggacgaacaaaagaatatacaatttagagaatattctgaggtagtgagctttgaatgtagagttgtaggaataaatatcattagggttaaaagaacagacgatagtttagttgattccttggctaaaaaggcaaagacactagtgatattgttgatgcacaaactgatttgaataatttgtaatatatgtacacttttcaccagaaaattaaggtgatgaatggcagtttaattagtggttgacgagttaatctcacgagttaatcgataatgattcgtactttctcactgcaatttcgattttagtaggtcattataacttctgaatttagtatagatttcaatacaaaaaggctcggttatcagccagaaggcaattttctttttggccataatatcacttctgttttgacaacagataataataatatcacttctcacatatttaacatcatttagtaaaactagctagcttttgaatattccatgactatcatgtaaaagatgattaggtatttttgaatccccatattctactattcatcaccgaattggtgtatgcatatttatagtatacatctcttgtatgagctaaacaaattatatgtacgcattaatgatgtacaaagatcagatgtgtacataaaggagattgtagtacagagactagagaggatgggaccggacgttgtcatgaa

SEQ ID NO: 57616 - DNA, 543 bp, Arabidopsis thaliana landsberg
  unsure (1)..(543): unsure at all n locations
ggtcagaccgnggaaagtgaatatctacttgtctgtttcactttagatgtttacagagaaatcaaccctaaaacggagggtctacttaccatttttttttgcatatatagtcctagcgattaatttcttttataactagatagacatagtcacatagatagtctttaaaaaattttggattcatttatatacaaagattagagatagatgatataaaaaaaaccactagctattcaagttaatccattacgtgtgctggtttatctggtttccgctctttgattggctatcgattagataaatacttaaaacaaattactcttttgtgtttccgttctttggctcacatcgattagagatatttagatagatacttaaaacatatttaacattttgattgtttgtttcttgtatacttttgttatgaagtgttgcatttgaaggttacaattgagggcaattactctgtaagaccggcgagccaaataattgcctgtgattatagataagagcaaaatttggtaaaccccaaaataaatatca

SEQ ID NO: 57617 - DNA, 1212 bp, Arabidopsis thaliana landsberg
gtatggtattgtcattgtctcgtgacctagagatttcatttcaggtattcttcaatatctatctttgagagactcacacatgtttggaagtatgtagaaaccataaactattgtgaatgaaaagttagctattagctaagcagcatgtagcaaaaatcgccagatgtaaagtttattataattatttacatctgaaagaggaaaactctggacagcaaaaggtaaatttgtctttctttatttttatctttacttgattaggttatttttacaaaatatgggtaaccttatcttagatataaaaagaaaggatataatacttacacacacgttttgaaattgaattggattgtaaatatctttctaaatttgcttataatatattttcatgatatgacatcaaagtctttgaaattgcaactgcacgtgttaattttatacctcattgttagaaaaccatactttttaactttaacctttaccttcctataaacttgaaagtgattcttaatgggacatcactacaggccttagcacttaggaggagttgtgttgcattttttcgacatcaaaattattacaagattttgcttatggactctgtacagtcatcagttttttttggtggttacttttcttcttccagaaatttttatctcgttttcaccgcatttatcttttctttttggagtaaaacttcatcttggaatttagcagataagagtcttcttgactcatcttatggaaaattagaatgataaacttggatttaggaatcattattgttttatgtaataattaggttttacaaggagtgggagtagtcaaatgcctttggatacttgatgagattaaacaataaagtaataaaactaaacttgtttgttttaaaaagaaatatcagaatcaatttcataggacttccactacaaagcttttaagtgttggatctgatatgtgatgtgaaactaaaaaattatccatatttcttcatatgtatcctttttctcacttttacaaataattagtgattatgtgtcagataaaattatgaatttactagatttgatatgtactttttgttccaaaaacatgtatttttgcatttatcgaaactaaaaagggatgcatcacctgattctaaagaaaggggatgtgtttgcaatgtaccaattaggcatcggatttaccttcccccagatgccataactt

SEQ ID NO: 57618 - DNA, 118 bp, Arabidopsis thaliana landsberg
  unsure (1)..(118): unsure at all n locations
ccaaaccagaaaagggagggggcgggaaaagaagaaaaaaagacgagaagaagacaaaagaaggccagccaacacaaanacaaagagcaacaaaggagagaaanacagcacaaagaaa

SEQ ID NO: 57619 - DNA, 253 bp, Arabidopsis thaliana landsberg
  unsure (1)..(253): unsure at all n locations
ccgaaggccgacccacanaangagggggggctcccaaaggcacaccaccccggccaaacccgaacggcggaagcgacgaacggaccgccccgaaaaanaaanaccaccgagcggcgggaagaaacccccgcagacgacnaaaanacgcgacggggnanngaaagaggcagagnggccnngcngccacganccacngagaagcagcccnnngncgcaaagaaacgacccnccccgaaagcacgccaaaaaaaac

SEQ ID NO: 57620 - DNA, 953 bp, Arabidopsis thaliana landsberg
tctatgaaccacgttgcggtctattacaactttatatgcgatatggtccattccggaacaaactatgtccctcacatcatgtacgtagataacctagccgaagatctaacaaaaaaaatctagccaagtccggattcattcctctagttcaagattggactcgcttccgagttccgaccacacatcttgagagagagtatagctctttgtatgtatcctctttctcattcaattgaatttatatatacacaagagaaaaactctttacaataagtcacattattgttttttcttagtttcatccttaaatattcaccctctacataattcatccaaatatgtgcatagaaataaggtcttagagtataaattttaaatattaaacaaggccataatatttgtgagccggccttgtttttgacgattgagattgacgtttgagctagtcattggagattgctatattacaactaagaatttgagaaaaaaagtcgaaaaactaagaaattgaaaccaaattacattaggagtaatggtagggacagtaaatctacacttttggtcggcagcatgtgactcttttatacagtggccgctgctcaacataccaaaccccaattactataaatacctcactgagtctttccatttttattcatcaagtacttaaacacaatggtttctctcaaagctttctcaactgtgttttttcttatactcggcgttagcatttgctacgccactagccgcaatcttttgaactacggccaagcttctggcggtggaggacatggtggtggtggaggttctggaggagtgagtagtggaggttatggaggagagagtggtggtggttatggcggcggtagtggagaaggagctggtggaggatatggaggtgctgaagggtatgctagtggtggcggtagtggtcacggttgaggtggtagtgg

SEQ ID NO: 57621 - DNA, 233 bp, Arabidopsis thaliana landsberg
tatcgcccttgaccacggcgcggcggagatggcacacgagggtgaggaatcccgggggctccgtcgaccaatcgtgcacgtcgaggccaccgacaccttcctcgcggtccgtggagacttctagacacgacgttagggcagtggcaacggggagcatgaggtttgccgaccggccttaattcttagccggtggcggacctaaacttaattggaattttccccctttcttggcc

SEQ ID NO: 57622 - DNA, 133 bp, Arabidopsis thaliana landsberg
  unsure (1)..(133): unsure at all n locations
gagcgagcngcngagacaaacgaacggacccgacgaggcgcgacncagncacagagaganncggggggncanggaccgagncgaccaaccanaacganncagagcnancnagagaggagcnncaaagacgcaa

SEQ ID NO: 57623 - DNA, 346 bp, Arabidopsis thaliana landsberg
cggtttccaactcctcatcttccctttgcctcccgcgctgagacctgtaaacgtcgacacatgcctgggtgctcgttgtcttgcaactcccctgctgcgctcgggcaacggtcctcgttctggcaccggccgcgccgagcttgggaccctgctcgctggcttactgctcactccagtcgcgaccgccgttaaatcgccaaactgccccgcacctcgggtcctgcccgcttggtgtgccttatggcctgttggtaggctagccagtcggcggcagcaccgaagtccatagcagcagactggcggtagagacctcgctgaaccgcgcccctgctcgatgtcggtgatg

SEQ ID NO: 57624 - DNA, 940 bp, Arabidopsis thaliana landsberg
aaatgaaaagtagatgaaggtaatcatcgccaatttgcaaagggagttacacgaaatggacatccaatagatctggacgtgcaatgaacttgtgggtcaagttaaggaagcccaggctggtgcaaaaatctttgcggaagatcttcaatctgcaagtgcccggatgcgtgatatgcaagaccagctgggtattttggttcgggaacgggattctatgaaggagagagtaaaagagctgctagcagggcaggcgtcacactcagaattacaggagaaggtcacatctcttagtgatctactagctgcgaaagacctaggtcagtttttctcttttacccttttgtttttgcaccgccacatatatagctgatacctaattgcttcctgcagaaattgaggccttaatgcaagcgcttgacgaggaagagtctcagatggaggatctgaaactcagagttacagaattagaacaggaagtgcaacagaagaacctagacttgcagaaagctgaagcttctcgtgggaagatttccaaaaagctatcaattactgtggataaattcgatgagctccatcacctctctgaaaatcttcttgctgaaatcgagaaacttcaacagcaagtgcaagatcgggatacagaggtttctttcttaagacaagaagtcactaggtgcaccaatgaggctcttgctgcttctcagatgggcactaagagagattcagaagagatccaaactgtactgtcttggttcgacacgatagcttcactacttggtatagaagattcgctgtccactgatgctaatagttatataaaccactacatggagacatttgagaaaaggatagcgtctatgctatctgaaatagacgaattacggttggttggacaaagcaaggacgttttgcttgaaggcgagaggagtagagtggctgc

SEQ ID NO: 57625 - DNA, 108 bp, Arabidopsis thaliana landsberg
tgaagctggtcggtccgttcatgacttcaatatctatcttattagcttatgtctgcttaatttttttacatactcatatacctctatcattcaaatacttcgatagcg

SEQ ID NO: 57626 - DNA, 1432 bp, Arabidopsis thaliana landsberg
tcattttctttttacttgtccatcttatgaatgtatagtttatttgatttttattttctttttaattattatacttgattgctttccaaatcaaatgcgtccaactttttttgctatattagacacgtagacacacaacttcacacatacagtatatatatagagatgatatttacatgtcacatatattacaaataccctcattttgtttaagatattaaaagaacttcaaatccttttctttttccaaccaaatcctattatatcatcaaaaaaatgagtaaactcaccaatgttgtcatcttcattgtcttcttcctaggtttgttttacatttccattctctaactatattataaatgaccattaacaaattaatcaaataaattttcacgtttttatgccttgtatattgaaatttgatgtttaaaaatattgttttagggatgatggcgaaagaaacgcaaggacaacatatatgtcatcagattctgttaaacaacaattgtgatggaggcacatgcacaagtctatgtgacaagcaattgcacggaactggccagtgctataaaaccgttgacaaaagatttatttgcgtctgcaattatctatgcagaacttgatgatatgattgattagctttggtcttatctactatataaacgatcatcaacaataaataataaaataaaatagcaaaagtttcttgcaatcttttctaatcttaattacatgcatgtaaaaaattgcatgttaaatgtccatcgatttccagaaactattgtttgtttgttattttactttgaaaaatgcatcactccaaattcaatacatccaacaaaaaaaaaaaaatcaaattaaagtcttaaggtttttactttttttttttttattgacactcatccaaatatcaccaattactagcaagcaatagatttaatgatataatcacacttttttttaatcaacttaatctagtgttaaataatttacttttgttattttaatgttgtacaaaactgtgggccggccgtggcaatggcatattcgaaatttggtatttgtcttgtatccgtaaaccttaacaagtgttttattttgttgtcttgtgaaagtgaaagagagagtatatatagtttggctctgtcgtaatgcacagattgaactacagaaaatggcgccttcctttgaaaccgtttggtagttgtattcacagctatgctgatagaacgaagcttcactcgaatctgttgttgggagatttgtctaaatctggtcgcgtcgatgaagcccgccaaatgttcgataaaatgcctgagagggatgagtttacctggaatactatgatcgttgcttactcgaattcaaggcgactttctgatgcggaaaagctttttcgtagcaacccagtgaagatacaatctcctggaat

SEQ ID NO: 57627 - DNA, 1299 bp, Arabidopsis thaliana landsberg
ttctttgttatctctatgatcttgtgattgtgatcactctttagctctatcaagtcttcacttcatttaatgatcatggagttgacctttgtacatgcatcattatcgagttgcaatgaatctgcaaatgtagaaaactttcagcaaataaatgaagaaccttttgaatctgtaaatttaagggagttaggtagctctactcacgatcgatggaagtaaggaggctactatttgcagcatcaaaaacatcaagagaggatgaaacagcggtcgagaattgagagcgtaggttctcattggcatccatgccacctctgttgagagattgaagtgataagtgacttgagacatatgacagacgatgaaaaaaagagaaatggtttgcggagatcaaacctaacgatggagtcaacagaagccacattgtttcgttctagactgacaagtgattcttgagctttcctccattgatgtgcactcatctcggtcttctccaaactacaattatccatttcgaaaggtcaagcaaatgcatgaaaaaagctcggcgcgtgggattatatatgttatgaagttttgtagactgtgagatttttatttataccagtttaagagaacttcttgcatagctttcttcccgctctcaactgctgaagtgtcctcgtggtggcttgattctgttttctccatgtgaatgctccactctgctttaatggaagaagttgaatcttgcattgttgacatctcatgctgtagggtagtagttctggtggatgcgctctcgcgtagatcgtgtacagtcatttggacctacgaaaagattgaagagtttgcttaaagacttaaatcaaattcagttcctaagaactaacatgcagaattgcatacgtacaaggtttttcttcctagcattagaatttgcaagaagctctgctactttctctagcaattgtctctcttcatttgcagcacattcctacaagacagatgaaacagcattagagtctacacaaggcacttgcagctgcgcatgtgtcaagaagccaagaaccagaatcacctcaaacttgttttcaaattcgctcaatttcttgtggttaactgtctgtgcctcttctactatcccggttaatttggtagcatgtgtgtctagagtcttgaagaattctactgttacttttgaaactgaccttgctgtatccacagctcgcgagtgtgcctgcagataataatggttcaacagaaatgtccgatatttatgttgtaacatttatgatcatcaaagattattgaaccttc

SEQ ID NO: 57628 - DNA, 1700 bp, Arabidopsis thaliana landsberg
  unsure (1)..(1700): unsure at all n locations
aatccaggtaattgatcaatatgatatatatgtttttttggtctttaataaatcaaaacctcattataccttgtcatttgtcagttaaagattttcctaattttaaaacaaatcaactaaaggtttaataggggtataagactttagatggtagctagaattaattagcctggtaattcaccactaactaatttaatgaattttcatttctattattttttgtctttaactcggagttaataatcaagaccgtcagagaaagtaccaatcactgtagtagtgtaaattaaagaagttaaaatcatccattaaggtaaagccacgtgttaatctaatcacgacaaaacaaatccaaccgtacgattgattagagtaagctaaaacttgtacctctcaagtctcaaccgccgactctaaaaatctctctcgtgaccgcttttaaatacaacgaaagctttacataacttccccacattctctctaacacacacacacattctctctctctttcattagataatggatcaaaaaagtaaaacgattggagaacaatggtggaggtcaaatccaacgtttaaaccgcctgaaacgccattagattctatggagtttttgtcacgtacttggagtgcttccgctactgaagtttcaagagctgtcgtcgcgtctccaccgacttctcaaccgccgcaaatgcgtttctcggagatccaaaacggttcttctgacgtcactttggtgccggaagatgaagaaaacggcatcgttcttggaaatactttttcttttgcttcttcagaaacttctttaatggtcatggaacgtatcatggctcagtcagtaagtaatctaaagatatatacgtatttatatttaggaagaaataaatcaaagttttattacttattttccaaatgacagttttagtaatcttactaacaaatattgtcacgttgaatcataatttttgtctatgttactatgtattaagatagtgaaaatcattaacttttttttttcggattttaatttgttttgttttttgtgctagccggagatttcatcgccacgaacatcagggagactttctcatagctcattcaccgacagttctccgatctctccctccgacatcgacgactttaaggtcagttttattcttgaactggttttagaaaatactaaacaggagctaaaaaatcttgtgggaaaaaataaattatttgaaatatttcttaattagtaattgatcagtccctttctttatcagtggattattctgacttctgatcctctggtttgttaaaagttacactagtgtgatagaattaagattaggtgggttaaatctatgagatgaataaaaaagctgggtctataatctaaattaaaaaaaacacgttgacaaaacgaaaaggctgtctaagtaagtagaagcagtagagtaagaaaaacagagaggaaacacaaaactcaggctttctcttcttcccaagcctctgtcacttactatcagtttagcagtatttgtctcttatccatttatttttaatttctatttttgtatttatgttattaatttcattagagaaacgcattcgatttagtaattaatttaggaaaaagaatatagttgtgtttgtagcatttatgattttggacccaaatattgctggcttatattncacggtgctatctcc

SEQ ID NO: 57629 - DNA, 437 bp, Arabidopsis thaliana landsberg
  unsure (1)..(437): unsure at all n locations
tccagtttttattataggaacctttattatactccattcatgtcttgaaattttaaatttttaggtacttgttagatatttgtttaatattttgaaaatttggataaantttatatcataaattcctatatatagaattattgcttagttatacttatgatttctctttgaaagtaagaggtgaagtatatataccgtattttgagaatgattaccacaaattatgcaaatatcaatctttgtgaaaaaagtgtgtaagaatatatcanaaagtgtataaaaaatatataaagcacacaacgcatcaccaccgtaggattagttttgttccatatcaatggcttaattgtccaaacacataattaaaagcttataagaaggaggaagtgtgcaacaagaaaaaggaattggtaaaaagaaagtcaaagtcaactttt

SEQ ID NO: 57630 - DNA, 99 bp, Arabidopsis thaliana landsberg
acatattttaagcttaactttccagctagaaattctccaaaccgattaggccaaagggcgcaaatatacgttttagtcatctattggtaaaacctttgc

SEQ ID NO: 57631 - DNA, 790 bp, Arabidopsis thaliana landsberg
gttttatgggcagttgcaaagtttcacttctaattcccaagacaattaagttgcacaaaaagcattgaatatccgaatattcaagattaattcatacatgtacattttcgcaaaatacaaactctttaatccccttctttttctctctctctctctctacctatatgatatcactttctatattccaatttcactttcaaattaatattctttcctttggaaggtaaaagcccacgaaactttcacatccatgtgaccatgtctaagcttctcgagaccctagaagaagaaaagacagtagagcagaaacccagaagccaagaagaagaagatcatcaagatagctcgaagaaagaagagttgttagaatctctgtgtactccaacttcaagtgatcacaagattccggaggtggagacgtgtcctccgccgccaagaaagcgaccgcgtgagatttctctcacaaagaagacaagattgtccaaagatcttcggttctttgaagccaccgacgtcgggagccaagaggtagagactttatttgttcacgaaccaaaccatgtccgtaagaaacgaaggagtaatagtgcctgaatcaaatttgattctgtagatatactcttctttctttacttgatttacacataattttcgatcacttttatatacctattttaataaatctttagtccgaattcggattttcttatgggattttaactctggttctgtacatgattttgtgtatatcgatccctctctttttttttgtaaaaatggtgggatatga

SEQ ID NO: 57632 - DNA, 127 bp, Arabidopsis thaliana landsberg
ccttccggctgtgacgacgccgtcacccacgtaggtgcagccttcctcgtcgtctgactggttgagcgggaagatcacgttggcggcgaacttgccggcctcctcgatgatcgagttcaccgtctcg

SEQ ID NO: 57633 - DNA, 278 bp, Arabidopsis thaliana landsberg
ttgcatatataacatttcatttcttgattactgtacttaacaaacctcaaaggatggaaagatcaattcatacataaacaagtacaaaagtctgcacttgtacctcatataattatcacaacaacaacaacaaaaagacacgcaaaaatcacacaaagaaaagatttatcacggaacaagagagtcatgtcgacttctttcacgatgatcggtggtgaaggtcctgagagttaccgactacattcaaaatatcaggatttttttttatacaaaatttg

SEQ ID NO: 57634 - DNA, 1029 bp, Arabidopsis thaliana landsberg
tttggatcctaataaataacttttatgcaaatagaaaggacacagctattgtgcttaggatggtaccctcatcgtcctatctttagacattaaaaataaaataccattgattttgaccttaggtatataatttagatatcgaacccgtggaggtcgcatttgcaacgtgaatccataacgatataccaacagataaaccatatctctaattgtcaatgaaatgtacaaacatatatcccttattctttcatcttagaacatatttttaggatctcttgaacggttgattttgtttgttgtgatcgaggatatgttgttaattgctatttgattgttggtgagtatggagtgttggtgggtaatgggtataagataggcgattaagatgcagagaacaaacctacctcggtctcattcgatatttgtgctcgttctttagattaaaacatagtcgcaacaacatataacaaaaaaaaatctgtaacaaaacaatgggtttgttttataatctaatgagtaaatgtacatgtatcaactaatcttactgaatgcccaattttagttcaacatgagttaaaacagattttaaaactaatataaaacgtctgtcatttcaaattctaatggttggatcgatttaaaagcccaaatataagaaggtgatcgttaaaggcccaattaaattgaatccctaatatatcaagtgagagtgttaatcgtcgtctctctcatcaaccatttcccggcttccgcgtttttgctttgtagcgccggaccggagaagataaaaccctagctccgccccactcacaggaagttctacatcgacctgagttctcgtacttcgtcgtatcactcgttcttcctacgatgaactgtgcaagtaaagctttcagtcgtctctctctattttttctcaatatgccgatttagggttttcttatggttgatgttggtggcggcactgtgttctttcagtttcaggagaagttcccgtggagccagtggtttcgacgaagtcaggattac

SEQ ID NO: 57635 - DNA, 662 bp, Arabidopsis thaliana landsberg
ggggggggcttgattgttttttgttttgtggattagtgtaattctgtaaagagaagatctgaagttgtgtagaggagcttagtgatggagacaaattcgtctggagaagatctggttattaaggtaaattaaactaaattttagggggaagatgattgttttaggtgtcaaagattgagaattttaatgaaacttgatatagactcggaagccatatacgataacaaagcaacgtgaaaggtggactgaggaagaacataatagattcattgaagctttgaggctttatggtagagcatggcagaagattgaaggttgattttttatttccctttatatgtcttattttttgtgtttgcagaggtttgtcttcaaactgatttgctttttttcatttggacagaacatgtagcaacaaaaactgctgtccagataagaagtcacgctcagaaatttttctccaaggtaaaatcggttaattttgaaatgatgttctcatcttcattggcttaatgcttaagacttattgaaagccaggcaagttttctgcttcttttgcttcttagtcaggagatagatagattacgtttttagagtttagtaatgagcaataagtcttaaaatagttggagaaatgacgagatttaatcgttttcttttgt

SEQ ID NO: 57636 - DNA, 273 bp, Arabidopsis thaliana landsberg
ttcatgaaaaaattctaaaacactgggtcaacaacgaatttttcatccgtaatatacaccaaataactaaaatacccacaatagtacttaaaagtcaaaattttttgttaacaaaaagccaatgtaataagtccatagatctgcttctttcgtcccattgctgtatttgggctttccctaaaggtattacatgccacatttggcctcaccgtctaaaatttataaaatcataaacttttaacccatacacaaaaagttaaacatatcatattc

SEQ ID NO: 57637 - DNA, 120 bp, Arabidopsis thaliana landsberg
ttcttatatgtccgtaacatagttttctcaggttttctatgaagacatttttagattatattttttccaggtttgtgttgatgataatgccaatgatactttttgcctatattccctcaa

SEQ ID NO: 57638 - DNA, 310 bp, Arabidopsis thaliana landsberg
tcatgtatctcatcatcctatcatcaaagaactaaccctgctctctgtgtgtagccatctcatgtaacaactaatctcagtgtcttataaactctccataaatatataacataatcatcccgcctttctatatatcttcatcattataaacacacctttcactgatgtccttgttaatccctgcacaccaaaccattcattcaaaaatttaaaaaaaatcacttaagttaaacctaatctaaaagaaagatgtaataactaccatacgtacaaagatgattaatactttttttttcttattaatctggaa

SEQ ID NO: 57639 - DNA, 925 bp, Arabidopsis thaliana landsberg
atagtctatgatctaccatatgagcatgtcgtttttgttgttggcagggtgggattggtccatccggaccttctgatgaagatgtctacatgcttgacatgactaataacaagtggattaagtcagctcatttatgaatttataaatctttgctagatctattttgtcactgaatttttttttacgcatttaatgtccgttcaggtttctggttgaagggagactccaagccctcgctatggccatgttatgaatatagctgctcagaggtggcttgtcatattcagcgggaataatggtacgtctatctatgttttccgctttcgtttggcattgatatatgttgtctctcttttgcattttgtaatcgtatatatagcttcagttttctgtttaacttatacatatcaatatatcatatagtacatccataagtaagaaaacatttagatgcatgatatgtttccctcagaaagggagaatgtctccatcgaacaaattcctaatctatatttggcatttcaaaattatcttagcgaaacaaatatgtatatatcttccaacaatgttttcatttatgtttctacgaaggaactttaatttcggttatcattatcctattttattttgtaaaaatgtcatatttaaacatcctaaaacgacttttgtctatggagtaggaaatgaaattctggatgatacatgggcattggacacgcgtggaccattttcatgggacagattgaacccgtctggcaatcagccaagtgggagaatgttagtaatttagttgatttaactatactctaacacattgctttgagttataactcttcattgtttaacatttttgtaggtatgcttcaggtagttctcgagaagatggtatttttttgctctgcggtgggatagatcactcaagagt

SEQ ID NO: 57640 - DNA, 1042 bp, Arabidopsis thaliana landsberg
actacgacaggtgtttctacgtctacgttttgtcaaaacggcacagatccgatccctctcttgtctcctctcgtccttccttcgatgcttcaacctaatccaaccaccacctctcactaattcttctttttttctctttccattttttaggttccttcttctttcttctgtaatgactattttggaacttttttttattgaaattttcaacatattaacgtagatacaaatctgttattggctctatacaaatttcacaaagatcgtcttctctcaatcttgattatactgaagattttattttgttaacacatcatttatcttttgtacaatgccactatattaatccaccaacttttgtttttgatttatgtctctaagagaaatgattcaaggagtgtgtgcacctcacgccactcacaccaatttatacctaatgactttggtctaacataactggaattggtccaaaaattagagaagacaagacctctttacatgcttccacagctaccaacaaacccaatggaaattttgttgttgcaacaatctccttatttaatgtacaagtttctttcaatcaccataaaccttgatttcttaggttttttttccacaaaatctaccaacaatttattgtttttcttcttattatgttcttaattctgatctttctttggtgagttttttttattttgataaagaaaagataagtttgtgagtttaaacactaaccctgttaatttttcttcatcacattgttaatgatgcgttgacataggaacctttttcctataccacaaaaatttaactttttttttttttttgtgtgtgtaaaactccacaaaaatttaacttttttttttttttttttgtgtgtgtgtaaaactccacaaaaacttaactaagagttaaaactgatgaaaaatcttaatgttttggtaagatctataaaaaaatgaaaaagggttttttacgaattgttttaattaactatagatacccccttatttagatacgacaaccaaattaattgtcgttt

SEQ ID NO: 57641 - DNA, 250 bp, Arabidopsis thaliana landsberg
aacccaaacctcaggttattttagaatattttaacgccaactcccccaatccccatctttttcatttttcaataaaaattattcattctcctctatgcatgaaattaaattcaagattctccttcatacctcttctttaaaaaaactatcatatcacctcaacaaaaacctccaaatatttacccactatatcatcttttttaagcaagtagcaaaatccttctattacccaatataaactacctatata

SEQ ID NO: 57642 - DNA, 229 bp, Arabidopsis thaliana landsberg
tacatcccccaagatcgactagaagatcttcgcaaacctcatcggagatcctcacacactgcgtactagtgtctcaacgcaaggcaagggcaatggataacaccagttcaaactctggtacggtcccactagtgactgacacactgactctatccttgggaacccacagcccgtgaaggaagccccaaattatgccctatgcacctctctgactctgatgaatctaatc

SEQ ID NO: 57643 - DNA, 1412 bp, Arabidopsis thaliana landsberg
ttcctatattataaattaaaatcaagatatatagatccgtttcatatatggttttttctaacaaaatgtgtttatgatttatagtaaagaatatttcaaaacagggtctatatagatagacatgtgtacgtctaatgtgtatatatagtcgcaaactaataactatatatggttaaatccatattcatatcatcataattcattgttaagatggataaaattgacacgtaaatgttatttttctcgaatacgcaagtcaccattcattcaaccatccaaaaatattagggactattcaacattcgaatcttttataaagaaaaggaagttaggcgttaaaattttgtcaaactgaaaagaaaaaaaaaaccataggctagactttaaccactgcttgatactacaacgtagctattaattttcatagaaaaattggtaccaaccaaatctctttcaaatcatcagcacaaagataataaaatctaggcaagtaaagaatctccccctttttttggtggttgagcaatttctagatccatcgaaccgtcacacaagatagtcgaatcaagcatctaagtcgctttattttcctcccaaaatccttcacggattttatacaccatgagcatctataattataactaaaataccttaaacactattgtaaaaaatttggacaaattttctaaaataaaaatgcttacaaaaccaaattctcttctgaggaatccaaacaataagttctctttctgcttatgtcacgatgattttaattcagttagtaagaaaaaagtaaatattgctttctataaaataaattaaaattttattaactaaaatgcattatatatatatatatatatatatatatatatatatatatatataggtcagctttaaagctagattcagtaatgttatacactaataaacgagttaataaaatttataaattcaaacatcattccttgacacgttttaattacaacattattttgcactacatcctatttatttgttattttaactaataatgacaaacatatgttgatatatcaatttatgatgttcagattactttccacttataattctatattcatttttaactgtatggatcaacctctttatatcatgcaattatgtaacccaataaatataaaactgaaggaaatttcaaattagattatttgggtgggttggatgaactcatataattttcacatttctggatgatataaagagtaagggtatttattaatggggtttatcttatctcagcagatatttaatttgtttgtaaagggttttcaacgtggacgtattaattttgatgaaaattgaagaatattgacatttaccacacccaaaacaaaacccccattaaggggaaaaaataaacaaatttttta

SEQ ID NO: 57644 - DNA, 420 bp, Arabidopsis thaliana landsberg
actcacttgtgcacagatagccgcgcgatgaaaaaatgtgcggtttagcctgcttcttccaaaaactcatagtggaactgagcttgtctccctaaatcaaggacactgcatcgtctgtttctaaattttacgttaacccttttcctcttagctacatctatctgagctttaggggagaatgcaaagctggctaacacaacactggcacaagtatctagatccattgactcttgctccatgtcataatgaacctttagtctatggcctacctagtcatgaacatggatctttatgagcttattgccatgcacattctgacattatacatctcacatgatcgattgcttctctaatgcaatgatggtgttcttatcctaaccttccacaccgatagatgacatttatacgcgcgtctgtcga

SEQ ID NO: 57645 - DNA, 449 bp, Arabidopsis thaliana landsberg
acactatttttcctagattgaatcgtcaaggcacgaaacttgtgcgtcttaccaaacaacattagtattaatttaaaatgtttgggaaaaacaaaagattcaagtattcaacctttgacatacacaaacaaaattgaatttatacgaaaaaaaaaaaacaatttcgtatgaaactcaatgaagaaagtttcattcaaaacataatgaagaaagtttcaaaatccacatctgatatgtgaagattgacgtatatttgatttgtggtttctatttctaatttgccatttgaataaaacgattggatatgcaaggataagtttgacttcaacatcttgctttggtccggaccattttccatttctttttctcagaggtaaacttagaatagtttttggaagttatcataatattattagtaattaataaaagtaaaagattgagacgttggc

SEQ ID NO: 57646 - DNA, 357 bp, Arabidopsis thaliana landsberg
  unsure (1)..(357): unsure at all n locations
tatgtcttttgcattcatatatgcattatcatatagacggtcgctctgtgttgtctcttgagacgagggggaagccagaagggtatgaactgcttgcttttgctgaagaataatgtgtaattggctgggacctgggatgagatgatgttcgttgccacatacagatttccctttgttgactgactctacttgtatgattattgtttgtaaactatttgcttatgtgtcatttacgaaaaacttctttnnnnnnnnnnnnnnnnnnnnnnnnnnnnnnnnnnnnnnnnnnnnnnnnnnnnnnnnnntatatatatttaaatttatatttctatatatatatatctagaaacccttttt

SEQ ID NO: 57647 - DNA, 907 bp, Arabidopsis thaliana landsberg
catcatcctcctcgtctaatttcaacagaggagcaaactcctcaaggaattggctaataccttcaccttgcaacatgttaaagaccaaaagagctaaatctcaaccaagcttacagattcactatttttcaaagaattggaacccataaaccatagagaagtatggtaatggagtaggacgaaccaacagagaagattcaggagaaggagcagtgagttcagcttgccactcccgaatattctgagagatttgggcttctaaaagcgcaaggtcaccatgccgcccttctttcctagcagcttgaagatgacagaacctctcctgaagttcccttagcttctcctccacattctgatgcgccgatgtgatcttcgggtggtttgacatctcctctaaaccctgaccaaaaccattctcaaaaatcaactaaaatcttaaccacaaaataccttaatattccgattctcatgaggaaggaaacaaacacattaccttaaaaccaaagcaacagagattggtatctctctctccttcctccgatctctggctattcatcaacaaaccaaaactgattagttaatggaaggtattgagcagaattcacgacaacaacaaagcaaaaaagcatttttttagatcaacccaatcctaaaacaaaccatcagttccattagagtctatacaaacaagcaaaatttcaaccctaaattcatgaaatcgaacaaaaccctaacatgagtctgactaataaatccataaaattgagaagaaattcggataaagttcatactttttcgatatggatggatacagagagcttcttcttttgatggagactaataagacaccggagatatcgcgatgaacaagaagaacatggcttagttacgccagcatacatatagc

SEQ ID NO: 57648 - DNA, 307 bp, Arabidopsis thaliana landsberg
gttcctcccactcttaatatatatttgtgccccgtagaaatcaatgggatcattcacttttatttaaaaatccaatccgccaatcttatttattcttctttcccccgttaacccgttacctttaaaacctttgatcacacaaaacttcaatatctcacaaaccaaaagcccgttaggaggaaattacaaaaatgtcctcctaccgcagactcgacgagcatgagcaagcgaaacttgaggcaagtcggaagacaaagaagagaattgccatcatcgctatatcttccatcgttctcgtctgcattgt

SEQ ID NO: 57649 - DNA, 1272 bp, Arabidopsis thaliana landsberg
gattgtgaacgtgaattttgaacttgaatgctttgaatagacaagtagggaggcctttggtgaatatttcttcatattgatgggaggaaggaacatgtaggacacgaacctggccgagtgctactcattcatagacaggcaacatatccacctcaacatgttttgtcagatgattttgcatccggtttgtggagaggtactacacttacattgtcacaatacacgatcgttgatgtcgaaagagggtaatgaagttcgataagcacgtttcatatccatatagtctaataactgcattgacaaccccttcgtactcggctatgtaagaaatattgtacaacaaaagccgctaggggggctattaactacgcttcataatatacacagaagaatatatatgtattcctattctagtagaaccgcttgttacgctctttccataataatgataggaatatcaactcagcaggacattttgagcaatcgtgtgatatttgaatccgtatttcatccgcacaaaactgatgtgtccaaaggataccgactcaaatgttgattcgagacaactcttgcacggaaagaatcattacagagaaaatgacataaagaaactggtaacgaactcgtgcccactttagaaaaacaccacactaaactccaagtctggaccagaacttgtgttctcatgcatatagctcccttgtaacatatgtggaaccatgagttataaccaacatgctaaagaacaaaatcatatcaatatgatatagatatgagcaatatacgttataaatatctaaccaggtttgttcgctttgttggtctaagaacacgtacacatataaatactgcttgcaattgtatccattgacgttgtttctggtaattttctcgtatttatggatctcctatttgacattagctaaaggacattttcttttcagccaattcaagtcatccacatttaaatatatatacacaaacatgcatgtatccaaaagcaccgtaagaacataactcatacatgaataacaaaagttataacaacacaaaaccacacccctccctctgtttgtatacccaatgaaagccacaccaaaaaaagaaatgtgaaactaaaaaacagatataaaacttgaaattaaactattgagttctctgaccccatgagaaacccaaattaatccaaatataccctcgtaatcgcaatgagaagatacaccaaccgatgtggtggaccttagaattcacagatgggaagagaaaagaaaa

SEQ ID NO: 57650 - DNA, 997 bp, Arabidopsis thaliana landsberg
ccgtcgctaatcgactacgtaattcttaggtcgaacggaaaactccgccgctacgtttactcgaattagatgacttctacttccgctgcgaagatctcaatgtttggtgccaaatctggattcgttatccctaaaaacaaactatctggatcattgatcccaatttttcaacgtggaaacaaaaccctaggaagtgccgattcagacactggacctccgtcgaagctggggaagaaaagaaagactaaatgggctcctgatttgtcacaagatattgcagtcaagaaatgtcgatttttagcttaccaggtattcaaattgtcttccttttaaattgctcaaaattgaaaaatccatgtaagtgattggtgaccaaattttgagcagaaacgcgtggatcaaattacacagcgattggaatctggaactcttgaagtggagactaatagaactgacgtaagttttttttttttcttttttctcttctttatttgtgcttcttttagccatgttaactcattgatagattattattactcaacagctggagtttgaaaaacgcgaagcaattggtaaaattttcctcttttaatctgtacaattcgctttccttcaagtgatatatagtttcttaacttctaggggagatactcgagttgaatccgaggtacaaggctccacctgattataagccattgctgaaagaagctagattgccgatcgatgtaagttctctcatgtgaagtgttaccttacgacctcatttgtttggaagaaagatgctcatgtcatatcttgggagagtattgagtgtaaacgaaaggatagttcacatcttgtttctaagttatgtgataattaagaattttgcagctgatattgtatggacctgagcttttgcaggttaaagaacattctgatttcagctttctaagtctcatatttggttctcaaggtgatactcaaaagcggctcgaaaaagtaagtcacctatgac

SEQ ID NO: 57651 - DNA, 672 bp, Arabidopsis thaliana landsberg
tggtctatctcgatgactgcatgatggttttaaaggacgggtaaattccagtgtgatgattccctcttcggatttgcatctcacgtatgtcatattttcggttgtaggatgcacagcggaagcggattctccatcgatccagtaagtatttacatgccctgttccatttctatcaaaccaaccaatataagcataactgtttgtcatttcgctaccaaaaccaattgcaagatagccacttttcttctcaccacgagccgcaatcgatattgaatcccctactatggtccaaaagaacttaacttgctgatcatctagattaacactgttgttgtacatatctgaaagtcccccgtcaacaacctgaaccttccaacccattttctcttgaaaaatcgagtgataatacagttggtcaggtgtatttctattaggagcccaaaccagctctgacggactcgatagtactccatgagtttcttgcccacccgcatagattgtctcagttctgttccttagagaagcattcccaccaagaaaatctgaagttatgtagaaagaaacgtcgtgtcctgcttctattgaaaacttcacaggaacccctctttccactttcaataccggcgcttctttcttgttaatatacagaacctttgaaggattctataaagg

SEQ ID NO: 57652 - DNA, 220 bp, Arabidopsis thaliana landsberg
ttcccatcgcattggcatgcatatatgtatttgtattcaaggttactttgatttgatatctgagatcaagtgtactccttagagcagctccttttcttcaacggcaggcccttaaaattaatgataagtgtgtttttgaatattaataatttttacttacgtttaaagcattgacggttttttgttattttatggttactatttatatttttatattgat

SEQ ID NO: 57653 - DNA, 1236 bp, Arabidopsis thaliana landsberg
tgcaattcaatgataaatcatgaatgtaatcggccaaaaaccaaaaatgtataaaagttaccttatttagtgtgttgtttttcttttacttcgagttgtgcgggttccaaaagctattaccatagtccataaaacgaaaaaattattaacgtttttaccataagttaatgatttgtaaagtatataattcgatagttcagtctattttttctatagtgttactggtttacaacaacttgaagatttgtgatattaattttatagttttaatcttattttttgaaagagagattttatgactatgatcaaaaaaaaaaaaaaaaatttgtataactataaaataaattattgatttccattatgatgattcattagaataacaataagagtatggatcttagaataaaaaggaaaattggtaatgagtatatttcttttagaaatttgattaaaattcatttattttgaaaacgagttatgttgtcaaggtttgagaaagatatatgcaaatcaatttatgtatttaaaaataaattggaagctaaggaaccgaaagagcatccctctcattggcccgatgacttcacccgcctcagttttgcgctcccctttttttttttggtaaatagttttttctccaacaaatttgactatgcttgtttgtttcattggtatgaaatgtaaaaaggcaatgggaaaattcttttacgatttttatttactttttctatttcgtagatctccccaattacatgtaacaaatttgctattgttttgtaaacagcgagagtaaacggtagacttttatacggtacgttctataatagtacgatccttgtgtatcagtgcatgaatcaagacgtttcaaattttttatgaaaatgaatagccttcaaaatatccctagtaataaactgctagttatgaccatttttcttgtctcactttatttttattccaatataacccttgttttgtttttcttttgaacatcaattcaaatggagaagctagtgaatcctacttaccatttgatacttggataagagtcatcagtgaacaattcgatacgacattatgaaaattgagtatatgtgtgaagagtgatataacacacatcttaatgaaatatcatgtatgcatgttctgtttggtttaaaacgtgctaagactctaattttaacacaaaggaaaagaagatgatacacaatttagcaacaatatcacatgatgagt

SEQ ID NO: 57654 - DNA, 824 bp, Arabidopsis thaliana landsberg
aaaaaaattacatcgttggctttttgcccaattgttggtttgtaaaaaaaacaattgtaatacccgtatgaaaaatgaaaattttctgaatatttggacttctgatcttttggtgattgttagaatttaattatcatacgtagatacaaagagtggtagttaatttctgaatatatatttacaattttcttttaccatctataaattatatacacgtatattatattgaaattcagattacaatacgctaacaatgtttgaataaatcaatacttcaattctatttttctgcgtgaggatgcctactaagataaaagacatttttgatgtttatagtccaatatcatgatttgagcgttgacgtattcccacgatactatacatttgtatttcaggtacggtaattaatttgatcgtttgtttattcaagtttatcttcagtaaagtaacccttttgggaataagtgggggattccatggtatattgccatattggagtcttggatttacccgaaaattttcgtgttgacatttttggagatgctacttattagattctcccatctgttcatcaacactgttagcgccgtcttatcagattttgtgtacgtgagacgtgttatggagattcatctagacgactagatgtacatgttgacaggaacgaacgattcttacttttggtctttttgaactcttcagatatatgtaagtcgctcgttctgctaggtgaaacatgaaaaattaatcatttttgactaaccaaaattatcagaaaattgctttcaaaaacgaatataaagtaattcatacacattaatttt

SEQ ID NO: 57655 - DNA, 167 bp, Arabidopsis thaliana landsberg
tgaactgtttacgagtggagaagaaggtgatttatatagcaatacatacttgcgctgtattgtttaatctacatacacggtgcgggccattaggggatggacaaccagcacaaacgcttaaagatactgtgcacagtcacaaagttcataatctatattttagctaa

SEQ ID NO: 57656 - DNA, 783 bp, Arabidopsis thaliana landsberg
  unsure (1)..(783): unsure at all n locations
aacaggagataaaatgacatacaaaattactaacgtatcataataatggcacggaattacaagtatgcagcagtacagtgtctaccttagcgctctatttcgcaacacctaatatatttttaatcatttgctaatgaattatgtatgccattaaaaattatcaattacatacctcataacactaaacaaaatgctaatacaaaccttcacctaagaaaatatctttaacccgacataaatttgttactacggacatgtttttgtttaattggagaaagatatatgattgtgtatggtgtctattgattgattgtcacagaagtataggcattttctgttattggcaaactaagaaagaaaagacattttccactagttatgtaatgcatcttcgaaatacccaacggaccaaacctgctcatcctttccgtttttgatattatataacaatattttatatcttttaatcgctaaaaacgaatattatataaatgtattggatgtccaaaaaaaaaaatgtgaatggaggctttcatatgctatatcactatcaaccaatcacagaacatctttgacagaaggttacctatgcacgtacactacacatacgatgctctttgtttatatctttgcttatagtttatcgatgctaaccactgtaagaattaagtaaagttaatgccaatttaatattaagttaaaattactgtaaaaaaaaagtaaattagataggctgccttttaaaaaattggtgaattataaccatattngcttttcaacatg

SEQ ID NO: 57657 - DNA, 891 bp, Arabidopsis thaliana landsberg
aaccctaaatttcgattgtccgtcttccccaactctcctttctccaactcgccgcctctttcaactcacagaaccaccgtccgtcaaaaaaactcttggtaatggagcataaactagccactgctgagaaaaaagtaagtctctttcgttatcgtaccacactagatatttctcagctaaaaaactctcattctcttcaaattctgactttggtgaattctaatttgtcatgggattttgattttagttgctagtagacctagtcaagctagtacagaaacgaggtttggaaggcgaaaacggaggatggaaggaatttctaaacgtttacgacaaaaaattaggatcgagtttgagtgatcctgcgagacgttccaatgatgttttggttgcttttcttttgacatttaaaaagaaagaagatttgcaggtaactatcacaacttaacacttacaatgacaacttattattcttagttcttaccattttattcttgcttcagctaatagctagggttatgcaatgtggtgctaatcgtgaactaattgagaaattcaagcaagagactccggataaagagactcctgagcaggtggagaacatttttcaggatttctaattataaaaggttttggttgttttaagcaaattggttcataactatgttgttggcagtgcagaggctagttcgattgactattactcatgacgattatcctggaaactatacgttcccttcctacgctgagggttgtgtttctgtcaaattgtattagctttttccttttttgcttctggatatgaaaatataaaaaaccttttctggtttgctaaacaagattggtatgtaactgagccttgaaaggaaaaagccgaagggaataaaactt

SEQ ID NO: 57658 - DNA, 310 bp, Arabidopsis thaliana landsberg
  unsure (1)..(310): unsure at all n locations
acgcgtatattactggggaagtgaaaagatcgggactgcagagaaacttgtgagctggccaccataaccacttgcttcgcgaccggccgtgatgtcatcgtcggcgtctgcagctcgccacgaggatgccacgtgcttggagacattaccacatcgccataggtcgttgtggacaacccatttaccgcctggggccttacctcaccgagcgccacgacagttgccctccggtgactcaccccccttccggtcgtgagatcatctcatcccaacnnnnnnnnnnnnnnnnnnnnnnnnnnnnnnnnnnnnn

SEQ ID NO: 57659 - DNA, 1519 bp, Arabidopsis thaliana landsberg
tataccagaaagggttagccatggcgagaatcgagaatctgaaggtaagaccaatacttatatcctcgttaactgttacttagtctatctgattagaagagagtaacattttagctggtgattaactgattttatgcatatgaaagttactaaatatagcgcataagaactacgaatggtgtcattagcatttttctagcttatactaagaaataacactattctattgtttgcagggtgagaaggaaggtgaaggagaagaagaaagtagccagaaggataaattcgaagagaatttcaaagaactgacaaaatgggtagacgtgaaatcatctaaatacggtactctcactgttctaagagagaaacggctatcacgactcgggaccgcattgaaggtaaatacatttatctaatctttaatacatactaaaaaactgcaaatgattcattctaaaatcagtgacccacatgactgataatgattttcaggtacttgatgacttgatccaaaacgagaacgagactgcgaataagaaactctacgaacttaaactggatttgctggaggaaataggttggagccatttggttacgtatgagaagcaatggatgcaggttcgtttccctaaaagcctacccctcttttagtagttgttgctaccttcttgttcaataaaagcttatccagaacatatagttgcaagttcttgttcaataaaagcttgtccagaacaaatagttcgttgtttttcgaaacccaaactactgtcttattttctgtccgtataaactgtatgttcttagtctctttgtattgacatttttcaattgtggaatcaataaaattatcgatcaatttagtatttgtgtcaatgtggagtttggatccttttggtccgtgcgatgttttatcgttgggaaattggatgctataataaattttgaagagcaaataacaagaaaatgtctttaagtataatttctaattgtttaaaagatgtgacgcgattatgactatccgctggcgacgagattacatgactaatcatcggatacgtaatctctatctctaaggaagcaggatccactaaactaaatcgacaagagcaccaacaacaagcgtgtacggcaaaagacactcagaatttattaaattttcaactcttcaccagtctggctccataatttagctattgcattataggttctcattaaataatcatttttttatccgtcaattactttggtacctgactattttgattggttagcttacttttgtaatctattagtttgaatcaatacgtacttgtgccataactcgaattcctatataattttccaactcaataaggtggatgtgtgattcggtatgaagaaattgttttaccaaagtaatcgaagtaaaaatggaagactactgcacctaaagatgtaacattatctcacctactttctcctatcataggttttggttatattaaattaataaatgcactctgtccctttcatgatc

SEQ ID NO: 57660 - DNA, 196 bp, Arabidopsis thaliana landsberg
cctcactctaataacatggactcgtctacacagaaattaattttactcgttacctgcaactgtcacgtcgtttttagaaattatagcgtcgccccaaaattagatatgaaatacgtgcattatatattcgtcttattctccaaatgctggagaggttgttattaggattgttcctagtataaaattcatcctttac

SEQ ID NO: 57661 - DNA, 1279 bp, Arabidopsis thaliana landsberg
ttttttttctttgcttttttggtcataaaatctttcatttgtttcgattagctttatgaaaaagtcacatactacaaggagttatattgtttgtatactaattttttggctgcactaaattatattagcatagacgcattataaatcgagacatagagcgttgacaaataagcactaaggtatataaactcgttcaaaaatttaagatttctgtttgattgcaccgaacttaaaggtgcacatgcatgtgaatcttttccacaagtcaaaatgcgcgttcatatgacaacggacttctttaaatatatatatattcatcctaataatatctagctagttaggaatacatgctagctataccataatatcaaatttttattaatcaagaaattcaaggccttaaattcaccagaacaagataacgtagtccatattctccgttacatatatatgttgtagctttatgaatacaagttgtatggatgcatgtacagaatacaagtactatcataagtttttcatagattttgtccggcctgcgtcaattaatgtgcgatttgatttgtctacttttgcgtgaactgtataatttgatctgcacttaattaatccaaccaactcttggttaacctgtgaaaaaattacatataatttcctacgagcttgcatgaaaagaaaatataaaaaaatacattgcatatatgcatacccaatattcccttattgagaatttagaatggtcattatagactattttcttgatctttttggttattcagttattaacgtaatacctacttggctacagcctctgattgagagtggtatgcccatagagtaaacttcatctttctatttggaaaagatatatatacggagcaacttattttgactgatcgtgctctactcaatcttgatctggctggctactcctttcctgtggttaaagctttttctgtgacaaattttcaatttgaagaagtcaaaattggatattacgagccaaaaaaaatatatgaaagtgaagcgtagagtcggccaaccaatgggaaggacatcatagggctgatatccgttgacaaaaaaaaaaaagaagaagccaaaaaggtttttaactaaccacaacaaaacgttgacccaagacaaaaactagccaataaccagacagaaacagtctaatagtatactgaaatgcataattgtgttgaattataccattgttttttattaattaaaaaattaatactcactcttttttttccaactcgaattgagttgt

SEQ ID NO: 57662 - DNA, 413 bp, Arabidopsis thaliana landsberg
atgactcggataataggtgtaagattgatgaccaagtgcatacttgttcgaatctcggtatagctaaagcttgccgggatcttcaatattctctagaacctcagctggcttctagggattcattaaataagcaggaaatagcaacttgtagctataagtcctctggtagagatcacaaaggagtagaaccgaggaagagcagaagaacgcattcaaaccgggaatccactacaggtttatcgtcagaaatgggaaactctgcggggtcacttttccgggataaagagactcagaagagagcaggggagatacatgcaaaggaagcaagagaaagagctaaagaatgtgttgagaagttagatggggatgagaagatcattggcgattcggaagctggtcttacttctgaaaag

SEQ ID NO: 57663 - DNA, 853 bp, Arabidopsis thaliana landsberg
ccgacggaatcaatagctctttcggattgagaatctcaaattttttttcctgtccactctctttcgacttagagagagattctgaagatatgatgttgcctcttggtactgatctttctggtaaaagaggtgggaaaaggcattcaaagacaacttcaaggatatttgatcgagaatttcctgaagatgaatccagaaaggagagacacccttcaccaagcaagcgatttagttttagttttggtcgtctcagccgaaatttcagcctgaaagatatttcagccggccaacctttgagttcttctgaggataccattatgtctggttctatgagatttgatggttcagtttgtccatctcagtcaagtaacccggagaaccagaacactcattgcagatctcgagttagccctctaaggcggtttcttgaccctttactgaaaccaaaagcctctgaaagtgttcttccatcaaaagcaagatcaagttcttccaatccaaagccaataaccaacagcaacgtaccacttcaagatgaaaagaagcaggatgcatcgagaaccctagctatttttcagctcacaatcagaaatggcatcctttgtttcaatttgtggtcgatgatacagcagcagcagcaggagcattctcggggctacaatgaaaagctcagattcatcgttcaaagatgattctgttcagtactgcacattctactctgttaatgaagtcaaaaagaaaaaaaagtggaagctggctaatccatggacacagagagaaacattgcgggttcgtctacaacataatccgtcaaatgcagttgggaaactcaatgagcgtagatatatcagag

SEQ ID NO: 57664 - DNA, 492 bp, Arabidopsis thaliana landsberg
agaagcgccggacgagatccgcgcgatgtatctgctgcgctacgcgagcatcgatcccggcgccgaattcgggaccagcgtcgcgaaagcgcacaaggcgcagcgccgcgacgtgcagcgctggatcgaagccggccagaaagtcggctcgatcgacgcgaagatcgatgcggcacttgccgccgacctgttctgcgcgacggtcgacggcctgatctatcgctggctggtgacgccgaaactgccgatgcgcgagctccacgacctgctcaagacgcaggtcgtgcagatgttcggcgtccgcaaatcgcgctaggccagggccggccgccgccagtaccgctttcgaaagaatcgtgaagtgtcgtcccgctggcgggcggcgcggtcacgcaaccggcaaacacggcgggcgaaccccgtcgcgaggagattgacgatgagtgcgatgtatcaaggtttctgtgttcgcgggcagtcgctcgacaatgg

SEQ ID NO: 57665 - DNA, 491 bp, Arabidopsis thaliana landsberg
tgagacgacagctcatcattataagcatcatatattaatctttttcttatatttatgtttctataagatttttatttatgcttagttatatattttttccttcaaaaaattaattagaccttgttaaaatttcatactatactttttaatggatgtccccaaatatcataacaactggaactcaattttcaaacctcagcctacctaatttttgtaaccggatattcaaactttttggtgtacaacttatttcaactatagtggaaaatttacaaaagaaaacaactttttgtgattactagaaatcgcttcaaatgtatgtttttgtcaacacattcgagcctccactccaaaatgcatctatatgggatttatattctaatatgtgccttttgatttttgagatacgataaaacaacaatatattcttggaattttctagtgaattaaaatactgttgtagggcaaaaaataatttcaaaaaaataaag

SEQ ID NO: 57666 - DNA, 613 bp, Arabidopsis thaliana landsberg
aagccccacagttataacaccaaaatcgataacacacataatagcatgtgtcttaacgaaacaaaaaaaataaaataacattattttcactgtttagccataacattactttctatccaactgatattacatgtattttaaattatttattaattatgtttatataaactattaacatatagaaaaaatttagagattgaagaaatatcttaaattacctttgatgtaatttgttttcctttcaatggacttcctaaataaagtataaatctcattagatatgtgatacaactgttttcctatatatcttgattttatatatgccccccaaaaggtaaaatatctatatgggctgtctctaaagataaatgattatcactttaccatcaatcacatgcctacacgtaagggtgaaactaatacaaatcctgaaaaattagtaaaataaaaaattaattaatcatatccagcaaagcaataaaaaatctattgactcgaaaattgactatataaaccatcctcctcatgcttacaagacaaagctaaacacacaaaagaaaaagataagagatttgagggggaagatgaagttatcgttcatagaaaatgattc

SEQ ID NO: 57667 - DNA, 950 bp, Arabidopsis thaliana landsberg
catatgtatgtatatcaaccttttatataatcatatttcaactcaaaccacaatgataagtacaacaaatttatgcaaagttatgatactcatataatataaacattgtatatgcatttgttgagatatgatatatcatatatgtatatgtcatatttgatattcataaataaaaaaagtatagtaggataatcacaatcaatatactttgtgccctcattgaaagctaaatgttaagatcatcaagctttgatgatcttgattacaaccatgttttattattgttaagcagaagaccaaaatttttaatatcaagttttcaccaccgtcacaaagcgatcctttatggtaaacttctatttaactctaaaaatgttgatggtgtccttggtttcatcagcgatagttttggttagtcttaatgtttcctaagttaacatcggtgttatctctccacgatctttgttggaagacaaaccaacgtcccacatcaaaaaattagaaaataacattctagtatataattacttacatgaaaagtcaactaaagcgtaaacatagaaaacactatcataaagtgctattaatatctgtttttcgtatagtgattcaagtccaactcaaaattagtttgaggtctttcgggaaaatgtccaaaaacaaatccgtgcgagcttgaaatttttgtataaagtagacaagttgacttgggtttcgggagccaacaatcttgccttcaaacaacttatttgtagtagagtttttggtcgctttatattgtcgctagcgataattttctgatcaagctttacatctttgctggagattcaaatatccagtagttatcttgagtttcacaagagagaattacacaagtgtgtcaaagactagctatagtaattttcgactagctcaatcttgaatatcttttattacaaactaggtaatca

SEQ ID NO: 57668 - DNA, 414 bp, Arabidopsis thaliana landsberg
aagcccttgagattggtgtagccgtggtgcacgacgttgtggccgacctcccagaggctgtacggcgtcagctacggcaggaacacgatgcggccgaggatctggttgaggcgcttgtgcggcgtgaacgcctggtggcaggcatcgtggccgagaatgaacaggcggccgatgacgaggcccgcggccagaccggcgaacagcttgagcagcggcgcggcggcaatcacgaccgccgtcatcagcgccgcgaacagcgccagatcgaaagccgtcagcgacagcgcccggatcgtgcggcgatggcggaattcgccgagccaggcgcggatggtctggcgcggcggcagcgagacgtctaggcgggatcgcggagtcgaggacatggcgcagggcagtggcgcgctcgtggcc

SEQ ID NO: 57669 - DNA, 160 bp, Arabidopsis thaliana landsberg
aaaaaaaaaacagaacagagaccctagctggtgttgtcctgaaagctagctatccatgaacctgcacagacagttttttgtactagtgcccagcgggagcattagctcaaagagactggccgtgttgaagccatgctcagagcttagatttaaagcttta

SEQ ID NO: 57670 - DNA, 1281 bp, Arabidopsis thaliana landsberg
tgcaacactttgtttcaggtgacacaggatgataacatggatatcgattggtggcaacggaaaggactaggcaggcatgggggagtgctaaattggtggttaaagttgtaatccgcttaaacagcgggtcacgtcttcaactatctgagacccacgccaaatttaagtatttcttattaatgtgtcatttgtttgttctccttcattatagtatttattcatccgtactttgtctgatatccttgatatatataaccctcataattatttagtttgaagttggtttttgtaataaaaaatgtgtgtgtaagaaaattaaacggatatttttaacaatcggaaaaccgacattaaacaattttctttttttgttgatagtaagaaaaagggtgggatataaaatagaagtttatgtatttgaataaaagatagaattaattcaggtagaaatagataaaacaattattatagtgtatgtttatggaatattttttcaacaaggtaaaacccaaagaataaatacacataaactaaacaagcgaaatgaacattaacaaaggaaaaagtattaatcatattaatcatgttttctttttttggcagcgtttacaattacaactaaatccaatttatgttttaattattgtttttaccatagtagaccatttcctcgaaacttaaacgtaatcattattttgccagagtgtccgagccataatctcgccacgtgtcccacgaactcgcatagcttaaagattttttttaacaaacaaacaaacagtgctttttccgcaactttctccgccagctcaatttcagatctcggcggcgacggatccattccaattcctgcttcagatcggtgactttgagttagaaccaaccaccttactcaatccgacttcagattgaaattgctatatcctacgcggattctcctgcaaacttggtgcggatctctgcgaaaattgctgttttggatgtttgatttgggagctgtgaaaaataggacggtggagtgagattatctgatggcgtcaatccggcgaactctctcgccgatgtatcacgatcgttctcacgagaatggaggttcacacaaaggtttcaccattggtggtagtagcagcaaacacaattcttcgcaatttctttcgtatctcaccaagctcctcggagtaacgtctgatcctaaacgctcgcgtagaggtccatggaggcgaccgttttaccaggttctcgtcttctttcttcttggatttgtattaggattgacacctt

SEQ ID NO: 57671 - DNA, 432 bp, Arabidopsis thaliana landsberg
  unsure (1)..(432): unsure at all n locations
aacttccaaattcaactattaccattcaaattataaagtattccgacatataccaacagatttaatcaaatttagttggattcaaccaaatgtagctattttttttttttttctgtttttgcgtaaattaaaacgctcaccactccatcgaatcagtgaaatataaagaagaagctaaattggatataatgaaataaacatgattttattgtattttaaaaatatttttatgttcgacatttatcttaattagcacatttttaccgaggttatatcaactaacatatcaataacaatcttcgggcttgcaacccnnnnnnnnnnnnnnnnnnnnnnnnnnnnnnnnnnnnnnnnnnnnnnnnnnnnnnnnnnnnnnnnnnnnnnnnnnnnnnnnnnnnnnnnntgctctatcactagggcaatgacaaagcg

SEQ ID NO: 57672 - DNA, 456 bp, Arabidopsis thaliana landsberg
tgctttgttaatagctggacttgttgtgtagacttgcaaagatgctggtttagtttctaaagctctgttccatattgtcaactatgattacattgtatgtttcctcactcttgatcattgctttagattgacatatgtatatatgatgcatgatttgttcttaattttggcttaggttttgtaaatagtgtgacgtgaagtggagtacatcaatagtattacagcattcgatttgccataactgatttgtattctgcatcagtggatctatcttttaaagataagatcctttacaaaggatgaaaaatcattgaatgtgttcacttatgaaaaatcctctcaaataaaacattacacaagaataatcaatcattcttacttttaagttttcaagatttgcatcatcgaccatcaaaaactcccaatacacagacaggggaatctaggcaaacatgt

SEQ ID NO: 57673 - DNA, 1284 bp, Arabidopsis thaliana landsberg
acgcaaatatttatttgcgataccaaaaaactaggtgacatagatatatgaagctgtgcttaaggacttgtctacgtagctatgctcggtcatttcttcaatgaaattatgaaaccacctaactaagtccagccctttttattgacacgaacgaaataataccattttcataataaataacaatcaatgaaactaataaattctaataatatcgacagtggacacattcacaccaatcttcgatgctcgatccatcttccaccaagttaccaattgatctttcgattctcattaacttttacaatgagttgttgttaattatatctcaaatctcttctgctcatttttcgcctattctttttgaataactcttaacaacaaaatttaataatcttagcaataatactgaccggtcaaagtttcacacaacacaacaatgacatagagaaattgaattcttcttttataatctgatcatcatcttgatttaatattttacatagagaactaaaatttggccggctatactctctcgaagagacttttggatacaatcgttatacgagttcattaaatcctgagctaggtttgatccatttcccatgttattcgatttaggaactagaatcgcaacacgatattgaaagaacatacaatagtttatgagttcatgcacttcagaataatgatacgctacgtctcaaccaatcttatcgtcgggaaattcactatcaaatcatcgctggatggcacagaaacacgagcttcctaccaagagatcctctgtcttatgcggagtctcatacttaaatcaaaccgatgagataacctcccaacactccaattcaattcaattccggttaagtcttcgtaaaccaaacccatactagaaatcatgcaaattccgaagaaaaatcataagattaaatgattaatagattactatctacaagatatatgaaaaagaacataaataatttacagaattaccactctttctgctattagctcaaaaggccgtcgtcccccatgtcagtggttaggtgagccatttattttcatgaaaactatagaaagaaagttatatttatgtttcatgaaaatagaagaaaatggttattacttttttttttttagcagggaatttggtttacaaaagcgaaagtagaaaatatatattaatatataaaattatatcgaagtgcataggaagatgaaactgtgatcaagaacatacaaaacacaatgacggtggttcttctgatactactagtattaagaagt

SEQ ID NO: 57674 - DNA, 472 bp, Arabidopsis thaliana landsberg
ctatgcacttgtcttgaaacttctaaagctgagaaaactgattctccataaatactttaagtctttaataatcataattccatccaattcttcgttgcaccatgggagcacaacaagtactgaagtacaaatgaaatagaattgtcttccattattatcactaacccttttactttctggaattcacattatgtaacggatcataattcgattccacacgtagtgcattacttagtgcacgattgcttcatcatgactacatgtaaaaactaaaaagcattggtgggtttgacaaaaaactgttgacgatacaacttcggtttatgcctgctgtcggaaaaaaccgatacctaaagatgcttcttttcgtggtgcagattttggttaagagattgggaaaccatccataatggcttgtaagaatcggattcgtatgtgcaagttgtggtgatagacaccttggatgagacaa

SEQ ID NO: 57675 - DNA, 124 bp, Arabidopsis thaliana landsberg
aagctcacacttgtcatcataaatgatccgctagccccgaaatgacccggccgatatgggaaatcccaattcattaggcctgtcgagggcaatcaaattgaatgcctcgagggccctatatttt

SEQ ID NO: 57676 - DNA, 858 bp, Arabidopsis thaliana landsberg
aaagaattataaggttatataaatcagatctgctttaatttaaatcacaaacctcgatttcctctaccacggcctccaccgtaaccaccgcgtccgccgtaactacctccgccagaggcaccgcgtccaccatatccagcatcaccacctccataacctccccctccgccgtatccatcaccaccgtacgacggaataggcgcacctccgccgccgtcttgattgtacatcccagccatgacctagggtttgcgataaacaacagaccaaaactcttaacgaatcgtgtgagagcctttttagacgtaaaataaaaaatctcgcgttttatttatatttctctcaaaaatagtggaactttattattgcatttatcttaaatcttaaattcttttacatcttatcttttaccgaccggtttcccaaaataactggacttgctttttttatcaaataagacaacatggttctaaggcccataatcatctaacctttacgaaggcccagcccaataacagttattttttacgtagcccaatacagttttgaaatgtggctattagagagaaattagaggcaaaatccaccaaaattttgctataactacaactttaaaagagtccggacagtaggaacaataagaggagaggccagctctgaaagaaatttggagtttgcgaagatgaatgagaagtgtcaagttgaatcgagaaccggcaattatcctcagaaggatcaacagtagtgatcaaaccaagtccaccaaagttgcagctttctgcactgtgatcattttgctggtacaagctattgaacgcgtatgaaacgttgcctggccatctgatgcctgaacacgac

SEQ ID NO: 57677 - DNA, 1054 bp, Arabidopsis thaliana landsberg
attagaatgtcatttcatgggcggtaaaataatgtctcagaaactcaaaaatatttggatttagtatgaaaaaaacattggtaaactaagagagcgaaatcagagaagcccaacgagccttatttatttattttattagtcataatcaagaatcggacagtagaagagcatgaataaatcacaagacagtagaagcatgagaggacaccgtataccccaagaaaccccccaccccttatatatataatataaatattctacaccatcgtataatagctatagagatgctgagaagatgcttgtaaagtttaacgcgaaccctcgagaccaagccttgagacgagccagtgaaccacctcatccatttctttaggaaccgtatagtgaccaagcctacacaatcacattaaaacctcacaatctcagactaaaacaactagattgataatgataactttgggatataggttgaacagttacccttcatatggtttgaacatagtttgtcggaatccagccatggcaagtgaatgagcagatttttctccaaatctataaggaactacatcgtccgctgcaaccaaaaaacacatcaagtgaataaaattctagattctcttcggtgattttatcttgaaacagtaaatcatataatgatatatgtaaacatacaagttccatgtgcaagtaagatcggtatcgatgcagcgcgccttgcaacctcattcgaactttctattttgctccttaagctcctgcattgttatgtttaagctttcaatgttaagtctctgtgttaacaagtgacaagaaagggttgaagacatatatttatacctccaaccaggaagccaaccgctaagtcctacagtagctcgtaggtttatagtataagcatgtccggttccataacgtccaagagcgtagcacgtcgtggagtagagagctattgctgcacccatactgaaacctcctatcccaactttgactgacacaaaccacaaataacattttcaagttaagctagagattatgatatattatatcaagacct

SEQ ID NO: 57678 - DNA, 915 bp, Arabidopsis thaliana landsberg
  unsure (1)..(915): unsure at all n locations
tgaatctccagacccaccggtcagaaaatgtctttcctattctgttgccgtaacgcctagctcggagaacaaaacgctaaaccggaatgagagagcaagaaagactacgatgcgccaatctatgatacggcaatcatcaactgctccatttacattgatgcatgaaatccgcaaactcgaacaccttcaagaacagttaggggaggaagcaacgaaagcccttgaagtgttacaaaaggaagtagcttgccatagactagggaatcaagatgcagctcagacgatagctaagcttcaagcagagataagggaaatgcgtactgttaaaccatctgcaatgcttaaagaggttggagatgtcatagctcctaacaagagcgtaagtgccaatctcaaggaagagataacaaggctccattcacaaggaagcaccattgcgaatctagaggagcaacttgagagcgttcagaagtcaatagataagttggtgatgtctcttccgagcaatatcagtgctggagatgagactccaaagacaaagaatcatcatcatcaatcaaagaagaagaagcttcttcctctgacaccaagcagcgtatccaaccgccagaacttcttgaaatctccatgctctccgctttcagcttctaggcaagtcttggattgtgatgctgagaacaaagctcctcaagaaaacaacagttctgcagctagaggggcgacgacaccacaggggtctgagaaagagactccacagaaaggagaagaaagctgagatgtctcgtcaagagaaggtactccaggctacagaagatcaagctcagtgaacatgaagaaatgcagcatatgtttcaaacgcagcagaggagaatgtaagaagcataagagcatacgtaaccngactcaaagaacgag

SEQ ID NO: 57679 - DNA, 118 bp, Arabidopsis thaliana landsberg
gcccatgaatcttcttccgtcggcctaaggtttgctcgcggatccaacatccgttatgcccaacgattttcaccgagaacagaccagcgggttctctgtgtaaaactctacttaccct

SEQ ID NO: 57680 - DNA, 489 bp, Arabidopsis thaliana landsberg
  unsure (1)..(489): unsure at all n locations
tgtccttctctaccaaaccaacaaaagtcaaatcaatgctgtactgtcacccaatatatgtaaattctttttcaaaaacttatcaatcatcaaatttgaattaatcatcgttataaaatagtaataaaaaaattgaacacactataaacaaagactgactcttcaagaataaccattctcatctacaattattttccaacgtcaacatataacttttcaaaggaagtggttacacccccattgtgtatacatatgtaaccttgtactcccatttccacaacacaaaacaacctcaaaaactcattagtcatgagagaagacaccttcttcttccagtggtggttcttggtctctggtctcagcttcatcttccttcttcctcaagctttcacctaccatactcctccaataaacccgtgcttcgctcatccttttcttcctcctatcacaaacccgaggctcttaaaagctntcacagctcttcaagct

SEQ ID NO: 57681 - DNA, 1475 bp, Arabidopsis thaliana landsberg
tgaccgcgaaatcttgaaaccagcactagctactgcttcttttctcaacgaggcctccacggttttaaaggaaggagtcctaacaaacaaaaaaatcaagccactgcaaaaaaacttccaatgcaaaaagaaggtatgtttctaggaattagagctcatacctaggcggttcgtattcaagagcaagcaaaggtatcttactacaagttacaccaacatttccaacctatgaaaaacaacacagtgtcagagtaatgcagggtaagatattggctaatgggttttacacaaactagccagaaaagtttaaaccttgtcaagagcggtaacaacaaagtcaactagttcaggaactatcaggacttgggctcccttttcttccttcagtgaagtcaaacagccaaagaaacaatgttaaaggaaatattttgtaaatggagctgacaaatttttgttagacaggatacatcagatgatacctgaattaagatatctccaagtttttccctggaaattcccgtgccaagaatagcaccaaggaagtcaccgtgagaacaaggttgaaacccgaaattccctgtgatactagaaatacaaacataaacatactcagactcatataagaacaaaaacctcaagaagagaacattaccattcatgtcctgtacctcaaagcagcaactatatctggatcactagttaggacatcaggatgtccaatcgagatcctacaccgttcagcctaagaaatatacgaatccacacaaaaattgtcagcttaaagttcaacattttcagaggaaattgttctttaaagatgaaagagcagacctcagggtaacctccttgagcaactatcttaacatcagcaaatttttccaatagtgaaactgattccttaacaataggtggtgtgagaaaatctgtatgaagaacttctctttttgatgatgcacgtcttgcctaataaacaaatcacaaatcccattgagatgatgaagatggaagactctcaatgacgaaaaacaaggtagagaatataccatttcaagaatttgcttgacttctttggcaacagcttggtctccaactcctttgaggagaaaatctacatctccttttatagcttctgcactgtaacatcttctcaaagctgcaatttttattagagatttcatcagaaaaaaaacaaaactttgatgaagttaatgccctaacctctaaattcccaaagaaaagttgcaaactatcatcatgaagagaaactttcatcaattgaataagtacgatggtgaatccaaaatcaaaacttcggacgaacctgactgtcggagaggaaacgaagtgggaatggagagattcgcgattagggttttttgatttgtgtggagacaagaagaagctgctactgaccggaaagctagtctcaagatgacccatggaggagccaagcttgtgacagccatagcctgttc

SEQ ID NO: 57682 - DNA, 432 bp, Arabidopsis thaliana landsberg
atttgactaaaatgcatacatggaactatacttttggggggagaaacagatttatctaggctatccccaggcctaagattaggttcatcgcagaaaatatggctcagccaacatattagaatacaaattaacttatatgacttttcaaatatatctttctcaactgtatcaccaacatcaatttctttgaactatacttttttggggagaaacagatttatctaggctatccccaggcctaagattaggttcatcacgcaaactgtgattcagccagcatattagaatacagattagcttatatgccttttcaaatatgtcttcctccactgtatcaccaacatcagtttcttggaactatacttttttggggaaaacagatttatctaggctgtccccggggctaagattaagttcatcacacaaaatatg

SEQ ID NO: 57683 - DNA, 1340 bp, Arabidopsis thaliana landsberg
ttttgttaaaagatttatatttgattaaataacaatataagggtacaatcagcagtatgctatatcctccaaaattttgtatctaccaactaccaaaagaaaatcaaatctttactaatcacatgattggaattattttttatacctttatgaaagaaaaatggaaaattcaatgctttggtagaaattatttagatttacaaagaaggacaaattcacgttttctattgcgcaacaaattgacgctctggtctctggaagtgttcgaacttcgaatgttgcgatcattttattttgttacgatcattttacctatagtctttttataattcatgcgttaagaatattgatattaacatatgatgattagagtgagatatgtagtttttcttgtcgtcaaggaatatttgttatagtttatagaagaaaaaagggaagaatcttttgcaagaatctcttaaaacattattccgttttactgtacaatattatacaaattgtataacacaataattggcaaaaaacagaaaagagaaaaaaaggaatatgaatcgaagatccaatcatatagtataataattaataagtattattcgtctgattatgcttctgtagtggtatgcgaggcaaagaccaaagagtgagttttcttcacgatcaagaaaattcaatgtcgctattgatattacatttgggggaaaaatgccaacatcacattttcaaaattgacaatgtaattgttatcaacataataaccttgataactaataatatagactttatttaaaaggttgtgtaatcaatgaacttaatttggcggggaaaaacattcaatgattgatcaaagtcatagtcggagaagcaagaggaatattatatccaacatgcatgtgcttctagccctcttcttttcgtgttttctcggatcttttattctccacaccaaattatgtttattttaagtcaattcaatgataactacgtttgtttagttaaatactcattagttgatatacttcaaatttccaaccaaagttaagtttgcgtgaggtctacagctagcaccgtttacatttataaatcatatataaagacaagctcctatgtttgaacatacaaactttcttcagaaaagaaaaatgaacttaaactaattaattttctacaagcaaatacatagacactgcatttacgggacaaggttataaagtactatatggtttaataatggaagaaatcattgtgaccctatttttattactaggaaaacaaaactacagcttatctactctactttagtattattgtagtaatgatcaacttcatctaataaagataaa

SEQ ID NO: 57684 - DNA, 509 bp, Arabidopsis thaliana landsberg
  unsure (1)..(509): unsure at all n locations
ccatattgattcaataatgtcaatgttgaatcattaggacaatgtacatgtttgtaattgatttctaaacatgagtttctacatacatatatataaatctatgatatttcttcttgcaagcaaataacgtgtaatttagacttagaatattggtcggttcgaacaataggaagaggagaagatagcagaaacaaggtactagcaagatgattttggttttctttttccttttggtatatatatcaccgcataggtcgatccaaggctttccataaacataataggccaaaaaataagagctttttgtatatcttaccgcatatatccattgatggatctgttacagtggctagaacaatgatattttttaatccccatatgcctaatggccttctggagcctgaggctagtgttaaccaaaataaaagagcattgngacttgaccatttaaaatgaaatcctaaagaagtcagaaagtcattagttcacattaaaggagaaggaagctt

SEQ ID NO: 57685 - DNA, 1272 bp, Arabidopsis thaliana landsberg
  unsure (1)..(1272): unsure at all n locations
cctagtaatgaataggtgctctttggggaggatacacatttgcttaagtcttgtaattcgaatcaaagctggaagggaagaagaactcctaactttatgttcaattctttggcatattaagatgctttcttttcttgtctctaaaagaaatttccagcataactctattcattactttgggccttgtagcaataatctcaagcagcaaacacaaaattgttcttcctctcctggtatttgccttaatcccgtacagatgtcctgcggtaaaaggttcatgtcaggaagaaagattgtgtaaacataaattagagcttttttagtctattttgactcgattctgtgaatgtcaacttgtgagtatagctctatttgatcacatacttaagcatactttcggtttcttctgcacatctcaaaggacaacaaaaaaaagatagaaaatcatgaaatgcaggcatattactttccctaaagattgaatctaacgtgacagaggactccgagattttatagtagtttagtttgtgaagcgaaaccgatcattcagcaacagggggaaatttataccaattaaactctactagggatagacaccattaccataattataaacctaaaccagttctatgtcaagttgacgccatctaaccctagccaaacattctttttgcattgttctgttcaaagcattgcattccatactaaatttgaccagcaactagcaaatataaaagacagccaaaaagctgcaggaaactagcaaaaagctttcatgaaaaccgatggggtttgacatgacataagagaaacatggaaaatatgcctcaagagtctttccctagctgttctcaaacgagacctctcagcaacttatctataaagttatgcaacctaattcataagtaacttatagaacatcagctaaagaatatgttatcagcatttcatcaacatagtctttccagattaaatttataatgctccgtactaagcttaacaaaccaatcaaagtatgcctctgggctttggcattagtctgttcaaccatttcattccattttaaacttcagaaacatggaaaacaaagtggctnnnnnnnnnnnnnnnnnnnattaatcatagaaccattcatggatcaaaaagcaagccaccccagcatcaagaacatgagccaggaccctataagtaggttaactagagtttctatgattcctcgcgttaaaacttagaagattcaacttactgttttcaaaagacattcttctcaat

SEQ ID NO: 57686 - DNA, 1193 bp, Arabidopsis thaliana landsberg
  unsure (1)..(1193): unsure at all n locations
ttctcaatcgttgggctgggatgaattgaaacaacgaattcatgtttctcaacgtgttttctccgtcttccaacgccgccggagagagcaacgattaggaaaaaagtgacgacgaggatactcaataacgttagaataaaacggccaagattggtcgtggatctcatgttacgagcaatcccagccgtccatttagatttgttctcaaccattagcatccacacgagcctgaattttcggagagagaggaacccgacgaggtaattgtggtgggagccacttggacaacacgataatgatcctcctcctcctcctccgccgcagcagctcgtagcggtttcttcctcgtcggggacgtaaacgactgcgtttcctcctccgacggtgttgacgtgggaatgatcttcttgagaatcagccacgcgccgtcttgttgttgttgttggcgccgccggtagttggctgctgcttgacggattcactggaacgccgactgacatgtgaccgccggggaaaacagaggattctttttgaatgaaaaaatatgatcagaggagatatttaggaatcaacgaagaatctccattgttgaaacttggttttgttcttcttcttttctttatataactcagcgtgatctcaggacgagcagacaaaaacaatctctcttataattcttttttcctctctctttccttcgccaattatatatttaggacgaatatttactcttatatatgtgggggctatatataaagctaagaagtcggtttcatttgatgttaaaaaataaaaagtcgtttttgttttgtcgaaaatataagtcgtttttgttttgtcgaaaatataagtcgttttattgacgaaaacaaaagtcgtgttatgctactttgctttgtaattttttttttttttgtatgccactttgttattttgagtttttcttaaattcacatgtaaaatattcgctgttaaacattggtactgtacaaatacgaattttgcttctcagaaatcatcagtctcgattttttcccgaggtttttttttaagtaataaaagtcccgaaagtatagtttttttttggttgatagcgtctcaagacatagtcgataattactgatttcttattttaaataaatgtcatatatattttaacggtattggattggttaatattcnctgcatttgcc

SEQ ID NO: 57687 - DNA, 575 bp, Arabidopsis thaliana landsberg
  unsure (1)..(575): unsure at all n locations
aattgaaggatatcacgagagagcttgcgagtaaagatggtgattccacaacaaaatttattcccaagtactgtttcaaaacacgatactctttatttagtgataaagaaatgagaggaggcacgagagcaatcttcgaccacgaagaaaatcgttaaattgattgacaagaacatgaaatccgtttgagcgtgctaagaagaagaggtgaagatagatcatagaatctcttaataatttattttaagaaaaatttacattcatatgtatcaatgtttttttgttttgtttttgaatacaatttaatattagattcaaacaagatacatatttttttaaaaaactatttttatatttccatcattaaaattgtatagtaaaattataaattcattttattgatggacaacgataaatctattaatttatgcaaattttttcttaaagttaaaagatggatttaactttaatcatcgagcacaaatcaaacacatcaaggctgggcaggataaaaaaaacatctaaaggcctaggcccaaagagaggtatttttatgaactgggcnnctacactaa

SEQ ID NO: 57688 - DNA, 1301 bp, Arabidopsis thaliana landsberg
  unsure (1)..(1301): unsure at all n locations
tatgggtgatgtctatactttgtaattgtataatcagaaaaacatttatttttggaagggagatatataaagatagccatgtacttacattttatcttctagagaaggtttaaacttgatggtaggtaattgagaaatttgtccctctgttaatccttcacctacacttgtgtttcctctttcacgctcttctatccgctctattatttcctgtgatacaataagaataatatatatatatagtaaaataaatattggaccagtttcggtctagacataacggtgagagttaatattaaaatttcaggcgagaaaaatgatacttgaaaaatattatgatcgttttggatattccttacatcgagtgaatgttggtttgattcatcttccaagtgttctgcaaacgtatattaaaggtttattaactggtaagagattaaccgggttttggttcagcatataccatgattgactaactgatcaaatagtctttacttattatataaagacgatactattggtcatgctacaaaatcaagtcataccatatcctgagaatgaatgtggagaatcgttataaggcataagtgtgggtattgatcgtggtacgaacaaccgccttggcatcaacattagccacgatatccaacatttgaagcattgcctatggcgagtgtttggttggttttgaaactgatgatgataaccagaacgagaaatgtcttgtgaagtataatgttccgatgaattgggattataataatgtgtagacattgtaggttggttttgatgatgataagtaatcattggagaattgtctaacacatgcactggagaattattgactctaccacgttctctttgatattcctcgattttcctcgtgatttcatcagcctctccgaaaaagtaattgtatccactagaactttgggaatctcccatctaatttatgtattagagaagttataatattttggggaaatagattttctctactgattttgttgtgtgacattatatttttataagtacatgtttctgtttcgttatattgttgtcgtgggtgagtctttattagagcatgtaaatatgtttatgaaataagcgagaaaggaattaattaaacgtatcgagtgataaatgctttaatggattcgagatttagtattcttaaatctttgtttcattatcattgattataaaactaagttatgttgatctcaaatccttaattatgttctcctaagaagagtacangtggtggggaacgaaagatgagntaaatacttaaaatcttt

SEQ ID NO: 57689 - DNA, 452 bp, Arabidopsis thaliana landsberg
cataaataaaaaaagagagtaatagtccaatctaaatttgaaacatacaagagttacaaaacaatcctataaaacttttatttgattataaataagtaatgtgaaacttaagtacaagtaaaagatatgttatactaatatgggcaaaatgtttttctaaactacatgaaagtgacatcaaaccacaaaataagtcaactttctctcgttccatttctataagtttaataacacgacgctgcgacagttaccaattgcgtagcaaatcaaataaagagtattcactcagaacaagaccctaaacatttaatgatccactatgtccacgggaccacatcaatcaacaataataaaattaaaatcaccaataatttaaagaagaaaaaaatgagtagttgtgcaataaaaaaaaaacatgagttgaagaagaaacgtacgaagccggtcatgcg

SEQ ID NO: 57690 - DNA, 136 bp, Arabidopsis thaliana landsberg
cctgttccttccgatctacttggttcttcaccatcctgtgcctttccttgtaactttaaaaacatcgccggagatttaaagccggggagatgcctgaaaacaagccgaattgaaatgtctttcgcgaaagaagttg

SEQ ID NO: 57691 - DNA, 1703 bp, Arabidopsis thaliana landsberg
  unsure (1)..(1703): unsure at all n locations
catttcatcgaacagtttacgtgcattccatataccatcggtttttaagtaaagactcaaaagattgttgcataagtcgagattctctaaaagaccaaacttttattactgggcagtggatgtgtaaaccaatacgtgatgaattcgattcgcagaaggagagaatccgaatacatgatttttgaagattacccaattcgttagtgcgagagagaaatgcannnnnnnnnnnnnnnnnnnnnnngctcgtcattcttttgcatcaaacttttgaagacgataaaagatcgaaagtttaatgttcacattgctgttgagatttgatctcaaacacgatttagttggagggaagcaaagccctaagtactgtactcaaataaatatgaaacatgttgtaattgtaacaagtcaactaacaacaaataaaatattgcaacactattagccaacaaattatcacacaacttctacgttctaattgttaaaaacttttttttgttgtgcgactgaaatctttatttatcatacttttttgttacaagaacttaaaacattcaacaaaagataaatttatattttttttatgtaatatggtgtactattggctagcttttggtttggttacaattttttttcacattttatgtccagagtaaacacagaattcatattcataattttcaaaagtaagtaatagagaagaaaattttgtttgataaaaatttgaatcattaataataataaagtaagttcatcaatatttgacaaaagcccattctagagtttaaaacccctacaaatagaatataagcccacaagacaagagtccgtttataggaagaagatggatagtcaatgcaaaatcaaaatatagtagaggggacttccaagtttcagtttagggaaaaccaaagttgcatgatgtcactagcaatcgcattattttggatacgaaagtctgaaattatgtttttagtaatcctgaaattatgttttctttttttggttgacctagtaaggtattcaaaactcgttaacggaaatcaaacaataacgacaaaaacaattgtttggtaacaatggtattcagagaaaaggcagtcacgggtgagtagacaaagaacaagtccgtgaacaaaatctgatattttatatatgcatgtgtatgtgtgtgtgtgtgtgtcaatggttgcatgtacattgtactcatgactgttcttccacttgggactaaacttcaaggaaacaaacaagaaaaaagcagcattacattttggggtggcaagtggcaacgtgaccaaaatgaaaaatctttacttttgaaatatcataattttcttacagaaaaacaaacttacgtggaaaagtcaactatcaataattcacgatttgtggttgtctaatgtccatagaatagaaaaaataaacacttgacatgaatacaaattgtacgaagtagtttagaaatttataactaaaattttcttagcacaagattattgaaagacagagattatacatcacaaatattcttccgatccatttttcatttatcgtatgcaactctcttgtatactagtttataataggaattagttcaaaccactttgctacatgttttatcaaaaattcttcatcttgatcgtgaaatttgaatagcaatggaattttatgttttttttcttttgttaagagaagaagat

SEQ ID NO: 57692 - DNA, 937 bp, Arabidopsis thaliana landsberg
aatacagcattgaacttgcaagatttggaatcaccccagttgtatccattttttaaaaagttcttcagcttctttcattctctccgcatcacaaaggccatcaataagcgcagtgtaagtgaccacattccattctacacccacttgcaacatctcattccctaacctaaaagcatcagagagattaccaattttacaattggcatcaatgagggaagtatatgtatactcattaggcacaagaccaactcttctcatgtcaacataaaacttgatggcttgttgcatcataccctctttacaaaacgcatcaaccaaagtgctatatctcacaacattcggtttcaacccatttcccttcatctctctataaaactccaaacctataggctttttcccaaatttacagaaacaattgatcaatgcattatatgttataacatcaggctcgcagcacatatccttcatttcctcgaaaaagcaaaccgtatcatctaatcgaccaaccttcccaaaaccatcaatcatagaattatatgtaacagtgtcaggaaccaaccctctaaacttcatttcttcaaacaagcctctagcagcttcaacatctccttctttacacatacaatctatcattatattgtaagtaaacacagtcggtctcgcaccagcaccaatcatgtctttgaaaaacctcttcacatcatcagtcttccctaatttcgcaaacctatgcaataaaccgttgcaagaccgagtttttgggaaaactctaaatctcttcatcttagagaaacactgaatagcttcctcaagcattcctagatcaatcaaaacactaaacaaagcatcaaacactccaaaaccaggtacacacacattccttgtagaccacagaacatcgaaaacatcgcagtccgcctttgacaaaaccatcact

SEQ ID NO: 57693 - DNA, 439 bp, Arabidopsis thaliana landsberg
  unsure (1)..(439): unsure at all n locations
tgatatagtaaaaataaagttaatccagttaaggagcagaaacggtactggtctgtgtaaacagaactagtgtataaaataatagtccaatttgtttcagaattacagggctagtaatatacagtataatgtgacacttaaactttaagagattaggtgaaacaaaaatcactaaaatgaatatagatgactgtttgtcacatttcttttatagtatatacctgtatatgtcaatcaaatgacaaagagggtcccctattctcttgctcgtctttgtctgtttgtatttaaaatgtttgtatcaaagtccattttaaaaagcttttacaatattttattttagaacaatgtcaacaaatataatgtttacctgtcaagaaaattccaaaaacattgagttattataattttatatgtnaaaggttaactgctaaattct

SEQ ID NO: 57694 - DNA, 1420 bp, Arabidopsis thaliana landsberg
  unsure (1)..(1420): unsure at all n locations
caaagtcaacgaaatggctccgaatggattatatatataatttttccagtaatgaatgttgttagtgaagatcatattactctcttctataccttactttgtaaacgttttaagtttaatgcaataaaatccttttctgggggaaaaaatataatccagttgaatattgttggtcagataagattaagtttataacattatagctacccatttttctatattaaatatatctactacaattgtcttattgaagaagtcagcctgatgagtcatatacgagtcaaattgcatttgtttttaactctggtaccaaccaataaaccacgtaatatcagattatacatcacgtatcccactagtttaaattagtttttgctgaccatgcacaatctcttactttgaacatagagtgtccccaatacatgtagtctaatcactaaaatctaattttggatttcatatgctttgaagctataaagttgtttagaaattagcatacacaacagtactttatcattttgggtgaaccatacattgacattagaaaaaaaataccattttgcatttagaacgtgaaaatcgaagtgattgaaagattggtgtgatggattaaaacgttggtgttgataatgctgctagttttctattgggccagccagatttgtttaatttttgtttttacttcgtccaggtcacacgcattctgtttctcaatatcaaacaaaaaacactcacgctcaaatcttggcgcgtccatatcaaactccttcacaaacagggcccatcaaagcccaaatcttaacacctttcaatgtccgaacgtaactcctgacgttttaaaaattttaaaaaccaagtcattaaccccttaatatccaacagcaaagcgagtaattaaacgtagttagacacgtgtcctaatttaattcgatgtcaaaataaattaggataccgctgccacatccagttccatgtgaaccacgatgcacagtagtatttccttttagagcaatctaaagaatgacgtggcgtagtatgatttgttaagatttagctgattacggtgaacttgcacgtaccagatcgtaactactctccgttccaacctgtgttttcttttcttcttggaagctcccttccctctctttctctctcctccgagaaaggaaaagcaccacttctctctctaagaccccatttttcggtgaaggtttatgcgcttttcttcttcaacgagacgactaaaatacgtatacatgcgtatgttgatgtatgctaagtgttgttgtgtgttggagatttagaagagaaggtttgtttgtgaatttgtgtctctgaggttggtttttccagtttattcttctcaaatgatccgaanggngttgaatcgaaaaccttaatagacttcgtctgtgatgac

SEQ ID NO: 57695 - DNA, 126 bp, Arabidopsis thaliana landsberg
ctcgaccaattgatcactcttagcatgggggaaaaggcgcacactctgcgcggcacccttttctgtagtcccgcgatcgaacatctattcccaccgcgtcaagattcttgtgttctatagaaactc

SEQ ID NO: 57696 - DNA, 535 bp, Arabidopsis thaliana landsberg
catgaattggttccgtaacttcagaaaattatctctccacgattttacggataatgtttacatgtggttggactttatagttttcgccatgagcctagcttcttcttgcttagtttaatttacttcatatcaacgatctgctcatttttcagagcttcttattttgagactttttgttgtgcctaaagtctttcctcaattttgatggttaaaccttcggattccacacaagggattgcagccttcacattaattatatggtttaaaatccgatgtgcatcaataatatccatatataccttatatatagaaatgattgtgttgtgtaactttggacgtatttgtagatgttataaggatattatttattgattcatagcgcatcaaatacacctcaatgaaactatatcagagaaccataagaaaaacacataactgtgaggtttaaaagcactcatccacacgtacttaagtagcttgatgaaccctcaaatgcctgattacaaagacaattgtatattgtcctttttttttt

SEQ ID NO: 57697 - DNA, 939 bp, Arabidopsis thaliana landsberg
actttctatgtgttatccttttaatctctttgcatgtatatatatatttcagttctctagtgtcttgtttgaaaacctttaattgctgcaaaaaattttagaaactaaacgaaccagaaatttggtttatgtacacaaatataaaacataaataagatcaattcaaattcactaatggttcaaaagacatgaaaaaaaaaaccaagatgagatgtaaaaagttacgttatactttctttgcctctggactatggacataaccaagtttggcatcaaatcttgtcaaaaacttccaaccaattgttgtttcataggaagttggtcggctttttgtcgatctttcatctcgttggaacttaactatcgtccgaatttgacaattttttctttcagtgactctcttcaggttaaatttgaaccaaccttggcacatcactgctggaaaaataggttcgcctccatgacctccaatatcgagatctccgtagtgatgatcctctattcctctccaaaaatgtatacttgttctttgtactaacaaacggcgacattattctcttggtcgataaagaaacttacatgacacataaacctatggtcataataagtgcttaaatccactgccaacaacttgctctatgataagactttggtttgatcaatcttatcgttggtagtcacccatatctctacccttgatgtatccattctctgttgcaaaactgaaagttgttcttctttaacaactgataggggcaatttctcataaccaagacgtacaatgggaagattcaggcgtccaaatctctcggttgtgaaatcgaaacttaatagtagtgaaaagtctttgatgacttctgatgccatccaatacgtattcccttttaaagatgccccacgagattgtgtgttgctaccgccatagacgccatcaagagc

SEQ ID NO: 57698 - DNA, 144 bp, Arabidopsis thaliana landsberg
gatcaagagtaccatcagaatgtaatttggttttgaagacccatttacaaccaagaatattctgattaactggaggtggaacactgtattcacgttttgatccgacacatcgcttgatttattgggtgtatagcctgacatatt

SEQ ID NO: 57699 - DNA, 1144 bp, Arabidopsis thaliana landsberg
tcactcttctgcttaagctcattactggatgacttctcttgtggaaagcaattgttttgtcgagaaatggaaagcattgattttgtcgagaaatgcattgacaaaactatatataccaactaccaagatttcttaaatacacaaacttgaccacctcctagaaatttactacataacatcagtcggccattaagatgttcatgtgttaacttctcgttacatgatgcagctgatttgatacaaaagatttgtttgcttgaacaacaccacgagatgaattggtcttcctgggattctctttatgaactgcttgttcttttattgcacctctgtgaaggcctgattgataatcttcttaactgccatcattgcttggacgagccatgttaatattacatcacatcttgtagtgaccttgggttcagacctagcctctcagacaaaaatgtttggtgttcgtatgtggcatacaaagagagaggatcatattcggaggatccgggttaacttgtaaacctgaaaatataaaaatggagttgcctcaatatatgacaggttgaatgcatctatgaatcaatatgcattctcatggcagtagatagcatagagagagagcaaacgaaagagagagagagagagagctgacttgggcagtccggctaggcaaaaacacctctaagcaatttctttgaccatcaattctgcacaaatgtggattcggttcaaaatgatgaacagataacatcctcatatctttgccaagtaggatactataacattaaactataagaaatttacaaacctcttgctaattgaccgttgaagatagtggtcttctgttacaatcccttgacccccatattttacttcatcggagttcagtatcatctgcaaaatccaggtaatattctcaggtgaaacgcattaaacaaccttatagtggagttcatcgttctatcagcgagtaaaaaagcggtagcaactgtgtttcatggagaacaaagcagtggtttcattgacagacacttgttaacaaaatgatggatgatgggtggaatatctatacagagaatggaaaaaacttacggtatattcaccagcttcctctacaccgacatcatgcttttcatatgaatatgatggg

SEQ ID NO: 57700 - DNA, 607 bp, Arabidopsis thaliana landsberg
tgcggcgccacccactgcggaccgagcgtcgcataacgctccgaccacgccagcacgcgttcgagtccgagccagtcggtgtacttcagcgcaccgccgagatactgcggcaggccgaggccgagcatcagcgccatgtcgagttcgggcgccgtctcgacgatctgttcgtccaggcagcgcaccgcctcgttgatcatcgccagcatcatgcgctcgacgatctcggcgtcgctgaactcgcgcacgccatccggctgcacggtcttcagcagttcgtagctgtcgtccgccaccgtccgtttcggcttgccggccggatcggtttcataacggtagaagccgatgccgttcttctggccgtagcgctggcgatcgaccatcgcctgcagcggatcgcgccaggtgaccggcatgtgtccggggaatccggcggtgatgatctgcgcgacgtggatcccggtgtccatgccgatgacgtcgttgagatacgccggtcccatcggccagccgaatttctccatcgccgcgtcgatcttctggaaatcggcgccggccgcgaccagctgacccaacgcctgcatgtacggcgtgacgatgcggttga

SEQ ID NO: 57701 - DNA, 816 bp, Arabidopsis thaliana landsberg
tcccggcggactctcataccaaattatacgtagtagccactagccaatagggaaagaattacagagagtaaaaactaagctatacctgagcaggttcatcatcatcatcctcccatgaatccttaatttcattctcatccacatcttcatcatcccagttacttttaagctcaactttagctggaagtggtgcaattttctcgtcctctggaatcagaaaataaaaattataagactactcacatgctagtgatacgattttgaaatatcaaatatgaaacccatcagattagcaaataatctaaaattgcttgcatatccaatcaaatactataaataaataagaagactataattagatacaaatagagaatataagagaggacacttaaagcatagtcttaccccagtcatccatatttgctgcaaattatcaggtacagatataagcttctatctgagtccaactggtaaacctgccaaacatacgcgtaagcaacagaaacacgcttatttgatcaaactacattactgatcaatcattcaatccacataatcaaatacactgatccccacgtgtaaatatgcttaaactacttgtagtaagcttgctaacttcacatcatagacagagaatactgatactattactttacaaatcaaggtttcacagctaacaaaaacacataggcctaatatttcacacccaggaaaaacagctaaatctaatgcttacaaaagacaagatatcttatatcaattaaaactattacaggcatgtcagctatctaaacctgaacacaagttccatgaact

SEQ ID NO: 57702 - DNA, 846 bp, Arabidopsis thaliana landsberg
  unsure (1)..(846): unsure at all n locations
cacctccctttttggagaaggatctacacaggccagagatactaacaggctctcacacgtgcaaccgtgatacacgtgcgtctcactttctctgaattgtacaagttcaagtaacgaagcaaatctcaatcgaatccaaagacaaggacctccacgtgggattcttgaggaaatcttgaaaacgactgaataaccaaaataaataatgatctgtagagtacacatattattaccccttaaatttgtacttaaaatttatcgactttcttaattacatgaaatgatctatagaatttcatataatcgtgtatatcattctttgtataataggtacaataacacaaattcataaatttatatgcaaatataaggatcatccatcggcagtgaaatcaaaagggctccaacttccaaacaagagattggtggaatcattggattcgtcagcgaaatgaaccaccggttcgtgtacagcctgaaccggagtcacgccaacgtctacatggttatgaccaatcaacaaagcatcagaccaaacaccattagtgtctaaagagagaagctcttcaccaggaaatggaggcaagccattataaccacattcctccacaatgtgttccaccggattaatataatgnnnnnnnnnnnnnnnnnnnnnnnncatactccatgaagggtccatggaagtgccggtaggattatctaccaaaaaatccgtagtggctaagtcgcaattttcttgtagtatagattcgtcaggctttggattcaagaaattggcgtaaacaagagcaagatcgatgcttggtgaactcaccaccgggttgccagaattagcggttaggc

SEQ ID NO: 57703 - DNA, 488 bp, Arabidopsis thaliana landsberg
  unsure (1)..(488): unsure at all n locations
gttccgatttcttgaggttttggattaggcctgatggcgtaaaagagcagttcagatggaataaggatatcaggaactggaatttgcttcaatggaaaccaagcacggaatgtgagaagtataaccgttgtggtaattacagtgtatgtgatgatagtaaggagtttgattccggtaaatgcagttgcattgatggatttgagccggttcatcaggatcaatggaacaacagggacttctcaggtggctgccaaagaagagttcctttgaactgtaatcagagtctggttgcaggtcaagaggatgggtttacggtacttaagggaataaaggtgcctgattntggatcagttgttttacataacaactcagagacctgtaaagatgtatgcgcaagggactgttcttgtaaggcttatgcgttagtagtagggatcggatgcatgatttgnacccgtgatttgatcgatatggaacattttgaacgc

SEQ ID NO: 57704 - DNA, 1382 bp, Arabidopsis thaliana landsberg
tataccaggctcgccaaaacgatgtacaaaaccctagtgccctagcagcaactatctataatagacatttctttggattcagtatcgtgcagcttaagcttgtcccaaactgtaatctcatttatgttatcaataggttcaatggttttttttttgaaattaggactaaaccaactcaaacataaagcaaacaaatacaataagcaataaacaatcaaaatattccatcttattttttcctctctgcaaatttagctttgctcaattttgattgagaagaatgtgaacgttatgttgcattttgttctattaaaaagttattacttcacataaaattttaaacaaaaatgtcttgaattaatccggagatggaggaatttacagttgtagaagataaagagattggtcggaaaaagtatctccggcatgttttaagccatcatgtgatctctcctccgataccgttaagttaaatctcaacggtagtttttgtataaagcctaaaagtaacaattaacctctaacttgcatatttgtaatatatattaacgttaaccacttttcttctacatctttttcttctactttaacccattgatctcttccatgtcaccaatgacttcagaaactccatcacctgatatatacataacaaaaatatcaaactcgtatgatctaaaatcgtagctcaagtattttcagttgaatgatttcttaatttacctcagacgggtcacgaagcgagtaaaaggcattgctgtctttaggcacagcagagactaatataccataaccgtggtttggtccatctcgtaatacctgacattacttgcaccttaagtcaaaactacttcttaatgaaatgttttagctatataagtttataaaaacaaaccttaaatgcatcttcgtctgttcgatcatccccaacatagattggaagaacatcctcacagttgtttaggcctgagaaatgtattaaagtcaatggccaaaccaaaccaagattcagaacagaagcagatgagaaggattttgttaactaccgagtgattcaagtagaaatgtcacagctttccctttgtcccagtcaatcacaggacggatctctaacaccttttaagcaaaacatacaaaccaagagaacaaaatcaaaactttgaacttctttttgttggaatatgtaagaattcagatgttttttaccttccggccatgtgttagccgtagttttggatatgttctgatgacatcatctacacactgtgcaaccaatgtccagttctgtaacaaagaagagctttttaaagaaagtgtattggtttataaaggaaccaaaaaggttattgaattgagaaaccaaaccttttcttctacatacg

SEQ ID NO: 57705 - DNA, 1347 bp, Arabidopsis thaliana landsberg
gctcaagaaaaataatctccaaaaaagaaaaagaagattgaaaaccttgagaagggttctaaacagctgaaggataaagtgcgtaacatcagtaattcttttttttttttaatgtggcacatccctcttcttccaatatgtttttagtctcaccagccatgcttatgaaaattttgacttatctttccctgggagcttagatcagtaaacgcaaaatctatggagttgttccttgtttaataccctgtaatatagaacttgtgcattttaaactgacgaggttttttgttataggctttggagctgcaaaccaacatagagaacgctggtggtgaaaaattaaaaggacaaaaggcaaaggttgagaagattcagactgtaagtttgcttttgttcttagcatgctgttagtgaactcacagttaagtgtgtcctaatttatgttgcacatctttaggatatcgacaaaaacaatacagagatcaatcggtgtaatgttcaaatagaaacaaaccagaaactgataaagaagttgacaaaggggattgaagaggctactcgagaaaaagagaggctagagggtgagaaggaaaatttgcatgtgactttcaaagatataacgcagaaagcattcgagatccaagagacgtataagaaaacacagcaggttttgacagttcttatacctgttatctatatactatctggatagcagtcacagatcagtcctttctttttgtttagttgattgatgagcacaaagacgtgttgactggagcaaagtccgattatgagaacctgaaaaagtctgtggatgagttgaaggcatctagggtaacaaacaactaaatctttttctttcggtctatatttctttgcgttgttttcatcatctgaactttagtcgaatacaggtagatgcagaattcaaagtccaagatatgaaaaagaaatacaatgaattagaaatgagagagaagggctacaagaagaaactcaacgacttgcagattgcattcacaaagcacatggaacagtaagtgcggtaaacccttcattatatgattacctcgtttacatctaaaattcgtcattctccattgcagaattcagaaagatcttgttgatccggataagcttcaagcaacattgatggatactaatttgaatgaagcttgtgatctgaaaagggctcttgaaatggttgccttactggaggctcagctaaaagagttgaatccaaatcttgactcaatcgccgagtaagaattttggtgttgtttctttcttgcttcgattgactcatgtttccctagctttcttaattgtctgttgtaattacttaaa

SEQ ID NO: 57706 - DNA, 516 bp, Arabidopsis thaliana landsberg
  unsure (1)..(516): unsure at all n locations
tattactctaatttcctcgctgtatctgaaaagtgatttatgattgagatcgtgaaaatgaatccgtgggcctaaagatatctgaatatgaaatagaaaaaatagaaaccaaaccctaacaacggaagaaaaaaaaaacctaatgattcctgaactgactaaagcaattcatgaatgaataaaataaagaagacgaggaattaaagattgaagaatgtcatctcatgttgaattgccagtgttcttcttgtaaccagagtagcctcttatggaaagatacttggtttgattgacaagagatgcttgtgttttgctannnnnnnnnnnnnnnnnnnnnnnnnnnnnnnnnnnnnnnnnnnnnnnnnnnnnnnnnnnnnnnnnnnnnnnnnnnnntaaacacaaaactcggggtttagataaaaacacaaagttgtagtatatatagagaagatgaactcaagttagtcaaggtcgtgagcatcttacgtcatagtctttctctttgaagagaccatg

SEQ ID NO: 57707 - DNA, 956 bp, Arabidopsis thaliana landsberg
ctgagataggtgagaagactccaaatgcaaaagatacacttatgttattttccaactccttgtaatattctcatccactaacttgcacatcaaactatacaattataacgtcataaagatatgagattactttccatatctcacatcacgtcagagcaagtaatagcatgacacatgtcatatatattattgcccatcttgttttctatttttggctctttacacataacttcaatatctctcttctctctctctcaaagatcgatcagagtaatctctctctgttgtgtggaaaaacgaagaaagaatgatcaagaacatcttccaaagtcggaaactctcaggtctctgtgttctctcaatcttgctcggatcagtcacaatcctcctcttgaccaatgataccatcgatctcttcccttacttgtctctcccttatctccgtcgatcttctctctccgtcatccctacctccacgccaatatcgagtcccaccaacgactcatcacctcctctggaatcaccgggttaatcaaacccgagtcgatgatcatcctgatgatcaaggtttggaattggattggcttaaagatgacaaacaatggaaagtgagtttgaagatagattggaagagatgtgagagtccagattacataccgtgtttggataacacaaaagctatcaagaaacttaagtcgaaaagaaacatggagcacagagagagacattgtcctgagcgttcaccaaaatgtttggttcctttgccgcaacgttacaaagttcctcttccttggcctcagagtagagacatggtgagagactcgtttctattttttcggtaagatcttttcttgttacttgcttgtgaagattgtgattccaatgcgttctaaattcgtgtttttcggtgtgtctgcagatttggtatgataatgttcctcatgccgaaacttgta

SEQ ID NO: 57708 - DNA, 1231 bp, Arabidopsis thaliana landsberg
tcccagccttgctatattggggaacagtacagaatttgaaaagggggttctctggctctcagaaaatcttactttcgattttgatgcccgggtcaacctttttgaggtaggagtctagttctgtattctgttgaagtttgcttcaagagtggatgtgtccttgagtactgaaaatgagttcactcgcacttgatgcttctaactggtgctctttttggcttctcatttgtagtgcaatataagagttcttggaggacttatctctgctcatcttcttgcaattgatccaaataataggttgattcagggttcctacaacaatcagcttcttcgattagctgaagaccttggaaaacgttttttaccagcgtttgaaacacctacaggattaccatatgcatggattaatttgaaggtactgaatcgtcacttatgaaattcacttacttcactgaaatcctggctatctaatgcgaaaaggaacagtcactttgatatttttcattcaattcttaaaggtttctatgcttaagtttgagcttgctcttctagttttcttggaaaatggaatatttgaccctgaataatatctttgggcagaatggagtaatggagaatgagacaactgaaacaagcacttcaggatgtggtatgtatcttgttatccctactttcttttacattctagttttccgaatgtgctcatgaatttattgatatgcattttacgctttaggttctctcgttcttgaaatgggagcattgtcacggctcactggtgaccctaggtttgaatcagctgctctacgagcgcttcgtcagctatggaggatgcgaagttcgttagatctgcttggcaccacattggatgtggtacctggggaatggatagagtactcctctagcattgaaggtggtatgttgttcattcagaaggattctagtggcagttcatgttccgaagatataccaaaatgattttacttatatgtgtggaagtgtcttgtgccttagattgatgtagctctgatgtgtcatttcatttatggtcttttaaaggggttgactctttctatgaattcctcttgaaggattatattctttttgtcaaagaagactactggggaatgtttcattctgcttatccggcatcccccaagccccttcagacatgggccttggtaaaacacaaaactgaaaaaatgtacttccgcaatctctgttatgacac

SEQ ID NO: 57709 - DNA, 785 bp, Arabidopsis thaliana landsberg
cgaatttattcatgattgcctcttttatttttgtgtcattgtgcttgcatttcttagagagaattaagtgtaagatactgtgttcaattttgaagattggctaaacaatttaactaaaagacacaattatttatgtttggaaccattagactcgacactgtatcaaaactagaaaacaagatccaaagtctttaacatttgttggatagcaaaataatggtagatattaagtcattagtcagtgtacaaggcagaagcgcgttaacttggaatttagttggtgagtccgatgattcactctatttctgtatatatacagaccatttgatgcattttaacaaagagaatcagttaatatgtctaaagagaaatcatatgtaattgctcttcttctatctttgcttctctgtctttcttttcaagttggtgtctctgaggccaactacaacgcaggtctggtatatataattgtctatgcatatttttatctgttcaagttatcacattatttttgaaagaatcctgaggaaagctcaaccaaatatagctcgaatgttttatgatatttttgatggtagttttggaaaacaaaacctacaagtgtgtataatgttcaacattttttctagttactacaaggtactcggattctcctcgatgcgccaatggatcttctgcaagtccaccaacaagtaagtttatgagcttcataaccaaatatttcgagtagactgtctatatatacaactttaatcctataaagtcacactaagtttgacgactgg

SEQ ID NO: 57710 - DNA, 612 bp, Arabidopsis thaliana landsberg
aaatggtcataaaatatcaaatgtaatgaaaaggtacattaaaatttgttctatatataaattaacttaaatatattattatatatatgaatatttcactaaagtaaatctaatgtaataaattcagggtgattgtaaatatgatttagcaattatacaatatctaaatagattaggtgaagtaaaaaagtgataataaatatcattgaagtttaaattgtcagtagtttgtacaaaaaaacatctagacattaatatttgataaatttaatggtaacagttcgaacatagtctggttattctcatcggttttgaacacaaaccactgatactggtctttattaagctgacaacgcaaattttgaaagttacttgatactattaaatcttttagatacctttgatagtcttatggcgttttcgaccgtgaggcttgttcaggattgtcgatcaaatttttttttttcaaatgtgttgttctcccatttgtactttctttgactataccactcacctaacacacaaatacatggactctctatttagcttatgcggcaactcttgaatatgacaaaataaaaataaaaaaaatcaaacttgtttgatatattt

SEQ ID NO: 57711 - DNA, 1426 bp, Arabidopsis thaliana landsberg
tgactattgacctaatgtgaaatgatagggtacatacctgcgaatgtacacgcttacgatcagtagaactttaacaccaaaatgagggtgggaattcaattagaatatgttttgatgaaacaaatataggaaggtatgcatatatatttagcatgtgattcagacttagtgtaaaccattgattgaatggtaaattttgtaaatcctaatgctttggaaaggaatattttattattaaaacagttgatcctaaaattagctgaacacacaataacatacaaaagacacttgctagttgctactgatacaaaatcttattatagtaaagatttttcgataaaaacaatatacaattagtgttcgaaatctaacatcgtcaaaggttatgaagtagacagtttaggcattgccgtggacaataccgcaaaaagtaagtaaacatttttgttcgtagtcgtacgtttatacacgtgtggctaattaacaaataagctatcttatagagttatagtaatatatctttgcatgttgtctataccgaaaaattataaagacgaacacctatttgacacgtacgtatacagaactaaatctaatttatgttgtaaaactttcccacttcatgggtgactgacttgtaagtttagctgtagagggcttttcccaaattaattcattttttataatattgtaaaaacatgcgtgattagtctgtgttagaagaagtacaacgttttgtttagagaaactcccatatctaaattcgattctttcttaaaataaaattatatttatttggaaaatttatcagttgggtcgtgttttaattagtttatatggtagtaagaaatgcagaagacctgattattctataacattaatcgaaagacattttaaactcggatctggtagtgtggtggtctaactctacctggatcgggaatagtccactttgtagcatattagtgcgttcctactaaaactgaccggatcagccgatagaatatataaaaaaaaaaatgaataattctgtatacagtaatgcatgaaaatgtaaatgtaatagccttctaggcccaataagataacttgggctaaagatagtatttttttaatcttgcaaactaagcccagatctactgggaagagcgtcgcagtttcgcagctgtaacaagatttcttctggcgaagaagagagaatcgccgttcaccgattcgtttctttgttcatctcctcccaggtaatctgtgaatttttgcatcgatttattgaagcttggtgtagattctaggtttttgttttaagtttccagaattcatctatatcgatgtcgaagaattactccttcgattttgtatcgatcgatgttgattcgatcatcttcttagttgcgaacttcattagatatctgtttgctttcggttt

SEQ ID NO: 57712 - DNA, 518 bp, Arabidopsis thaliana landsberg
  unsure (1)..(518): unsure at all n locations
ttcacttataagttcaatagtttatatagcttctggtagagtagtagagtctcttacttacaacttaatgaaatatatccttgatgtcaaaaaaaaaaaacctgataccgtggttttactattttttaccatttatgatgttacgtaaacttaaagaactaatatcataaaaggaaaagttatttagttacgaaattcgttcgtctaaaataaaaaaaatacatatgataagtaaatgattcgactaaattttaaagatcatattttattcaaaagatgatttgtatttgtaatataccaaaatatttcagataatttaacaaaatacaagtatcaacaatattttatacttgattaatgtgtctatagttntcttaatggaatataatatgtagacaaagtaaccataattgttcaagagtttaaagatttgcattaataattgtggacaatttaacttgatacaaattagcanacattacggnggttaataagctgatcacanataaagttcatga

SEQ ID NO: 57713 - DNA, 470 bp, Arabidopsis thaliana landsberg
  unsure (1)..(470): unsure at all n locations
ttctttgtacttctctatctttaatattatcgaagttaagttttatctttggcttttaaagttcagtatttggacatttgatacatcacatgagattaaataagatggttgacccaataaaaccataaacaaatgaacatacgatgggtttacgcaaatgatctcaatgaattgtaccttggaaaattatggaatttgtgactagtatatgttgagttgtattattgattagcaattctgtaatctcaatcaactcggagaatatggcgcacaaaaaaataacttgcacagatgtttcccgatataagagcgacagttttgatatgtgtgtgacaggcaaagacattgacaaattgatataatctctagtccagcgtataaacaaatcactaatgcntaattgatatcagaagttgaaagtgactttctctaagttgataagtngatattgtgctatctcaatatcatca

SEQ ID NO: 57714 - DNA, 402 bp, Arabidopsis thaliana landsberg
atttatacttttattttgcaacctttcatcgattgatagcgtctaatgatgttatcatccttaacttataaaaagaaattacgctcaataaaagtaaccaagcaatcattcaaataggaaggaaagtagcttaattagggttaacgccttagaaggctcgatttcgtgcagcaggaagggaaaatacgggatgcttggatgagcatacctggttgcagctcgtcgctggcgatggcccaacgaatcacgaacgacgaagagctcggctgctctggcttagggaagcgcggcccacgcggtctcagcgtctcgcccgctcgccctggcctgcagcaggcagcagcgctcgccagcagccggcaggaggcctgccgcccgcgcccgttcggcgcgacggcgctc

SEQ ID NO: 57715 - DNA, 509 bp, Arabidopsis thaliana landsberg
cgaggcacgttgggttcacatgggcacatggttgcttaaacaatcccattactccatccttttcattgtccctctattttaggctctttgtgctcatctctattttctttctttgatcaaaattattataccacaagacttttttttgtgcttaaattttagtcgtcatatacgacaattttttatatacgaagtttattattattaacatcaattgattattcatatatttttaatcaagtggcctttttaataactctctattcttttgacgtaagaacaaatagtaacttttatttgtagaatattcattctaagaaattaatacgtaaatacatatatttctcacccgtgaaacaccaccagtcgagtaacgtgattgaagatatgtttaaaaaaaaaaaaacatgattgaagatatgagagagcaagagtcagggaactattttggcccgacacatgtgacacatatatatatatggggattaatccttttggaattactacat

SEQ ID NO: 57716 - DNA, 104 bp, Arabidopsis thaliana landsberg
ggtttgtaaccgggcgttgcgagatcagcttacatttcggtcctgggattcactgcgaacatgcatgcggacatggaagtgctgtgttgcttgtttactcctgc

SEQ ID NO: 57717 - DNA, 116 bp, Arabidopsis thaliana landsberg
atgactgtgataaaacaatggaaagcttttcggggctgtctcataggaagacttttacactcaatgttaaaaattatagatggagttttctacccacaggggtacctatagatatc

SEQ ID NO: 57718 - DNA, 1125 bp, Arabidopsis thaliana landsberg
tttgctctgatgattgcttcaaatcctgcaaaaagttggattctttcatggttaatttactggagcattctctataactatttcacgtatatgcacttggagggtttcttgtcctgaagtgggcctgggcaagatggaatgaaaggaactagagaagtgacaaaaaggaggcgacggatgatgatgatcaaaaagatgatgatgaggatgatcaatcatctgatgggcatgaagactagtcatattacttgaacactttgaaaatgttacccactttggttctgtatagcaaaaacaccataaacttcaaaatgaagatttcttattttccattgtatgtacttgaatcttgagtctcatctccttatctaaggggactcgaaatctcttctcatgctggcaagaagttttttttttcttactggacaaatctcttgttgttgctgtgcagtgtctctttagttcgtgacttgtagttagatcattgctagttaagtttcaagagatttgtcatgttaaatatcataaaccgaacaaatgaacacacaaacattatcaacaaatgggatttcaacaaacggtcctataatgaccaagttatgaatcacatacataacttttgcctcttctatacagtattttgacgttacacaaagctgatattagtctacagtgtatataacaaccaccacactctacaaagatccaacaatcatatcacggcttcacaaggatcaacagaatcattctcgcctaaataagccatcatctgaaccactagtaggagacagcccaaacgggcgtgtgtaataaggagtcgaatacaattctctactgcttagaactgaatcaggatacaagcttcgagtaggtgtcacaggggtattatatgtacttgacgatacttggttaccttcaaaaccagatgttccaccagagattgcactgcctgaaactcttggtatgcctttattaagtctgaatcctggaacatcaaccatcggtggaccatctgccctgaagctggaccatagttttggtccaccgatgtatggggtggtcgaaagtcggtcatccactgacaaaggaagactggtttctagttggctttggaagccagtattt

SEQ ID NO: 57719 - DNA, 529 bp, Arabidopsis thaliana landsberg
  unsure (1)..(529): unsure at all n locations
tatacttttgacggcactcacactagagggaaccaagccggtatcaccaggatcccaaacaaatactgaaaaattaccttggccactgctgacagcactcagaccagaaagaacaaggccagcggacagaccaatccctgaaccaacgtcgagagctggcattcccggctgaagattcttctcgaggagcttcaggcaaactgcatgcatgtgtnnnnnnnnnnnnnnnnnntcgaacccaatcgacatggagtcaatagctgactgaggagcaggaggagtggctagacgattgttatggagcagaagatgctcaaatagagcttgcagacttgaaccatcaactagactactgaaatttggatggacagcgcgaactccagagcctcccctcatgataatattgacatcactagattcactactaccaactgcaggagaagggatgcacccaattatgagagtatgaatagcagctgatctccttctatgttcagtacatgtcccttgtcgaccatgtatatcagac

SEQ ID NO: 57720 - DNA, 523 bp, Arabidopsis thaliana landsberg
tatctgttttcctcgagctctggactgcgcgttggattaacagaaagccaagggttaaacttgcaaaattccagcagactcagactacccccgccgagaccgcgggttgaatctctatttcttcaagggcttctttgtaaacttggctcggcgaaggggtatgcatgatcctgagccatcggatccacaaccgagggctcggattagatcacgccataaaatactcagtatcgagtagtgaccactagatcctaggttaatggccagatggaccaccatgttaccctatattcttggccatccgttctagcatcaagggttacagtttaacgcaacgaagggatatctatcatcaaatcgtggccatccatgtggatccaacggtatagcctcaatctaatctcgtccgtcccacgccgaatggactactcccgtctctctccttccctcggctgccaggcacggcggcgccgcgtgccacacgacggagcacacgccggcgagcgcttaacacaccccagaa

SEQ ID NO: 57721 - DNA, 432 bp, Arabidopsis thaliana landsberg
tattgatttcgatcttgtgaagaaaatctcattttacaaaacaataattaattgctaaaataaggtttttaataattttagtttataatggtaataagtttttcatttaattgtgtgtcatttatttgcatttggaataattttgattgcgcacgattggtttttgaatattgaatagcattttctcttaaatgaaaattcacataactaatataataattagtctaaaaataaatattttatttataaataattttggtttgattattatgaattttataattatttgaataggtatttcggaattagaaaagaaaaaaaacaaaaaaaacctaattataatcggcccactaggggcccaactagaaggagctgtcgcccctaaccctagccagccgcgccccctggtagccgtcaccccctgctccctgt

SEQ ID NO: 57722 - DNA, 1273 bp, Arabidopsis thaliana landsberg
tgaaacacggttatatgagaaactgatatatatttgatgatttcactgggaagtgagaattacacatctgttcattgagttaccttggcctgagattattttggcagcatcaagagcaacatccaagacacaacagaagatagcaatgaaagtcaatattgagaagaaaagaaaaaaactctgactagatgattgaaagaatagtccttagaaggtcaaatttaccacgtccaaaggtttcgttggaggtttgtctgcgaggatatctagaggtagtagtggagttgagtatgcttcctacaaacaataaaaccataatacacgattacatcacaaaaccaaatatttagtaaaataacggccacaacaacagaaagtaattctgattagaaagattaattggggaggtttattgcttcaaccagttccaagaactagaatgaagggagcttaaaaatggcaaacctgaagagctggcttagtggggatgcggaaagtaacgacagcaggagcaccgtagaagactcctttaaccttggcctccaattcgatagaatgagacagaatacctcctctgcacagcaaatattagattagtgacgagagtaaaagctaaagcaggccaatataagattttatgattgaggaagaaactcacgcatcaagtctttcccatgattttgaagtgtttccattaacaacttcaaaagtctttttatcccagctattatctgtcagagtcacatcatacgccgacctgagagcaaacaccacaaatatctgacgcttttagctgacattcattaagaatctcaaagtcatcgtagccggcagatacaaaattcacaaaccaaatccaaaattccgataaacaatgagatcagatcaaatggcgtttcgtttaggaactgatacgcatacggtagatctaatgatagctcaagcataatctcctaattctacattgaccaatctctccatgcaatcagaaattaacacggatcggaaatgaaaatggagaaatcaaacggattcgggaaataactagatgaaggatagagaactaacgaggatccttggttatagatgtcgtaggaaacggagacgcgttcggcgccagatttgagcctgttgagagtggctttcttgtgaaccaccatgaacggcactttcgaggtcgcgaacgaagcagaaacaagcatgaaaaccgccatggcggagatcagaagcttagctacagcgacggtcatggtttgcgatctacgaccatgta

SEQ ID NO: 57723 - DNA, 1468 bp, Arabidopsis thaliana landsberg
agctatacccgctcccactaaaattcccgcaatgacaactaataccatcttaagctttttttccaaaactagatctaccacacgaccaatcaatgttgttgtactcacacatgtgggcgggcttctcatcattgagaccaatggcgcatcaagctccaagaaaaataattaaatgcacaaatatatcagttcatctatctttttttgtgtcaacaagtgctgaagcggaacaatattttgttttaactcacgttattgcaatcctcccgatgcaaaaggcctatgcagcttcccctgtcgtctacaattggtacaacttgctccttgaaaaaccgcatggccacattcttcaactgcagagtgcctagcagtggccgagtggcttcaaatcgaatcataatgcttactattggttcacttggtatcacctcgtgtcaatagagtgctggtaattacctgacttacatctcagtattagattgaaaaattgaggcaagtacagcaaaccaccaaacctcacattctgagatcatttgcctgaatagagagtgtgggcaatagatatctataccttactaagtagatgtggacgcaatatagacttggaaaaccccaacaatgtttctaggcggacagcagcctgcggttgaacaaaaaccacccaactaaggtttcatcggacataaccgcttagtaaatacatgtttaccaaaacaaaaatctcatgtctgcaaataacttttcacatcataccatgcctccactagtcgtccaaggtattgtcttccaccttctcacgatacttaaaagaatccctagggcctcatcgagctgaaaaataatccataaaattagttaagaggacccataatcattaccagactagtatcaccagaaaatgatagacaccacataaaggataaaacaaatagaaggcccaaatccagagagtttatctaaattcgttagtacctggccatcattgagagctgcttccatcaggagattatcagcttcttgttgaaccgccttggagattgatcctgaagaatccggccataagcgaagatacagatttctaaccattccataatccccttggacagcaaacgcacgcatcatagacaggtacaagtgaggctttggtcgcaagacttcattagctccacttctcttcaatatctcaccaaatacacaaagggcccctgtgaacatattcaataaagaccctaagaagttacttcaagagcatctatgtccggatgctgaaagcagcaataatcagaaataaattcatagtatcataccgcttgttgaaccacacttcagcatggcatcaactactgctgttaatgcagttcggtcaatgaacacgttctcacacaatttcatttccaaaataatttcctgcagtgataacagatccgttgcatccccaaacccctatgaagtagaattatcataagag

SEQ ID NO: 57724 - DNA, 1490 bp, Arabidopsis thaliana landsberg
taagagtttttctagtgtattcatttatttgtaagactcatcttgaaatcttatacggttaagttaaccacctgcttgtttcttgtacagcttgttgagaatatgtcatccaagcccttttctatggagaagaaagtgaagttaatggaagatgttgcattggagttctctgttcgttgggattctaaagatttcgagaagaggattgtgagacagaatagtatttcagtaatggtatgacaatgactcatttgttttagggaacaactaaactgaaatatttggatagtgattgaattctgatttctttcttggacgtgaacaggagaccccaaaaagcaccaacgacaagtataagcctgtagacagaaacatggccttgccaaaaagagaagagtttgaaggttctgaaaatggggttagcttgaacagaaaaacggctgaggcatcagaaagaagagatcctttgtttcaatctgataaagaaagttatcagaatggtctcagaggaaatcagcgtgggctaacatataaagaaaggtcagagaatgttcgtcacgcctctagatcggaaagcaaagacaataaggccgaaaggaaagagttttatctgcattctaagcaaaaccctgctagagaaaaacatcagcctatttttaacgaaggtgacactatagtgatgaaggtcaactatgggaatctcggtcaagggaatggacatcgacctggtgtagttgatgcgcataagaaaaccgagtttgttgcctcagaaaggaaagagttttattcgcaatctaagcaagaaccttctagagaaagacatcaacctatttttaatgatggtgacactattgtaatgaaggtcaagcatgagaaccacgttcaagggaatggacataaaaatggtgtagttgatctgcataagaaaatagaggttaatgcttcagagaaacttaagtctagcagcagcaaaagagccgacaagttagttatcggctttaaacaagagagtttctttcaagggtacaaacatgagaaaaatgaagagcatgcacatcagaaagtggaagatagtacctcaagacctccgaagccaaatagcaagtcaaagagagcggaatctatcaatccaggttcgagacatcataatgatcgggagagtaaagaaaatgcagttcttgtgggaaagagcaccgaagaagatccatctggtgataatgttaagggtggagaatacgaatatgatcatgcaaatccagcaaggaaagttgaggagcgagaaacagagagaatgaaatcacccttctacaaatcccttccacctccgtatgttaaaaaatctattgctaaagcaaggcatgaaaaagctgaagctttagataatccaaaggctcgttttgatggtgaagaaggaaatcatccagacaatggtaaaaatgtttatggggcagagagacgaaatggagcaggtcatcatgaagtgaatgaca

SEQ ID NO: 57725 - DNA, 862 bp, Arabidopsis thaliana landsberg
  unsure (1)..(862): unsure at all n locations
gattctcagcttgagcagtttcgtaaacgaaaagcagcagaaaaagctaaaaaggcatcacagaatacacaacctgttgataatagccaacaaagtgtcatagattcagatggagctggtgcatctatctctaatggacctctcaagcaatctgctgaatctacctcaaatgaaacccataccaaagatgtatataatttatcattttcgaatacagcaatggatgatggaagcaaagaaagaagtagacaagatgatggtcaggaatcagtgggcaaagttgatttttctaatagcttagagttgataggttcatcgaaggacttaacagtgaatactaggcctgaagttgtaccttannnnnnnnnnnnnnnnnnnnnnnnnnnnnnntttgatcgtgcttctactctaagagaaactgcatctcttttttctggaacctcaatgcaaatggatggtttcattcacggcagtggattaacctcatccagaaaaggtacgtggctatcatatgaggttaatgtagtaatgtattttgtcctaaccctccttcttttttgttccttaaaggcaacaacctaatttatcattacggtttttgttgctagactctctacaacctactaccaggatggcagggtcttttgacgaagttgccaaaaaccaacagggaagtggtgaactaggaggtagcattgtgcagaagccaactttgtcaagcagttatttgtttaattctccagacacatcatctcgaccttctgaaccttcagatttcagtgtgaatatcacaagctcttcaccattaaactcagctaagagtgaagcaactgtgaagagatctcgtccctcttttcttgat

SEQ ID NO: 57726 - DNA, 729 bp, Arabidopsis thaliana landsberg
atttgatagcgtagtgaggtttatgcattttaaacgtatttgttactattaataagtataattatgttatcatttacagaccattttataactaagattaaaacgtattcgaggcagattggaatttatctcaaataactatgtgaactcttttatctataggttatacaattaaataacatcaattacaatttctgttattttggttcgacattatgatttaactatagtggccgcaatgaatatactgacaacattgcttcaactgccacatctattcgaaattaataaccaaaactgaaaattgaaataaatattcttatcgttttgtttagataaatttgcgggccatcgaattaaagagcagttggaaaatatcaaaattgatttaacaatcataagtttacaaaagttacaaatgagaacataacttatacactaaccaaactttttctgtatgcgtaacaaagaaactcaaaacatctttctctcttcttcttttactttaactgagaactataagaatatatctctgcctttctataagtttaccaggaacacaattcaacccgaaaccaatcctcaggacaaagagaaaccgttacaaagatgttacctcgaacagcaagagaatgtctttgtcccttcgttctcgttcttaaccaagctaacacgattcacagtcagcttctctttgaagaatcagagttcaattgctttcgactaatg

SEQ ID NO: 57727 - DNA, 507 bp, Arabidopsis thaliana landsberg
  unsure (1)..(507): unsure at all n locations
taatgaaatagataataatctcattgttgtggaaatatttgtactcgtcgtgccgagaagaccgattcctcgttagcgcgttgaaaaagttattttcataaattttcgtttttctatttcctcgtactttatcttctaagttgtaagttgtaaccaattacttttttcgtaaactggaatatataaagaatgtaattttttttatctacaattttccaagactaattctctcggtctcaggtcaagtcagccatttactttttcatctagaagattatgatagtttaaatataatccataattaccttaggaaacataatccanaacatattaaatatttaagaacgatatataattaacgtcatttagttttttagaaagtaaacgttctatataatatgaattgagataacaccananaattacgatattaaaagaattaanacggagaaagactgtattaaacgtataaattttgtaatacgtagttacgtactttcgtagctt

SEQ ID NO: 57728 - DNA, 250 bp, Arabidopsis thaliana landsberg
ttttatcaaccaaaaacaaactcacctttcctttaataacccaaactatactagaaacacataaattaagttacactttcatataccaaaaattaaattaacatttctgatccaaaaaataatatatctataataagtagaccttaacaaatatccacttgaacaccttatatgaaagagttaataactttattttaaaatctcaccattcacttaaactcaaaacccactctcaattattttaacttac

SEQ ID NO: 57729 - DNA, 404 bp, Arabidopsis thaliana landsberg
acttctctcgccggcgtttgtcgccgttggtctcgtctcctccactctccttactttctccatctccgtcgtcgcttaggtttgctccgacattctctcttcgcgatatccaccgtcgattcaggacttttcgccgcggattatgctatttcatacagagattgcgtcgaggaaagcgtctcttgcggtttcgagttcgtctgcgatcgttgacggtagttatggaagtttatctcatgcttctgcggcggcgattggacctagggtttatgttgatagtagaaatgctgttttgagatacgattcttggatgggaacgcttaatttgagatctccgatgattttccctcggaagaaattcgcaatcgcggtttgctctggtaagatctacgttgctggaggtg

SEQ ID NO: 57730 - DNA, 1750 bp, Arabidopsis thaliana landsberg
ttccggtgactgaattgttagagacgtccattgtctcaagtttactgtttgatccaagcttgtgtggcaaaactccggtgaagttattgttccatagaaacaatgtagtaagctcagggagttcaccgattccttcaggtagttcacctgagaggttattgctgattaagcttagccatgtgaggttcttcaaggtcgagaagcttgatgggatactaccagaaagctgattactcgaaaaatcgagaagcttgagggatttcaagttgctataactctctgggatttcaccggtgaaaccgttttggaatagaagtaaagtctctaggtttgagagattccccagttcttgaggcagagaaccagagaggctgcaattggaaacgtcaaagtacttgagatttgagagtaaggcaaactccgaaggtatgtttccgttgaagtgattataaccgatttccatgtgttggagctctgttaagagtcctaatctaggaggtagtttacctccgaggacatttccagctaaatgaataaacttcaatctctgtaaaccaccgtaagctgctggaatctctccttcaaagtaacttccaccaaagttaagctcttccaagaaacgaagacgagacacgtcactaggtaatagaccttcgaagttgttgctgaacgcattgaagacttttaagaacttaagcttggagattccgggaggaaaactcgagtcgaacgagttacggctgatgtcgagggtagtgagcttggtgagatcaaagatagaagttggaaacgaaccttccaaagaattcccactgagatttaagtagagtaagctcgacaagtaacgaatctgtataggaatacgaccagagaggttccggtgagagaggtcgagggaaatgacttgagccgttacattatcacagactacaccggaccaagaacaccaaacggcgtcgttttgaccgttaacggggactttccagtcttgaaaggcagagggagggccagagagagatgttttaagggaaaggagagacaagagttgaggtgaaaacttgagagctaaggaattgaaagcaaagaaaggaagtagaagaaggacaaggggatgaagaacaagagaaggagaaatgttcttctttttcatcgtagcttttagaaagaaattaaagtgaagttgtctgaggaagtgtggtgatattgttgagaaaggtgttagtgttgacaatggtggatttaagggtttgaagaagaagaagatggaagaagagaagagaagaagaagtcatgatgaaggtgatgattgtggagtgcgtctaatggtctggcttttgttggttaaggcattatggtttttgtgtggggaagaaaacaaaagcaaagagaaaaaaaaaactcaatccattttccactcttcttttacttttcttacttttttcaaattactgtacttcgtatactagtacttttttctgtttgttacctttattaagtatgaaccaaaataaaacgtatatactataattgtagattttgtttttgttttgccatcatacaagtattgggtaaaatcagaaaccaaatcacacaatgccactcatattaaaaaccgattaattagatatgctagtatcttttctttgtcctttaatttcttctcctcattaaaattcttttttttccactatggtattctatttaagaaacctttgcagacaaatgaatgttcaatggatgtatacgcatg

SEQ ID NO: 57731 - DNA, 1180 bp, Arabidopsis thaliana landsberg
atcaatgcactttgtatatgacaagaaggtattttttggtccttgtaaatttataacaaaaaatgtcaaaaaggcaataatgaaagcgaataatgaaaaagaacctctcccgaccaaaaaataataatgaagtgtgtggaccagatgttgaagcccactagtgggaaaatgggcccgctagtgaaagagaaaagggcccactatcaatttccgaagttgatatttggaagttgggaccaattacgtttggttactgtagaataatatataaccttttttgttattgtgtccaaaacatgaacgaatcagagagtcgagaaaattaaataaattttaacgtctcttcacttttttgactcacctgtgtccacttgtcttctcaatcataccaaatcatctactacataccaaattccacgtcagcttcagttttcattgtcatatttgtcatttaattcaaaaagaaaattgacacaataatttaacggttccaaaagttatatgtgatgttttcaaattctagtcactaaatttatcctccaagcataatcaaatgaaatttgttaaaaaataaaaaaaagcataatcaaatgaatactaacgtatttgtgtgtttgtgtattgttgatgcttggatcgaataatttatataaaaaaaaattcagggaaaaacgaaaagttttttattaaacgagtttagagttcagagttcggcgattgcaagaagataattacaacgatgaacagaatgttcgaacaagatgtaaaccgatacgtttgagctgaactaaagataccgagcaaaagtgatcggtcaaaatgctcggttacgaagctttgtgaagaaggtgaagtaaaaatttcatgttgcattcaaataatttaactcttacttcagttttcaattaattctgttcaaagttcccaccgtcacattgtaaggaaaagaagtaaaacaaacttatactagtatttatttaatgaggaaatgtcttggagacctacgatgttgagacttgagaccgaccattttggtataatgtgccactctgtaaaatctttaatttttctgtgttaaagaggtcacaatgccccactcagcataagcttttgttgtgattaacaataagaaaaaaaaaaattaaggaaccaagagctttggcccaagtggttttgcctt

SEQ ID NO: 57732 - DNA, 587 bp, Arabidopsis thaliana landsberg
  unsure (1)..(587): unsure at all n locations
aaaaatgataatattatttttctatgaaaatacataaaatagaaataagaaaatataagttttcttttttaaaaattattaaaatttttaacgaaaatacaaaatagaaattttattatcaaaacacagataaaaattctaagtatatagtttaaaaaaatgttaagtatttaggttgaccatatgatatttaaaacgatcaactacgattttccatctcactaattaaaacttttaggcattaagttaattaacatttttaaattataatatctttgggattaagatgtttatgaaaataatacaaatatatgtatgtaaagaatacaaatgtaaaatttttaaaagtaacatatgaaaataagaaaattttaaaataacatattttttacaattagaaattttacttttaccttttgttaaatagacacattttgtttttcttttaatttgatgctgtttgagttaaaattttggggacaaagggtttaaagaagaaggatgtttattagctataaatgtggcaatgttcatgttacttncttcgcaagtatttgcaattctgagcttaaggattttgatttgaa

SEQ ID NO: 57733 - DNA, 564 bp, Arabidopsis thaliana landsberg
gatagaacaaaggacgtaatattcgatgtgttctctttctcccatctttacttttattgactttttatttcaccttaatgtgtgatgtaaaaataaaaagtaattatttgttcaaccctaggtgaaataaaggacgacccaaaacaagtgacgagagagcagagagagcttcttcttccggacactgaacagtgagagcacccatctccaacctcttcctgtaagtttccacaattactctgtttttttgttctgcattctttatgacaaatcatagaagatttaggtttaagatcgatctcgtttgatttcacactcactatctgaagctctttgattacaaacccatcttcataatctctgtaaaaatcaaacatgcaattcacttaatggtgcaaaaaccccagaagagggaaaaaggaatcaaatttagtttataaaagcagtggaattgagttgcattgttgaaatattcaaaagcaagatcagatttttgataaagaatttcacttttgattgtaacttataatcaaggaacaagatgggaagcactgtgattttaag

SEQ ID NO: 57734 - DNA, 580 bp, Arabidopsis thaliana landsberg
cctctgggaggattattgatggatcacatgcagttgaaaggatcacgagttacatatagcatatatactatgttttcaagagatcttgaatttgttatgccaattgagtaaactttgattatcaggaaataaaccaacgaatcagtgttggacttatttgaacttttaacaatccatgctatatgattgatggcttatcacaacaaagtctataattttaggtactaactaacactactcgtaggggaattttaagaagatccactgacttatctgaaagataaacactaactatttgtcatttctatttatttatttatttttgacgttttttcacgtaatgctaattgactcttttttgtttctcatttttttttttaattttttatttgtcaatagacatatttacagacgctagttagatattcattttaaataagagaagtttgtttttttttggttgagaaaataagagaatgtaatatactttctaaaatttatcaatcaatatttattctaaatttgttttgactgatacgatttaataaaatctagtaaaaattcatagagctgaaaatct

SEQ ID NO: 57735 - DNA, 1680 bp, Arabidopsis thaliana landsberg
  unsure (1)..(1680): unsure at all n locations
aaaatatcccaacgcattataattcatttagcgaagtcaagtttcctggttaagaaaagaaaaaacttaaccaagagagattgaaaaaagaaaggaacccaaattcgtattttccgatatatcgtgtgttatacgttgacaaaataggtactaatggaatttatttaccgacaagaaaataattaaatatatcaacgaattgacaagctaaataagctaaaggaccaagttaggaaaaatgaggtccacctgcggaccaataacaactcgtccgtactaataatatctatttatacctatgttggatgtttcaaaaaaaaaaaattagcatcataaatcagatactttttcctttagcactcttatctattttgtttctctataaatcacattctaaggtcttctacctcctttgctcaaaaaaaaaaaaggtcttctacctcctttttctaaaaacatacagtatataattgtagttttcttataaaggagtaaaaatatgataaaaagttatgttactcttttatcatataacaaaacaactttcactatctttgtaatatctataaatatatgtaatgatataaattccaaacaaaatttacaaaacgtatagaagaaactaactaattctgatatgatcaaatcaaaagtctaaaacactgaaagtgtactggtgaaaatgtctctcttttgtaagcacaggttacacaacttcaatactgtatcacttacaaaaccaacttttcaatttggagctcaaatacttcgaatcataaacgaaacatggatgagcccactctgtcttacggagacaaattccatgagaaaagaaagctgagttagcaacaagtgccacgtgacaacatactcaatttcttctaaggaaaatacagccatctatttctttttgtcgcatacccacccatatatgatatacttagaaccattttaagtttttttaaaacataaaaatacgattttaaatttgaaaatttgattagagtgtgattatctaattattgtgttgtctataaacctacacagtcactactttctaccacactgattttaacaaaatcaattaaagttgatcagcacttatttctttcatatgggcttaaatgccaatttacttatatatattttgatgaaaatgtgtggtaaaacttaagaaacaaaaaaatcctaacactaattagcgcctaggtattttgagcaatgcctcttttaacttaaaaagaaaaaaacgaaaaaagacaaaagtaattgtcctgctgtcaagaaatgcccatattattattcatccacacaagacacgtacgaccatgcctcttagtgatttgtcattggcccacttcccatcctagtggatcaaattgataataaatactataataaataattacaagaattcaaatagaaaccggcaaatcaattaatagatataaaaaggagatataaatcgttaacattttctattggagcagggagagccaataaaagtcgaatctcacgatatttcgcagttctctaattggctctttgcataaaaaatgaaacctaactaatgggtagaagaatactttttgcaagcaacanatatatcagataggatcggtagctatccacatcacttgttaattgttctcaaccatattatataatgcaacaatttat

SEQ ID NO: 57736 - DNA, 555 bp, Arabidopsis thaliana landsberg
acaatcgtacggttatattaaaccaagtgctatggctggaattgtctgtctatcctacttacgataggagtagtcgagtatttaagacaacgattctgagcagtgctagacatacactttaaagtggcagcgttactcattatggctctgaaaatgaataagactcaactgtgttaggtaattagttcttaattactcactagaccgaggaatattaatagcggaagctcgtgagtttcatgagttgaaaaatccactggctacgtgaatctagtcatatatgtgacacacttatagcttttatgtcattgaaataatgaaaatttggtatagctgaggtcaaatgaaactttactactgaatcgaatccgaaaataagatatggtaggtatgcttattggtttccacattcattggattgcttattcatcattacaattcacaaaaaaaacatgaattgtacaatcttgtatttgtcacttattcatagcagttaaatatgctattgtgataaaattgttagtttggggaaatttatgtgcgtcttgttcttgc

SEQ ID NO: 57737 - DNA, 599 bp, Arabidopsis thaliana landsberg
gagagctggaaggaggatttctgagtcgatgcacaagagcgtcccctagctcacgaatatgaggaacaaagtttaatgcttcaaaatttactttacagcgtaaccgctgtatactttcaggcaaattgtcaaatgccaaacggtgagagaatggagcaacagcagcaatgccataactgcataacgaagtggataattcatatgagtaacaatgcattgaactacagacatatatagttcctcagatagacacaaaaaaaaaacgtgacttgacagaaaaacatctacattgaacactcccttagtattgtctataaagcattccagatcatatgtagtatcgtattttccaggactttaaaatgcagttattcatctgatagatcaccaggtttagaaagcacaaacctctggataataggtaagacattttccaaataccactctgctgaagcgtgaacaggcgcagtcttaatcctagtagctcgaatacctgtagcgtaataatcacgagtgctccaggcatactgtattggaagcttcctaacaatccgcacctcgtctttaggacacttataaagtgatccaaatcaaatata

SEQ ID NO: 57738 - DNA, 1907 bp, Arabidopsis thaliana landsberg
aactggaacactaaaagaatttgacccaaaaaaaaagaaaaaagataagctataaacctctaattaggtactataagttaacacaatgcaacaacgtgaacatccatatctttgtttttttttcagaaaaatagcaacgtgaacatccattaggccaatcgatatattatgctctaatttactaaaagagtgaactactcgataactatacttattatgagaaattgataagttggttggtaaattaatatgttacattacataactttttatatagattgagtggtttttaaattatatacaatttttatgtgaacatttcattcatcaaataaatgtgtataaaaccataaatcttagaatagtgtatcaaataaatgtgtataaaaccataaatctgatccaagatatattttttatttagtaaattagatatcaacataaaatataacatgttacagtaaaaaaatcaaatcgttgcataatagttaaatgaaaattgaactcatccaaacaggcaaacaagattaaaaagtttcagaatacactttagggaggttaataaagctttctaattacatagatctatctatttcatactataagaattatatcaacgatgtatataaaattaaattacattttatacgtgcatatataattactatttgactcatgataactaattattgaagcttctaaaaaaaaaaaattaagcttctttgtgaaccctacaaaatcaaatatcactatccatggattttcattgcctttgggtcatttccctatctgttgtttacctttttgacgggtttatttttgcggagaagaataaaaggatttgatcgcatattcgcattaaaggctcaattggtagaaattgaagactaattttaaattgcaaacaaagagacccatgccacttgtgacttgccccacttaggtccactatgttgtctcttttcatcacacaacactataagacaaattctcttataagacaacttgatccctaccatcacctaatgaatgatatatttttcaatattatgaagaaaaagaattatagagtattcataatcaattgggaatgattgaagtagattatgattcttatatatttcgggtgatttttcttacaaaaatacaattttcaacatgccatgcaaaacaatttttttttttgctttttttttttttctcaaatcagattttattttataattgacattgcaaaaaaatccgaccaatttctaccaagaatttagttcgaaattggttagaccatttttgatcgaatcatgaattgctatgtttaataaattaactagccaagaaatgatatctaaatgactgattgatcgataatgggtagtaatttcatcttagacaaaataagcatagtatactatttcccccaatattatagttacctaattaatctcttaaacaactgattaatcgatttaagcgatcgacaaaatataacataaaattatgtttaatagattacaaatcctatatatacatcaagttaacgcctaatggttgttgtaaaacctttaactgtattttttttttaattggtcagatttgttttagcatatttctttaaatcgcatttgagtggcggccaaagtttaacagattaaggaccctaattaagacctgacaacttcattctttgaaaacaacaaacccgtggtattacttaatcgctgtcaccgagtgcattacgaaccccatatgtccacatgcttctttcaaactaatacaaaactgaatacgatttccttcatcaataattgagtataataagatcttaaatactctaactacaactattaaaagaaaaggttaagttaaagccaatagcttccacgcaagtggttgaccaattcaactta

SEQ ID NO: 57739 - DNA, 1144 bp, Arabidopsis thaliana landsberg
aaacagtctgaattaacttttcttgtcatttattgacgcagccatgttcacactttttgcgattttgtttgaacttggggagttgggtttgtcttcttctttgagaataaaaatctcatactagtaaagaatactctgtgatattttatttttaagaacaaacatagatttctctgtcaataaagaattgttactgaagaatccaagtggttcgggtcgctttatggatttttacttttttgctaatcttattataatagaaccatataaaccaaattccgtttactttttaaatttgggtttatgacttggtttggttcaactcacttttggcttctaagactttgcataacatgttttagacagacaaaaaagaaaaagactttgcataacatgtatgaatttttattttattttgtttgtgtgtagacatgtgaaacagctatacagctgagggaggaaggaaaggtggtagtggctgacacaaccctccaatatttaggctcaattcatctcaaaagcggcgttattgaccctcacttcgaggtctgttatgttaaaaaaaaatatatatacacattaattttggctgattttgattttcgatttgaacgcattttaataaggtgtgaatgtgaaagcaggtggtgaaagaagctttgctaaggacattgaaagaggggttgggggagaaatacaatgaagaagtggaaggtgcttggtctcaagcttatgatcacttggctttagccatcaagaccgagatgaaacaagaagagtcataaaaccctattgatcatttgggtatcgcatacatgaatctattccacatacatgatacacatatacgtgtttctgtgtgtgtactatgttgctctctgactttctacagttcactattttaattataaagaaggatcttgtgctatcattagggagatacgtgatactgtagttcttcttgaaattgttattcgtgagaaatatcatggtttgaagtatttattttcacaagatggatgttaacgtggggatcattttacaatcattctacaaataattttacttctccagacacaagattttggatatattttagttaaattttttctttttttaaaaaacagtacactgaaactatttt

SEQ ID NO: 57740 - DNA, 596 bp, Arabidopsis thaliana landsberg
aagcagaaaatatgttggtttttttagtttggattttgaatatgtcccccaacaaacaactcaattttatagtttttctttctttctttctttctttctttgttgaattcttgttctctagagttcctttttgttgtgattatagtaaattgagttttgatcaattcagattgaagttacaagtctcttgaacccattttataccactaaaaccaaagtataacgtactacaccattaaacaagactagtaaccccttttgtaaaaagttgatctactaattctataaagctgtaaaatagtgaattaaacctttttgtcagaaaaatgatttactaattctataaagcaggaagcatagaaaaaaaattgttaatcaattcgtattatactaatgtaaaattaaaattgctcatattaaaaggtatttttgtccctcaaaatttacagtaaaaaagccaagtaacaatttttcaaaaaaatataattctaagcccaatcatggagttgctgcatgtacatcagaacatggagtcatggaccatctatgggctcagtcccaaacttagcccatatgtttcctttacagtaatctta

SEQ ID NO: 57741 - DNA, 1080 bp, Arabidopsis thaliana landsberg
aaaagtaatggcaaggtttggaaaaaaatcattttgcatattttgactcatttgcatttttaaaacctttttcttgatccttctccttatcttatcttttctcaaattctatatttccaaaataaaacacgcactttctattttaattataataaaaaaagagttctcaagttatcttccaaaactggtctttaccactatatttcagatttctcctccacgtctactgattgtcatagatgatgcgttctcttcttgttcacacgtaagtacttcatttttttgggtgcaaatgcaacaattcacacgtaagtatacttttcacaattgcttttttttctttgttaatatatagttatatactttccataatataattcaaggatttctcgtgaaccgattttttaaaaacagttagctaatgcatatctttatttctacataaagaaacacatatttagtctattgcttctctatcaatattcttctttccatatatatatgattgaattttaaccctcttacaaggaatatatttcatttatacattatatatagattacaagaaaaccccatcactctatattatcagattcatcatcgaaggaaaaataaaataaacggccaaaaatgggagcagacgcaatccaaacgaatggtcaccatcaagccaagttaaccggcggtgaagagatccaacggctgagatgttttgtgaagaactacgaatggggcaaactcggaccggagtcattggtggcgagactccaagaggctaatacaggacaacgagtcgattcggagattccttacgctgagttttggatgggtactcatgagtctggaccgagtcatgttgaattcgggtcgggtcatggcgtgtctgataaatgtatagttacattgaaatcgtgggttttggataatccgaatttactcgggtctaaagtccgggacaaatggggttgtgatctttccttccttttcaaggtaatgatcaatttctctgttttttactctgtttgaaaacgttaccatttaactaatctttctgaataacaaattgattttatgtgttct

SEQ ID NO: 57742 - DNA, 887 bp, Arabidopsis thaliana landsberg
cattatatcaagacgacactgcccgtatcaaacattgtgttgtgtaatagcacggagagccacgccatggatcatttcatcattggtcctgcacacatcaagacggaatggatccatgataggcctagtctcgaaccaaaaatccaatttatcccaatcaatcacgaaaccctaaaccacacaacaacaataagtgagctaaaattagcatatcgtgctggtttcaaaaaccaaacttttttttttatcaattagtagatccaggtttcaatcgaggtcataattaaaacctaattcctgtggggagaattgaagatatgtacctcgctcttatggtactggtagtagtataagatgtactgtcgtacgtattcatcgtcgtaagggtcgtatctccggagttctcggaatgtgtagccgtaacttgattcgctggagaatttctccaacctcggcttcttccgaatgtgaaaatcccccgtcgacaacgaaccggccatggtcggaaccctaaattctgcttctcagcgagaacaagagacaaagtgagccaagaaggtttttttttctttcaggaaaaggaatgctgccttaacacgtgtcagagttgcgtatcatatactgggcctttcatgggcctgcttatatttgtaaacccattgtgtactcttgttgatgtgcgttcgtcttatcttatcccaattgagttctagttctttgtgtctttcctaatttccctactattccaattaattctttgtgacttttcaaataataccctaagttctgagctaaagcatctcacgatgaacttctttaactaaatcatcaatatattgtgggttgttcgtaacaatttttcttcgataattgatatcatcattata

SEQ ID NO: 57743 - DNA, 805 bp, Arabidopsis thaliana landsberg
ttaatggtaacattaacatgtagtaaatttaaaatacaatacacaatattttgatataattttgagtttaaccaaattatccaacctataaaaacacatgcaatggattcttgaaatctttatgtctttagcgatttgaaatgaatttatgtagattttcatgtgtacacacaataggtaataaaatctaaattatcatctacttaaaataaaaacataaaatttaatcataaaatcaatactaaatatatcaaatcagtaaacaaaaactcctatttcatattaatatgttaagaaataaacttttatgattttttttttccaaccactacatttatggttgtttttcaaatgttttcttatgattttctgagtcaatttttcgctttttgttagctggatactctctcttctgataatggtcttttgtttttcaaaaaaaaataaaataataattcttttttgagcaaattatttggttggaaattgcaaagtttatcaatcaaattaatctcatcctccttcttcttcttcttcttccaagtgacatgaactatacaacattacgcgttttcttctcttattgattccttcgcaagaaatcttctccactagttgaccaatcgagagacttgtggtcttcccggagatggtttcgttcacgggtttcgctttcgtatttggaattctacttgggattcttgcgatcgttacggcggaagttgtagggtttttgtatcttctgaagcgattgaatcggaaaagagatcgtcaggaatcgaattcgagttcgactttaaaggac

SEQ ID NO: 57744 - DNA, 528 bp, Arabidopsis thaliana landsberg
  unsure (1)..(528): unsure at all n locations
tttgatttaaaagcatatgataatatgacaaggcggggggctctgctctgcaacatatgcattctancaatttgtatattaaattccagcatgatgtcatggtgtgatagtggaaacatagtaagaataactataccttgctaagagcataaccacgccgaagttcttctttgattttgctgaaagtactttctgttgtactagaggagcaaaattctggtggaatacagggcaacattatgggcatgagagagcacccatcaggacccccacaaagaactggcggatcaagcaaactcactggaagaggccacggccagtgaacaaaaatatcaaagaacaaagacagcagagtatttatactagcatttggatgtctgcggcaaacatatgcagcaagaatagccaaatgaattccagcaaagaagccaagtagctgaaataccatcaggcaatcaataacagcatagttgtagaaacataattgactgtagacaaatcacctacatggcaatcaagtcctctttt

SEQ ID NO: 57745 - DNA, 478 bp, Arabidopsis thaliana landsberg
cattaatcgtctcctgattggccaggaacgagacgcggctcatgctttccggtggacgttcctgttatcacactgccactctcagcttgcgcggtcatcgggccaaactttttgttaatggcctccaccacattattggcggtggagaagtcgctttctttcaatgcgagtgtgacactgtcctgatgtaccagggtattcggtagggcacgctcaacggacgcaccttcggaaatccggtctacactcaaatgattgatctgggtctggctaccgatggccgcagcacccacaccgccaacgaccaggttgccctgtgccatgggataaatatgaccatctgcccctattaaaagcgtcatgagcaaggtgccaccacgcagactcttggcgttacccatggaagatacggacacatccaaggtctggccaggttgcgcaaaagcatgtaatgagctggttaccatgactgcagcga

SEQ ID NO: 57746 - DNA, 1225 bp, Arabidopsis thaliana landsberg
cgaatctctaaaattggaatccctaatacatggctcgctctctttgattcaaacataaactgcactcgtttatttaatctttgtttcacagctaaaaagatttttattttcgggttgataaacctataactcctccagcggacaaaatttcctagatagatcaatagcttttcgtgggctatatataacttctcgtgggcttcgaggcccaaaaatgtttaaaagtgttgaaaaccaagaaaaaaaaaaatggagtgaaaaagatgaaatccctaaattgaatcgcaaatcgcaatttgaaaaaaaaaagatctctctctgaagaatccgtcatggcgtcgtcaagcgatccttcaaaaccagtaatggagaggaagaagaaaggagctccgatcaaattcttagtacctctcatctacgcacctgcgcttcctttgattcggttgtctttaaggcataagccagttctaagagatcgtctcttcggtcttgtcctcgtcggtgcttttgctcatggcttctatcttgtgtatcctctttatgattgcttgggtgctttcttatgtgatttagtgaaacttgcatttatgtattgtatatggaatatgcatgtttgggttttaggggaattattttgatttgcagtgaagatttgtgttttgatattgtagattgttagtatgtacaaagagctaggaagtatttgctgttgaaattgcgcatagagttaaaggtatgtgtaaggaagtgaatcctgactagtttcgtcagtcatgttgaggatttgttaggcatagttaagcatatggacttaaggcagttaatcttgacttgtatcatctaatcactggaagtcatatatggttatgtggtttgacaatttacatttctagaattgagactataaaccatctatgtataccaaactgaggagttgaagaaagtttgcttgtagttgttgattcaggtagtttagatttctataaaagtcatgtgcggcgtagagatttactcatgatggttttgcagtaaattgtaatagtttggtagcttagagaacctcaagattactgttggtagtgagagcaaatattcaacatttcagcgattgttgttaagaatagtttgagctgatgatgtttcctaatgttgataagcttcgatttgacataagcagagtctactactatgtggatttggagagtaagaacattcatttgctact

SEQ ID NO: 57747 - DNA, 1060 bp, Arabidopsis thaliana landsberg
atgttttatctgtctttggctgcttttgttattgttcctttaggttcaagtgtttttcgctagatctgatgaagaactaaacaaagtgaatcagtttcacaagcccaaagaaacagagtttttggaaagaggagagattctgaagaaacagttggagactcttgcagaactcaaacagatcttaagtgatcggaagaagagaaacttgtctggctcaaattcacatcgctccttctcatcttctgttcgaaactctgatttctctgcaggttagtcttcttcttattaatgcttttattacaagttaggtcagatttagggtactttagtaaattctgcattttgacttaagagttaagactcttattaaaagctaaccattagtatatttgagatatgacgcggcctgcacccattagaaatcgcaaaagtgcatgtcctagaggccgtttacgtagtgcggctagtaaaagaaaagtaggttatttaatatttttatataattgcacaatttagcgtttttgaaataatttaagtaaaaattcaaatgttttgttataacacaatagaaattctactactgaaagacaagatttgttaagcatacaaatcttttgcatgcggatgcaaaactcgaagctgcatatatgtgaaagaaagaattttagagttttgagattttattatgtagacatgcatatcttcaatggccgacaagaacacaaatcgattctactaacaaacgaacaaaatgtttgtgagtaagaaaataaaaatggaccgacaatagatggctaggtcgacaaaaaattttattttcttcttctctttagatcctgtgttaatagtcacaaaatatataattatttgtaatttattttttcttattgttcagggtctccaggagaactaagtgagatacaaagtgaaacatcaagaacagatgaaatcatagaggccttagagaggaacggtgtgagtttcataaactctgcaacgaggagcaaaacaaaaggaggcaaaccaaaaatgtctctccgcgtcgacattcccgacgctg

SEQ ID NO: 57748 - DNA, 460 bp, Arabidopsis thaliana landsberg
aggcatcgcacccatcaccttggccgcgcgcgccagatagatgtcgcccagccgtcccgcgccggccccgatgacgggttcggcccaaaagcgggtcaaccggccatcttcgaccagcgccgcacgggtctgccctgcgcctgcgttgatcagaagctcaaggcgcataacccgcgcccgccagaagcgtggtggtcagcgccagcggcaagcccaccacattcgaccaggaaccggaaatctctttcacaaaactctcggccaggccctgaatggcgtaaccgcctgccttgcccacaccctcgcggctgtcggcatagacgggcgatctgcctcgcgctcaggcgcagcatggtgacgcgggtcagcgcaacgcgggtgcgcagcttgccgtccgggcaaatcagcgcccccgcggttatcacctgatggcggcgcccccgtcagcagcgccagacac

SEQ ID NO: 57749 - DNA, 518 bp, Arabidopsis thaliana landsberg
aagactaaaatatctcacaactacatttaacaaaaaaagcaaagatactattcttctcgagcatggcatacaaatattaaaaattcattaactacattgattatattaatttcacaaaaatacttgtgtgtaacttataatgacctaaaaatctcaccctattagtattaaacctcatatactttgtgctttcgatataatctatgctacgtaacaattaccaatcacataaatcaacctaatctgcatcaacaaaactagtgacaagacaacatcatccaatacaaattagaattaccaaattatatgattagccacaagacaacatcatccaatacaaactataattaccaaattatatcaatatataacatttgctaattaaaaataaacatacatatatacgaagaaaaaaaaaaagagttacactagcactgagagcgcttaaaaaaaaagtaattaaaactgtaaataagataacaatacagtctaccgtgagactaactatacttattata

SEQ ID NO: 57750 - DNA, 1472 bp, Arabidopsis thaliana landsberg
  unsure (1)..(1472): unsure at all n locations
aaaaaaagtatagtactcatggtgtttttcacgcgtattcttaatagtggactatattgaagcagtgaaattacttttaaatagagtccatcctatgtatttagagttcctgcattttacatttggaactcctaaaaattaatctttttaaacaaaatataaaacatatagaaccaacctgtttagatattttatgtgtaatcctgaggctgagattattctcagtatacttaagatcggttctactatatctttaggtaagataaatataataacgataaagaagaatccatttaggaagcaattgttcgatcccatgaggaatatatggagtttaccaaatttatctttgaagactaaagaggatctaggcgtgatctaaccatcgtatcataacaaaaaatatattatatatgagtagttccaaacttgtgtaacaaaagaattatatgataatgttctttcacatagaaataattaaaataaatttaaagtaagaaaactagaaaaatgaaaacatgaatggggaatagtagggatatggggccttagcaataacttttttcaagagcaagttgtaagctttttttttttaattattcttgttcaattatgagattccaactttcacattactacaccatagtgtggtatcctacatgtctcttcttatttattttattttcatttttacaaatttttgtgtataaattcacattaaaataaaatgcaatgccaatcatatttgttggaagaaacaaacttatcctctttcttctatcttttcaattgattgggattaaggttcatagaaaacaacatgtgtcataataaagtgagtagcatgtactaaaataaactatatatgaaaactaaagatgtattcacattgatgtaacttgtgcttccaatattcataaatctgtaaaaagtcaaatttcttttaagtcagttccagagaaaagtttacatgtcgtacgaatcataaattctaatgtattgtaccaaaaaagaattttgcttggaagtttgctctgccaaaagagaattttgctctttgacataagacttcgttgttttcctttgtatataccgttatattgacatgttaagttatccagtcgtatcttttaggtgaaacaatcagtatatagaaagaagaaaaagtgtacacatgtttttgtccagccccattaccaatataccgatctggatatcatctagctcacatttcatgataaaagcaaactcagatggaatgtgtgtactgggctttattgggctaaacttgaactgagctttttatttttaaaaataaataaaagaaacaaccaggccgatgattttttcttaggtctaaaaagtctaaaagaaacccatttgtatcggtttggatataatattatataatttacaaaaatattgaaacgagtagttctgatattntgtttctatactttgacatgtttttc

SEQ ID NO: 57751 - DNA, 1189 bp, Arabidopsis thaliana landsberg
aaatgacgctacaagattcgataacgtagtaatatgttgcgtgcatgttttgttacagagaatataagctaccttttaaagttatgagttttttttttttggttttgttttttgttttttcttgttgattttatttttaagcttgaaaattatatgattttaatgttaattttctgataactatgtaaatgtcttcacatttacagttttagtttgcatatacacctatttttttttagaagattttgtgtagttagttaaaatgattttacatgttgagtataacaatgaatttttatttccttacgaaatattgatgatattacaaagtttttaagttagacaaaagtttttgatttcacaaatactaaatgcatcattaatggtatcaaatttgattcttaattgccttcatttccggtttaggtaaccggtcatagaggtttgtggtataaaaacaaagttatggtgtgttttacactttacagagtaagaaactgtaccgtctaacaagagattggttctatttggtattatgacaatgatttacaaaggcctcaaaagtgggtaatcttcaagtagttccctttctgacaatgcgtcggcttcgttctgcggtgtccatagtacttctactgcctgcaacatttttgttttacatctttcatttactagactaaacctttcccatgaatatgtaacttacgggtacagaatctcttaccattattttgtttcttggtattgacccgagtttcagtaaggcttccttcagatctgtagttccgtttattggtggcagtttatgtataccctctgcagccatcaagatggttacctgaacatgtacaacacttttctgttaaacggttaccaaaaccaaagaacaacaacctatcgttacaagtttatgtatacattcaattgagagttttaataagtttaccacaatatattcattgctgaaaccgctagctttccgaatcttcgagctttgtctctttatactattcacgttaacaagtgtctcctcatcaaattttcctcgttcttcaatggagagttgattaaatcgcttctctcccttttctatactcggcttcacatccacctgaaagaaaataatacaagcagagtggttaggttcttctctgcatccatgattactgaatgaccctagaatttacta

SEQ ID NO: 57752 - DNA, 209 bp, Arabidopsis thaliana landsberg
actcttcgcatagtatcattgtcaaggccatcgagtgcagtgattgcatcttcgtaagctttcttaaccaatttacatgcgctgtataaattcacatataaaattactattagttaactgtgggatactaagatattcataaaacttgtaaaatctgttaatttaaatttaattggcaatgaaaatttaaattagttattattatatta

SEQ ID NO: 57753 - DNA, 468 bp, Arabidopsis thaliana landsberg
  unsure (1)..(468): unsure at all n locations
tatcctatttccgatcagcatcacgttccttcgtgttgtttgtattttctcatcgtagatgccanacagcacatgcattatgtacttgtccttctaaccttcttgaggtgcatcatccatggctgcctatatgctggtgtagcaaggcagcggatcagcgataccaccgcaccgctttaccactacagcatcagcatgcgtaggccagctcctcggcacatcaatgatgttggataggtggctaagaacgactaagtggtcatcatcattgccactgccagcaggcagcttctgcctcatcttcgcgcctccgcttgcaacgacaaccagcgcaacgagcatcatggccaccgccatggccaggcctatgccgcacctcctcacattgcctaccatcccttataagctctggcgagcgatcgatctgatctgatgtgatggtacactggctcctacattacacactta

SEQ ID NO: 57754 - DNA, 159 bp, Arabidopsis thaliana landsberg
taaatcccttattcattattattcttaaaccctattcttttttatatcaactctaattttatcccatacattcatttcttctcacaaaaatattatttacaaataaccttttacctttacttcatcattcaaaataccttttatattatctttcatcaa

SEQ ID NO: 57755 - DNA, 714 bp, Arabidopsis thaliana landsberg
ttcgttgcacttctttggttcttatgttctttgattttgttttatcatgcaggttcatatatttgttcattggtattggtatggctctctttggtatttcttgctgtggctgtgttggtacttgttcgaggagcgtctgctgcttatcttgcgtatcctaattagttaacttgcttttcttatccaacatttccttttagataaatactgcattgacctctagttatatgctcaggttattggtatctttgcttagttatgataggatacttaagcaaactaaaagtcttaacctttcatttccttaattgagaatagtactctcttcttctgatcttgttgatcttggtggagcttggattcgcagcatttattttcttcgacaacagctggagagatgtgagttatcttctttttttgtgtctgtttctctctgggttacatttcatgttgccaatgccttataacttgaaatgatctgcagacaggactgtacaagtacttaactaaccattttgtattattgttctctaggaacttccttctgacaggactggaaacttcgatacgatatataatttccttagagagaactggaagattgtaagatgggtagctctaggagcaggtgttttcgaggtaatatcaagcacaggttcagactatcattgaaaaatatgaacaaactatctttgaaaggataaatatccctgc

SEQ ID NO: 57756 - DNA, 211 bp, Arabidopsis thaliana landsberg
aaaaaacattccacaaaccataaactcaaacctaaatcaaccattaaaccccacaatatataactattccctttacaaatccctaactaaaaatatataaaaccataaaaagcaaacaaataacttaccatataacaaataaacaacaacctaaacagtaaaatccccactactatataaactttgacaaaaactataacaatcttcatta

SEQ ID NO: 57757 - DNA, 1104 bp, Arabidopsis thaliana landsberg
tgtcatgtctgcttcaagccaaagaaagtcactgaagcggtcataggttttgaaaataccagaaagagccaaaacatgatttcaagcattatcttacttaagactgcattggatgctttacctatacttgcaaaggtgtttttctttctcattttgttattagtttttttttgcttgagttagctattatgtctatgacctacctctaaccttaccagcgccatatcctacgtaaaaaatgcaggttctgaaggacgcaaagtgttttcttcttgccaatgtttacaagtcagtgtgtgaaaatgatagatatgcttccatcagaaaaaagtacgccattgtgggtctggctagtagatattaaatatgaacttcgtttctcctataaggtttctagtaattagagtttcaaagtaactagactctctttgtttcagaatcggggaagttattgatgatgatgtcctccatgcacgggttccgtttgttgcccgtacacagcagtgttttgctttaaaagccggaattgatggatttttggatattgcaagaagaaccttctgtgatactagtgaaggcaagaatttgcttcattttttattatcactgctttctccttttaaaatcttgtttgctaatctgcaatcttgttaacactggcagcaatacataatctggccagtaagtatcgtgaggaattcaacttgccaaatttgaaactccctttcaacaacaggcagggattctttttcagaattcctcagaaggaagttcagggaaaacttccgaacaaattcactcaggtcaaaacgcagttcaatttgaaacttaatgttctctatatatatcgtttccctgactttatttttcttgtacgtcgtatgtaatccaggttgtaaaacatgggaaaaacatacattgttcgagtctggaactggcttctgtaagttgaatcatcacaatttcagatgcctcgtttccttggatcattctcttggtgcttaatcatactcagttgttcaccaagtgatatagttcaggattaagttacagctcaatataaaaagtttataatgttttgctgcaaatgatagtaatggaacc

SEQ ID NO: 57758 - DNA, 202 bp, Arabidopsis thaliana landsberg
caaaccactccttctaaaccaccatagatacacccacctcttgcactctcatgcacccaccctaactaaacacaaccaacaaatgccatccccattacaaaaaaatttaacaaaaacctacaaactagtaccaacactaccttctagactcattgactactatttgggaccataattataaattcactcaagactcctaata

SEQ ID NO: 57759 - DNA, 387 bp, Arabidopsis thaliana landsberg
  unsure (1)..(387): unsure at all n locations
aaaaactcgtacggagtacgaaagaataannnnnnnnnnnnnnnnnnnnnnnnnnnnnnnnnnnnnnnnnnnnnnnnnnnnnnnnnnnnnnnnnnnnnnnnnnnnnnnnnnnnnnnnnnnnnnnnnnnnnnnnnnnnnnnnnnnnnnnnnnnnnnnnnnnnnnnnnnnnnnnnnnnnnnnnnnnnnnnnnnnnnnnnnnnnnnnnnnnnnnnnnnnnnnnnnnnnnnnnnnnnnnnnnnnnnnnnnnnnnnnnnnnnnnnnnnnnnnnnnnnnnnnnnnnnnnnnnnnnnnnnnnnnnnnnnnnnnnnnnnnnnnnnnngccaaagaagaaaaaaagacctttttttggtaaaattttttaaaaaataaggggtcccatttttttta

SEQ ID NO: 57760 - DNA, 446 bp, Arabidopsis thaliana landsberg
gaaggctttttgatgaaaccttctctgaggttaaaaagaaagtgtgcattctcaagggctttggaggttttttgtacgcataacagacaacaagatcaagagggagtctaacaatgattattcacaatctacgagagaaagttgatactcaaaggattttttttttggaaatatggaaacttgtattaccaaatccattaattttgcatgttttaaatgagttgtgagtgtaacttacctattgtaattctaaaaaaaaaatatgttggataaccatatgacccaaacaaaccttgaaatttgcctacttccacattattctagactcatatgaaattgggggcgtatgatccaaattaacccgaagataactctgacacaattgagagattgtatctagattaaaaatgcagccatatctctattattctacaatctgcaatggc

SEQ ID NO: 57761 - DNA, 1588 bp, Arabidopsis thaliana landsberg
tcagttggtaaggttttgtcttctctttctgccaattacacacacttttgttttacaaagaacataaataaaagttacatatatatcctgaaaagtttgcttcactgtatatatatcatcatcctacacgcgcttcaccggcgtttaccctttcaatttctggttaactaagttgaaccggattagtaattcttcggtttagttgttcttctatacgacaatttatcacttgacaaatataaacgatctattacttgcaacattcatatttaatctagtatcttacacgtacatatttgttagaaattcaatgaccaaacattgcaaaactattacattcacttgttgcatgtaagctagaagcctagaactcgctgtcaacgactacaatgtctacattattttcaccgacacaatttacatcttaaccaaaatttggatattggaccaatcgttcgtttatataacaaccacacgtatcaatcaacacacagaagacaatgacatgtaacaaacagtgtaaaatattgaaaataacttatcaaaaaactttagttcataacacaaaaactttcggctattttttattgacttctatgtagtctttttgttgcacttactatttttaaaagcaatatgtatgtttccagcagattcttagtttttacaaaattttgcctttaatattttttttgatatacattgtcattctttatttcattttcttctacaatagtatcaaaattttacaaaataaaacttcaaaaaacatacgaaaaagttaacaaatattcaaaaagagaatgattttaaaaaggatataaatatagagagaataaaacgtagaagttaacgatttttttttgtgagtgtcactttagatggaaaatgaaatgattgggtaaaaacgctccacctgtaaaacagagagtggaagaaacgctcctgtgtacgagcgtactctctcttcaaaagaaaacaaatctctcaaaaaaaagaaagaacaattgaaaaaaaaaaagcaaatctcaaactcaaagtacatatacttacttgacacgtgttaatatacagctgtatcccaagtccccaaccgtttttcctggaagattctctgctctccacgctcgatgttaacctcacacaaacgcttatctcccaaaacgccttttccaatcgccaacgtgttttatttttggtttaaaataaatatctgttccaatcatacaaacacgtaaatgttgtcaattttttgatacccaaacgttaacgaggtttgtacgtagcccatttatggacacataattatgaacatataaacaatggttaatcatacgtttaaattaattaaattcaccaatatttttttgactgaatgagtcaaaattgtttaacgagtaacgaccataattatcagtttttattttttattgtttgaactaccatagttatccgtttaacactgagcaaatctctttattaatagagaaaacggttttatttgtttccttctataaaatttgtttttaataatacgttagatatttttatgcagttaaggataatattacactgtaaagtttaaata

SEQ ID NO: 57762 - DNA, 1077 bp, Arabidopsis thaliana landsberg
caaaattgtcaattgctcgtcacatttagtcacgccgccagggcaattagccgcagaaacctctacgtaccgtgcgacaatggagttttcatcgcaagacggcgattttgtaggagacgattccgctgataatgccaccagggcttcaggtgccgacattaatggatttctcctcattcatggtttttgtttaaggttggattggacattaatttctcatctgtatcattcaggtaatagaagaagcttcggtgatcttgaagacgatgaagatgatattttcggatcaacaacggtagcgcctggtgttagaactgggatgattttgtctctccgaggaaggttattatccaatcctttcttcatgtatgagaaaaatctttgatgtataattctaactttcttttgctttttctctttggcagtcttaagaattgtaaagatgatcttgcttcatgtcaagtaagcattgttactgttcatccctaatctgtttgaattctataccattgctgtttatggttgcttcgcttttgcatctaactatatcgctttggttagaatgagctcgagtcagcaaaaacagagattcagaagtggaagtcagcgtttcagaatgagtcctttgttcccgctggaaaatctcctggttaacctctctttctcaattttgttttgtacatttgtatatgcgatgttaattcttgagcattcaatatgattctgtttggtacttttttttttccagaaccaagatttttgattgattatattcaaaacctaaaatcttctgagaaatctttgaaagaacaggtttgtacttgagtaataacttgtgtgtatatatcaatatgaaggtcttgattttcaaataaggtttggttgttgtttctctcttttcagttagaaatcgcaaagagaaaagaagcgtcatgcattgtacaatatgcaaaacgggaacaagaaatggcagaattgaaggtaattctcgagaaactcaccccctaccactttgattcctgactgatgctataaaatgtaatcttgaccattacatagaatagatgtcgctaaaca

SEQ ID NO: 57763 - DNA, 1326 bp, Arabidopsis thaliana landsberg
aatcacacggcacttgtcggagtaataatgagcatgagcttataaattagacttgcagagctctggtcccgtacagctgttatgtccaaggaaatagaaaggagcgttgctcacttttcttctcatgtttgcagtttaaccctttgagtttttgtatatttcagttagagccgcaaggcctattgtgctatcggattttgatattatcttgttttgactccaaagtgtaaatagatcaatatcgaaggacgtgttaatcatccaccaaaactttagtggactctttttgttttttatccgatattacggaattgacattaccagaaagataacaagaaagaactcctactcaaaacaagaaagatacaagtgtgaatacaaacactttggtcaataagatgatttggagtttttttataaaattgagttcatactctttctttttttatttgaaacttgtgttcatactctaaatatcagattgtcgattttgaaaaaaaaaaatagttaggtttattaaatttggttttggttgatgtttgattttggatatgtgaaaataaagccaaaaacatcactagattcaatattcaatttggtggttcagtctaaatccatttgattaaatctctaatcactccctcgattaaaaacattgtttcagctttaaggtctcagtggatcttaaaatataaactagggtagtgatattagaaagataattaaaggtgtttgatttggttatgctaaaataagaggtgctaatgacaattagtaataaagtaaccgttgatctaaagattcaccgaggacgaatattaaaagatgcatgtgaatcgacatatgtagctggatcctgtttatctacgaggatttggctgtttatcgacttagttgttggacttgaactctttactccaaaagcccaacaaactaaagagacaaaaccaaaagtaaaatttgatgtttatgaagctaaatttgaaaaagaaaatatatctgaccaaatttgatatttataaagaaaacatatttgatgtatttaacaatttttaaattgatgacgtttagttgcaaacaaaataaataaataaaataggtaaaaaacagtgtgctttgattgcttttatttcattggaagtcttaccacggcttccatactcttgtagtcaacttttcttacatattcgtctaatcagttataccaatatatacttttgaagtacactaactagtttttgttttttttgttcaaacattaactagttgttgggatgtgacataaagacaaagatgtttcaaggtggattttgtgcaacgtgagta

SEQ ID NO: 57764 - DNA, 526 bp, Arabidopsis thaliana landsberg
tttgtagctcttgcgcgttagtgtatcatagacggacacaaagaaacaccgttcttgatcacaaacgaagtctatctctccacagattgttttcatatctatagatcgtgaaattcgcaacaccatcacctcaataagacataaaaataaacaacgttaattcgattttttagccttttaggtttatcggttttaaacaaatgtaaaacttataaactatgtgagattccatcactctgtaattttatatttacagagacaaaagaaaaatatctaagaatttaaatttcctagcatcttaatcatctagaaattaatgaaacctccttttcttttgtttcctaaatagatgtgttcacggtaatgtggatcagttgtgaaattttggttggaaaaaaatgtaaagacatactatcttttgtgttaacttctttaattaattatgagattccaaatccgaatcgaaactagttaagaaatttatggtggaatggataattttatctaaagcttattggagaccact

SEQ ID NO: 57765 - DNA, 1799 bp, Arabidopsis thaliana landsberg
gaactattccttccccaagcaaactccagtccataaacagtaaaccacactacttatctttgcaaatgctccaactgatccaacgatcggaaacgctaataatcctcttgttaaagctttcgacggtggagatgaagttgacggtgatggcggtggtggtggtggtggaagaggaaattgactcggaggactcgctggaaattgaatcggacatgatttacaaatcgagccagtaccagaacagagcttatcagattgtggataaacaccacaagagcaaagagaggatgatgatgattcaacgcaaggacctggtaaaacttctgggaaagggaggaagattctggagaaatttgtaggactccaacacatgattgagagattacttgaaatcaacccgcacattagacccggacccgaggaaatcgattcgaaagagatcgaatccgcgacattgttgaatctctctgctcctccgccccaacataccacagaattattcgagattcgcatcgcgcaggtgaaatttgatccgagagagagagatgatgagtaaaggttaggttgatctggagtaataacattgagctgaccagaatcgttgtttccgatgcaaatcaaattcccagtagtgtttaatccacaagcgtgtgatttacctgcgaagatggtcaccatcggcgtgtttccgaatccggtttggatctgattcgatttaaccggatcggttccccagcaaaggattcggttatttcgaatcgaaacgccgcaggagaaaccaacgccggatgaaattgatcggaatctctcgttcggaggttttgattgatcggaatcggaacctctccagcattttaaggaatttgtaccgttaacggttgcgcagatttgtttatccccgacggagagagtctcgagtaaaacgttgtcgttttggtagattcgtttccggtttggagagtagcttccgatgttatcccaacagagaaggctgtaaccaccggagcgtataccgcagaggaaattatctccggcggctattgaggagaatgagacgccggggtttagagtgacgttgatattaagacgcgtgtcgtaacagaggatacgttgtgtgggttgaccggagatcaatgcgcagacggtgtcggagccgtatacgactgcgtaagttgagcctgaacctaaggaggtgacgggagacaagaggaggaagatgataacggcgatggtgacggtgacggaaaacgtcacggttgagttgataaacctcttcatctacagaggttgaagttgactggcgtcttcgtcgtcgattctaagtcggattggttcattttcagaactcaataacaagactcttgtgttagaagtaacgagagagaagaagaagaaagaagaagaagacgttcgtgagatttattagagacaagacagtaattagaaattagtcagaatttgcttaagaaatgcgtttttaatatgttagagtcacgtttttttgtctttgattttgatttatttatttattacagcattaatgtaaatgttaaatcttctaaaacagagtaattatttgaatttcaaaaaggaaattcagtatctttatgtagatataacaagagtgttaattggtaattaattaagatatatttttacataacaaattttctttactaccaccttttaaagattctcaaagaaaatttgatatgaattatttgggccgtttcaatatttaaatacaccacaactactacgttgtatatgtgtgtatataaataatgtggtgatttata

SEQ ID NO: 57766 - DNA, 411 bp, Arabidopsis thaliana landsberg
gcgcaggtggattgtttccgcgccgcgccgatcctcggagatggtttgccgacacgtgcgtttgtcgtggatgctttcgtcggtaccgactacaaagccggcagcatacagcatactggccgtgacctggatgtcgccatccagggccagggctggattgccgtacaacgtgcagatggctccgaaggctatacacccaatggttccctcaagattaatgagaatggccagttacaaaccgaatccggcttaaatgtgatgggctatggcggccccatcagcatgccacctaacgtcattgtcagcattggtagcgacggcactatttatagcgtgaatgactttacagtgctcggagcgaccacgatcttgggccggatcaaactggcgaatccaccagaagcttcactc

SEQ ID NO: 57767 - DNA, 481 bp, Arabidopsis thaliana landsberg
agactctgcgagcgtgagcacctccactcagcacgatttatttgtaactgcccgagggacccacccaattattactttctattttaaatttcaacatataatatcaacattatatgaagcaaggtttaaaatagcgggcttctagcttcctagcctctaggtgataactagctaataacatataataccacaggcgaccagttcctgcccaagtgcccaagtgtgtggtccctcatccttgcttatatccttctcttgctgcctagctcctagctgataactagctgcttgcgtacgtactagtactactgatacttgttgagcggctgcggcttgttaattgtcatctgtcaaaatcgagcaaggaacgatcaaggaggaaacaggctaaggggcgacctttcgctagtactgacaccaacatatccattagaattggggacgaccttttggattcactctcatttatctctatcacata

SEQ ID NO: 57768 - DNA, 458 bp, Arabidopsis thaliana landsberg
  unsure (1)..(458): unsure at all n locations
tatataaacaaacatcaaaaanaagaaggtgattaatttaacctcgcggactgcccccactaatgcaaactctaattttaatgttgcttttgcttgaaatccactttttggtcaaacaacgagtatgaactattattaatccccattaaacctaaagaaaagacatgtttagctatattcattcataaatatatgctggatcggattcaagatgaatcataagatcacatggactgatgcacattaaacgattggtttcattactaaaccaaaaccaatcacaaacatatggtatagagtagaaatatatcttacgttcacgaaacagtcatgaaagtgaagacgcatgactttagcactgagtctgacgtcgttacagctagctcgctcgatcagaccccgagcaatggctgtgacgaaaggcatgtcctggagtaaaaatcaaacgtaagctgagc

SEQ ID NO: 57769 - DNA, 1025 bp, Arabidopsis thaliana landsberg
tctagcaggatctctctgttgctttaactgccttgaggttttaaggtctcttggctttgcatttgcttaattacttaagccaagtggtgcttttcaatatcttaactttattggattcaaatttgagttatcatggacctgctctttgttttaagaatgatgtacatattattattgaataatgtacattttgaaacagctaaatctgtaaactttagacaggggaaaagaattatagttttctatgaacatgtgattaatattgagttatttgtacttaattggatatccctgctaaacagtaagatccacacacacacaaaacaaaaaaacaatcccaagaccaaaaagttgtgtctttcaatcctacgacacttttgtgttactaccatcttgatgtgcgtttgtatataatataccatgctaatttggtttggaagttacacaaaaagacttaggtcagattgaaaagggtctaaactttggaagaaaagttcattaacataattagaaatcaatatgtgatatgattcacaagaccaccttctcccatagttagcaaaagctagcttgtttgattaagattcgagaaatggggcaaaagtgtatgatgtggtggggactattaaattaaagagccgcatgcctataacacaaccacttcttatgtagtatcaccaatttcataccttctgtctctcccttttctctttatctttagtgtatcaaatatatgctaacaataggataaaactatgatatatttgatagtcatgataaatttagcaaagatactctcggaaggattcacccttaatagaatatatactatatatatggaattcgttaaaccaaggtattacattaatttcaaactccaaatcatcaactctgtagaggctgcgtgcaagatttatgtatatggaagatttgactctcaactaaaaatacaatcattttggtcttttaagaatagcatttttggttattatagtcttcacataatcgaatcgattacccaaatg

SEQ ID NO: 57770 - DNA, 312 bp, Arabidopsis thaliana landsberg
  unsure (1)..(312): unsure at all n locations
gcgtaacatacctcgttgaggccctgttttgctcaccgcaggtcgaatttcctgccgcagtcggtgcgccggccgcgctgcgtcaggccatgctcaggcgcaggccagcggtgcgcgtacgccttgaacatcgtgaaaacggtatcggccgtttcggcgctgcgtcgccgcagttcttcgaaatcctcaggcgcgtcgagatccagcgacaggctgtctgccttacagcacgcgcgtttagcactcggngctgcgagcggncgacaggtggcggcggaaactgtcgcggccgaagcgcggtgtcagcgcatg

SEQ ID NO: 57771 - DNA, 502 bp, Arabidopsis thaliana landsberg
ggaccaccaactggagtacatcatcgtgcaaaccaatcacggaccgcaggtctattaccgcagcccggtgtcctggggagtcgccgcctgcgtcaatctgccgacggccatcgacaagcactgccccccatgcactcaacagctttgattcacgctgttcgggccaagggcgtggttttggcagtgctcaccgaaatgacgtttccggctggcactgggtacagaaagtctggcggcatcagcacatcaaccaactggcaagtcacggcacgagcgaagaggatcagaagcaggtaacccgatccatcaacggcgggctggtagcctggccagaccggcacgcgttcttcgagtatgtctggagcttgctatgcgatgcgcccaatccgccggatacagacaaacacaagcggcagatcaaggagtaaagaaatgattgttcggttgatgtctgttgttcctttatggagcatcctcggttgttgtggcactgtcttggcag

SEQ ID NO: 57772 - DNA, 138 bp, Arabidopsis thaliana landsberg
caccccactgccacgacgcggagacttgtctatctaacaacatcaaagcttccatcaagaatgaataagattctggtgacgggggctatgaagaaggcgaagagtatgacttcaaattcactggacatcatagcccat

SEQ ID NO: 57773 - DNA, 1234 bp, Arabidopsis thaliana landsberg
  unsure (1)..(1234): unsure at all n locations
atagggcggacctgatccagtcttaaattacaacaaacaaacaatgaatttgatggatcaaaccaaaaaaaaaaacacgtagctaaagggaactgcagagtttagagaatttaaaaacaaacctggccataagctagaacagtggcattgtatcctttaaacaatgcatccacaagtggagcaacacagtgattgtaaatctccgaacacggatagccaccatttccgtagacgaaatcataagtaaatgtatgcgaaccaatatgtacctgtttcagttcataagaaattccaacaaaatgagttttatcaaagttcgaatctttaaaacatattttcagcaaaaaaaaaaaaacattcacgcatcaattgatttcccgaattgaaccgaatcagttctatgtgaaaacaaatcccaaatgtttcaaaattcgaatcttacagcaaaactattaactgatgaagaataaacgttatttctcattcgcgcataaatttgatttcccgaatttaaccaatatataatcccacgaatcttatcaaaactgaaaaactctcagaagaaataaacgcagaaaaaacgaaaaacccttctaattgaattacctgtggctctttgggagccacggtgatgcaatctgtgcatccgttcaaaagctccggtgtaattaacggacggatgttgacggcaaccctaacgcactctgtgctctccataaccgccgagcagaaacccagaaaacctctggttacggatctaatccagaaacgaaacctcaaatcaacaccacgaaaatgtagatccaatccagaaacggaggagctagggtaattttcgagaagaaaattctcaggaaatgcgatttttgagaattcaaattttgaagagagagagagaaagagagaagggggacttttgtttattttgagaggtcaacaattaaaaaacaagaaaggcaaaacttaaaaccattatggaaattaaaattataagcgccgctcaggtacgaattcaaattttctttgagaccgttacgcacgtgtcatgcacatgatcatcactaaaatatcataggcccattattttatatttcagcccatattttaatatcaaaggcccattattttatatttcagcccatagttttaaatattggcccatgttgatctttgnttctgaagaggaggaggaagaagacgatggttgacacttgacagagtaagctcagaaatg

SEQ ID NO: 57774 - DNA, 1446 bp, Arabidopsis thaliana landsberg
gtggctatgaagaaggataaattacttctccggcatcgactactcggaaaaaagacaagcttttgttctcactgatataattattactatttttttttcctcactcatataattgatatttggattttacgtgaataaagtcatgtaatggtcctacttgagtctgctgctgctgaagcatttacgactgcgtagtatgtataggtcctgacttactgataggagaatgtttaatttttaaaaaatcagattcatatgcatgtgtaatcaactttaacttccttttttattttggttaaagaatcaacttgaacttaattattccacttgcatctccatgaaattgcattttttcaaccaaaagttgatttataaatcatggtgttagtaaacaaaattcacttcttacataaaaatctagtgggatttgtcaaaaaattggtccaaattttaacataaatttgtttagcttgtaaatccatatggaccattccacaccactagtcattctttaatcttatgttagatggaattgacttgtaaagattgcattattaatttcattttaaaattattttgccgacttttcgaggaaggtccattgttactcttcagagaatgttacttctaattcaagtttttttttaatgtatacacaagtttcaagactgtttaagctaacattagatacattatttccttcctcctcctatacgttgactattttagtttttcctttgattccagtttttgatccatccaagattcctttattgcataattctaatcgctcatagattttgcagttgatcgatcataaaaagcttattacaggatctttctagatttcaagaaaactccattacttgcagttgttgtgtctttttatcagctcattggattcttggttgatttttaagtttcagaatatggcttctactggtgaaactatatgtaacaatggccaaagcgcagtttcagtaacaaggaggaggagttaccaagttgtaatagcggcgacaagagacatgggtcttggtatggacatgaaacttccttgggatctaccttcagagtatcagtttttccaagatgttacaactaggacatccgatcccacgaagaggaacgcaactataatgggaagaaaatcatgggaatctactcctctagagattcgtcctcttcctggtcggctcaatattgtcttgacaaagtctagctgccacaacattgccattgatgagaatgtactggtgtctagtagcatggaatcggctcttgaacttctagccactgagccctattccttgtccattgagaaggtctttgtcataggaggcggcgagttgttaaagtttgcatcttctttccacaagggttttgttctttttctaaaaacacatgtttatgtcttgatatagcgtgtcatgcgatgtttgagac

SEQ ID NO: 57775 - DNA, 332 bp, Arabidopsis thaliana landsberg
aattctgaaaactccaagacttgtctatctaacaacatcaaagcaaccaccaagaatgaagaagataaagatgaagaggatgatgaagaaggcgaagaggatgaagaagagagatctggagatcagagcccatctagcaatagctatgaggaagagagtgggagtcaccaccatgatcagaacaagaagaatggaggatccgtgaggccgtacaaccgctcaaagactccgaggctgcgatggacgccggagctccatatttgctttcttcaagctgtggagagattgggtggccccacatagttgagtgttcaattttgtttttgaatcaa

SEQ ID NO: 57776 - DNA, 165 bp, Arabidopsis thaliana landsberg
tgtcgattcgtgcatcgacgtcgtcgacacgccgctgtccggcatcatcagcacgcatccgctgaacacctgcacgccgctgctcggcgacgtgcgcgtaattaccattatggcttgaatagtcaactactaggtaaatattaaattccaaatattcacgtgatc

SEQ ID NO: 57777 - DNA, 800 bp, Arabidopsis thaliana landsberg
ccgttctctttctaacaaagagcgaggtatcggtttgttgtggggtcctgattgcaccgcaaagtttctacatgacaataatttaaaggttagattgattagtttttgataataaattgtcaaaaatattgtacctagaagcattgagaatttgatagaagatttgagtgtgcaatcaatcaaatgcattaggatataatcagaacaatttcgttcttttttgtatatttgtgaggtatgtctgttactccttcagcttcatgatgttatctctttgtatggcagtggatcatcagagggaagggagcccctgacgaaagggcaaaacgagatgaccttgcaccaatgaatggaggatatgcagaagaccatgaagggcttataactttgttcagtgctcctgatcatcctcagtttcaggtatgctctattggatatttgtattggctatcttcacttccacctgttgtagtaagctcttgcggttcaacaaaaatggttactcgctggcaggatttcttatatcttgtagatgttgtaacttgtgtttgagcctcaacacaaacctgagtacctgttgtctcgtatgcaggatacagaggagagacacaacaacaaagcagcctacataatattacaaatccctgaatgtgaggagcttaaatttcaaccgcttgaagcagtatctccgaggccaaaggtagtactacaatttaattacgagagtcctaattttaatatcttttagtttattcttaatatgttctgacatctgcaggctgaggcgtactacgacaata

SEQ ID NO: 57778 - DNA, 231 bp, Arabidopsis thaliana landsberg
tacttagatgtggttgacgaatcgatatgtgatacaaaagaaaacctaatgttataacctttgtaggcaattgcgtaatgattgatccctggccgtgatcatatgatagtatgtaataagcgtaattaccacacgtccatgattttatgaattttcgaattttgaatctcccaattaaataaatgctgtgacgagaatggctattcatctttccccttcataatttatgga

SEQ ID NO: 57779 - DNA, 518 bp, Arabidopsis thaliana landsberg
  unsure (1)..(518): unsure at all n locations
atgtctcgcgatgaaaaggccgtgtgcttccaagcagatcgaagccctcnctgagaaaggcttcatagaaccttcgcggggtcccttcggagcacccatcttgttcgcgcctaaagccgatggcggctggcgcatgtgtattgattatccagcgatcaacaagctcactgtcaaaaatcgctatcctctgcctcgcattgatgacctcattgacactctgcgtggtgcgcggtttttcacttcgcttgacctgcaggcgggctaccatcagcttcgtttgccggagtcagacatcccgaaaatggctttcacgacgccgttcggccactaccagtggaaggttatgcctgtcgggcttgctaacgccccagccaccttccagtctgtcatgaatcgtgttttcgcaaagcacctcaaccaatttatcatcatctatctcgatgatgttctgatcttcagcaaaacagcggatgagcatgcagaacacatcgcgatggtatgtgatctgcttcgcaaaa

SEQ ID NO: 57780 - DNA, 550 bp, Arabidopsis thaliana landsberg
  unsure (1)..(550): unsure at all n locations
tgttcaacaatatacaaactatttttgttacgaatattaggaagacgtgagcactttaaataagcgattttaacttcatttgaaaactttattctttcttagtgtgaacagacaatatttatgcatataacatttttattataaatctgaataacattttatgagtaaagataatcatataattatttatctaatgtttttgttatgaaaatgtggtctaaaattccttttaacttcatacttagaaaactgcgtataaatttactatgattcaaataaattttatgaacttaaaaattgatgaaaaacaataattaaaatgattaatcacatttttataaaattagtaaatttataattaatttattggaacactaagtattacttttttatatataactaagtttagcgcaatggctagatcataattatttgcataatatatggtagtatgaaatatgggctntcttctacctttggtcggcacagagctgagacggctgggcacaggcgatggggcttcatcgagggtgatggcacaaacagatga

SEQ ID NO: 57781 - DNA, 1194 bp, Arabidopsis thaliana landsberg
gaattaaagggaatcacgatcaaagagattaagaattgttttttgacaatgtatatggatgatacaaagcttggagaccaagtaatgtagcatttttatggatctatgtaacagcttggagaccaattatgtatattctatttgtaggatattcagaatacgtattcgatactaaatagcaaagcttggagtgtcttgagtggtttttggtggttgcgacagaaatcctccaatgtaagccttggccagtcaagctgttaccagttggatagggttcatgctaccgttctacgttttctttctatatatattacaaaataattactataaaattataatataaataaaaattgtacattttaaatatataaaacaataggttgtaaaatctattgatcaattaaacgaattatattatattttattttattttaaatatagttttgcggtttaccgtaaattaaaatctagtaaattaattaaattagataatcattctaaatatatttttaaaaaatattaattgactctcggttaatccaatgactcgatgagtagtcttgcttgccatccggagccatccggagccatccggtttgccatccggttcggtttaaaaacattggttttttcacgaattccaaacttaaagtatggttgttcgttcaattatcgtttcacctccaacaactaaacttattaccatccaatgtctatcggtcttctggtccacccattatctcctcatatcccaccggcaagttctccctcagcctccaccgccggtaaccatcaccaacgtattctctccttagcagaaacatgttcagacatgtctcagctcaagcaacttcacgccttcactctccgtactacttaccctgaggaacccgcaactctgtttctctacggcaaaatcctccagctctcttcctccttctacgacgtcaattacgcgttccgggttttcgactccatcgaaaaccatagctctttcatgtggaacactcttataagagcatgtgctcatgatgtttcaaggaaagaagaaacctttatgctttaccggaaaatgttagagagaggtgaatcttcaccggataagcatagcgtgtccgttgtattgaaagcttgcacttatataattcgggttctccgaagggaaagcaagtcattgtcagatagtgaaacatg

SEQ ID NO: 57782 - DNA, 830 bp, Arabidopsis thaliana landsberg
  unsure (1)..(830): unsure at all n locations
aatatacataatgagatcgaaatgaaatagcttagtaaaggtttattttgtgcaagtaaacaaaataacaaatgccgacaatggaatttcccattctcgaattttatcgaactgtacacgcatgtatgggtttgtcatccggtgcatgactctttctttccatcgaatttggaggaagtttaacgaaattatgtacaaatttgtgtataaccgttttctttatttgtttctttcagttaggaatttctatgaaaatcatggtgtttaaaacttctcaaataataaaacctttcgataatgacttaattagacacttgatttcatatttgaccataagtttgtgacctactatacatacggaacccctcaagctaaaatccataaaaatcgatcttgactaaaaaatcaaataagtcccaacattccatatggccactatgtgttaagatggtattagacttgttcacggtctatctggtggttcaagtctaaggtttctcaaaactcaaatatacccatatagtagtgtcttagaagaaaaatttcaatcttgcacaagagaacatttcatgtgtttggagagtcaatgaaccatcttagtgaatctgagctttttcaattttcttagcaaaatctatacattactaagatcatgtctgacttaatggtcttgtgttgatcacggccccattataaataaaaatagctagtctctaatattatatcattaaactcactcaactccaccaatggtttatttctatcttatttctctacactctttnttttccaacttaatcttcatcaatttatagatgatgaataatttc

SEQ ID NO: 57783 - DNA, 1214 bp, Arabidopsis thaliana landsberg
ttgactgttagccataaactcatttactctttctagtgtttgtggagaggcatatcgtatttgggtgatagggtattatacaaatttaaaaatgcttaccttattgttttacctacggatgtctacgtaaatgtaatccctacaatttttttatgtgacccacctatgtttttagttccaaaaaaggtaaaggtgtggaatttggacagtcgaagtatagtatatccaaaagttttgtcaacgatactatccaaaactcgaattatttgtttattttttcatatcatcttttttttatggcaaataattcgagttttggatctaaatgtgagaaaagttttgtgataattcaatcataatttttacacgagaaaagttttcaaggcacattgttttatacttatctaaattatgtgacccaacgatactactagacaagacgagacaggtccaaacaaagtagtgactgattggtagaaggagatttatgagatggtccgggttataatgttaagccattttcaagaagttatacgtgttggttcttatgatatgtaaatctattgtggtctctcctgtgaccacaacagattgcatttgaccacgtgattttctatttagcaatcaattcacgattggtatacacaacccttatatatattccaaacaaaataattaattcttacatctatcaaaactatatttaaaacgaaagtcagactaatttcaacattataaccatcatggttaatctaaacgaaagttaagagtaatttcaacattacaaccatcatatggttcatacttttttttttttttgaacaacatatggttcatactttaaatgaccatattgttgacgaagtgaagttgattctaggtctggactaacaaacaaactgatatgttcatagatggagaacgtatacgacccaaatttatttattacttgtaataacatattaatagtgtaagatatgtgaacaccttgatagtgtagtgcttgagtgaatttgatttgaaacattttacgtaatttttctggcacgtggtatctttttcttttagcatctttggatcaacattgtccgatatatggtctatttctactacgcgaggtaacgagatttagtagaatcgaattttgatagaaacggtggaatcagatggaaaaaactacttattaaagacacatccctcacacgtgacaaacc

SEQ ID NO: 57784 - DNA, 1054 bp, Arabidopsis thaliana landsberg
aattaaatagtaaatacaaatcattattttttcaaatattttcaacaaatcattcttgtatatatacacacaacatcccttcaacatatacgcgtcctatttccacgttctcttacatttttccttgaaaacatctcgaggttcaaaatctttaacccctacaaatcaagaaaaggaaacagaggagaagagagaaaagaaaaacccagaagcaatgtctttttcttctctcaaattgccaatctttctcattctctcaagtcttctccatgcggctataggtacgtacaaacatattcatattttacattcatcaaaacgtcttggattgaaaatcttcatcagtctttagatcagcataggaagaaccctagattttcatagtttgaccaattacacgaaagatataagatcaaccataggaaaaaagaaagcgtcaattctcatacgaatctttgatttttaagattcttattgtatttttttctttctcttctataaattgtaggggaaaacattgtttgcgagaatctgccaacaaatatgtgctcgttctcaatatcggcttccgggaaaagatgtatattggagacggctaatgtcgccggagaattcacttgccgcacttccgcagtggacgtggaagggattgtaaaccacgtggagaccgacgagtgcgtttccgcttgtggggttgatcggaaaaccgtagggatctcgtcagactcattgatggaagcaggtttcgccgctaagctttgctcatcggcttgcttggactattgccctaacattcttgatctctatttcaatctagccgccggtgaaggtaccatatataatattcccttaagccttaaaaaagaaatttcataactcatgcatacattggccaaacttgtcatatgatctatttgttgaaaagcaattttggtagaagatttcattatagtttatttgcgacaagttttgttaatgaaagtagaaagtgtgtaaattatgatctttatcatggcttattaatgaagtaagaatcgtatatttggctggtttc

SEQ ID NO: 57785 - DNA, 898 bp, Arabidopsis thaliana landsberg
gttgtgttgttctgttcccattctctctttctaatgcgtctgctttttcagagtgtgtggcattttaaaaagtttggaagccctttcatatgttcatccatcttgacttctgaacatgttccatggagcttaatgaacttattgtataaatctttctcaggttcgagtttgtgctttttccgctagtaacttcaaactaaagggtattgagatctgcccagattgcaaccctttaaacagagcaacatctagacaagtaagtgctcagtttcttctaatgagatcattctcctttgggagtaagtgtgttaatcttggtttttctgtgacttcagctattgaattgggcacttgagccagcagaggacgaggtgttggagaggctgtttgagttaggatacgcagatgcagctacatgggctgagatgaatccagttgagggattggtctatgacgatactcctacagctcaagagattcctactagctaagaactcacgaactcaatactatataacagtaccatatattatcgcggtacaaaatattcagatagttttccagaagctggctttaaagtcacagaaagttgtagttcttagatcaaacaaagtaaatggtacatcacttttagtcggagttcatacacttgttcatcaaaataacatgtgcttcgaggagtcgctgttaagaccaaaccattctcaatagagttgtccacaaatttattcaaacttttctcttattaccccctttcttatttagcattgatcattcaatttcaaaaagtgccattaacaaaatcttgaatgggagatgcatatttctctaatttagcaacaactctttatctgaaagaaacattattctctccacattagcctcacaaacaaagctt

SEQ ID NO: 57786 - DNA, 1083 bp, Arabidopsis thaliana landsberg
atcagagcctagttactaattagtcagttaattattctgtctattgtaataggtagctgacaaaattcgcagggatgggaaagtgactgttatagaaaggacaaatctgagatacctcccaggactcccacaaaaagtcgacgtagggacgcttgacctctctttcatttacattcttaaggtaagcttgctactgattcagcttgtttccaggaactcttatggttattatgttaaatcatccgaaaatgtttgagaattcaaatttatgaacaggtgatgccagctattatgaatgtgatgaaagaagatgcgactttagttacccttgttaaaccccaatttgaagctcgaagacaacaggtaatcaatttaattgactagaagatgatgctagatttcgtattcactgaacttttagaagtgagaagtacatactgatatgtttatataatagtataatgaaatatataaatgaactctgagatttcacaattgttgcttcaacaacttgtttcttgtgaaggtcgggaagggtggcatagtgagagatcccgaagtacatcaagaggtatgtatgcttctctctgtcctctttaattctttatgaaaactgaatcttttcgggaaccattgatgctctttgtttattgcaatactggattccttctgtatctatctatcttaggatagcaataagcctttgatcttatatagcaagtgaaagatgttgttaacacgatcctttgatttcatggttatgtgtgaaggttcttgagaagataataaacggtgttgagcgctatggatttaccaacaaaggctttatcgaatctcccataaagggcgcagacggaaacatagagttcttggcttgctttaatcgagggacagtaaaacctgaagccgaagaatagtagacttatattccattactgagtgggaagtttgaaccttgtgtgatatgctatttgtttcttctttcacgcattccattcacaaatctcattctaactcgtcttttgccttgggtttacgttcaagtaaacttaccttttggtttggtgatatcataaatcttca

SEQ ID NO: 57787 - DNA, 459 bp, Arabidopsis thaliana landsberg
  unsure (1)..(459): unsure at all n locations
gttccgacagaagtacttcaatggatcaagatgttgatgttctctgatgggtatgcagctaaccttagtaggggggtgaacttatctactctgtgagtcttagggatttagagtcatgacttccacatatggattgaacggattcttcttgcgatggttcgaggctatgtccctgagcatgtctggatagcgctttcagatttgagctatttcttccgtcagctttgtgcaaaagagttatctcggaccatggttgcagacttggaaagattgttacccgtgttactgtgtaagcttgagaagatatttccacccagcttcttcaatccaatgtagcatttgattcttcatctcccctattaggcacgaatggngggcccgtgcaggacgttggtgctacccaatcgagagatgtctaaagactatttgaaagaaatgtagaaataaatgcaaaatcga

SEQ ID NO: 57788 - DNA, 1357 bp, Arabidopsis thaliana landsberg
  unsure (1)..(1357): unsure at all n locations
ctaacatcagaccgagagtccatataacgctgggctttcaccgcactatttttggcagcaccactaaatttctcctttttattctgctcgaacgcaatatgccaaatgttcaataaagaatcacagagagacataaaaatgtaagctttaacaaaccaagttactaaccaatactctctgtttcgtgcccttattcacattggtattgctcttttccatcttgataatctcatctatacccacatacaaatgatcatgaagctataaactaaacaaaggatacatctttatatgagtaaataaattaaacataaacacacctaaagacatgtccattttcttctcagtgagagcaacagtctccgtagtaatcggtttctcagtcgccatctacatagaagtggcacaatttaaaccaaagatttcacaaaatcaaatacataaaccctaaaaatcataagttaaggttcaacgaattttgagtttattgaacttatgagaagcaaggagatacaaaagagataaagcaaaccctagtttttgaagatcaaattgatctgattcaagaatcgatcaaacaaaaccctcaattaaattgactcgtgtgaagaatggaggagaagctttaagagatgaaatcgtttaccgattttagaaagtcgattgtctcactgagacaaaaaaaagagaggctttttatttttaatccgataacgagttaaaccaaagtgaactgagtcaaaacgtttccgatcatgtatacgtggcacattttcattggaagagatgattggttgttttgcatttttttttttcttggtctctcccttgaagttgaagagtttaacttcgctaagaggaacagagatggacttgagtttaatatgttctctgtttctaacaaatgtttttttttttgagttttcacatacaataaaaaatattaaaatttaattataatttataaatgcattattatttgtaatttacgatttaccattttctataaccttaattaatatagtatacaattatttttcttgaaatttacaattcatcaataataactaataattattgcattggaaccaatttttttcctaaatatattatttaggaatagaggagtagttgtttttggcaaaatggtagattattataaatctaaagtggtagcagttaaatttgaaaaagatggatggcatagtaactaaaaattatttaccacaatanccttaaaatctatgaagaattgattaattaactaacagactaattaaaacccatatttgtccttttgaattataattttaaataaatttacgaaaccctattagattacataaatattttttat

SEQ ID NO: 57789 - DNA, 362 bp, Arabidopsis thaliana landsberg
tttaataaacttttcttaagttgctttcttgtatcaggtctctttagtggctttgcttggggagcaagtaacttctatactacgttagttataatgacctcaagttcttgagatagtcatgttacactcctaatggtttttgttttcttgttgtgataaactgtttatgcatcaaccagtgtcgacgaattggatttgatttatattagaatgtgtaaaagttatcatcctctctctatatataggctttactttttttgtctagccctccaataaaaatggtactttttcctcactattaagggcgggtggacctgttgtatgacgacattgatacgttttcttctacaatttgagcttat

SEQ ID NO: 57790 - DNA, 1562 bp, Arabidopsis thaliana landsberg
gttatgtgtaaatgagactttgaatgtttctaataatctgataaatggtcacagaagttaaagttgaaaaacatgaaagtgtgtgaattggagcgttgcatatggcttcatgtaaattagcttttttctcatgcgttattcttttgcagactcatataagatttgttgctttctcatataactttcttttatattttcagaaaatttatcgtgtccacgtagaaaatgcatacatatggccagcttcatgccgtgggcaaagcatgtggcaaacacgctcaattttatctgaagttctgatcaaaaagttcaaaactcaaacctatttctccttgtcttatagaacttgtgtggaaagcatatataggatcttaatcggtgaataaagttttacagatgaggtcacaactcacaagacttctcgcggttaaaattaactcatatgagatggttccatgttggaaaaaaaaaagacatggtttaattaaaagcgaaaaataacattagagtaggtataatgatattgttcatccgtaatttgattattggaaatttgcgcataacagcaccaatactctaaagatacttaatttgatgctcaattcaacatgagcacggaaaaaaaatgatacgtataaggtatgtggatgctcttagatttagcgtaattaaaaattgattaataaagcgtatttaaaaattgattaatatacaatttactttctcttcattatattagaaaataacttggaataatatttataagattaaatacttttacttacagtataaaggttttcctttaaaatatgtgtttgaattaatatgtaagggatttgacacactttaattgcaaactcatggaaactacttgtgggcatattgcttagtgttttcttttatggctttcttataaataatggtaacaaatcaataattaaataatatgatatatattatacttaaatgaaactcataggaaaattttttaagtaaatttgaaaccaaattacaaaataactaatatgatgtgatgatatgttcccctcgttctttacgtatatatatatatcatgttcccacacacacacttcacaactttgagaagaacataaaacgagagagaagagaatcgatcatcaacaatgtcgtcggaggaagataagattacaagaatctctatcgaaccggagaagcaaacacttctcgatcatcacaccgagaaacacttcaccgccggagaaatcgtacgtgacatcatcatcggcgtatctgatggtttaaccgttccttttgccctcgccgccggtctctccggtgccaatgcttcttcttctatagtccttaccgctggaatcgccgaagtcgcggccggtgctatctccatgggactcggcgggtacttctctttttactagttccgttttaattgacacgtaaactctctatatagttttgaaataatggctacatgcaaatgatgattcatttcctacttgtggtgtaattactactacacattaacataaataacgtatgataaagttgtggtataaaagttg

SEQ ID NO: 57791 - DNA, 635 bp, Arabidopsis thaliana landsberg
atatccaaaagatgggtaacataccctgaatcaatcaatagtcatgaaagtaaacaagacctcaagtcaaattcggattcattcataaaattaaagaaaattaaagaaacaaacccaaaacgtggacacacataaccagaagaagagatctaaaatgtatatcaaacacgtctttttaacatgtttgacaaaattgaatagcatcctcaagacggtcaacggcaaatatcagctcatcttccgatcaaaagcaagcttccaagagaacgcaacagcagagcatagccaaactgtaatacaaaacaaatacacattttataagtaccaaacatatagactttgaatatccatattactccataccaaaatttatgaataatgaaccaaaaaaaggtatatcatcagcttcaagtattcaaaactatatgttaatataaaaagagagagataattggtcaacgcaccatccttccatgaagcctcctgaatccttcttatctttcttatttttcggtggagcctgaccataatgcggtggtggaggaccttgataaggatattgtggtggatgaccttgagggtattgcggtggaggatagccttgtgctggatatccttgaccgtatccttgctgc

SEQ ID NO: 57792 - DNA, 243 bp, Arabidopsis thaliana landsberg
gacataaacggtacttcactgggtggaacgagccatataaaacatagaacgactttggagaggccacaatctattacgaacatggatgcacgtgaaaacgggtcaatatgggctacacgattatgtgatgacgatcagtgctacaatgtaaccacagtctgagaagcccatgtcgccagaggagtttctgaaacatggctgatgcagcggtgtcaacgacgatagatatgagagggtaacact

SEQ ID NO: 57793 - DNA, 1267 bp, Arabidopsis thaliana landsberg
ggaactgcatggaagttaccgtcttgctctccatttttattttttaataaagaaaagaaagtctttcgttttccatataataagaactaggaagttcccaagtgttcttcacaaatcctttctttgttggttttggctgacaaaccaaccaggcaacgaccaatggaccctcctagtcctcctcctcctcccattcctgaatcccgaccacgacctcttactcctcccgtgctcctaacccgaccacgacctcctcttccttatgctcgccctcttcagccaccgcaaagtcttccaccccgaccacgaccccaggtgtttgttagtttccgaggaaaggagctgcgccacggcttcgtgagtcatgtagtgaaagccttgagaattgcaggggtcaacgttttcattgatagcaacgagatgaaagggagagaccttcaaaacctcttcaagagaatcgaaaactcaaagatggcactcgtgatcttctctgaccggttctcggagtcagactggtgcttaacgagctcgtgaagattgatgattgcgtgaagaaagggaaacaagtgatccctgtcttctacagggtcaatacagacgacgtgaaaaatttcaaaggtaaatttggaagttgttttatagaaacggtgcagagacagtctcctaaggaggaacctatggccgaacgttgggtgaactctgtgaaatctatttcgtccaagaccggcttcacctcagaagtccacaggtattttgtgttctgtctcaagttaaggttttttttttataatgtaatatcagttgagagtacatattaaaatttaacttatggtttttagttagaaatttttaggttgatactatatcaatactgttcttatcgatttggcagaatagatagctatcttgtggatgcgattgttcgggacgttaagagacagctaccatacgttcccactaaagagaaggaattgcccattgaaacagagattttcttcgctcttgttttggctggtctctgtaatttcatagcacctttaatattcaatgacacgagtttctacaagactcctcaatggtttgtaggtgttttgtttttggttctaatccgcaggaagttcgcctgaccgtgtgagtgatcgcgtgctttgacatgatcaggctcgtgtttgtacttgtacatgtgtgtgttttgtgtgttttgttaatatttatatataaagaaaatgtgcataatttacccttatatatatgcattacccgcttt

SEQ ID NO: 57794 - DNA, 1629 bp, Arabidopsis thaliana landsberg
tggggatgaggatgaggatgaggattaggattaggattagcattaggatgatcatgtgtgttttccttttcatgttgcttggtgatatccgccgtggaatcaacatgatctagcttcatgctgaagtacttttctgctccgaaaactccaatctcggcgtcattgtcagctttgatattggctttttctgagatttttgaagaagggttttcttggattgaggagaggacaagtaattgtggtttataagatgagatttggcgaaaatgggcactcttcttttcagcatccatctctttgtatgtgtatatatgttgtttagtgatgactactttatgaagtgttaaaatacaaaatatccaacccaaaagatttaaagggaatgtcaagaagaagaaagctatggaaatgatggaagatttgcagagagaaagagctttgaatggtggatatgttcatgaggaggaaatttcactattatatagagaaaatgaatcttggtggaggaaatggtgacaagtcatagttagctacacagtttgcaaacccctcaatttttaaaaattgattacggcttttgtattttgtcaaattgatttatggttttccttcaaaagaaatattaggataagtacattatatgtgtgtatatatctatgtaatttcaattactatttgaggcatgtacaaaaaaaaattgctatttaaaatatattcaccgatcccaattacacctgaaaaacttgaaccctaatctgtcaatttccataatcaaacacaatacgttgattcaaaaatatatagattttaattttgtttggtctctaaaacaaaaagtgagtaaagttattattaccgtttgataaaggaagaatctagcttaactttatatagatattttggttcattcgcgttacaaaacatcagttgaaaaatggattctggcttagaaattgtattttagttataagctataaaatattagtatatatttgactattcaaaaaatttgcaacaactttttcttaatatatcaactcatatttactctctgttacatgtaagttctaaagcaatcaatagaatatgccaatatggtgatgaatagtaaattaataatatatgttttgaaaatgtgattctgttttttttctatatacatttcacaacattcatcaatttttatattttcacattttttaaagtgatacagttttgaattataactgaaagtagtcaatatgtatttacgaaggctaaaatttctagtgtcttgagattttttagtgtaaatattttgtttttgtttgctaacttaggtatccccactaaactattcatttcacctaaagactgtagtatcaccatattattcgctgatgttacagtaattttacatgaaagccaaatgaacattatgagttggacctttcaacgttatacagtttcttcttccttatcaaagattgattcgaattatctcaatcatcaaattatcaatttcctttttctcgttattttgtggatttattatccatgataaaataacatgtggacaatgttacgacaagtggtatgtggaaattgaacaacaaagagaagagagaaatcgaactggcttggtattca

SEQ ID NO: 57795 - DNA, 353 bp, Arabidopsis thaliana landsberg
tttatttttagaaagtaagaaggcaagataaagaaagagtttatgaaatagaaaaaatctgagttggaaggaaccttttcctttttaatactctatcgggtctaaaatataatttgttttagactaaacatatatttattaattaacttatgaatctagcttgcatctatgtatacatttaaggtggaagaaaaagagctagaaagaactatattttaggacgaagggatattatgttgagattcagattgagatgaggtagataagatagagatatgtttgaatcagtcttaatcagcgcataagaaaagtatggatgagtttggtgcggcacaccacacggaagagcacag

SEQ ID NO: 57796 - DNA, 686 bp, Arabidopsis thaliana landsberg
tttaataacaatttgggtaatacaaatggaattttcaacactttttagccaattgaatgggacaaaaaaaaaatgtttttaatagaataatataagtcaattcgaataatttatttaggcaaaaattagactattttaatcggctgtgtgaatgctagaatgacccgagtgtcatattttgtcaaagctaaggtatatatgataatagtaataccataatatttattaactaatcctctcaagaacccaagaggcatcgacaacgccagagtcatcagtatcatgggtcctagatccattaccgaaccactggatcgcaaaaaagacatgcccaatgaaaagagacgcaacactgatctatccatttgtggacagagatcgatcgagggtacaaaccaaaaataagaatgtactttataatatttgatataatcttaggacctaaatcttggcttgtagtttatgcacaaatgtttagaatcacttcacaattccttagtgttcatatatgtcgccgtttctgatcatgttattaatgttggaaatagacatgacattttcataaaaattgtgtgatatgctaaaatggaagtagttataaatcataaataactatctaagagaaattgggtcacaattaacggaaatacggctattaaaagtactattttaacaaggttttatcc

SEQ ID NO: 57797 - DNA, 160 bp, Arabidopsis thaliana landsberg
cttatgctacacacggcaaggatgatgacatctatgatctgaccacggcctcattttggcctccattaaatcctgactttatccaacctaactcatccacgacagaccgagtgtgcagtaagccggctcagcgcgactagcaacaagacaagccagagcg

SEQ ID NO: 57798 - DNA, 155 bp, Arabidopsis thaliana landsberg
tatcgcgatcatcgtcttttgtatatatatcggagtagattttgggtacagcttgacatatttcacatttagtagcaactaacacgtgaagaggttgaccaaagataaaacaacgaaaaaagtgcgttgtcgcccactttaacatataaaacgag

SEQ ID NO: 57799 - DNA, 1034 bp, Arabidopsis thaliana landsberg
gaaaaccgcattagataatggcccatttgccgctattgatgccctttatcatcttacataacaaaacacgaatcatctacgacgaagacctgtaaaaacacactgcaattgagatcgatttcgactgtaagtgaactttgattgccgcgaagattactcatatcgccggacacaagtttttcagtgaattccattggcatagaactcgagagaaagagacacagagagagagagagatctaacaagagtcaaagtttctgactttttcgcattctttttgagatcgagttctgtctttgttggcgtgtgagatgaattcttaagaaggaagaagaagaagaaggaaagatgcgtagagagatctcgtttttgctacagcccaggtgtcttcttcttctcgttgccctaacgattttcctcgtcttcgcgctcttcaacaccggaaatgtaagcttttttctccgacccgttttcatcttatttgtcacattttcatgtggatctcaaattcttgtgtttcttcagaagatctgattctcttgaacccttttgtggagttactttctgagtagtgtttttttggatttggttattagtagtagtttcactttgattcaaatcaacattttatctccaagtacattaaagtgtttaagtgagtatcacacacattataagctccatggcaaatgcttgtcagattcttcttatgatggttttgaactttgggttattgtaccagaataacattgttgaacttgggttagctttctattttccgggtctgacatattattgttaggtttctctttgttgaatttatggttgcttggttagtgagaaggtttaatagaggagcagcagaatgtgatatgccttgtgtatgtttgcgcctgatttacttcctctcttgatgcttaggatgaggagaagcaagtaattgaagatcatgaaatcaccaacagggtttttctcgatgttgatattgatggccacgcttagggaaatggacttgacatattggctttttaatg

SEQ ID NO: 57800 - DNA, 681 bp, Arabidopsis thaliana landsberg
gcatcaacaaattattcagctatgcaccacaccatataggtaacaatattcatccctaactgcttgtttttctaaaatctctttgttaatcactgaagttgtcataaatgaatgataaggacatggcctgataaatctcgttgttaatcactgaagtagtcattctttcatgtttgtttaattgaaagggatccttccggattcgaggaaagctcgtgcttgaagtcgctccttgacaaaagagatgcatggcttggtccttggattcctggcaggtgactatatgttcatttgtatatactggtttgcattccttaaggaatttttctgcatttgtatcctcacgtattccggatcatgccgcagaaacctagtcctccccagggagatgtaactttttatgaatttttatccagggattggtttgaagatgaacttcgctattttcaaggtggggaagatggtctagcaccaagtgtatgggaaagtaaagtttctagttttcctctggtaagcccaatggctttttggtgaaatttggttttagtggttgtgctggctttttatttggctaccggcttgtctttgttatttatgctcaactcttatgcaaaattttcgtaatcatgaacccagaaactgtgaaaaagacattggggaatcagatggttctttgctttg

SEQ ID NO: 57801 - DNA, 328 bp, Arabidopsis thaliana landsberg
atgtgagctagtagaactaagcaggagtcatacgagaatgggtccaagctgaatataggacggacgatttgcctggacgattatttagaacagaatagaatatcagcacttatagataaaagctccattagagataatttcacatggagtcaaaaagaaagaagaagaggataattctacatagagataaatgaatgaaaaaacctcataatatattataggtgcatatattcagaaatcagaataatatgaaacgaaatagtgaattttggtggaaagctggaattttttgcactggtcagagtcggtttagttgtagtatgatggg

SEQ ID NO: 57802 - DNA, 1088 bp, Arabidopsis thaliana landsberg
gctcccatgacctccattgatgttgtcatccatataaaataaacggatctacaaaaccaggtaaccacatgcgaacattttgcacaactgctccttcgttatgatgtcccatgttcactgacaaggcattttctaaactaatcagatggttccacctagatgcctataggcggcacgagccaatcaagaactgttcctgttgttgatcggccattctgctgaaccaaaaagtcaaaaatcagcatataaaacacagagataaattgatttaactgaaacaaacacaagtccacacaatctaattgtctatgactgaaacaagaagccgtttaatatacaactgagtttcgacaattcctagtaaactactatacaaacttattattagctccatatacattgtggttcatatgatattattgcataatgcattttctctacagagtttacaatagaaaaaacgttcttatccactaattatacatttacattaccaaaaaaatctcaaaagacacagagtttacattagaaactacgttcttatccactagttatacatttacccaaaaaaatctcaaaagacagagtagattaccaagattagtgatcgaaatctgaagtaactataccgaaaactctaaattaacaaaatcgaattacattaaaagatagtctcaccgtcggaagcaaagaaattagactgcacaatcaaattgaatacgaattgaacaatatcttgaagcgtcgtatctgtagagagcgagaaagtcgaatgattaaattggaccaaaaccctaaatcgtttttgaacattaaccaaatcaaattgaaccaaaagataatctcaccgtgggaagcaaagatattagattgcaatcagatttgtaaaatctggaagcgaaaatctgcagagagcgagaaagattgctgaatttgttgattagaccaaaaaccctaaatcgatttgagttaaaagacaacctcactgtacgaagccaagaaaatataatcaaatctgtagagaatgagaagagtgagaattaagttaaaagaacaaaaaaaccctaaactttaagatatcataggaa

SEQ ID NO: 57803 - DNA, 890 bp, Arabidopsis thaliana landsberg
gatccccgtgtcttatgttgattccgaagctatgagtacttttgattaatctagtttacgaagttatcttttagcatcaccttctcgattttgttactgccatcacaggtcaagctggtttgatgtttcataagcattgataagcttttagcgaacaaacctttcttttgttagcattattacgtcgcggagttttgcatttgatcttttgcttctcttatggttgagcaagggcggcactgggctaaagcaggtgaaatccatgctttaggcgccaaaaattatagatagtattaaaagacatcaaaatttaaaaacatttcgtagtctagtgattgtttcatagattaatgactctttcgtgaacagtttgattcttaccttcgttttttgtaactttaattataaataggcttaaaaatgctaaggaattataaatgagcttaaagatgatttaggcatcaaaatctgttgggccggccatgtggctgagcttgagcttgcaacatgcaacactaatttcttaagctgcaatgcagtgagaagacaagtaaaagaagattaacattagcccaaactagactcttcacaacaaatgttaatgactatcaccttgctatatttatatttagcttcttttgtttggccttagttttcgaaaatagtttgtcttctgtcgatttagtttctggaaagattcggctcttattctcatatctgcttcaagtataaaaactgtattccatccatatatctcgcaatcgtatcgtatcccactcatgtattcatgtatcgtattataaaatagaaaagatatagatagggaaaaaaaactcacatatatttgaatatatataacgtactagaatgcaacagctatagcaaaaagg

SEQ ID NO: 57804 - DNA, 1373 bp, Arabidopsis thaliana landsberg
ggtctgtccggccaaggagcccagtgtcctaatatgggcttcttggtgggttggaagttcaatatctctaagactctcacgggtctggaattttatggttttgcatgtaaaattacaacttcaaaaataattgcaaaagatcaagatatatagtcatgctagtatcttactattgcaccatttagattcaatgtatgttattgacaagagaaattggcaaacaaacgaaaaaaacctagctattggcaaatgtaacaacaataacatgtttttcttgcaatgtcatttctcaattgaaaagatcttagagttaatatatctaccattcccgttatcactttaagaagaaaaataatctagtttcacataattaaagaaacacaataaatggggaaaagaaagaaggaatcataatggaaagacatgtcgagagcacatggtgtttgtatggggacagattccaatgtaagaaagaaaattaaataaagtggaaacaataatatgaagaaaaaaagagagtgatgcatttgtctccttggcggtggtatggtggcttcactatcacccgacacctcctcaaatttggaatacacctaatcaatcatgattatattacacacacatttcgttatgtagatacgacactcaatcacggatcattttgttgttccatcattttcctctttattagtataaacatcaaaaaacattttcgaaaacgtaaatgttggatgagactttgtgatcgcatccaaaccacttaattatttaaaattgtaacgatttttgttattttctacatatgagatttttttactatagatagataggttagtgtcacaaaggtagcaattggtttgatggatatttttacttctatagtttttgtcagactccaatgaacttactcatatgtcacttttaattggatgtgaaagaagatagagcatcaatattgaaatggcaatagactgagaagtcagaataattttttgaaaataaaggacaataagagagtgtccacatcaacttttaccatcttattttgtctggtggcttctgcttctttggatttaaaccttgagacaaatagaaagacgttcttcacttggctacctaacaacttcactttctgtgctcttgtcacaatcttaacccatttttccttacatctaacgtatatcattgattccttttgagaatttccatgttcaagacaatgagagaatatatttacgcaatttgatccaaacggtttaatttgtttattagtttgttacactttgtgtaaactatgatattaaggtaaggatgttggccttggatcagttcatgatgttttttagattaccaaaaacgttttagacttttga

SEQ ID NO: 57805 - DNA, 851 bp, Arabidopsis thaliana landsberg
gttgtcgtggtggtggtgttcttgttcataagtgttgaagagcccaatgaagaaggagaagaaaatcgcatctgtggttaagtggttaatgaatgatgataatgatgatgatgatgaaaggagttgggaataatttaataaaggagtcgtctttgtgagtgagttgactcggactttggatcgtcgtcgtcgtctagtgaaagttcgtgaagaatggggcaaagaaaagagagacactgatgatgagaacgcaatgactcccaacaaaaaccaaatcggtctttgcgcgttaaatgttttttttttctttcttctctttttgacttttcaacatcatcatatattatcttgtttgttaggagatggacaaatttttcttccatttggtatttttcgctttttcattcgtttttagataattctggatattttgtaaatggttttggtgttttgaccaaatcaaagaatggaatatgacatttacaagaaatgttttcttggtattagtttttgacaaataccaatgcataataatttgtatcacaaaaattgaatatcatgtcacatatttaaatacttattaggagtagtacttattttgttgttgttggaatctttaaattatgggttgacagttatatatatatataaaaaaagcttgttcatttagcagatgtacccgccaaccacggttcagcaaacaccccaaaatgttaattcgtgttgcttatgtattgtcagtttgtaacataacgattttagaaattttacagagtgtttatatacagagactctaataccatgtagactaagagtatatcgaatatatgaaacaagatgattacagagtg

SEQ ID NO: 57806 - DNA, 1523 bp, Arabidopsis thaliana landsberg
gtctgtggagcttctgctaaacaggaacttcctccaaatttcatagcacttccaaaagatgcttatactcctgatgtgattgctgcttcagactgcatgctcggtatcatctatgagtctttcaccgtaacattgtgctgattaactaattcacgtctaataatggtggtaatttcaggaaaaattggatatggaactgtgagtgaagcacttgcatacaagttacggttcatatttgtgcgaagggattacttcaatgaagaaccattcttgagaaagatgcttgaggtgagagacccacagtttgcgtaaatgtttgtttaaatgtttgccttctcctaagaatagttccactttcttggattaaagtattaccaaggaggagttgaaatgatcagaagagaccttctggctggatgttgggcaccttatctcgagcgtgcgattacattgaaaccgtgttacgatggaggcattgatggtggcgaggtagagtgtgcaaactattcatattagcagaccagtccttcttgtactataacatgacagttgctcaatttcccctgttgatgatgtcaatgccctggctgtttctatattcaggtggcagctaaaatactgcaggacacagccatggggaagaagcgtttcaaactcaatgtgagtgctacaaggaagataatgttatttgttactttagattttgtagagaaatttagatgtatggagttgtatagacaaaaataaaattagtttgtgattcatttgtaatgccaatccaatgatattcaccttgccaatgtagcttagcggagcgaggagactgcgggatgcaataatattaggtttccagctacagagagctcctggaagagatctttcagttccagaatggtatcaagtcgctggaaacgaagctgggattccttcggttgatcagactcagaaaccctccaagtgtgttttcttgtatacttgaatctctcaaaggacttaatggtactcacctcttaagctcctatgtgttttattaacaggtttgtagaaggctttgaaattcttcatggagatcaccatggcctttcagataccatcggtttcttggatagtttggcaacattagcgaaaataggaggccatcatcaagaaagggagcatttagcggctgccgcgcttttcaactgggaggtttgtatcattttcttggattcagtgaagtttgtgtgtgttttgaggaactaatgaagttttttttggccattcaggaggatattgttgtggcgagagcacccggaagactcgatgtaatgggaggaattgctgattactctggaagtcttgtcttgctggttaattctttctccaagattcatctttttattagcatcaattaaattcatctttaacagaagagtgtcttttttaatcggttagatgcctacgagagaggaatgtaatgccgctgtacagaggaatcatcctagtaaacagaaactcggaagcacgctgaagcacgacagcat

SEQ ID NO: 57807 - DNA, 1067 bp, Arabidopsis thaliana landsberg
ggcgccggataaaaacaactcacggcgttcgtgtccctcagagccaccgcaccaaacacaagaaccgacaaagcggcgtggatccagtcaataattcttatccggtatttagtaagattgggtaaacccaaaccgtcagggtcagggtagtcgaaaacccacatgcctttacgagtagcagatccgtaataaacgtttccgtcttcagccttgacgctgtcagtgaaggagctaagtaagcaggagatggacataagcgtgaggagctctatggttaaaacctgggtcgggtaatcgcatgaaccattggatgtaaagacgggtatgaggagcgtgaaagctaagagcgttccggttggaaggagatttgccaggtttgcagctgaggttagcgtctgtgacatggctgcatgttgagatgtctgcctccttagctgtggaacagactccgattgctcttgcgaactagttgggtttctctgcgttagggaagatggtgaagacatattctttcgtttttcttatttgtttcgagaattaatggatgattatgatcataatatataccaagaagaacgtgcgattaagtgtagaagatggttgttgacgtgatcaatgttttgacttttgagaagtcaatgggtctcttttgattccttcttgagagttgagactttcaaagttgattatatattactctcggtcttactcgtctccaactttaaacaaaaaactttaaaatcgatttgcatgttacgttaactttaaagagattcgcactctttggtgggaactaaaaaagtaaacctaattccactaaaaaaggtctcccgttggatccatctcgcagcaattcatccccttcatcatcaaatccgtgtgtttcctgcataaacgcctcacccaaggatcccctagggatttgttccgcgcgtatgatttctgtttggaatgctgcgaattggtcttctacgatcctctagccgtccagctttagagagtcgggctgattcactgttaccaggcctggggttggttcactcacgcctacaacgatggttttagag

SEQ ID NO: 57808 - DNA, 457 bp, Arabidopsis thaliana landsberg
ctgatgaaaccgttcctttctggtaacctggcctatatgaggtgtccagttcagctccctcttaccagatgttgtttgtcaaatttcgtatagacggacatcccgaggccagtgaccacacactcccttccaagataacattcaatattatattgacctgcatttagaaaggtacagtatgtccataacctcacactagagccatactatagcgaggattaatggttctaaacattaatggtctaccaatgacaggatatacaacccagacattccttgcaacgatgtgttctaccatcgagcttagacaaggcaaccagtactggttcgatccggtcctgaccccgatgatcacgttatcaacatgccatcacatcaattcaatccatatgtgatgaatcacaattttaatgcacatacggatgttgcatggtgctgttcaaccgagacgagaagg

SEQ ID NO: 57809 - DNA, 299 bp, Arabidopsis thaliana landsberg
aatctaccttacccaagaaaaacaaaccggaggatactttgcgctaccagttgccttattccctacttcattctctctgaactgacttatatgagcataacggcatacaagtcttaaacaccagcagctcttgagatttgttaactaatgcctaaacttgcaagagttcttgaggctactacatcacatagaaatagaatcttctgcaactattacaacaaggagacattaaatagtactcataaacagtcaattacctggagcttgtgctgatgaagaagtgaagagacaagttgaaa

SEQ ID NO: 57810 - DNA, 476 bp, Arabidopsis thaliana landsberg
ggttttattttctagggagctcttggagatgctcttattcctattggtacggagtaatatgtatattgtgtaattaaaatggcctttatatggtattgaacatttcccacaataatctgtaatctttccatgaattgctttcctatatgtggtattattaattggcagtgctcctagacactgcacatccatttcctgtgaaattactaaaagattgccgggaagtggcaatgggactgttactgatgaaattctatgagaattattgatttcgaagtaacttctttctggacttttttgccagccaacattgttttccatagaaaatggtttttgaatattcatggcaaaaatttatggtttacaaaatttcttcatttcatctacaggaaatcgggcaggctctactacctttacctggcgatgctaaaagccaaccaacactagcaacagcgactcaatttgctgccacacaa

SEQ ID NO: 57811 - DNA, 481 bp, Arabidopsis thaliana landsberg
tctgttccgctctggtcagctggcgctagtcggcactgggctcgacggcggcaaaggcggccgacagcgatctcggcggccagcaggacggcaaagctggcggcgctgagataggtggtcttcatcgacgtttccttatgtgcgtggtcgggcccggagggtccttgcctctccctgggccgaattgtcaggagcactgcaactttaatgtggcggacggggtggcctcaagtggcccctgccgcgcctctcattgctgcactgcagcgcaagaggccggcggggttcgaaaacacttgattaccctgtgggtgcagcttctcaaggcagggcagggccgcaccatcatgtctcaagcgcttttccgcctggatggaaaaaccgccttcgtttcgggggcgcgcgggcatctgggcgccgcgatgactcgggcgctggccggcgcgggcgcccatgtcatcatcaatggccgtgactatgc

SEQ ID NO: 57812 - DNA, 1174 bp, Arabidopsis thaliana landsberg
ccccgcccagtgattgttgttccacaatcgcgttgatgatttcttgtgtcgctctgtccaactcgtaaagagaatttgcttctgaaaatctagcagcctgagtggcaatacttggttggagaattctcacatcttgggttttggagtcaacagtcttggttagataagtcacagcctctaaaatcacaggagaggatttgtctataacttcacgagaagggtatagctcaaagagaggtgaatcccatcggtttcttctctcaggtttctcaaatcttctaaccagatcttcgaatataccatcgtcatatccatcttcacctctatcactccgttccttattccattgcctacaatgagcttcatctacatcacaataaacaacacaatacctaatcccagcagcacgagcgatacaccatagctcatatctgtaacctttgatactattcaaggaatctacaataacaatctcgcctgtcgaaactgatctatcaacatctgacctaagctttcctctcagattcttctcagcaggcacgttagcatagttttggttgcggtctagatgaaacgaagcctcatcgatgatcctaacactctgtttcgtttcagactctttcaatgtttcagctaaagttactgcagctattgacttaccactacaaggttgcccacaaatcacaactagcgccattggtttttaaacacactgcctacaaaaatggaatcaatacaagactatttcaattcaagctttaggtgcataagaacatcaacacataacaaacgaataagctttagattcacatataaaaactaaaattccagaaattcatatcataacggattcaatccccagaacaagttaaagtatcaaactttattagtacatacttccacaattatcaattccgacgaaaaatcaagctaataaaaacattaccagagaaaaattcgggagtgttgtcgacaggttgaagaaagcaaaagtgaaagtttgatttgggaatctagggcttatagattagaaccggtttaattcgcttggtccggttcgttcatatgaatatcaatttgcgtccggtttagaagatagatacgagccggatatgccaacacaagttgctaggcacgttgatggaatacggtgaggataatttggtaaattcaa

SEQ ID NO: 57813 - DNA, 524 bp, Arabidopsis thaliana landsberg
  unsure (1)..(524): unsure at all n locations
tannnnnnnnnnnnnnnnnnnnnnnnnnnnnnnnnnnnnnnnnnnnnnnnnnnnnnnnnnnnnnnnnnnnnnnnnnnnnnnnnnnnnnnnnnnnnnnnnnnnnnnnnnnnnnnnnnnnnnnnnnnnnnnnnnnnnnnnnnnnnnnnnnnnnnnnnnnnnnnnnnnnnnnnnnnnnnnnnnnnnnnnnnnnnnnnnnnnnnnnnnnnnnnnnnnnnnnnnnnnnnnnnnnnnnnnnnnnnnnnnnnnnnnnnnnnnnnnnnnnnnnnnnnnnnnnnnnnnnnnnnnnnnnnnnnnnnnnnnnnnnnnnnnnnnnnnnnnnnnnnnnnnnnnnnnnnnnnnnnnnnnnnnnttccctttttttttttttttaaaaaaaaaaaaaaaaggggcccttctcctaaagaagggaaaaaaaaactccccccacaaaaaatttttatttttgggggggggggggggggtgtctttcaccaaaaccacaaaaactttncgggggggtggggttttttttttttttcccccct

SEQ ID NO: 57814 - DNA, 1392 bp, Arabidopsis thaliana landsberg
tgggtaaatggtataaaagaaaactaagaagttcatgttttagttgggttttgtacacccatcagttcgctagtgagtggatcttccacagctacatgtcttcttaacagctggctctaccatagaggttttcttccagtcttaatgtatctctctcttcaatcttaatctctatgatctaaatccaatcatggctattaaacaactgagtagtgctggacataaatacacaggcgtggaattggaagattcacaatttgatcacctctacttacacttatcctcatcaatcaaaagcgagatatgatttcagtagcttttcatgtatataggacctttttttgtcaagccacgtatatgattacaaatttacatttgatgcatgaatactatatccatataaacaatgccaattaaaaaatccattttaacagtatatagtcgagtgagacgagactaagtagctacctcttattcgtttgaggactactctaactttagcatcagcatcgcgatgactctgcaattctctagaaagtgatttgaacttcacaagaacatcatctagatcccctctgaaacttttaatttctgattccaactcactcagagctagctgaccgcacaaatctagaaaagaaagcaattccacataggacctgggttaatactaaaatgttataaaggccataacaagagctgacaattgatcgcagtggaagtcatacctttaccaagattggttctgagaactgtgggaggtaagttcatccttcagacacctcaaatcctctgtcgcggctactagattatacaaggtttgcgtcatctggcttgacgtattcactccattttcttccatctgattcgagcagatattggatgaggagctctcagtagcaccagtttcaagtagccggttgatgaaatcgtttttcacggctggagaagacccatctgtgtagcaatttaaagttaacctttcaaaaagtcatatttgtaacatataaaaccaaatctaaactagatcctagcactaacagaacgaagaaaaggcgggcttaagttggtcataccctccttgtttacaaacctatgagctccgctgcttgaatcactcacacgaacagagcatgattccactgaagcttgtagctgctatacaagcattaattagttctctagaaaaagagatctaatccatgttctattagaatcgaaagcacattcagtgttaccttttaccaagacttatggacagtcttcaaactggagttggatggtaattgattttccttgatctgagagagcttatcctcaagaatagaacactcaacctgctgagcctctagctattgtgatagcttgagagtatggaactgaagaactgca

SEQ ID NO: 57815 - DNA, 904 bp, Arabidopsis thaliana landsberg
ttcgctatcttgttattgacctgtataagataagcttcaatggcccgtgatgcgattctagaacggttaaatccccgtgcagctaaggcgtccaagttgttgatcttaacacctaatcacagaaatcaatgagtgtttataccgctacatactttatcaaacgacaccaatatattgggtagtttcaacacgaacctggtacatactccaaagtcaagaccttcatggcagagtaatcccaataaaccaactacaatgaaaacgagataaccagaatgagtttcatctatcccacaactatacaagaacttatctcatgggggttttggtttagcaagttaaacttacaggtacgcggacccagtttatattccggaagtctctccggaatctgtcagcgttcttagcttcgtttatgtagtcaatctcttgatacaaaattctgaaaccaaaggaaatatcagtcctacatagcctggagccacaagttataactacgtctcgggaaaactacttacaaggcacattcttcatagataccaacccaatcgtttgtaccaaatgattcacttttctggaaatactcggcaatcagcttcagatttcctgataaaataaattacgccattttcagcaattctcaaacatccatgcaggtattctattatataactcagaagttgttactacatacgtagatcaatatcgaaaagtttctttagtccgggtctttgtacttttactaccactttctcgccattgtgcaaaacagctctgtgtacctaagggaatacaatttgaaaaattatgatacaaacatcaatatctagatgaattgcaaagaaaacgataagcgagtaggcgttcttgagggtgttgctaagtattagatacctgaccaagg

SEQ ID NO: 57816 - DNA, 544 bp, Arabidopsis thaliana landsberg
gctctgaagaagaaacttcattttcagaatcagtttctttttcttcttcttcttcatcttcaaagctctcgttttccttgggaacgtatttgatttcctcaacctcattcacattccctttctcttctccatttccatcgtttgatccgcttgtcgagtcatcttcctcacttataatacttgactctggcgtatctccataaaccttatatacgttcccattctcatcaaagctcacagttttcaccacacggtttgtttttcctccacttcctttcaccaaaaccctgctcccagttttcgaactacgcctctttccctcatccctacacatcacgagggtttcctctccaacgtcaactgaatcatcatcctctgcactagaagttaggtcatgtgtatctccataaaccttacatacattcccattcttatcaaaactcacagttttcaccacccgagttgtcttccctccacctcctttcaccgaaaccccgttcctagcttttaaactctggttccttccattatccctggacatcac

SEQ ID NO: 57817 - DNA, 1179 bp, Arabidopsis thaliana landsberg
aatatacgtcgagtatagatattaagtcattagaaacactcggttttccagtttattacgtatacgaccgatcatgcacagttggactacaattaaatgcttattattttcaactgccaattcagcttaaaattgaataagttaaacatttactacaacttttggccatattttgtcaaaataatcgtaaaatgttaacgatgagaatctcatttttcccgttattttgatcttttagataatacgtgttatacattaggataccactttcgtaaaagcttactttcttaagcaaacaattataacattcaaaaagtagaatggtcaattaagtaacaccgatcataacatgacaagagttgtttgtttataatttgttaatcacgttttgattaaatttcatacataaatagattatatatatagtgagagagttgttcaacggcaattttttagcttttttcacttgttttagatgaacacaccatatgcacaaagacaatacaatcatactttccatctccataaactgagtgataaaagtaagaagtaaaaacttgtccatcctagactcctagtcttacgatcagggatccgttggccctcaacagtgcggaaatttatggtttactacaaaaaagaacgtggtttagagagatttagaattaaagatggtcaaacttctaaattaaaacaaaaggcactggaccctcgagctatacagagtttgatcacacaatacccaacttaagcttctttttttcccaacctacaaaatctattaacccggaccggtttggagagtcccattcaccaaaaaacagagggtctcatcacgtcttttcttcttcactagcctctcatgctttgttcaaaatctgcatggtctctggaacataacaaaggtaaaaaaaattcagtcagtgagatgcaggattgatattactcagtcccatgtaacagaatcaacaaactctgatgatattactcactcgttgatcgcttcttgttcctgcagaatctgctaccacacagacaatcaaagggtttcattagagagtcattatcgttgaagtcaatgccataatcctgagaatgtgaaagggttacatcagatcaatgtatatcaagatatcagtaagcattaggaatatacaatcattttcatcggtatagaaa

SEQ ID NO: 57818 - DNA, 352 bp, Arabidopsis thaliana landsberg
cgcctgagactgggtccctaagatttcgcaaaacacgttatgggtttttttcacaacagcaaccttcgtttttaaagttcccttttctattgccgtgaaaatttaacttttacccatggtaccttctactatcatcatcgacaatgctgtagttgggcgtccacagaaattctaacttgcgacgattttctcgtggataaggacacttacacgataagaatcgatgactccttgcgaccatacgatcctcgtattggatgccggactcttgacactaccgtcaaaactaacactgtgaaggaagatgacaagaagtagtttcttagccggattgactcagcagatggttatg

SEQ ID NO: 57819 - DNA, 1760 bp, Arabidopsis thaliana landsberg
tctcaatgtcagaaatcagaatatattacaactcatagatagcggataaaactgttcttcatttgcgatagtgcagaatgctgagagaaaaagtgatagaaaaaatgttttgttggcaacacaaacatatattgattaatagtatagatttacaacaaattagtgtcagccttttctagaacgtttaagtcggccagtagattaattacttcctgtccgctatatcatgcaaatccaaatgaaaatgatttgattgatgttactctaactgtaagaaaaaagtgcattattgaaaacttcctttttctctgtacacaactacaatagccagaagcaatttgtaggtcataaaacattataatagatattttctttttggaaagtttaacctctttttctccttaattgttgggagtgcaattgggtatttaagaatgaagatgaaacttagattcaggacctttttgtgtagccactgacgacagtccttcgtacataatatttatgtttaagttgggtgtattataaatttatataattaattatgtatattgtataggtggagtaggaccaatttagtcgtcaaaagataatgtgcatgaatgatgacaagaatgcgatatttttggcatgagtcatgattaatcaatgatgtcaatcaagattacaaatttatacgaaatgatagtaaaaaggttcaaaagtctcttaattctattacaccaacaaaaaaaaagtctcttcattctacctcactaatatatgtttgttcggtttggattgtttttaagaggtccgagccgagatccgactaatttcttaatggatctaaaacatgatactaattttgactaactatgaaagagagaaatatcatctacaaaataaaaattactaaaagtttaagaaggtgttctaaatagtttagtacaatttattaaactcttgtgaaccttttctaaataaaatcttgtagtcttggtgttttcctaaatattgtatttttaaattaaaaacttaattttgtcatatttgaagatatttctctatacataaataaatatatcttccgagcatacacgaacattacatttctctggacaaatcaacattaggtttattcaattgtcgatttgacaaacgatgaaagaaaacgaaaccctacatatcttttaagcataagtgactctgtggttcatgatctctatttctggttcaacgaacgcaaaaggtattgcctgtacagaggtgtgaactaagacttgtcatataatttctttgactatcattctaagacgagacaggtttggtaaattttcggtcaaaaggcaccaaaaaaagattaacgtatgtcccttaataattttgttgatcaatagtatggtttggcattaaattaaaaatataagaacaaaatgattgccagttttgtgaactaatagagttgccaatatgaaaaaccattaaaaatagcttactgcaactttttaaaattgaaaattgcaattaatatgtcaactactaatcaataacaatttttgtcctttgcattgcaattaacaatcaatctttgaaaagaaaaataaaaaactataaaaatgaagttaaaatgtttcctgtaataatgatactaattgacaatagctagctcttttccctccttgcgtttcacgtggcatatcccccacatggctcttttgaagcatagaattcttcttctaactcttgtcttggtttcacaaaaaaaatctggaaaagat

SEQ ID NO: 57820 - DNA, 1409 bp, Arabidopsis thaliana landsberg
  unsure (1)..(1409): unsure at all n locations
ggatactatactatactactattgaattatgagtcattttatttatctggctttgaccaaatactgaatgtttattccaggtagagaagctcatgtgatgacatttgaagttggagctgtcctagaagacgagaaatggcaggctcctgtatattgtttccacaatgagaagaaagaagtacaatgagtaaatgattttgtgtttcatttctatgtagagttttgggcatcttttgaatatatatcaaccgttcaatgaggaggtcattttcgtttttaatcaaatacacttggaagcataaataaaagtgatgtcttaatctataggcctttgttgggctttcactagttttgtaattaccttcttgtctagctaaggtctactaagcaccttcttatttggtccccaaacgtatcttacttgtctactccaaaacccatttgccaaaattctctaaaacgtaaattgttgttagatatgacaacttacgatagcaattaataagagaaagttattataataagttaaaatgtaggtccgaccacattcaaaagagaatctatgtgatgtatgttcatgacattagcataatagttgataatcaggaaaaggtagtttggtcattttcataacgcgtttctaaatccattacatcatccctaaacactagttagtgtaatactcaagtaaatgctttataaaaataaagtaaccaatggttgagcgtttgtggattcattatgccgaggataaagtcaagagaccaaattaccaatgtacatgtgatttggttcctaaagatatttagactgaacaaaaaggttattagtcttttctttttcactttttgtcttctaattaatgattcagatgtccatttcttatagtattaaaaagggttaagggtcaattaagaagaaaagattaacatataaaccccagcataaatctcagcttttagtatttaaaaaaaaaaaaaacataaaccctacttttatttcttctttttcaactttatgggaatatagtaacatgcttctttctcttctttattccccttttaaagtgtttttaaattggatcttacttttggcattcattttttcatcacccatcatatgcttcacctaaagttataagacttgtagctcttgtttccaaatcaatttccaacccgatctatgctctcttttcccatcactttattctttaatactttcccatgcagttttttctaacgtaaaattgaggacaaatattttctcaaaagatccgactcatttcttactctctttaggcaaattattataagatgttgcaaggaaaaaaaaacagtngataagaataagaataaataaaccaaataaaagattgtgacttggagctatcaacacaacgaacgccctaa

SEQ ID NO: 57821 - DNA, 134 bp, Arabidopsis thaliana landsberg
aatttgagaacatgtaatgtagtaaattttacaatattgtggcttacctcttataatgttttttttccccataaagtttcgattgatcttccatgtcaattcgtatctaaaatgttcttcagagaattagaggg

SEQ ID NO: 57822 - DNA, 533 bp, Arabidopsis thaliana landsberg
agattgacaacattaaattaaacatattttcgtgacgatgaaaagagacatttatttccatgacagacttcacatgatgtatgtaaatacaatatgtgaatataatcaaattaattagctccggttcaaacacacaatgcttttggtaacgtggtaagaaaacgaatatatggctagtacacctactcattcttattctctttacagctataagatttttggctttaccatttctttagtgtcaactcttcttcatactgcttgtttatagtcgagtaagtcgacgaatattgaaagaaaatatatctactccgagcccgtgagcgactgagcggtgagctacgctatcaaaacctcgtttctgaattctctcatcattggtcgaggaagaaagcaatatacgatactaaattgatcatagctagtctagactcttaccttttagttcactattatttttgtgctcagattttattacataattatataactcactcaattaacatttatcttgatattaaaattccttagca

SEQ ID NO: 57823 - DNA, 1033 bp, Arabidopsis thaliana landsberg
acaaattactacttaatatgtgactaatggaaattaaataacttaatgggagtgtaagggaaagaaaaatgatggtgcatgaaaaaattcttgaaataatttatttggctagcctctgatatatgtgaatctaaattatacatatatacgcaagaaacttgaaaattatgcaatcacattgacattatcaatttaaacttaaaaattgctatttagtaataatcagtggttaagcttacacaaaactaaataaataaaacatgacaaaaattctcgaccgtgaattttaacaaatgggccaagaaaaatgtcgtccaacggtacgttcatgaggatgcacgacgacaacagaaacacttgtgtaagcataggacccactaaaagagtcccagtttcccaaaaccaacaaatctcagccgtcgattcttagccactcggaccaaaacgtacgcatcaaaatatcgtcctcccaaagtataacctcaagattctcacatattctcaggcaatgccattgagtatttgagtattgaccctcatcatgtgattgaaaatcgccactcaacaactataacaacgccacgtgtcactcgtgtcagtccaagcctccactcttcttcttctctacataactgaccattcttctcctctgctctcttcactttctcatctcctccattggctcttatttcctcagttgccgtgaaaatctgtgagctttttcttctgtttaatgtaaaatttgtcaaagattgtatctttctatttaaagtatcgattttgattgttcatctgttgaatccaggtaaacgggtagttcataatggcaactgtgactgcttcttctaactttgtgtcaagaacttcacttttcaacaatcatggtgcttcttcatgctctgatgtcgctcagattaccttaaaaggccaatccttgactcattgtgggttaaggtcattcaacatggtggataaccttcagaggagatctcaagctaaacctgtttctgctaaatcctcaaagagatcttct

SEQ ID NO: 57824 - DNA, 694 bp, Arabidopsis thaliana landsberg
tgtttttcacctctatgacggtagtattaagctcgccaatggtcacaccatttctaagctccgtgatgttatcccgtgggagatgtttagagagctagttcgcaacgacggagaacggttcttgaagtatcccttgcctgacatcctcaaaggtacgtaacgtatcaacggttagatattcgattcagacctaatgctttttatagattttgacataggtggtcgtctattgctacagagagcagatcggcttgtaggactgacgaatagtctgctcgagaaatgctggccggtcttaatccggtggtgattagccaggttcaggtttgattttcggcatatcacaaactttgttcttatgaatatttgaaattatcaaaatttatgattacaaataatttgaatacacaaaccaaaaatgcaggaatttccaccaaagagctgtctggactctgcaaagtatggaaaccaacactcttccatacgaacagagcacatagaatcaaacatgaacggcctcaatgtccaagaagtaagtataatatacacttcttgtttaacaagtaacagagatttttttatttcatagccaatgtagttaactgctttttggtttcgttttttgttatgtaaaaaaggctttggaacagaataagctatacatattggatcatcacgacgcattgatgcctta

SEQ ID NO: 57825 - DNA, 1642 bp, Arabidopsis thaliana landsberg
gcaacaacaacttcatgaaaccaatttagatgacaaatcaatgatttatttacaatcaatgcctacactaaagcaacacggtctagatttccaaaaaagcctcaattcaaccgataatagttccatcattcaatcagtattttcttctcgaataaagtaacagagagtcgtaggaacacatacacggtgactctgtcaggatcaaacgcgccggtagtggaattgtactcgaaacgacagaagaagtcgtcgtttccaacagagtcaagtttggtgtagctactgaaactgtgaaccttacactttccttcaatcgtatcggcgctttgaaaatcgaagtggtcagagagaaaaacctccttggctccatggaattgtctcctccctccgatagattcctcagggcgataataccacctcacacgaactttcgcgtgcgatccacgcgcgtccgtctcgatcgcctctaccctcgctacgtacgacggttttccaggctccgacgaccgcatcaacacagcatctccctctttttaaccacaaaacaacatcgaacgattcactttcaatatccacgaatttcaaattgaggatgaacaagtcagacgtaccttgaatactcttgttgatgtgtttgagtttataggacttgagctgcttccttggagctttttgcttgggcatctgaaactgaaaggtgagtaatgggcgatgatgaagctcaaggttttgcgaacagtttttctcaatgaatacagtcaagaatcatcaatcgcatgtctcgcggagtacggtaagaacaagtcatgaggatctcaggagcgtatgattgggtgtacaatggcaggatcgtgaatatagaggaaagaaagggagaaaatgggtaaatagaatgtcagatagccaattgaccacgtcagcttttaagtggaagcgcgtgtgtgatacgcgcctctaggccgctcccttttgtcgtgaatcatgtaaaattagccacgtaagcaattactcattatgacttgtcctgactttgtctttgtgtgttgcatgttttcagataaataggaaatgctaaggaatattttaagaacctttcaattctatatttattcacttattattcaattctatgcgtacgtatgattacattcgaaaggatttccaacatttttgtcccaagaagcaaattggaacaaacacatccaaatctacataatttgcgcaagaaaaaaagataaccacaaaaaaacagacataaaaacagtaaagaaaatcaaaaattggatatgaatgacgcccccacacactgaactgaagtttgtgttttcagtgttgggttgagaataaaaaccaaaggagctactaaatatattgagaaagcgtaagcttcttttttcctaagccacacaaggtgaggaacactgggtgctactagagacccttctacaagggtagttagacaaatacacattgctgttaatagctgcagaaaatgaatatgaagatgatcgctcgtccttcttcttcctctccctgtaagcctcatcatcatcatagccatcaacagtttgggttggtttcttcacatccataaggcattttacatctgagatacatatgaatgatctctcttttcctgaat

SEQ ID NO: 57826 - DNA, 558 bp, Arabidopsis thaliana landsberg
  unsure (1)..(558): unsure at all n locations
agcgcccttgaggttggcgaacgtcacattgtgcttgatgtggtcgatgaggttgagcccgtaggtcttacggtcctctgtgacgtaggcgatgccgtgctgcaccgcccgccccacggtggacgtgtcgatcttcttgccgttgagccacacctcgccggtgatgtggcggccatagctgcggccgaacaagctcatcgcgaattcggtgcggcccgcccccatcagcccggcaatgccgaccacttcgccgcgccggaccgaaacgtcgatgcccttgatcacctgccgctcggcatgcaccgggtggtagaccgaccagttcttgacctcgagaatggtgtcgccgatctttggctgccgcggcgggaaacggtcctcgagcgaccgcccgaccatcgaggtgatgatgcggtcctggctcagcgtgtcgtggctcagcgtctcggatcgtctgcgcgntcgncggatgaccgtgacatggtcggcgacccggctcacctcgctcagcttggccgagaacagttcgagggtgatcccctgcttcttgaactcgag

SEQ ID NO: 57827 - DNA, 207 bp, Arabidopsis thaliana landsberg
tcgctccatatccgtctgactcataatatgtatcttaacttgggcatccatttcaagtgcatatcccacttttgcccagcatactgatgaaaatgcacaagaggcgactgggcggatcgcatgtacccatagccatttctctaatatgcccaaggatattgacgttccacaccctgatcttgctgatactggattcgaaacacatgt

SEQ ID NO: 57828 - DNA, 351 bp, Arabidopsis thaliana landsberg
  unsure (1)..(351): unsure at all n locations
gattttaatagacggttccttaaggaaaccttctgtgaaaatcatggatttgtattgacggttttcttaagaaactgtcgtcagtactgatgttttttttaagaaaactgcatgtagaaatacacgatttgcactgacgattttattaagaaatccgctagcgaaaagttgtttctactagaggttcttgagtcaagacgactaatttattatcactggcttcataactataatcacctctaaaacttagacctcaccaaatgtatagagccctatattattaacatttttaataattataaatttaacccgcctagtacttattaagtactacatanaacgcaaaatgtt

SEQ ID NO: 57829 - DNA, 508 bp, Arabidopsis thaliana landsberg
gcgacttgacaggcaagcgcgtggcggtcgtgggcactggtgcatcggccattcaattcgtgcctgccattgtagacagggttaaaacgctttctctctttcagcgcagcccttcatacatcatggcgcggccagacagaccgcacagccgttttgaaaaagcactgtggtcgaagtttcctgtcctcatgaaactgcatcgccttcgcatctacttgcagtacgaaagtcgtgctttggcttttacgcggtttcgcggcttgatgaaatttgccgttgaaatgcccttcaatcgcttgctggaaaagtcagtgagcgatccgcaattgcgcagcaaactgatcccaaactaccccgtggggtgcaagcggattttgttgtccagcgactacctgtctgccatggccaagcccaatctaagcctggtgaccgacccaatcaaagaagtcaccacaacgggaatacgcacccgcgatggtgttgaacacccagacgatgtcattattta

SEQ ID NO: 57830 - DNA, 1041 bp, Arabidopsis thaliana landsberg
aggaaaaaaaaatgtacattattaccaaccaacaagaagtcagtagtttaggtgaaaacaggtgaagcaaattctaccatgactgttgtgtgtttctgtgatgatcactctcttacatctcaacaaacaataatatatcaaagaaaatgtttactagaagaacaagataggtaacaactaaccagtaaaatagtaaggaaactgatggaagactgttagcttttaactgaccaaaacaaagaacactgttgacaaacctatttctaaacgacgatgcatcgcatgattcagcttctgacgtagagaaaatattaagtccaaaggcggttagaagaaaacataaacgtcaaaagataatagaaatttggtattaaacaggaacagaaacacaatacccgagtgcactggacactgagtttagcatgattgatgcccacaagatagcatctaatcgtatcttttgttcagtaaggttattggcaagggtcaaattcttgatattgtttcttgaaatcttcagccagctttgcctcctcttcttggctaattttacagtttctccaatcggccctatctgggatctttagcaaccctgctagaacctgtaaaatccaatgtcatttctatagcaacaaaacgccttaaggatctcaaaatattgttaaggtggatcagaagttatctatctattcgaatccaaaatgtcatatattatgatcttagcatgaaagttcttttgtgaatggtcactctgtattaaacagaacataatgtttgactcttcatgcgtatgaatattgtgttatcaatggcatctttctttagtagtataatagcaaagtcgcaatccattcatgaattgtcttacctcccgtccaaactgcgcagggaatacttcgttttcttccggggtgtgtgatagcacagttccatcaggaagttccacatagaagagacccaatgccgctattatattccttctgcagatattttctgcaatcagtactatcattaactgcaacaaagacaacatcactgagt

SEQ ID NO: 57831 - DNA, 407 bp, Arabidopsis thaliana landsberg
ttaaatacttacttgaccagaagggtaaacggcagagtttttagttggaacggcgataattaacggcgtctaacgtatgaaaaataacgctcgtctaactcttccgtcaacttccaccgtcttgccacgtggagtaatattagtgggagtccgtacgttaccctcgaaacaagcgacccctccataagtcaaagcttttttactcttataagtcaaacttttattcaccacgcgttaaccgcgtgtttgcgttacactgcaattttattctgttttgtcacaagtgttgcattattttgtttgtcaaagaaaaacaaaatctgctcttgattaagaaaaagacgttgtgttggacatctttaaaaaaaaatgttagaaaacgtttcatatacctttgtctatattac

SEQ ID NO: 57832 - DNA, 1189 bp, Arabidopsis thaliana landsberg
gtttgcttttgatttggttggtatgagaacagaaattagttagccaaaatgtattttgttctattttatttggaaataaaccaaaactaagtctatagaattgaggctgacccgggccagcaacctaaataaacagagtcaattataggaccggctctatacattaatgttaaccttggagtacattacgtaatgaaacgaagctctacaagaaaagtatgatacacttatctaatgctaattcaatctcctcatgattagaccacaagcgcatcttctcactttcatataaacgtatgtcatattaaatagtgtgtgtatgactatgagcggtataatatattagaatccaaggaagtgagattctttagccgcttgaatactttggcgatcgttgattgtattgagcctaaaaagctaatcttttcattttgtaattatatatcaaaccttttgactaatgccaaacaagataatttcccattctctttttattcactttataatagtgttgtcaaaaatattaattcttttgggaaacctatgattcttttatcatatctattaacgccatttttaagcttttcatacaagcaatacctaacacgggagctatcttattaccttatgatgatcgtcacttttaattgtataatcaatttgataaagaaaaaagggatagatacaatacaaattagtgctttgatcatatctaattattgcatgagtgtctttaatttaaggtcgtgaatctttggaaatccgagaggttttttgacttaagtaattgaaagcttttatttatctattattttatttgtagctttttgtaaaaaattgaaacttgtaaaatctgtatagtatttgtttgctcaaaaaagtcaccaagattgagaattgacagaaatagaataataaaatgaacaatttgaaatcaacgagagccaaataatatgcatatataattttgggaattgtggtgttgttttcatttggaccatatctccatgtgaagaaccacttgaccaggagaatatttttgtcccaattgatttcacaatctctagggttttggatagctgagaacatgatcctttgtcctctttacgaaattgatgcaaaaccacttaacaatttgtcccttcgttgaaatttatgctttcgatttttatttgggggggttggggga

SEQ ID NO: 57833 - DNA, 1061 bp, Arabidopsis thaliana landsberg
aagagctacaaatatgagcggcttacgtataacgtatataacccacttcaagatatatttgtataccaacttaaatattttttaatcgttataattgggaatggctttgtgttaatggcgagacgcatgcaccacaaaatgttcacttgtaagacactagctagaaaaaaccctaatgtaagagttgtttataatatatcagtgattggttcaagttttttatacccagataatgaatttattcaacgtttactttgatatttttgaattcaacgtttactcttacttttattaccacacatcaaacttttatatagaggggggttggtaaatgagaagatatgtaggtagttgagatatattaaaattaaactcttctttcgatacataacgtacaacagaaaattaaactgaaatcttggcattatgcacgcttgtgattagacaaatcgacgactagtttaccaagtgattataatcaaatatataattacattcaaaacattatctcaggtacgtaaacttctctattttcgttactatttatatccgcttcaaattgttacttttcaacattcacttttcaatattcaaccaaaaaacaaaaacaaaaaacattcagttttcaagcagaagtgtggagacaatgggtatcaatttcgaggaccaaaccacattgttcaatttcgtggtcagagaaggtaacggcgtgaaaggaatgatagactcgggcctctctagtgttccacggcccttcgtccagcctctctctgagcgaatcccgacccaaaaagcccttacgtgtgaggctacccagccaatcgatctttccaacctagacggcccacaacacaaggaggtggccaagcagattgtcgaagctgccgagacacttggcttcttccaggtaattaatagtcgacacatagtattttggttggtgtataaaccagctatacatgagcgtgaacatgtaaatttgacgcggatattacttacaaaatgacgttatatatcttggaaaaaaagagtaaactgggcttataagattgagaatattt

SEQ ID NO: 57834 - DNA, 579 bp, Arabidopsis thaliana landsberg
cttttcggcagtttctataaaggatttttccacttggaaataataatttggcgaccacgttattgtaaaatagaactgtagtatttcacgccgtctcactttgacttgtattgtgtgattttgtatctatttcttacaaaagactactacacaatttgaaaagatattaacaaaacacaacaagaaaaggtaatggagaaatgtgttacaaaaccgtttgaaacaatttaatgtttaaaggagttttgcgggtttaagttcattcctcttttgcttttgctagatcgtatatgattttatttactgaattgagcgttaaaaagatcttggaaaaccacaacacctcaagagtttccacatgtcaagagattttcaacattgatcaataaacaatagataaaaagtgggtgagtaaaataaaagatagaggtatggatcaattaaaaaatatgtggataaggtcaatgtccccaacaaacaatttagtgatcccactgtacatagcaataattaaagtgggtagtgcgataaaataaatagactatacacactgataattgtgttgagttggataaaaac

SEQ ID NO: 57835 - DNA, 446 bp, Arabidopsis thaliana landsberg
aatttatatttggaaatttggaattgttaagcttttctactattattgaaaaaaaaaaattggttcagtatgtttaagaaacagattatttggaggattgtgagagcaaaactattttatacattttgacgttaagccgggacacgtattactgattcacaagcacacgtcagtaaataaaaagggagaaaatgtagttggttcataaataatccaaaatacaagcgacaatgtattgtacgatgagatgagaggtgtgtttaggttcacttattccaaacctgccaaaatttcatcctagcgccacacagagagacagaacaagataatttttaatcttgggcccaaatagacacgtggccataccattacactgatccacgtggagagaagagctttcgtgtacgactcgaggcgtgatggcacgtgattgcttacacctaatt

SEQ ID NO: 57836 - DNA, 497 bp, Arabidopsis thaliana landsberg
tgatgaaggcgcaggtgccgtggtgcgaatacgtcttcccgatgtgccacaaaatgggtttgcccccaattttcaccatgggcttggggcgaacggacgttttttcacttaaacgagtgcccaaaccgtccgctagaattaccgctttcatgttgttatataccttgaattattaattggaagaacacacaaacgcatctgaaaaaaactgccttgcaggcaagccatggctgatcaatagctgagtggctgaatgaatcatgttttcagacccgcaggcgtagaccatgcagttagccagaggcaaacccgcatcatgaaaaatgttttgcacataaccgtgagccccctgccaatcggcgcctgcacgtgaaagaacaggatgaaaatggatcggggcttggccataccttgattctggtgtccagtacaggtcttcagctgtgcgcccaccccaaaacacgtgaactgaattcggcaattgatctggcataacg

SEQ ID NO: 57837 - DNA, 773 bp, Arabidopsis thaliana landsberg
ataacatgacccacaacctgaaaaaaaatcaacagaacggaacaaaatgaaaccagtaccacttataacgatgaattagcgagttttcgatgggtaaagaaagattgttaccgagatgactttgctccatatgaatggagatgtggctccaactagaattgcaacagcgtaagccatttgaagtagtgtaacacatgtccaaaacacctgaattttgcaagaaacaaaaacagttttctttcttctgtaatcttaatccaacacttgagtcaaaacaatttctttagtttagatatcgtacccgtttctgacccagagttacagagaatgatcggattccgaatatcttatccccttcgatatcaggtatatcctgcatccaaccaaaaaagaaaacttctcatcaataacagtagaatgctttactttaagtatacatagatttaatatttttccatctttgtttaccttaaacaatgcaataacgacagagaaaaagctcataaacgcagtggcgaaaataagaggcctagtgaacaagattggtcttccaaacacatgtgtctgcaacaaagtttcacagctttagtaatataaaagtgattttgatgaaaacaactacaaaacataaggaaaatggtttagtacctgaatatgtagataaaaggcgatttgaacaataatagctcggacagcgaggatacacattgctgcaaccaatgcaaatcttttccaccgtaaaagtggcaactgtttgtagtagaagtaagtta

SEQ ID NO: 57838 - DNA, 573 bp, Arabidopsis thaliana landsberg
  unsure (1)..(573): unsure at all n locations
tttttttcgtctctctgtttaaacaattgggttttgttttcaggctgttgttgcagctctcatgatgaacatttacatagttgggctaaatcagttgtctgatgttgaaatagataaggtaacatgcaaattttcttcatatgagttcgagagactgatgagattaatagcagctagtgcctagatcatctctatgtgggtttttgcaggttaacaagccctatcttccattggcatcaggagaatattctgttaacaccggcattgcaatagtagcttccttctccatcatggtatggtgccattttcacaaaatttcaacttttagaattctataagttactgaaatagtttgttataaatcgttatagagtttctggcttgggtggattgntggttcatggccattgttctgggctctttttgtgagtttcatgctcggtactgcatactctatcaatgtaagtaagtttctcaatactagaatttggctcaaatcaaaatctgcagtttctagttttaggttaatgagggttttaataaacttaactttctactaccaaaacaggttgc

SEQ ID NO: 57839 - DNA, 1192 bp, Arabidopsis thaliana landsberg
actttttgtagctttacttgcttacctaagaaaatgttatgttgactacgcttcgccgattatagatattgcgtgtctaaaataatgtcccattaaaaactagtcaagagactcgaagataatgagtacaatattaaaaattacaaacacattgcaactttgcaagatcaattcttattgttttactttagttacattattcaatattatcttgtagtaaaaggtttgttttttgaaagcatcattgtcaattaatgttccattttcggtggtataataattagacaacttaagtttttttttataataagagtgtatttttatgtacacaattaaaccccacgagggaggaaggtggattgaatccattacatgtgaccacttcactatattaccaaaaatactgtacactatatttcctttatttgaaacccgagagaaaccgtaatagagatcaaagcagacgactacatattttcataaaatatttgcatgccagttagatttgattgaattcgtgaagaccaaatatttgtcatatcaattgctatgacagaacgaatagctaacatgggtttttaatgaataatattaaaggaaaaaggaatcatatactcatgatatcccctagtacaagcaatggctttttttatttaacatggttgaggatatatcttcacgttatcacctatgtctatattctcatgtatgtgcttatcaacctatatactcgacgattagggaacctaattaagatgaataaacatagaatataaggtggtggaagcattcaagcatgcagctgcaatatccagtgatacctttgaatttgtcttcgcatgaacaagaatattaataaatgaacttattatattactcgattttggaatagtatagagtgcatgattgtttccatacgtttacgtgtattatatgggtcccaaaattttctcggtatcgtgcacccgagaacgatagtacgtagtgctcattatcgtcattttttcatctcgtttccttttgatttttcttttttatacatcatttccttttttgtttaagttaagttttttttttctgccattaattggcccattccccatcgatgacgttcatggtatatacgtagttcataacagagtttttaaaaattgatacatatagcaaatagcaatttaccatgtgggattga

SEQ ID NO: 57840 - DNA, 1242 bp, Arabidopsis thaliana landsberg
caagtattttcctttttaactttcctcattacatcaatgcttctgcttccacagtagacaggaacttacaatacttctctttgatgcttgcaggtgtgtatggagattgtggtggtgcgtgggtcaatgaaaagtaagtttctttcttccaagtttcatctcttttgttcatgatagataaggtcgttccttcatattgcagtcatctcccaaatcctaaaactcagtcagccaaagtgagattagctgcagaacaaggatggttaagcttgggtcgtgatcttggggtttcgactcaaatacttcgacttgggggtatttatggacctggtcgaaggttgtttacagcttctgattgtgtatgtagtgcttaaacaggctttaaaactgattctcaaaaggaacgtttcttgctgcagtgcaattgataccttgttaaagcaggagcgtttgtctgaaggtcaaaagagaagagcgtcccgtaaattcacgtcgagagttcatgttgaagatatatgccaagttcttaaagctgccactgaaaagccagcatcagggtttgtgtatccctcttcatctatgatcattcttttgagatgaatgattgaaccattgagacggatgaatcaaccattttggcagggagatctacaatattgttgatgatgatccggcagcaagagaagaggtgtttgaatatgccttggagttgatcgagaaacgttggccggggaatatcaccacaaaaccatttccatttctgtatgaatctcgggaggaaagttcattgagaggcgagaaacgagtctgcaacgaacgcatgaaggataaactaggagtgaaattgctatatccttcgtataagtcaggactgcaaagcatagtcgagaacatggacaaccgtttttgagcacaccacaggactaaattccgctgatctgaatctttcctgtggagaattagggactctttagtaaagacagatttttagtttatccttttttgtttcttctgcattctacaaaatgacaagtttgtttcattggtacacatattttccccatgtgacaattaaacatggaataaaagtaaaaagggatacaaaatgtttaagggagcttttctctaatccaaagccaggcctattttatgtcatgttgcctgattaaggccccgaaatgccgaaaaagaagtggttaatcatgtggagaaaactttatcttttggtttagaaggggaaaa

SEQ ID NO: 57841 - DNA, 573 bp, Arabidopsis thaliana landsberg
gttgaaaatccatcgagggtttgcgatttttttaatgtttttttatttatgtgttatatagatttggaaagaaattaagtttaagtgggggaatcaaagggccaacattgaacagccagactaaaaaaacattaaacagattaatgggcttaatgcgtaatgcgtctctttttttgtttaaggcccataatagttttattaaaaaggccgaaatgtaaggcaacactagcactacactaacaaggtcagtcagaatgtgctcactggccactgctcataaatcaagaaatcaaaatattgcatgcaatttttttcttaaaaccaaaaacgtagtatagtgaaaatattctaaaaataatatgtatgtcagctcatttttactttttctaaaagaaattagtattattctataaacaaaaagaagaaaaaagttgggggaaagagaggggagaagctcgagaagagtgtgggagaaggcaaaccccaaacactgactagacacagaccgttgggcccgactcttcatgcatgcactcttttgacaacattttaatttctccatatctctctcta

SEQ ID NO: 57842 - DNA, 344 bp, Arabidopsis thaliana landsberg
tctaattgttttcactttatgttcttaatttgacagcataattatgcacataaagcacggacaggaaaaattcaagcacatactggcttagcttccgttgcctagttataattccattgaaaatatcctcaaattttatttttctattgaaaataaattgggtatacaaataaaagagaaatcaaaacaaaggccatgtgaaagataaaaattatagacatttaaaccatccttttaggctgtttaataagtgccaactagacttaaaacaactgcttatgctttggaatccaataattagacacacgtaaatagaatttagctttgcatgtgaaactaaaaaa

SEQ ID NO: 57843 - DNA, 1237 bp, Arabidopsis thaliana landsberg
gcattacgtttgtgtctctgagttgacatttatcaaaaaatcaaatatgaatttcaatgacttttttaatcaaagaaatcaaaatatgactgtttatttatccattttgaataataaggataaaacaaacaagagaaaaaacctttatccttatccctttacctatggtcaatgcagagctatgagaaaccatgtgaaagaaagaaaaaattgaacgtattgagacgccgtcagatttgacgccgttacgaaaacaaattattttttgtgtgtttttgaaaaagagaaacaactagtggtggttaaaatatacgcgcggcacagtacaagactacaagggcttatcatttggcgcatacacatccgtccatgaactctttcaatatcaaaaatcaattttacaacaaccactctattgacttacaattaaataattatttgcctagtattatatttgtgacgtattttggagtaagaaacaaattgtagaaaaaaagaaattaacaatgagtagtaataaataatataaagagagacacacctaccattaccacgaatgacagcgacttggagaaatgatgctacctacctgcccaccatattcaccactattgccccaaaaatttgacaccttactttctcgtcatgttagtattccacctcaccctcgtttttgagatcatgaccttacaatacatgggcttttcttacttgggaccattagccagaattgttgagagcttatatattagaggcttagagctatgtttaccaaaatacaatacgtattgcgggttcttttttccaataacatttacaattatgtggttttgaaaccgtgcggtggtgatacgtatactaaaacaagactccaaatttttaaccataagtgtattgtcaacagtttacgttagtttataattaaatgatatcatttgagttttgggaaatgagaaaatattaccattgatatttactatatcaacatgcattattcaacttcaacctattttcaacatcaactaacagcccttcgaaacaacatttcaatccaaaagaacacacggtatgtccaatgtcctgcacgtagtcattgactcattgttcttacacttcaagttgttaaaaccactactctcttactcttatggccggcaacaactcttcaaagcctgtcgtacccatctctgtaatggtcaagagacatacaaaagctgtcttatagcttctctttttt

SEQ ID NO: 57844 - DNA, 1243 bp, Arabidopsis thaliana landsberg
  unsure (1)..(1243): unsure at all n locations
catcattgttcaaacatcactttaaaacacagtaccattaaataaataagtaaaaaaacttacctttccaatcataacccatctttcatcttgccaagattgtctagccctgaggtaaactttgtgaaccgtgagttctgctttagcaccaagtaaccgaacaacataatatcttccagataacacctccaagacagtagcagttttccatgaaatattattatcaagaacctcaaccaattcaccagcttcccatctatcaacatctacttggggaggacacggcctaattatcttccttggaactctatcctcaacaacctcattgttagcaatttcaaaagagtaatatctaacattgtaagtgtgaccattaccagatataatctccgctgatcgccacacaccataagaggcttctttgatgctaaacacctcaactctacttcctcttctgaatctcatgatagtttactttattcctgcaaaaaagatcacacctttagaatctcagagatagaaacaatctcaatatacataataaactcaaaattagcaaatacaaaactgtagtcaaaatttgagcaagactagtccaaaattagttctgaggaaacgttaaatcaataaacccacaacgaatatcgatggaagatactttcgtggcgatcaagggtgtaaaagaagaacaattggataagaatttacctagtacactgtacaggcctgaagcaggtttgatcaccgtaagatttgaaaattccctctggattttctagggatttgtgaacaatttatcggaagagaatttgggaattagggttgtaatatgaaacttggcgtaacaagaggctagcaaattcatttatttggattacattaaatatttgacaccaggcttaagttaacagtgcgtgatcaaaaagtcttaagatcatctccagaaagtccatgggctttcactaatttttttttaattgttagatgatagtttatgttttttgaaaaaaaatttgcatagagactagagagattctcaagaaaaaataaattattttaaaattattttactttttgaaatttaataattacataaaaatattaaacatacattatttttaaacatttcaaaactagacaaaaaaaaaatttggaataacgattaattaaataacttgcgtttgagtacatcaatcatgtgtgacaacacattcatgcctactntntgaaggttatataactc

SEQ ID NO: 57845 - DNA, 1121 bp, Arabidopsis thaliana landsberg
  unsure (1)..(1121): unsure at all n locations
atcgttcagttttcatcactggaactcgagctttccctttacatcacccattatagtcttgctctcaacggtcgatgtaggagttacagaggtaacaacgaaagcatccggatttcgagtaatggctactggtttggaagcaacaagtccttgttcctccatagtttctcgagctgctctttccttagctttcttagctctttcaagaacctcttcctatatattcaatcaatcaatcattcaatcaagacgctttcgacttaactagtagcagtaatctccgcggttttcaagtgccgttctacaaagctcacaaacctaatcagcttatcagctcaatactaactaactttttaagtatcttctatggtgaatagagtttccaaacctaacaacaatgcttctccattaacaaaaagcaagaagagagtttgaaaaagtaacctgaatctcttgaacttgtttctgttgctcagcttgaaactttccaatagtactcaacacttctccaacagtagactcaattctctcattgataacctcagctaatgctttccccaaaaagaaagcatctaacacacttttgttctcattttcaccttcccaaacaaatttctatcaaattgattctcaaaccctagaaatttaaaacttgaacctcaggaaacaaaaattgaaagagattctcacctgaatctgtacctttggtggagcaattggaccgtaaagaagtgcttcttcttcgagactccacatctaatcgtaaccggtgaaactcaaaattggaacgagaattgcggagaatgaaggaatgaggagagggttggttataggaattggaaagagagaaggaggaaggagatggaatcgtgaagctactcatctctctctgtgtctctcttactctgaactgaaaccgtctcaggaagatgaacgagttttgggttttggagccgtcgatatggattatgaatttatttgggcctttaaaggcccaaagtataactctttcagtcaaatggataacaaaaagaaaataaggatataagctaaagtgattacatatgtgaaagtgaaattagaaatgggaaagtgattttttactntactaaacctatgta

SEQ ID NO: 57846 - DNA, 621 bp, Arabidopsis thaliana landsberg
gttacatatagacagaagaccaacattattgacagagaaatgtatcagaaatccatagcagctttcatatctcgttgaccatatactattggaaatgctaccaagtatgaagaataaatgttttaaaaaaaggaagttcatttgatgtgggtataagacttactgttggagggagatcaatctcgaataaaatcgtaagaagtttgctagagacagagttgtagcaatgaaaagacaaaagaccaacattattgtcagaaaattatatcataaacaaattttatagcagctgaacataaaacaatgaccaaaaacttttggaaacgacaacaagtatgaagaataaatgtttaaagagaggaagatcatttggtgatcatagaagactaactgttggaaaggagagcaagctcaaagaacatattcacgatgtgtgtgaatcgattgtatcgaatcgactttgttgttgggcttttgtttatgttatgcaaaacataatttggatgatttaaagacaaataattattcacgactgtcataacataaaggaactaatattcttcccaaatatatttaaaggacatccgaaaacattgatgtgaaattaacataagatcattc

SEQ ID NO: 57847 - DNA, 488 bp, Arabidopsis thaliana landsberg
cattcaagaagctgcatagagtttcgatgcgagagtgcgtgagcactgaaaaatgaccctttacatgggcactatacacctatttatatggacaaggtgacatacaccttttgtgcgaaattatatttgtaccctttgtcagcagactgttatgtgggaccctggatagatggcaagtgggtggcatgtgtgcctataaaaagggagaacgtatagaccgagagaaaagaaccatttgaacaaactaaatcatctctacctttccattactggtatctttttatattctctcctctcatgtatcttggttctctaccttctagaatactgcaaccgttattactctgaatttggtgcctcacgttgttgattggagtttgtgggatcagagtcgctaacatttggtatcatactactcgcatcctggaagattgcacgcatggaggcggcaatgcagcagattctcgacgcgatggcgcacatggagc

SEQ ID NO: 57848 - DNA, 737 bp, Arabidopsis thaliana landsberg
taaaattttaaaaaatttttgttaaaaaaattttttaatatatttttaaaaaaaatttttttaaaaaaaaaatttgttaaaaattttgattaaaatttaaaaaaaattttttttaaaattttaaaaaatttaaaaaaaatttttttttatatttaaaaaaattttaaataaatttaaatatttttttaatttttttaaaaaaataaaatttttaaaatttttaatattttaaaaatttaaaataataaaaaaaattttttaaaattataaaatttttaaaaaaaatatttttatttattgttaaaaaatgttgttataaattattattttttaattatgtttaaaaaaatttatgtaaaatagttttttaaattttttttaaaaaaattataaaaaatatctgtataatatgtgtaaaaaaatttttaaatatttttttaatatttaaaaaatttttttaaattttttaaaaaaatttttaaaaaatttttttttaaaaattttaaaatattttttaaaatatttgttaaaaaaaaaatttttaaaatttttttaaaaaaattttaaataatttaaaatttttttttaaaaaaattttataaataattttgttaaaaattttaatatattttttttaaaaatttaatattttttaaaaatatttttttttatttaaagaaaaaatatattttaaaaaaattttaaatttttttttaatatttaataaaaatttttta

SEQ ID NO: 57849 - DNA, 530 bp, Arabidopsis thaliana landsberg
tatctttacacgagtatctgattactctagcttccggacgtgcgcgattattgcacaaacaggtcgacaaggccggcaaggggagggatcggaacacggcaggcgcgcggcgatgtccgcggtcctcacggttcgatctgcaaacgagaaaccggccgaagtgccggcatcgtgcgccttcatccccggcagtgttgtcctggtccggctggcgcgcccagccatcacatcatcgttccgggaggacgcacgtgaaaccattgaaacttcttctggcggccgtgaccgtcggcgccgtagcgctgaccagcgcggcggccttcgctcaggacaagggcctcgtcggcgtgctgatgccgaacaagacctcgcagcgctggatcaacgacggcgacgccgtgaaatcgcagctcgaggccaagggctacaccgtcgacctgcagtacgccaacgacgatatcccgacccagctcaaccagctcgagaacgagatcaccaaggggccgaaggcgctgatcatcgcctcgatc

SEQ ID NO: 57850 - DNA, 1247 bp, Arabidopsis thaliana landsberg
tttgtaaattctcaccagctgatacatgaaaattcagttcgggtcagtatgtgtttgtttggtaaagcgagatcggatttcaatcggttaggtccgatcatatgatgagatttctataatttcatagaaaaactataaccagaaaaaagccaaaccaaaccaaatcaaacgtaatcaacccgaactgaaatttgtttacagactaattggttttattattctaacacccccgctaaagcaaaaccaaagccaaaccgtaaccaatttaaatgtcacaaaactaaaccgaataaaccaaaattcatggtacctgtaatcaaatcacctcttagattcggtccggtacggtaataataaccaaacaaaaattctcaatttcaatttcgatagaaagagtgatggagagagaaaccttggaatggtagagatcggagtcgtagatagcaagaagctgagcagtacggcaaccacagtcgtagccatggcgaatcgctacagctccgacgtataaaccaactccaagaacagacttatccatagccactgtctctttcgtcagtcttatcgtatccaaatgcagaaccaaaccgcgttcgaaccatggacgcaccactccctctgctcttcccacctcaccgcccgtgtctgcgttcttccctgtcactctgaaaaacggtcctaaagtctggatctttaagtctagctttcgagcttttgatgacgtcaggatgtctgacatcgacggtagggaattggaatcgccgaggtaatttgacggtgagagaatgagtttcggtgggctcagagccatcttcatttcctcctctgggtttcgttactgaaagagggttcagataagatattaaatacaatgatgagataatataggtaacatagatgacacgtggcatccattcagagagtcgaacattactaaaactatggacaacatgaacaaggctcacgagttttgattgctttttgtgaagaatgcgtgtattgggatgtgtttgctactgtccttttgatctggtttctgcttctttggcttcgaatttaccttttcctttccgagaatcctaacaagtgtttggcatatgaaactttcagtgagaagcagagacttgtaagaaacataacggaaaatggagtaggctttaaaacgttactgtcagctgaccttcgttttgaaggtgttgtggaagaactagaaaaagtttcttcgttttgaagtctctgagcgagat

SEQ ID NO: 57851 - DNA, 1063 bp, Arabidopsis thaliana landsberg
tattatataactaaaaaacttgacattgtagaaaggaataaaaagttttggatttatgtatcatttagttttatgatctagtttttaatctaaccgatgtgctttatatatgtttggcagtactagaacttagaactaatattcgaatgtccggatcggtagttgtatcgacatcactcaccaaatataccaacaaatgacaaaaaataaaaatcccatcgaaaccttgggacgatccaaacatatctttctgatccacaacggttttggtatttcttcttattgaatccaaaacattgacatgcattcatacacatatatattattattacttttccacaatatatatcctttatgcatggaccatcaatattagttcacataacgacaatccttcctgatctccccttggtctcccgtgagcgggttggtctcggacaagagcctgacgccacgtgagaactgctcatggaagtaaccattgtccgcagccatcttggccacaaacggtgcggtcctggaatcggtggctagctcatcatcaatgacaagaagccccttatgggccatgatgttcttgtaatacatgttgtctacaaccatcggagtctcacgatcgtttcgggagtacaagacggcgttcgggtccggagttggacttgggcaacgtttttttaagtaaagggcgtaacttgggtcaagagtcgggtcaatcgttgggtatagccggtgcactaggttaacgcagtggaccctacccactgagtgagcacctacggttatatacattgactgatcactaacaatatcattttataattaaaaatcaaataaaataacaatatcatccttatttaaggaaattcaattaatatcttaagaaaatttctgtgatatatctctttacttcactaggcataacatctccgaatcaaataccaaaaccaatagctagacaaaagttcgtttataatgattgattttgtatgtcaaaactgaaagaaaggaaaaaaaacttaggcaattttccagataagaatttacagtatacttcctagataca

SEQ ID NO: 57852 - DNA, 1365 bp, Arabidopsis thaliana landsberg
cccaaaaacagtatcaccttagggtgacgtaaactggatacaaaacctttgtcatggtgataataatatgaagaaagatgacagccttgagcattttcaaaacagaacttgtaagttcttcatgatacaaacttgtcttcaataaaaattacagtaatggctggagaatagtaattactcacaggttctgatatgtatttctgaagtaccaatttctcaaccgtaaaggcagccaaaggaaagatcgaaagggatatactgcaacaagaaagaagaatcaaagaggaacttaatcactaaactcatcattatacgtataacaatgtaacattgctggaaataaaaaacatcttcttttaccaacacatgaaaagcggccaatctcgcagcgatcttgaactaaaccagaaatccgttctgatcaaccaaccatactacatgaatgatagcaacaacaaagttattcgtctctgataaattttcaagcaattcaattcctaaaaggagaaacaagtaacagcaaaccttcataagattttcgatgatgagtctactgtttacagcaataagaactactacacagaggttgaataatccggcatggctctgcaatgcaaaacaatcaccatactcaattccatataaaacaacaagcaaacaccaaattcgaagatttctgagattttaaacctgtttgaagattgcgtcggagctaagtggactctctctcgccctccgatgagctggaaccgacggtcgatacgtaaacgtagcatcggcgtttcctcttccttctccgccgcctcttccaccaccgttattatcgccaccaccgttattatctccggccaaattggctgttccctgagcgtcatcgttaacaacggaatcaatccgatccctaacgtcggcgggagctccaacatcatccgaaggagaattattatcggaaccagagagaagaagtccgttagaagaatccgatctcgatttccgtcgacgaagcctatcaagatcgacgaactctccgccaccgttctccgtcaccgtagtaacgccagcagaatccaaaatcgccatttcgaaaagcgtttgacgaaacagcgtcgggagaaaagaggcgtcagagagaatcgagaagcatgcagaagaaattgaaagaggaaacagaatctaatggagagggaaagagaggattgaaggaagaagctaagaaatcggtgggaatgggattcgtgtctggttccttatagaaagagaagcaaagttttctttgaagagaagaagatataataaagggaaatgggatccccgagagaagaagtatgccacccatgggggaccgcagaatttttcaattgaaaa

SEQ ID NO: 57853 - DNA, 1405 bp, Arabidopsis thaliana landsberg
ataccaatttacctggctcgctctgtaataagcacttatcaacatttaaaaccttatcaaaaaatccaggtgcatggagccccaatgcaaagttcttaggaccatcttgtctctcgtttaacatttcaatcggaagccatctttgtggaccaaatgaaaactccatctaattcaaaatgtcaacatttataagcacagagtctaaaaccaaagcaccaaccaataagcacaacaatcaaacaaaccttattccgataatggaattgaatatcgcaagcaacaataggcttcaagacaatctcaaggccaggattgttatcagaaaaccttccaacatgtctgataagctcatgaacttgctcttctttagctctaagctgagcttcataagagagattctgagttttgcaaccaccccagtaagatgcatactcacatggagcttctactaagtccttatgtggagatattgtattgatttttgtcacctaagagaaacaaccaaaaaacaacaaatcaaaactaaaaatcgtaactttataactaaaaatcgtaattagaagataaaggtgaagtttttatgaaacctacttcagcatagctgcctttgcggcgagtgacacggccaagaaaacgttcgccgggaagagctcggtcacacataacgacgtagccagttccatcaactttacagattcctttgcctttgaatcctaaactctcgcacacaagctccactgtttctcctcgtttcggataatacggcgccgttttctcattgcttacgttggtgttgttctcgtcgttgagcttcttctgggctttattaccgccggagaattcagaaggggagagaggagcgagagaagacgagcagcatcgaaacctatgaagccatgagcgtgtgggcaccaccacgtacctgagtccatgagcaggcgtcgtggccaacattgaaacggagcccgagtcgggtgctaatttctgaatctgttgataagagagaacagtgtgaatagatttcaaaacgacatcgtgtttgcgtcgacctatcttcttcgtcttgtatagcttaaacccctaatcatatactaaacccacaacgacagcgttttgagagttgctactgaatgctgattagtcagggctcggtatacgggtatccgttcggggttttcggatttaggctcttagagcccattcggatatttataatgtttgggtggagttcagtttggttcctaggttcgattcggatcgggtttacctttcgaattcaggtttttgggttggttcggatccgacactcctggagaaaactttcaactatagagctgcctgagacactcaaattttttttctaacttggcgctttctatctttttggggggattaaagtcaattc

SEQ ID NO: 57854 - DNA, 299 bp, Arabidopsis thaliana landsberg
  unsure (1)..(299): unsure at all n locations
gaacaaacacttaagtagttgtaaaaggttttcataaaagtggtctcgacaatcgttgagattcattcctttaacgaaaatggttgaattggttccaagaagcttctcattggactgtatgagaaaccccactgagacaactaagattggtattcctcacacatncatatcctaactatccttctgattccaattgtgcaaatcccctcgtttagaagcatttgatgcaattgcacattgggcaaggttagatgatcacaattttctactagctactatataatactcaacgttgtcgc

SEQ ID NO: 57855 - DNA, 225 bp, Arabidopsis thaliana landsberg
tattaaattcttaactatttgtaggaagaaaaaatggaaaatatcaacaaaataaataattccacagtttagtttacaataaaataatttaaaaatcgcaaaaaaaacttagtcacatatggttcttcattttgtgtgattatttaaaataagaataaaaatggtttcattgacaaagaaataatattcatggcttaatagtaactataaatgactgggggttga

SEQ ID NO: 57856 - DNA, 563 bp, Arabidopsis thaliana landsberg
  unsure (1)..(563): unsure at all n locations
gcttcacatccttcattactgaagccacagtgaagctgaatcctccatcctccgtcgcagtagccgccatcaactccgtaataacaataataataagctcacagcatcaaaagcgaaaaccccaaagtcaatgaaacttcactgccaatgacactagtccgatccaaataagatcggagacagagagatatatgagaaacggtagaacaaacaaaaaaaaaagaggacttgggagatttcttctctgttttttttggttaacaagtttggggagagatttaaaaggtaatgagagatttaattagaaaagaaaaaaagttgagaactcataagctccatgaatggtctcacaaatacaaggttgtaaagctataactgctttatactctgttggcctcttcactctatctccttccctctattctttccgaacctcttgcttcgtttctttnttccctccctaaccaaaccttataattctttaatattcttttttcacgatcacgcgagaatcttttcgggtagcctctaccgntggatttataaaaacttactattatatc

SEQ ID NO: 57857 - DNA, 733 bp, Arabidopsis thaliana landsberg
gagaatatccgctgattactgaatcaagagctgggaatgatggtttgggtgtgactgttactcctggaactgtggcttatgtgacaactgggggtgagtatattgcatttgatgacttgaaaactttgtgcctgcattttagagtatatgaaagtgcttctaattttctgttcttgttcactacttactatttttccatttggtagtgtatatgcatggagaagtgtctgaaacgtatatgtttctttgatttcaacctattgttttctttggtatgtttctcctttaggacctatacctgatggtgcggacgcagttgtccaagttgaggacactaaagtaattggagacgtctcaactgaatcaaaaagagtaaaaatactgattcaaaccaagaaaggcaccgatatccgtagagtggtatgctttcttcttttctcgtttatataaccagtgttgtacttgatatctttgatttcttatatctcttactgtttgctaaatagttgaaatctcgtacttttcttttatatgtaacgccatttgttgatctaagaccatttttttaggagtatgcctaaccgatttgttaaataaattgaattactgtgtcgtttgatgggtaagttattggaacaaatggaagatggtgggctagttttggatatgtacttgaattgtcgaacagcatcctgttttttgttattatctaggtgtgtgttcgcaatatttc

SEQ ID NO: 57858 - DNA, 1306 bp, Arabidopsis thaliana landsberg
taggcttgccttgaaagcctactagaagctggttgcttctgtattcctcaaagggaaacggaataaagtaccattaaaaggacttctcatatcacatccaaaggcacaataaggaagaaactgatccttatactgagacagagctgaagaaccaacataatcaattctcttccctgggtttgctgcagaaatatttggaagataagcaccttgaggatcaaacaataccacgtattttccactcacaaaagaaggtatatcagtcaaatggtataccgaattgaagccaaccctataataccaaagtcagaacatttttatcagaaaacaaatatgtaacacactgagattgactcaaccacgtacttcttaagaagtatactgctatcttcataagcaagaaacaacgggaaaaaaagtgacagtaaggaatcaaaattatacccaaatcgaccagtcttccaagcttgaccatgtttgccacttccaccaattctggagatactaacgaaatcctcttcagtgaaaacagcatcattgtaagccaatagagaaggaccttgccactgagccaaagagtccgaaagcaaagaacccgacccgtgaacccgccggtcaagacagagacggactttagtagctccggcgtcatcagcgttctgtataagctccttaagcacagtggttccttccggatagttcaataaaacctcccgacattcgtcgggtcaaatcaaccttctgcccaaaatcttcgagaagaagtgaatccatcttcgaataaacgttatctctgttgctgcagaaagatgatcaaagccccatgaatatataaagaagatgagattacgatcatgaagaatctgggtcgcaccgactcacgagtcaaggttgaagaagatcgactctagaagaagtggtgcctcaagggaagctttttagtttttactttgaaaggaaatggcagaattaaaacttttattaaagccgattgttacaaatgtgaaaaaaaaacaatattcgacatttttacttgggcctctaattcaaggcctattaagaatattgaaaataaagagataagttcagatgatgtatttattaaaatttatacatatttgtccacttctaattacactatactaaagttgtagttaatccaaaacacagaaaatttaccgagctaatgtaaatataactatattttgataatgttaaatcacatattaaaaattaattaattagaaataaagttagacatatatcatattaatcatttcatttagagtaaaacgtaaaattacaa

SEQ ID NO: 57859 - DNA, 918 bp, Arabidopsis thaliana landsberg
gccaggacattctacacatctcctaactccagattagggtatagagacagtaagctctggcatattcagaattcttggttgtgaacatcaaagccaagcacctcgggtaagggcagtaaactctctctgtgacaggtattgcattctcttaaagtatttgttgccacaatttactcagctttggagtcaaaagcttgccacatgcatcgataaccagctcagacttgcagccatcgtgaggacattttggagccattccatgaagcagcttcacctctacatgctgtttcacgcattgaaagcaaaaacggtgacggcatttgtcaacagaaaacataccctcagcaacgatgtcgttgaaacagatagcacactcctctttcagaacagcttttgcttggcgaggatcttcatgaggggtgaccatagaaagtattgattcccttgcaagtttataagcaaatttaacatcatttctagccaccagaacatgctgataagatgaaaagtgttgcatgatgctttgaagatcatctaacaacagggaaatcttcttttgcttagctatccattttcccgtgacctacattcaagtacaatacaatcttctcaaacatatgacaggaaaagctaggtaaagaaacataactcattgcaatttaaaccatctcgcaaaacacaagcatagaaccttataagtcacggtctactgtctcataactagtaaaaattagcgcaaaatggttacaatattcacaacactattagataccaggacaaaggaggaaaaagttaaaacgaattgcaaagagaacaaactagatcatctttaaaaaatacataaacaaagtcgataaactatgaaaatcggaaacttacgtattggaaaatcggataagaacgcaaaagaaacaatat

SEQ ID NO: 57860 - DNA, 546 bp, Arabidopsis thaliana landsberg
ccttatgcgtgtgcaagccctgggacctcaagaggggcagcgtgagacagcctcgtggactcctcctcatcgggctcctcggaagagaagggcgatgcccgtgagagtgagatgatggattcgcttcaggagtacgtgggagctgcagcacagtatttcgagtccgtcggccatgaggaggaggaggaggaccacgacgccgcctgtaaagcagacgaagtttggaagccctacaacctgggcgtggacctggcgcccccctactccggccggatgagctgcctgaaacacctggcgcgcagcccagcggacgaagcccatcgcctggggaaatccagcctctgcgcgacgttccaccagctctacaccaaggaatccctgaagctgcacgacatgtcgcacaattgacttacagacaaccgcgccttgaaccgcttgaagctggtcacctcggctcgagggctccggacggtagccgcgggcacactgcttggggcgatcgcagcgttctactgagaaagcgacgttgaccaggacccgacggac

SEQ ID NO: 57861 - DNA, 1551 bp, Arabidopsis thaliana landsberg
cagagatctcttagatttaagggttggagctaggaattgagttctatgcaatatatctcatatagaaggacttaccatgtaatctggttcatatttacatcgtttaatgcagcatcttgcaaaaacctagaaatcaaaagaatgaagtattagaatgagtgttgattttctgaccatcaaggcacacaaaactctcaccaaggaaatattaaggcggtccaaaattttgatataatgagaaacatcaagaacattgtatgggaagactgcaagtttttacatgtatcatcatttacacttctccgtttgtaaccacagacaataaggcaaacatgttcaaagcttccgaaaagcggataagagagatgagtggacatactccgataatgaccggtaagggtgaaacacaaccagataataatctagtgcttctaacaccttcatctccattcctaatatatcctttagttcatatttgttgtactcatcaggatctgcaaagatataagaaccgttgtcgtcgatatgtcaaaaaaaagcatattgaaggggatgtactctcatgatttgaaaaataaaaaaacagaagaagaagatattacacaatcttttgatgtaaaaaacaagattcctggcctgcactatgctttcttcagctttagatgccaggtacaagcacgtaagagcaacaagtcgaggctcaaactctaccatactctttctgagatagtatagtaacaaaaggaagatattagacaccaaaactgaaaactttcgtaacacagttaacgtttttgatagcagagatgcaacatagagagacactggcatgacaagaatttaactcatttcattcctcacatacacaaagatgcacattgatgtatacgatcatatcaaaaatacattgcatacctgatataaacccgtctcatatacgtaattgcagtagccacaaccctacataagtagaaaaaccaaggcgacgattcatatacaagtccaggttacaacagatatagagctagttaaatctacagaagcaaaacaaagtaatggaagtactgcaacagtagaatctctttgatatagcaaaaattggatccccaaattgtaaagaaccaacctttgcctcactttaatgtgctgagccaatttcataatatctgaaagcaacaataaatgaagaaacaaagagacataaactcaaaaaacttctctgatcaatctctaatcaaaccagtgcaacagagacaacaaatttgcttaagtaagcagagaatttgaagaattaagaagaaaaaggatttcgtacgattagacatatggaacttgatgagcttaaaatcatcaattgagattccacgttctttatcgagatcatgaactacgtcgacttcttctggatccaaaagctgtttactgtttcgtacaaacgcaaaaacaaaacaaaaaaattcgagaaattgaaattagaagttgcttagaaggagaagaagaagtgaactttgatggggtaaagtttaaagaacatttactagtgagatgaat

SEQ ID NO: 57862 - DNA, 228 bp, Arabidopsis thaliana landsberg
cgttctgtcagaataaccaaggtttcagaatcagtcttaccaatgtacatcgtctccttatcacaactatcatgatcgcttccaaatacgtcgaagatatgtaagttaaattaccttcaaaacaaagtttgaataaaaaatcctctgtttttatccaactcattttcttcatctttgtttcttacaggaactacaaaaacttcgtacttttcgaaagcaggaggattt

SEQ ID NO: 57863 - DNA, 1443 bp, Arabidopsis thaliana landsberg
  unsure (1)..(1443): unsure at all n locations
aaacaatttgggttgatgcatccagtatctcttaggggattattgaggaagaaagataaggagaccttgtggtctccaagattttttttcagacacaaccaagacagtgtgttagtaatactaattggtctgatcaccatggttccaaggacgtgatcggaattggtgtcggagatgagatttccagcgtagctgccacgttgcagagtcttggctccggtgacgtcgtttctagggttaatatgcatccccatacaagatcctttgatgaggtatacacactttatttttcctctcacctaaaatatagttatgtatatagcatggatatcctcagaacatataactattttggtcattttcattcttaaaaatctacaactttttttgttctgctttttgtcagctaattaagtttcttttcagctgattctatgatagtgttactatctattacattcatagttttttgttgttgtctctatgtatataattatttgtttttatcgtgggtatatacgttcattttaaatggtggatataaaatactttttctctaattttacgatatatttcttctctattgctcaatttttacgtgaaaaagtcttactattgtggtgtcgtctaattgcaacaatgagagtttgttttacaaacatttttcctttttggtaaccaacatttttttgtgtggtaatcaacttgtacgtaatcaaggggacagccgaagcttcaaagggaagagagaaccagcatgtgtttggcacgtgcgaggaagtacatgatgggatcataacatcatcaatgtcatctcatcatatgattcatgatcatcataatcaacatcatcaaatcggagatagaagagaatttcacatgtcatcatcatatcccatgacccctactatcacatcacaacatgagtcaatcttccatgttacaagtactatgccctttcangtaatgttttcattaattaatttcacttaaacaaatatattcaagctcaaatctaaagtcaatgcacgcgaacgtgcatgcatggatatagctagctagatagtagtgatattatgtttcttgtctacttggacatttaatcataaccactcatttaaataaagactaatgattttggatctacaggctcatgcaaaaaaagtaattcatactatatcataaattcaattccttctcaatatttgtcataaacaattagtattcgcattttgattttcttttaaatgacagcggcagcaattaaggggtcggtcgtctggttcgggattagaagacctaattatgggttgtaccacagctacgtgtacagaagacgtaagtttctaacgaatttgtgtatttaattaatgaaatttatgattgttctaacataagttatgtggttattggtcaatatttcgcgtaaaacaaaagaataat

SEQ ID NO: 57864 - DNA, 294 bp, Arabidopsis thaliana landsberg
  unsure (1)..(294): unsure at all n locations
ttttttttttttttttttttttttttttttcgagggtttttgntccnccncntcctgctccccctacnaccgctcgcctgagtacggacacacaaggacttactgatagtaggcnccctnnttcanatcnccancccnnacaacnanacccccnactcgagagatgancgtgtggccnccaccgtcncnaacacacccngcacacccgacctgatcttgctgccggagttgtggagggtcgggttcaaccatttcgacgactacctcgcacaggccgaaccgcttcacggtgac

SEQ ID NO: 57865 - DNA, 502 bp, Arabidopsis thaliana landsberg
tttgatctttatcactgctgatgagtgtgttgcgccgaaacgaaaacgaaatccaaggaacaaaaaaactacattgcaagctttggatcgaagaagactccttgatcgtgatcccgatgaattttgatgtctaatgcataatttaattttatgtgatgtattatttgttttttattaattatatttaattttatggagataatacctttaatgtttttctattaaacaggatgagtggtaggaaagcaaagcacactgcgagggggtttcttaatgcggctagcaggatagtccctggtgcacgttcccttttccaagggagctcttctagccagagcagacaggaggcgttgctgagacatgcccagccaaaaccgcgtgatacacctatcgctctactaagaattcatggtaatggttatgtaattgatcttatttgtcattcacttatatataaatgggccttacatgtctctatttcatgtccataggaaaaaggaga

SEQ ID NO: 57866 - DNA, 795 bp, Arabidopsis thaliana landsberg
tctttgttgttaacagaatctcaagcaaataaaaagtgagaaacatttgctcgatggagtaaaatgactccgcacctcaaaacatatatgaacagaatttctccatgtcgtatatatcattctctgtgtaggctccaaatatcgtctttgatgatccgttcataattcatattaacccaaaaaagaaagaaaaaagcacattggaaacaagtaatataatccaccagctccaccattaacccgttcaaaattgttattaaccttaacatacccgtctttgtatcccaataatatttcagatcatcatacaacagaaaaacggcttaaaatataagacattggtcctaagcagaaactattacggttctggtggactatagctaatgacgtagatgattacaatgatttttaatgttcggcgattgaggaaggcaccttccgtcggttcatctttgtctcattagcgttcgattataagaaatctcatattatttgttacgactttcccatccgtcaatataacacagagatacataaaacttaaataatatgatcaaggataaatatattagaaagcagagattcattcattaaggccatttctccatctccattcaatatttaagaaacaaaaatccacaaggcaaatttgcatcccaaaaaaaaagcacagaccgaatattttttaaaagagaaaaatagcgaaaatgaagcgataaatttgttttaggacagtctccatatggacttctaaatatacaagcagattgctttcatgagccaaccacttccata

SEQ ID NO: 57867 - DNA, 309 bp, Arabidopsis thaliana landsberg
caataacaaatttcattttaatctgttggattagatctataattcaaaagtttatttggctaggaaattcttgtagaaatcgtatataattttaacatacatgtatttgaattgtagacaaaacgaattgtcagatatttttatgttataatttatatccttatttaattatgagattacctccgtcatgttttcatagcttggatcataatcttgtaatggtttttctatataagccaatgtatgcggcgctgctgatggaacctgtaaagccggagcaacttgaaaaccatttcgcggagacgagtt

SEQ ID NO: 57868 - DNA, 280 bp, Arabidopsis thaliana landsberg
aaagcatagatgaattgcgcagggaaatgaaagcagaaggaatcccaccaaccaatgtcacgtactcagtgatttttaaaggactttgcagaggctggaaacatgaaaattgcaaccatgtactcagggaaaggatattcgaaaaatgcaagcagggactcagggacatggaatctgaaggtatacctccagatcagatcacatataatacaattattcagtatctatgcagagttaaacatttatctggagcatttgtgtttctcgaaattattgaaat

SEQ ID NO: 57869 - DNA, 854 bp, Arabidopsis thaliana landsberg
actcacaacacttggagccaatccatataacttgatgacatctaagatttttctagccttatctatattctgggttttgcaatacccgtatatcaaagaattaaaagttgcaacgctaggagttatcccagtctcaatgactactttgaataactctaacgcctcctcaatgcaaccagactttgcatacccgtcaattacgatattgtacagaacaatatccagtgtctctccacttgaaatcagagaatccaaaagcgatcttgcctcaagtaacatccctttctgacataaaccgagcaaaagagcaccatgagtcctcgaattcggaagaattcttttgtcacacatctcgtcgtaaagccaaagagccatatcaaattttcctaacttgcagaggccatgaatcacaatagaatatgctacaagatcagggctcagaccatcggctttcatttgattgaataacgacaaagcttcatctattcttcctgttttacataaaccactgagcattacactgcatgggatgatactgtttaactcaaatcccctcgacaacatatccttcagcaatactaaacccatgtcaatatttcctaactgacattgtccacatagtaaaattgtgtatgtaataacatcaggactcaatcctttatccaacatatcttgaatcacctcccaagccccactgatcataccgagaagatgaaaccctttctcaagaatattgtatgtcacagaatcaggttccactccatgcttattcatgtcactagccaactttaaagcttctgcgatagaaccaactatacagagtccattgatgagtatattgtgactatatacac

SEQ ID NO: 57870 - DNA, 392 bp, Arabidopsis thaliana landsberg
catttcgatcacaaacattcaaagtatttgtctctatctcgacaacatttatatatattttttttcttttttttgaacaagactcgacaacatataatacactcctttgtactgtatactacaaaataaactactaaacaatattgactctataatatataatttatatatacatacaatacaagtctaattcaatcacttttggttcaaattggaaaaacattgaattcttctattattcttgatgaccaagtctatatcacatgtaataaaagtacacataaccggtctttctttcttaattcgaagctgccatgcaagtggggcttcaaggtttacctaaaatctctcatgtattccacattattaatcgaatttaaagtatttttgca

SEQ ID NO: 57871 - DNA, 563 bp, Arabidopsis thaliana landsberg
cattaacagttgcatctttagcgcattgtccatttccacagcccataggttacacgtaaaaatctaaagcgatgttcaaatgattttggtttgagttcatatgcttcaagttccaaaaagattttcctttgaactattcacctgtagactaaaatgaggctactcataaaccacatgctcgagttagaccaagtcttaggtgccctttatgcgccaacttatttactccacttttatgggcaatgactaatgatggctactgatgtttctatatcttatacactgttttaggtcggagagttcaagccacaattctaccaattgatgaatattgagacgtataaagagaatatgcacccaattcaatctagaattcacagggaattgagttgattaccatggaaataaaagtctgctgaaaatccatgtaattgccaaatttaggaacattacgagtctgttcaaaatctccaaaatcagcttcttcgatctcaggcaatgtaacagcctctttcctgcaaacaaaaaaaaaccgacacgcccatcatttctattattcttca

SEQ ID NO: 57872 - DNA, 891 bp, Arabidopsis thaliana landsberg
agatatgatagggatgttaaatggcgaacaggagttgacattatacacgttccatgtagaagtgcggataatttcaatatgtcgatggtcgtgcttgatcgagcattctatcaagctaagaaacgaggtgtaagaatccgcggcattataatctcgaatccttcaaatcccatgggaagcctactgagcagagagaatctctatgcgcttttggactttgcccgtgagaggaacattcatattatatcaaacgaaatctttgctgggtcagtccacggagaagaaggagagtttgttagcatggctgaaatagttgacacggaagagaatatcgacagggaaagagttcatatcgtgtatgacctttcgaaagacttgtctttcccggggcttagatccgctgctatctactcgttcaacgagagtgttttatccgcttcaagaaagctcacgacgctctcacctgtctcatctccagcccaacatttgctgatatccgcaatctccaatccaaaaaatgttcagagatttgtgaaaaccaacaggcagagattgcagagtatctacacggagctcgtggaggggttgaaagagttagggatcgagtgcacaagaagcaatggagggttctactgttgggctgatatgcgaggattgatttcatcttacagcgaaaaaggcgagattgagctgtggaacaagctcttgaacattggcaagatcaatgtcataccaggatcttgttgtcactgtatcgaaccaggatggttccgtatctgtttcagtaatttgtctgagagagatgtgccagtagttatgaaccgcattagaaaagttataaaaacatgtaaatctcaaaattgattacaatttgattatttggtggattct

SEQ ID NO: 57873 - DNA, 433 bp, Arabidopsis thaliana landsberg
  unsure (1)..(433): unsure at all n locations
tttagtgcgtgcgactctgattagattgagtagatgccgattcggtggagttgtgcgcagccgttggattcgatctgcgcgggggagatttaatctcgtgtttttaaatcacgatcgtcgataaccgatcggagggcacagagagaataccggtttgtgataatctagatctaatctgagcccctgatttccgatcggacgcccgagatccctcggtaccccttcggtgtacgcatttacataagaaaccctctgttttcgcagaataagcccgcagtccattctaactattcactgagtcataggaatcttgcaacttagaccctgagttcttggtaaatagtgcgcccagtccagagtngaataaaaatagagaaataatattagaattagtttttaatacaaaaataaatctagaaacttgtaaaatgca

SEQ ID NO: 57874 - DNA, 553 bp, Arabidopsis thaliana landsberg
cgtgcccgtccaattgcccaaccaatacgttctggatttctctgcaaaaccggcaggaaatttggaatcgctaacaatcatttggtaggtcaaaatcaaaatcgggaagcggttgatcgcgcccttggtgccaatgccccggtacaactccagtggtttgtaggcaagggcgggtgcggcaatcatgtccacagaaccgttgttgaacttggcggcaaagttggtgatgtcggccgacaccggttgcgcgccaattttctgaatcatgaccgcttgggccttgtcgtagtcaaaggctgcaatctttttaccggccagtccttccaccgttttgatgctgcggtcattgacaattggaaatgccgtgccgaagggaataatgcccgcgacctcataatcgccctgcttcatcagcttgccagcagatggggacgagaacacctgaattgtccggtgcaccacttcgtatctggcaccaatgtccaccttgttgactttgaccacggacgatgcgcccagcgaatcgatggaagcggccactgggttgaactga

SEQ ID NO: 57875 - DNA, 910 bp, Arabidopsis thaliana landsberg
agcatcttttaattgagtcttcaaatcttttattagggcaacattctcttgaatatgactaacttccaccaatttcttcatcaaacgggatggaaccaacaccaaacctacgtcctttttttttacttcatttttctcttataataaaaaattgttgttaggaaaaaaacatagtagctaaatataatcttataataactattacttaccgatcggaaaatttcattttgttccacttgtgtgagttgatcaacattggacgtatccggttgttgactcaattgtgtgattttctctccctccatcagtcggcagcgacgagctatttcctcagctttttaatcaacaaagacaccatccgatttccgtttatgagtctcctccatgaatgtcaccatatcgggaccggcaccggtttcaggatcccgctttgccatttgaaacttttataagtaattatcaaacatattatattaaatctcaaattaatatttttaaaatataacttttttacttaccattttttgtattttcggatatatgctattgatccacaagtgtgtttagccatgccatagccgcctcgctcgctcttgcggttttgggaattggtttcattatgggctttatttttctcatttccccaatatacaattagcccttgccaaacattttctcgcatccatttaggcttatctttccccttaagccaatttttccattcatatacataatctaataaacggttcgcacatatcacctcaaatttatcttctactttggacgtaagaccatcatcccagtaaaattttgctacaattataaaattttttaataataaaacctttaaggtggaaggattttttttccgggaattattacctaatttaattaaggtttaatttaggtt

SEQ ID NO: 57876 - DNA, 1122 bp, Arabidopsis thaliana landsberg
tcactcacactgtcgggaagaaccgatccaagaaagctagtagaccttttgcttctgaaaaactcttgcaaatgttaggaatcacagtatgtataagggaagtaagagtgtgattcttaatcctaacctttggtttatggccaaacttaaagagaaggcatgaatggagcctgaagaactagttgcaattaatatatctggaagctgtgtcgatggtccaaaagacagtgaatatatagtagatgggtatgttcctctcctgaaactatatgactgcaaacagaggaaagaaacgattaagaatctgtagaaaaacaaaatggtgatgtattaaaagagcaaactattcaccttagttgcttctgaaacaagatggactcggatcaaggttccttgctcagatgctgtagcaatgtacattccatttgaagacagtgcaatcgcagccaatggagaacgatgtgcatcaatctgtaatcgagtttaacaaacagagagacaatacaatcaagttcattaataacttagttttctatgcaaattagaaatttaaaccaaaaatcaggtgaagcatctagtaaacctcactatgagactgcaaatccatgacgttatacaccaaaacagatcctttcgtcgtactagctggaacagctaagtagcagccttcaagagatggagagaatgcagatagacctgaacgaagatatacatttacatgtctgtttacaatgaactaatacggtaaaaactgacaaagggaacttaatgagataccttttggatttggcacggtgtcgatagtatcaagcatgacaagagtattcaagtcgtaaacgaatgttttctctagcagcacaacaacaagtctgataagaagcaatcacagaaccatgaattcacactctcaaaagacaaaacaaacaacaatctgaagtcataagttcggtaacaaaccttttcttgatcatacgaacagcgagtatagaagttaaaaaattcaattccctaagaggtaaacccgttgtggtcttgaacaaacaaagacgccgtggggatagagaagcctatatatatgaaattttccttaatcaaacaaagatcaaatctgattatcgaata

SEQ ID NO: 57877 - DNA, 1211 bp, Arabidopsis thaliana landsberg
agatattttccatgcttcatctccaaaaccacaagatttttctgctgcagtgaagattaaatccttgaaagggagcgaactaactgatcgtagtgctatatattcccgaataatggttgataaaccacataactacaaattaacaaaccatccatgaaagacgctgtatcagagaagggaactatattatatctagaaaggatatgtatcatgtcaacaacagtcgcttaagttcattaagattctaactagtattaaagtataaaagaaagagaaaagagaagccaagctagcataacacaacctaaaactagaccacattattaaggcttatcatccaatttatggaaaaaaaacaaatgatagaataactatgcatagttgctgtgtctcataacaactgacctttaaactgaatacccttttgtcaatagggctggcagatgatgtaataagagaacgcatatttgaaagcgcttggataaatgactttgttctagaggatttagtattcttggttatctgcacaatgtcttcagctaaatacatccgaagacgaagaagattattttgacgatgttccactacagcaaacccataagatgaaggaaatgaattccctttaatctgcaaaagttaatctctaagtgaatccaacatctgataatgaaaattttatacaagaaagtacaaaatcagaaatgcaagtcatacaacacccttggaaaatcaaacaaaaacaaaggaatagtatatgtacctcttcttttgatagcaataaaagatcattttgagcaagatattcatcctcctcatgttcgtatgtgactaacagaaagtgaaacccttcgccctcgttgcactccattaccaatctcattttacacaccgatgctaagaggaaaaaagacagaaaaaagtcatttccacaaccagaaccaaatacgttaaaaactaattatctaaacataaaatcttactacaagtatacaaatttagctctaaaagctgaaaataacaactgccactttctttcatgatcaatggatggacaaaagtagtaagaaaaaagccaattgtatataagtttaatggatctaaccttcttcaccatctttattctgcaaaaattgagctttgacttcctcggagagcaatggttcaatgtctcgaaataatcatcaacatctttataagtatccttacaacat

SEQ ID NO: 57878 - DNA, 520 bp, Arabidopsis thaliana landsberg
tgttaacctcctctaacttcaagcaaacactaatactatatattaatgtcatactttattcatggtgcacaaaaatatgatattgaatctctggatttactactacgccaccaaccacttgtcctgagatcaatataaaaactttgacatgttaatcacatttccattataatatatttgtaaaaaaaagtattcgagccaaatatatggatcaatgaaagatactatagtttgatgcttgattgggattaggataacacattatgcgatatgcgttagggataagttcttaatatatagtactatagtagttaagacgtcgaagaagaaaggaatgttatctttcgttttggtcaacaaaagaatgatatgttaatgaatagattggaaaatattctcttagcttttaatatgcagattttgtttgacgacaactttagatgtcgattaggcttcccaatatttaaacatgtttattttccgtttatgcgagaacaaaaaatatcaaagactttttctt

SEQ ID NO: 57879 - DNA, 406 bp, Arabidopsis thaliana landsberg
aaaaaggaaggaaaaaaaaaggacagacaaaaaagaaaaaacacagaaggaacgacgagaacattcgaaggacgaaaaaagaaaaaaagggaagaagagagaaaaaaaaaaaaaaggaaaaaagaggaaagaaaaagaagaaagatagaaggtagagaaaaaagggaagaagaagggaaaaaaaaaaagaaaaaaaagagaaaaaaaaagaaaaagggaagaaaaagaggggaaagaaaaaagaaacaaaagaaaaagaaaaaggaagaaacaaaaaagaaaaagagaaagaaggaaagggaagaaaacaaaaaaacaaaagagaaaagaaaaaaggagacaaaaagaaagaaaagaaaaaagaaagaagaaaggtgaaagagagggagaaaaaaagaataaagaa

SEQ ID NO: 57880 - DNA, 585 bp, Arabidopsis thaliana landsberg
  unsure (1)..(585): unsure at all n locations
ctcttctcaagcatatactccttttggttgctggcaccaccaagaacatccgcagacaattcgtgtaaaaggagttggtgtatgttttaatgtagatcaaaagttaatgcctgtctttgttcgtgggattagagtatagtacatcgagtttaattaggcataaaccaacccacaatctatatatgtaaccaaatgtctctatggattgactcacgaccgtcctgtggctcctatatttttctccaagactcctccaaccttcttgattgtctgtttttcaggctgataggttgttatattacgtcatgcaaaagatctttaagttgtttgtgaaagtccattataattaataaacttatatatatatatatatatatatatatattctcttatataacgaanagaaccttatattagattctttagatgcatatatatngtatacataattaaccgactgattatcaattatgtttgttcaggtagatctaggataattaacanacgttataaaatcatttaattaggcgatccactattaaagtctttgaatatcatgtgtttttaggtcaagtaccggcaaat

SEQ ID NO: 57881 - DNA, 433 bp, Arabidopsis thaliana landsberg
gttctattttaaggttttggtcagaagcactacagagtgatcaagttaagattgcagaacgtgaagcgaaacttgctagaagaaaccctttcaaagctattaaagatgccccattctctatcttatcctcactccgcaagaagttttgtatggatcccctagatctattatctggcttcttggctaggttgataggatagttctatgatattaagtttttcgactacatcggtaaggacgaagttaaatttatattatagtgcttttctaatccataaacttgctatataaccctcgatgccttagtaatgatctagatgaatcaaaatatcaagaacaattgaaaacaaagattcaatctagaatcaaaaccaagaaatgcaatgttcacatatagagattaatgatattaccgtactaatcttgcataata

SEQ ID NO: 57882 - DNA, 985 bp, Arabidopsis thaliana landsberg
aacaagatatttctggttctggttctgttttcctgctcttaaggaaatcttggaaggcatgtgactaatcgacatccaggctatgataaggcagcagcagatgttgtcaccagctcatcagtaccacagacaccaccggctgttgttaaaccgtcacaatcccagtcgaaagtaccacaactcgattatgatcatcttaactggttagttctcaagtggcttgctttgtcatcacttcctccctctactgtagacgaaacatggttgggaaactccttcaaatttcttaagccatccatccagttatggccggctgaaaaatataaagccatacttgatgaggttttcacaagtatgcggggagatgtgaagacaaccttggagcatatccagtccaaagtttctgtcactttaagtttctggaattcatatgaaaacattttttatatgagcgtaacgggtcaatggatagatgaaaattggtcgtctcataggttgctgctcgacatatgtcggattccttatccctctgggggttctgagatttataactcccttttgaaagtccttaagacatatgccattgaagacaggattctatgttgtacacatgacaacagcgaaaacgctattcacgcttgtcatagcctgaaggagtactttgatggtcaaaaggtcttacctttctgctacattccctgtgccgctcaaactctgaatgatattattgatgaggggttagcaactataaagcccattatctctaaggttagagaattcacacaagagttaaacgcgtccacagagctatctgatgatttcattcagttgacaacagcttatcaagaaggcaactggaaactacccatcgatgcttcatctcgttggagtggcaattaccagatggtcaacatcttgtgcaaggtaagatgtctataactttgacctgtaagccatcaagctctgagatatttatatgtgatgg

SEQ ID NO: 57883 - DNA, 1155 bp, Arabidopsis thaliana landsberg
ctttttgaacagtttgttcagaaatgagagcataacatatcgacgaatggaacgaaaatggactcttcagattaatcaaaccactagaaccttttctgtatcttaaaactatatatttatttatggagaaaaacccaacaaggttaaaaagaagcttgacatataccaatgtttgaactaatcctcctatatgttatgaaataaaataaaaaacctgaaaaatgggaaaactgaggaaataaaaaaaacaaaagaaggaaaagttcagcaagacactttataagttacctcaaaacacttgtcatcatcctttgaccaatcaatcaattcatcaacctattcaagaacccatctccaccactttgtagatcactcacctgcatggaggaaactcccaacgtggctccggctcttttcgctttccaccaatgctgatagaagaactcgatgagggctctacatttgctcctgaatgctctcccatagccccgctttgtgaaggtgatagaaactgcctcaaatttagcgactctctgtttcctatctcaagtccaaacccagagttctgatcaaagtttggccgcattgatccattcgtactaggcgatccacccgccaagctcatgaacatgtgttgttgagggaatggtggctgcacatacggcgctgatccgattatttgcggcatcatcactggggtacctcttgaatccaccatgtatggaatagcagttccaggaacatacatgggtgatgacattgacaaaccaggaggaccagtcaatccgttgtagccatacataggggctggagaaaaggagacaccaggggctagacccaaagagtttcccgttcttcccatgtgtaaacctgttgcaggctcgagggacttgccattggacaagaacgaagccatctgaggtacagagtcttttctgtcagcttccacttttgtacccaagatagatatacctggttcttccaatttgtgccccccataggaggctgtactccatgggtgccgcccatagtagggaccctgatcacgtgaatcaatgaaaaactgtggcctgtcattcaaatcaaagtttacttccttgcctgattgttgagcaactgacgatgaggagacaggtgatgcgctttgctgaccat

SEQ ID NO: 57884 - DNA, 442 bp, Arabidopsis thaliana landsberg
attcttgctacaactagttcaatcaaattgacatttttgtattgtataaacacactgtattataatatatattatacaggatgtttcttagcacagtatgacacttaacaacttgatgatttatactaggcaacaaccaatgtttttgaagatcatacaatatcatttataagtatatcattttttatattacaaaatgaaagattgttttggtcaacaatatgcgggcttgaaccctcagtggcgatacaacattttacatatctatatataagttttttccaccaatttttagaatatttgcctaaaatataagaatgtttatactgcttaattagtgagtaagaacaggtagtccatatccattatatacaattcggactcagttgtcacgacttcgttaattggcaactttggcacgtatgtagatttcagaacacat

SEQ ID NO: 57885 - DNA, 482 bp, Arabidopsis thaliana landsberg
aacgtctcgaatattcattttctcctttggagagcttctgttcgcctatgattggtctaaatatatgacataacatatttccactgaattgtaaataatgtattacgtatagtggcatataactcaatgctaaaaacatatatcaatttactggatttcacaaaattgtaactcaatgttactctatatatggaccactgcatgatatccatgtcttgccctaaggatacgatcattcgattattcacatcacagatgttcgttatcttgtcaatagatgaggacaaactatatgagacgagatatttgcctcgacaaatgaaccattagaatcactctacttttggaattaaccggttatgcacgtccatatgatatgtataaatactgatatacataacgctcatctataatgcatacaccattcattcgcctctaaagtataataagtcatgatattgaccctcgattgattgattgac

SEQ ID NO: 57886 - DNA, 465 bp, Arabidopsis thaliana landsberg
ggaataataccggttcataaagggttcctatcggtaccaaagaaaagggtccctaatggttcaaccagggcgcggcctaaggggaaggggttggggaaggggaaaaaaaaaaccgagatttcaccaaagggattttttttttttttttggaccaaaaaaaaaccgagtggatttaattcggaccccttcggttaaaggaaaaaaggggcaaaatcctatgggaccaacctaagggacctaaaaatggagggaggggattaaatccaaaaaggaatccaattaaggaaaggggggggaaattaaggaaaaattaggtaatccaaatggaggtaaaaaaccccagatcccaaaggaccaaatccaacctggaaaaagcctcttccggatcctcgaaaaaggaggggcaaagagatggatggaaaaagacctctggtccttattataagaccgggggatgggacccgc

SEQ ID NO: 57887 - DNA, 258 bp, Arabidopsis thaliana landsberg
tttgatttaattgccccaacaaccactcttcgtgaatcccgcaggaagccactccgacaaaatgtactaacccctccctgtacgactgcatggtcgaggcaagctcagccaaagcctgaggaggaacctctgtctcgcttgagcttggcctcggcctagataacatcaaccaaaggacatgaccaacccctccgcgaagtctgcacgcaggcgagatgggtacaagaccgaggctatgtaccctttaccccatacggg

SEQ ID NO: 57888 - DNA, 749 bp, Arabidopsis thaliana landsberg
tagtcagtttgccccgttgactttttaacagtgtatttactgagtgcctattgatttatattagagtttttcctgttttttggtgccaaattttcaaaatcacgttttagacaacatttccctaatttttctccagctgtatattaaaaacatcaccacaacataccttgtctttcagcacaaacgattgagatatgcacaaacacgatcatcttgatgatattccaacaagataacgcaagcagtatgctgcaggaaagagaaacaagtaagcgcctaactaataaaactccagaaaatatagacccacctatggggacaaacagtctcttaaatgcatttaatgaattacaacaaatggacatttggtctggtgtatgatcccctatgggaaagagaggtccagagcttaattcttaaaaagccctcaaaactaatatatcctttaattttgcttcatatgttctgagggtagttctttttatcagaaagtcaagtaaattgtatggtacacatatcatgtgcaaatgttcatagaaaacagatcagaaatgaattaaactaatggagtggtttcacatgatcagtgcaaacgggcaactgaatataagacacaagagcttccacaactggaccagtatatttccagagtatatctggctacaaaattgcgattgagtaattcactttccaatgaaaaatgaaaacagtcattgccttaagactctcaattgtgaaacagatactgc

SEQ ID NO: 57889 - DNA, 1539 bp, Arabidopsis thaliana landsberg
ctacagaccaggtttgtttctgattgtcgcgatgtaatcattgttttgattcaactacaagagttagtctgattcataccatttctttgtgaattcaaatcatctttggtgttcacagggtggaactgtatcagctatgacgattaataaagggatccttcttggttttgttccatcgggtgatactcaggtgtgtattagttatcatgattcttatgtgttttggtatacctctgcgtttcttataagtgaacttgtcaatcaaattcatatgtttgacatgcttggattcttgcgcaaataagcaccattctaatttttagatgaatgtctcgttgatggtataatgcaattctcttaagtagcattccgtattctgggcttggttcagcttaagagtagatggagattctaattgtgtacaatatagtatcctggtctctttttgtttctcacctgacctgagaaagcattaaagaattggataatttaaaatgaatgtggtttgtagacaggagacaaacatatatttcggagctgggaaagttccttgtgtctgtgtgtttcacttgagccttgaagtctctgtaccgtttattctctttctaatttatatgcaggtccagttgcgctctgcacaatttgaaggagaagtatgtttcaggtgtgcatatctttcatgatctctcatcttgtcgttagtgttttcaaacttttatatccatcctcagacgtgcataagcttgttactaagccccgtatagggtaaagtgcaccttggatattgtggaagtatttcgatctggccagcattccattatatctcattttagtatgaaaatgaacttatctttcacttaagtcttagacatttatcagattcaacctttaagtttgctcataattccctagaattcattggaaattgaagacccttagcgctgtaagggatacaaaagtatccgttttggatgagcttgcatgattttctagtttctgtttcatgcattctattttaccttttctaaaggtatttttgttttccttagtgcatttcaattttgtactcgtcatggtggtaaaggaattgaagatcttctatgcataatgctaatagcttttcgggttctgaaattatagagtagatgaaatccagcacccaataggcctagcaaacaagaatggtgcaagcacgccatctccatcgaaggaaaaaagtatctggggtacttatgccagaggagcagtttatgcgttacagagcagcaaaaagaatctcaaacaggtaacaggttcaaatttggtcttctggttatagctatagataaagtttaccattaatgggaaatgaggtttagcctgcacatttgctgtgtgatcttctggggttccacatttacccttatttggttgccatacctgatcttttaggccttgatttccccataatagttgacataattgtatttaatggaaaaggtatttgaatatgtttctaagtaattgttttgatctttgaagggcattattggttacctc

SEQ ID NO: 57890 - DNA, 841 bp, Arabidopsis thaliana landsberg
  unsure (1)..(841): unsure at all n locations
gctaagtgttctttgtctaattctctatcattgtttgatttaataataaccaaaccttaagacttggaagcaaagaagagagaaaatcccaattaatttttaataattcaaagagagatattgagtgacttccactaatacaaagaaagcttggtttgtgcaatattttgcggttaagctattaattgctgaggcaacaccttttcacactttgctttccttcttccaagttttcaacttttctttcttactctttctattaatcaaactgcaacacaaaaatcatttggataatacatgtttagaagatgattaagctttagttttatttcaagattatcataattgttatctgttgttacctacattcatataatcttatcaaaaacgaataaagacaaaaaggatacaatatagtagtttttattataaagaaacagaaagaaagaaaagggttttcaccaaacgaaattagttcaatcatttaaattatctttatccttatgattagtgtctttatatctgtcatatgctgcttctccttccaacttcctttggattatattctctttcactttattttaatttccatttgtggtagctgttttattttttgtattttcacgccgcgtccctttaaaataatactaattacaccactaatgttggaacatgaaaaacatgaatgaggtaattatgatgatgaaccaaatgttaaggacaagctcggtgtaactaagaagataattagtgaaacagaacacgtcaataacttgtaagcatttcagaattgaaaataaagataagggaggatgaatatgaatttagtnaatgggtaatg

SEQ ID NO: 57891 - DNA, 595 bp, Arabidopsis thaliana landsberg
gggcacttctgctggctttttatttggtcgggttgcccagtgagattagcccgattttgctgtaccaatacgacctgcgtcttgttgcccttcaatttttattggggctggcagggaccggatggctatgggtgcattatcagcaatacacacgtcgccgtcctttgtgggatgaacttcgcgagcttttcaaaacgctggtcgctgccacattgatttctgctaccactcttttttattctggggtccaagcctccagagatctgaatatctgggcctgggcattgggtttccttctcgtgccaatcgggcgcatcgctgtgcgccaatgtcttcatgtttttggattgtggatgcggcctgcattaataatcggaacaggccccaacgcggtcgatgcatacaaggcaattcgcagtgaattctcacttggatatcaaatagtggggttcggtgagcctgacactggttcactcatgaaaacaacccatctagaagtggatggacagttctataaaaaataccgttacgacgccggctttttcgactacattgtgaaattgcacgcgcctcagttggttcttgcactggaatc

SEQ ID NO: 57892 - DNA, 108 bp, Arabidopsis thaliana landsberg
  unsure (1)..(108): unsure at all n locations
aagccaccgcccacttganncnctcttttggtgatcatgattgattatatcgaggtagcattactctacgataagcccgtgatagtcttcataaagtgagagtcactg

SEQ ID NO: 57893 - DNA, 819 bp, Arabidopsis thaliana landsberg
gaaattgcagtaccctgtaatgaaagtactttggtcatttcatctcacgagagtgcagtccaagtgagacttttctataagaaagcaaacctcaacaacatccacaacgacaagcccagccaagctaggcaatgttttgtttgcagcaacttgcacagcgaccgaacctcccatgctatgtgttaataacatgaaaccaattcatgaacacagaacactggatcacactacttttatcctacaaatttatgcatgtgtctatcactacaaccctataccgaacgaagcctataaatgttccatacttaagaatctaaaacataaccatagtgtcagtagacaaattgttgtacaggtagatcataaacaactaaaatcttaaactttcttacaaatgttacaggtgtgaaaatatattcgcaggcgcactggaaaaatattgatgtactcactattgaccagccatttacacgttaagatagagatcgaaaacagcataccgatatgacaaaataaaatagagaaagagaaaaaacctgtgaccaactagcacaatagctggaggagagtctccatacaattccttaatgacagccaaaacatcattgctcattgtctgcattttcatcttactacatcagtctcaattctcaaagaccagctaatgtataattccataagcaaatccagactctcaaaaagaacagggatgtcatacctcaagcgataactccaattcgttctccgaaaccgatttaccgtgccctctcaagtccatcgcaaccacacgtgctttctgcattaagtttacagaagagc

SEQ ID NO: 57894 - DNA, 1084 bp, Arabidopsis thaliana landsberg
acaaacgaattctttatgcaatgttattctaattaagattcttaactgatgttaacgatagtttttttccgattttgtttgtgtgtgtttttgaatgattatgactgtgatatcagcatatctatacaggaacattgagcacgaggagttgtttcgtcgagctctttgtttcatgcataaaccaatctcacgtcgtgatctcaacagcctcaacgttgtatgtcaacaagctctccgccatagaatgaacggtaataatatccattgatacatacgaatattatgtgacaaataataataaacatcctccttattcttgcactaatgtaaacttatcttgtttttatatattatccgattttatataggagaaaccaatttaaatggttcgggacaaaatgtgaccgacgatccagatgattggctacggcttcgagaaaagcctaagctcaaatggacaaaacctcttcagcatagattcatgagcgctcttaaaagccttggtgtcgctagtaagtattaaagttctcttctcttactactacaacaattaaaggaacatactatcagttttttagtgtctacaaaagtattgatgctagttaaaattatctaataacaatatgcaataattatatgattaaacatcaattacgatagatgatatcgttattgcattgtttaacaccaaaaagtagaatattattgaagtctatagtgtagatcgattttgattttttttgtttgttgatattactcgatcgataaatctttggctgattcttgtagtgtttgtgttcatttcaaatataccttacttgcaaaagatacctgtctctattctttttaggttgtatgtaagtattgattgaccataaattttaatttttgtatcatttttgcaaatcatatgatatgtttttatattttcatagttatttttgtaagttttgttaaacaaaaaaatgttatttttgcaagtaagggctgacatatgatgcgttcggtaaaagtttagttgattatcttatttattcattaactagccgaggaaatatgccaatcgtgacattaaaattgttaa

SEQ ID NO: 57895 - DNA, 970 bp, Arabidopsis thaliana landsberg
ggcgaagaacacataaaaaatagtcaacgaggttttgacaactgggacctatctcgtttactccttcgctgaaacgacgtcatacttgtcggattccctttcccgctaagacttcttgtcttgtccccctttgccttaaattattattattttttgtctattataacttttttattttgttcatcaagtaagatttcaggcttttgtttcgatttaggttacacatattcaaacttatccatatatacacttcagaatctaaattaaagtaatctgatcatgttttgcctaatgttgtcataaactctttagacatgtacatatttcattggaaagttactgaaattattgtttttgtcttatgcgatacgaaaatattatcacacttacctttcaaattataccaaaaaatatgacaatttattatatagattatcttgtagataaccgagaagtttgacatttccttaaacgttacgtgccgtcaagaattggcaaagccactcccaactactcacaaatcacaatccataagtcatagccaagaaaaccctttatgaaacacaaatgtttattattcctgaaaatacaaatttaaattccaatttctaccacgaagatagcttactttataggtatatatattttcttcaccaaatccgtaaaaagcaaaagtgatttgaatttaaatcagaaacgcgtatagattgtgtatatatgtaagttaaagggcatgcatacctttttaatgttatttaatattaatcttaattccattcttcatagacttttgaataaattttatttttttcttgagtttataagtcagggaaattgtcacccacttaaccactaggaaagcagatttggttactgaatctttttcacacctaaggctcaatcaaagtttttgatgggacctaagttgacctagaactcattttcacacccataataataataatatgac

SEQ ID NO: 57896 - DNA, 962 bp, Arabidopsis thaliana landsberg
acttcaggtacaaagtatttggacagcagataagtcgtatactctttggatagtgaacatgtcctttagttacctaaatatatataccgagtttaagttatttacaatacacaaatgacaagatcacctgcttaaagataggcaaagtttggctggtctctgaaagaatttggagttctgaacttgaaccgatcatcaaattagttatcttcagctcaaattggatttggtttggtattacacccacaccagaccaaattgaaccaacacacaaaggctttacatgcagaggcagtagaagcatttaagccaaaatagcataaagagacagaaagtcaccatcacaaaacaactaagattgtgtccccatgtatacaaaaaagaaagggactctgctcataaccaaaatagaagacaaactgtaatatatcattcacttcctgcatctccaagctgataccgagtatagaggtcgatcttgccagcaaattactgcgcacccgctctcttccttgattctatacccatcaaaaccgcacccttgaagcaatctcctagcctgcaacatcgcataatagctaagaggaacattcccaaaaccagccaaatcgatcctctggctccatttctcaagcttctcgtgtctttctcttctctcaaatccctcgcaggatatgatgttcttgatctcctccccgaagagcatcttctccactttgatcctatcttgagacgttcttggaacttttgtttccaagcaatcaaacaatgctgcgtaggtgtagagtgattctaatagcctctccattagtgtggagccgttgtggtctgagtcttgctcagtgaccaccatgacctttggagacccccccccaatagcattgaggaagctatcagtccaacatgaacttggtaaaggcaaagatgaggccgagtcaccgctagggctagaccctttgttg

SEQ ID NO: 57897 - DNA, 834 bp, Arabidopsis thaliana landsberg
ctcgacgactccctttatagataggagactaatctaatatgggtctacttttgaacgtcaatgaagtattactaccaacttgtaataaaatcacaataatgggcttgagtacttgattaacaggcccatttaaaagattttacgtttaagaatctttcaaatttaacaaacaaagagattattgcatggagagacggttttggtgcttggaatgggtttgtctttccttgcggaagaagaatcgggtcaaccattctcatccttcctctccatcaaaaccctaatttctatattacatctctaacctcattcatatttgatatataacaccattcctttccttgatctctcactcatcaccctcacccaccaccaccatcaaaccctagttttgtttttcccccaatttcgtttccttgatcgtggatcattcttgttcagatctctgttagcgtctttgaatggtagaaacaactccgatcaccagagaatatatgctttcccattgcacaaccgcaagggcgagctttctccttcgtcgtctctccgccgcatcttctttcaaatttggcttctccaaagaaggctggtactaccgttgcatcggcgtcgacccttgaactcctcaacacggtttgtttttttaataaacctttctgattttgaaatttgataatgttgtacaacaacaagcatcagagaaaccagaaatcgaagactaccaacaggttccttgttagcatcaatgtcttaggaagtgctggtccgattcgtttcgttgtcaaagaagatgaaactgtatccaatgtcataaattatgctctcaaatgttat

SEQ ID NO: 57898 - DNA, 544 bp, Arabidopsis thaliana landsberg
  unsure (1)..(544): unsure at all n locations
tttatgtgtctcgcaagatccaacgcatttgactgacaaaacaatcaaattttaccgttacaatgnatagtcatatatgcagaggatgatccaggtgagaaagaatgatacaaatgcacaccgtaattgctgattcataaacaaaaatgtggcctaattgaaggattacattcttcatgtagaaagaagagaacaacaataatacctttctgatagggctttggtctgcataatatgtagtcatccgtaacatcataatcatggcggaccctagtttgaaagagctttagcaggttatcgtaaggatctctaacctcaaaggttatgaaatacattctaccaggcccagtacacatgtaagtattggctttgacaaccttgagaaaatcatattctgtaaactgttttcacaacaaaaaaaaaaaaacaatttcatcagcaggtaaaactaaaattgatcaaaacaacaacaaagaaaatttgaaagcagaccaattctgaattgtagttcttagggagttttgagacagcctcttgagtaact

SEQ ID NO: 57899 - DNA, 1479 bp, Arabidopsis thaliana landsberg
  unsure (1)..(1479): unsure at all n locations
taaagctctttcttctctcgtccttctctttcctcaacgtttctcgtcgacggtgtctctgtctggaaaatccccactgttcatatcggcgactctgttagtaagtgttaattacaaaaccagtccttttattttcctatttttgttaaattcttctcttaattaatattaatggtgtgatcttactttagttttcagacataagtacggatacgatctctacatcttcagaaacaaagatgcattcaatgtctgcaactttactcaagccactcttcttactaaacctaattccacttccttcacggtacgcatttcttaattcgttacaaaacttgtgaatttcttttatttggggaaattgctagaaagtatgagaattcatctagggtttctcagaaatttcataaagttgtgatcttttacaagctccctttttgttctctctgttcttgagattgacaaaaagctcctcttcccctgcttttcctctgtttttttgtttgctcaattaataatttccgtggaattgataataatagaatcttaaatccgattctttgttctgacaacagaattgaaaaatgattaaacacaaaacgtctcatgttcagggctcaatgataatcaataagaagcatcttgacaattaatacttctttcttttacatagtacttaaactttactctactgatctacatttgaactttatgattcttgttttctcagtggtatccatcaagaacaggctcttactacttttccttcacaaacaacacatctcttcccaaaacatgccaactcaaccagaagctcacagtccaagtcatcctcgccgcggcatcaccgccatcgcaaccaccagcaactgcccgtgttccggtttcggaaggaggagtgatctcatctccttcttcttacccttggccattaggtcctagagaaggttcagctttctctccgggaccatccccatcagagatcacgtcagtgacagtccctggtaaagacggagttccattcatcaacagtaatccggcagttcctcttcctaccggagatgtcgactctacttccattaaccctttaccaacttccactaattcagctcatcaggtacattcacattcacattcacaacaataaacaaaaacatcaattctttttctatacaaaacgatttgatttaatagaaatgtttgattgtgtgtgtgtgcaggtgatgatgatgacattaacggtgaagctaggtttgtgttgtgtagccatgtttctttttcttgttctgtagagaaacagagtttttaatggaagaatgattacatttctgatcttattgttaatccaacaccttagctttagtgttgttgtgtaatcattctctctatagctnttctgtttctgtctctcttaatggtagggctctctgtagaatcttagggttatgcttatttgatgtgcaattttataaaatcaat

SEQ ID NO: 57900 - DNA, 426 bp, Arabidopsis thaliana landsberg
ttttatgtaagcacgacaggtcttatctgtgacatgagatatatcagatacggagtcttctcactccaatactcttaaattaagattgaggctgtatatctcatctaaaggttatatgactaagcttggcatggcagtcacacacaggtgatgcgggcggctctctgtcaaactgttctgtctatctccgtgggtggatacgcgcctgcattctcctctggcttatgaccaacatacgcgccgtactactttctgtgtgtcttgatgaacaccttaccgagagggtcaggttttccgatttttgattgctgcatacacagatcaccagctgtcttgctctggggagactcacgatcacgcactgttactcgagctttactaacccatatgggttgagcggcaaaacacttaccaatccatcttgga

SEQ ID NO: 57901 - DNA, 470 bp, Arabidopsis thaliana landsberg
gagtcagcgatgaggggcggcaacggcggttcagcgtgatggttgccagtcactttctcaaggagtgagacgtggaaaaccgggtgaaccttacccatagaggccggaagatccaagcgataggcgacggccccaatgcgctcgatgatcttgaaagggccactccaaacgggaccaagcttcttggcgccgggagtccggaggcggatgttcttgatgttgaggaggaccatgtctcctacatcatactcaacttcgcgacgatgtttgttagcaaagtgagcttggcgttcctgagcggcacgcaagcaggagcgagcaagatcgacggctcgacggatttgagccgtgaggtcttcaaccgccggcaaccgcgaaggcatgtgtatcgtggctggagtgagaagatgctggccgtagttcaaaaagaacggcgtgttctgcacagattcatgccatgatatgttcag

SEQ ID NO: 57902 - DNA, 1210 bp, Arabidopsis thaliana landsberg
ggacctgattatgtcgtaaacccacacttgaatttttttttccaagtgggcttaaagttttgaagttttttagcgttatgggtaagtagggattttatggatcgcatagtggatatctttaaagttagaattggtcgcatgatgcccaatgagtgaattatgtcattatgctaccttgatttatccctggtcgaagacaacttattcgtaggtttatcgaatttgacataatatcatatgttccgagaatgctttaaaacttcatattctgttgcttgttaatgtaatatgatgtattattatcacaacaataaagtattatctgaacgttgcctcattcgtcccgttacaaataattatgtttgaaatatatatatgcaagtcaaaaatatctcattctcaattaattacataactattcaaaattatcaccaactctagttctagacttccttttttgtatgcaatattccaaaaactaataaactacacacctagactaattatgtcgtcatctcctaacactatagcttctaatttcaaaaacaaaattcccaaagtaaaagtaaaatgaacattattaccgtgcatgtcgacattactcccaaagaattgcacaaaatctccaaaacctctgtaaacaagaatctcttatatataagaaacgtgagttgttcgctgttacaaacccacaatcaaagccacaaaggaagaagaagaaaaaaaacaaaccctaacttttgtcaaaagtaaacgatgagtagattccgtaaaaccctagtttctgctttcgttctctgcttggttatttttcctcttctagtctcagcggcagaggaagaaaaccaatgcggcggatccaaaggtggctctgctgcggagaaagcatcggctcttaaatacaagatcatagctttcttttccatcttaatcgccggagtatttggcgtctgtttacctatttttggcctcaagacggagagcaatttcttcatgtacgtgaaggcattcgctgccggcgtaattctagccaccggctttgtccacattcttcccgatgctaccgagagtctcacgagttcgtgccttggagaagaaccaccgtggggagattttccgatgacgggactcgttgccatggctgcatcgatcttgacaatgttgattgaatcctttgcttcagggtatttgaacagatctcgcttggcga

SEQ ID NO: 57903 - DNA, 2092 bp, Arabidopsis thaliana landsberg
tgcaaactgaattctcggaaagacgaaaacttgtaactccgattactatagacttttttctgggaatccgatttggggaaacttgaatgtttacccaatttgacttctttgtaagctaatatggtattgtcttagatcagagcaatgcacatgtgatgttatatctgagatcatggaatttaaagaagaaactttgtatcatgagtaatgttgatatgtttagtgatgaaaagttctcagatgtcagaaacagaatttaaagtgttgcttgagacattcacatttcctgctgattctgctcccttcaagagttgtcatgcctctaccatagttgaggttaagatcaccacaagtctctttgattggatctttagtagtatcagtgatggattgggttctgaatttctacattttgtgaaaaggttgttaaagatcatttcttggctgcgtatttcggaggcaccagggaaggagcacctgatgtcaaaatctggttgcagcatttcaaggtattatatagacttttcaatcatttagagactctctgaggttataattgtgtgtaataattgattggttttctcaggatggtcaatgggattcaccggttattgttgatgaagagccaggagttccaatgtataaccctgtcttgttcaaacttccatctcatgagctcttattgttctacaaaatcggccaggaggttcaaaagtatgtctttcaatcaaccgagtaactctttttgttttgttacatttctttgatatgttaagtgttttggtgaaagctcagatggagtggttgcatgaaacgatcatatgataaaggtataacttggactgaaagagaacagcttcctcctgggattctcggtcctatcaaaaacaaggtacttgttgcgttgcgcagactcgattactcgattaagactaaaccttttgtactggttagagacttagcttaagcttccttcttcatctgttctttcttctgcagcccattttgcttgaagacggtactctcctttgcggatcatctgttgagagttggaattcttggggagcatggatggaggtttcttaaaactatttagtttgatttctatatttagagtatgctacaatgattttacactgaaatgtgttggttgattcaggtcacttcagatgcgggtagaacatggagaaagaaagggccaatatacattcaaggcaagagtcttagcgtgatccaaccagttccataccaaaccgcagctgggaacttacggattttactcagatcctttactggcattgacagaatctgtatctcagagtctttggatggcggtgagaactggagttttgcagtaccaacggttctcccaaacccaaattcaggtttcttgaaatcgaaactaaacacattgtataactagtcttcgttttagcgcgattttattgaagaaaatgttgacaggtattgatggagtcaagcttaaggatggtaggctagtgcttgcttacaacacagactcaagaggtgtgctcaaattaggagtttctttagacgacggtgattcatggaccgatattttaacgttggaggaatctccgggaatggagtattcgtacccggctgttatacaagccggagacggcaatgtccacgtcacctatacatataacaggacacaaattaaggtataaattaagacagttaaatgtgattaattaacaaagagttttgtttcttttgatgttattattcaatcacgttttgagtggtctctatacgcagcatgtggtgctcaagactgcgacagatatcgattcgaagccataccaacatggtgaagcaggaggaggacacgtgaacttggatttgtacgaaccaaacattaattaattagctatttgtctcttgaaccatcgatgtggagtgtgactttcttcttacggaagaacaaagaatgttctctttcttgccttgtaagttattgattgatccattcttgagttttgtaaagttgccactaattgatgaatattattgagatctgttataatacatttattgggaatcatataagttagagatttacttt

SEQ ID NO: 57904 - DNA, 1503 bp, Arabidopsis thaliana landsberg
  unsure (1)..(1503): unsure at all n locations
gacatttaataaagctcttgctcactgatgatactaccatctgaaagatccaatccgaaaatgagatttgaggacattactattaatgaaaggagagagttaaatcttattaaagagatgattaggtcgctagcccaataagttcaaacaactctttcatttttcatttagttactatcacttgcaaaattatctacagttttcttacctttgagttgatttagtttcacatcaacttatctatgttagcacaatttcanaaatttntttttttcaacatgtaatggagcagattaatttttaaattgggtgttactttcaccgattttccatacttgtagtgacttacatttgctgattcattctttcagaagatgatttccataaaattgagtcgacgagtggaatattagaaaaatcatatactaaaaacgtgaacgaagataacaaaagataaaccttgacgtcctctttatcaagtcttttcttgtcattaataaagtaaacctaatttcaactttgataagagccaataaagataaccatttttttttcccttttttccggggcatgaacatacaaacaaaccatttaccaaaagcaaagaagttatatagagtgcatagatctaacttaccaaacataaactgaatattgtgagacttaatcatccgtttcattggtaacatggaagcctacatatatacatcaatgtctaaatataagtctttcctaataaggttggattgagaactaattacttactatagtgattatttgcagcatttggaagttgatgtagttgataatcgtaacaggccacctttgcttagctacgagcagtccccgtgaaaatttatcatgtcgctgtgccctgcattctcctcatcattagtgttaatctttttatactgtaatattcactctacctcaaaaggttatcaaatgcatcagaaggctaatgacttatttcaacagaatctctttatcagctcaagttggattcatgctaaaatgtgcgaaataaagcgacataatcgggatcaactatacctcgagcatgaatggtgttgattcctggacctttcagttcagtcccgttgtcgctcagcaatgaaatcccagctgatgttatatggaacgggaaggctaaaggaggcgacataggagattttgccaccttaatgattctctgacctgcaaaaagcgtgaaaccaatcccatgaacatacattcttggtagttactgagaccttacaaatgctttacaaagccttgcctgacttggcttcaaggaccagtcggatggttacagcatgagcccagttaatccccaatgcagcaacaaggtgagaatcatatgtctttgtgttgtctttgaattcatctttaactttagctgttgcagaggaaatctatgactgtggtgaatgggaattaacaaggatcacaaaaccttataaagatacttcagtttctgtttattgtaccttggaaggaata

SEQ ID NO: 57905 - DNA, 308 bp, Arabidopsis thaliana landsberg
acaaaacacagaaacatcaccaaatacggggatggaaaaaaataaaaaaaaaaaaaaaaaatacatctaaaaaactaaaagaaaaatgaaataacaattaccaaaaaaaaagagaaaaaaaaatacacattatgaaagcaagccaaataaccaaattcaattgcaatagaaacaattaagaactaacactgcaaaacactgcaaaaccactcgcacaattaagaaaaccataaacaacagaaaaagaaccatcacaaaccatgaggaaccatcataaaaacctggaaaaacccaaacatttccaccaa

SEQ ID NO: 57906 - DNA, 1383 bp, Arabidopsis thaliana landsberg
atcaagtgatgttttaggaaaatggtcatgttttattttatttgatgattttttggtagaagaattttgaaaaagaggcgtgatatagctattgtttctttatgtagggactgtgagagtaaataagacaattcaattatctcccgggatgccaaagatggaaacagacaagtttgtgtgggtttgtctgaagaacaaagaatctcagaaaaacatattccaacttatgcttcaaaacaataactcgatcgagtcaacggattggttgttgtgtaactctgtccatgaacttgaaactggagcgtttggattgggcccgaatatattaccaattgggcccattggttgggctcatagtcttgaagagggatccacgtcactaggaagctttttacctcatgaccgggattgtctagattggttggaccggcagattcccggttcggttatatatgttgcctttgggagttttggggtcatgggcaaccctcagttagaagagctagcaattggtctagagcttaccaagaggtaatgatttggacataaccgggtttgtgtgttccggattatcctacttactctatgcgtgtctattatctaataagttatgttgatccattcaccaggccagttttgtgggtcactggtgatcaacaaccaatcaaacttgggtcggatcgagtcaaagtggtgagatgggctccacaacgggaggtcctttcttctggagccattgggtgttttgtgagccattgtggatggaattcaactctggaaggagcccaaaatggcataccatttctatgcatcccttattttgcagaccaatttatcaacaaagcatatatatgcgatgtgtggaagattggattaggacttgaaagagacgcacgaggagtggttctgaggttagaggttaagaagaagatcgatgagatcatgagagacggtggagagtatgaagaacgagctatgaaggttaaagagattgtgatgaaaagtgttgcaaaagatggaatatcttgtgagaatcttaataaatttgtcaactggatcaaatcacaagtgaattgatagagtttcacaagaagaaatgaaatgtatccaattcaagttttcaacccaacatcaaacaacttcttagtgtgtgtgtatgggaaaattatgaagagaacaacaaaaaaaaaaaaacagaggatctctagcatttttccagtagaggacaaagagtaaatggtacacttattttaccagcgatgatggtaaattatggagatacagtaagaaaaacttaaaaataatgaatccatcatcaccttgttctgctctctccgcctacggaatctccccgtgggcgaaccttgcgattcagtgaccttt

SEQ ID NO: 57907 - DNA, 886 bp, Arabidopsis thaliana landsberg
tgttacattcaaggatccattgatttcatcttcggcaacgctaagtctctctatcaggtaatttatatattttttattaggttactttttgtgttttggtttaatggctccaatataattaagttccatgttgtattgtgatgtgtaggactgtcgaataatatcaatggctaatcaattgagcccaggttcaaaagcagttaacggagccgtgactgcaaatgggcgtagctccaaggacgagaacagtggcttctccttcgtcaactgcacaatcggtggaactggtcacgtgtggctaggtcgtgcatggcggccttactcacgtgtggttttcgtttccactaccatgaccgatgttatcgcacccgaaggctggaacaacttcaacgatccctctagggacgcgtaagtacaaaacacaatttttctataaatttgtttttttgttataaggaaggttgattaatactaagtgacattgtttttgtttacaggactatattttatggagagtataattgttcgggtccaggagcagatatgtcaaagagagcaccatatgttcaaaaacttaatgagactcaagttgctctattaattaacacgtcttatattgatggagatcaatggttacagttttctgacctttaaaggaaatatatcaaccaaaactcgttggaatatactcttttttttttatatattttgaatcggaacattatgattggagaaagtgcaatttttaccaatgatttaaactgaatcattgcaggttttcaagttcaaaatggttaagaaattatctctatatatacgatacataacctccagttataaagattacaatcgaattgaaaagtctctaggaacaaattagaaatag

SEQ ID NO: 57908 - DNA, 888 bp, Arabidopsis thaliana landsberg
  unsure (1)..(888): unsure at all n locations
gaaggtagacatgagaaaatggaacggtccctgtaaattctattcccatcataaccttttttgctacccaaaaaaatagtatgtcatgcctgtccaaataaatgagaaaggttatttaaaggaagtgatgagaatttcaaaaccgcaagctgcaactaaagcgcattttcttttcagattttacttaatttagacattagttcttgccttctnnnnnnnnnnnnnnnnnnnnnnnnnnntaaatttttttcttcctagtgaagggtttacaacaatagccctgatagtagcagccattgttttcctgatcgacaaaaagaaaggaatgtaccctgtttctaacatatttgttgggtagaagttattgaaatccttcgctgctacatcaggccagccaagagtgctgaatggccacaacgagctgcagaaaaaaaacatctaaataaataatataggaagttaatgcaaaatgaggaaaactatgttcagcgtcatatatgaggaaacgcactaattcatggtgactattccgaggaaactgatactttcacatgattaaactagtgactatttctaaaacaaagacacacagaagaaaagtaatctccaaataaatgaaaaactaacctggaaaaccaggtgtcaagaacatctggatcctgatatatttcaacatcttttccatacttctcaagggctttctcaagggcttcttcagcacttttagcaactatgtagtcctcctcgcaatcctttccaaccacataccaaactggtatgcgatgtccccaccacagctgccggcttatgcaccaatccttaatatttgtcagccagtgattgtatatctgcaagtggtgacaggaaataaaagcaaaagcaaaagta

SEQ ID NO: 57909 - DNA, 1330 bp, Arabidopsis thaliana landsberg
  unsure (1)..(1330): unsure at all n locations
ttaatagtgattacaatcattttttaggaaaacctttggcaaaaagttcgcccaaaaaggtccccccggcgaaaggaaaaaataaaattatcgagacttccttgccctggacggaaaaatacagaccgaaggttccaaatgagattgttgggaatcagtcgttggtatgtgatcgaaactactgtatgttggtttttgttcaacgacatgaaaatgatggatcctttatcaaatcgattgcaggttactcaacttcacaactggctgttccactggcatgatcaatttggaggtactggaagtaaaggaaaggggaagaaattgaatgatgctggttccaagaaagctgtacttttgagtggaacacctggtattggaaaaacaacatcagcaaagttggttagtcagatgcttggtttccaggcagttgaggttagctcatgtttctttaaatttcattggttagtgatacaatttcttgcacatgcttgaaaacaaatgcaatctgctttctatttaggttaatgctagtgacagtcgtggaaaggcgaactcgaatattgccaaaggaattggtggcagcaatgcaaattctgtaaaagaacttgtcaataacgaagccatggctgccaacttcgataggtatgttggtgtttgactgtttgttttattccccctaatgttgataactggttctagatgcttgtagttttttcctgacttggtggaagattcgatcttcaggtcaaagcacccgaagactgttctaatcatggatgaagtagatggaatgtctgcaggcgacaggggaggtgttgcagatcttattgctagcattaaaatatcaaagattcctatcatctgcatttgtaatgaccgatatagtcaaaaactgaagagtttagtaaactactgtcttcccctcaattaccggaagcccacaaaacagcaggttggatttagatgattgtttgtcctttctgcgtttttttaaggattatgcacaggattttcattctatgtaccattattagtccttgagctcttcattatcttttcgatttgtcttttattgcagatggcaaaaaggctgatgcatattgctaaggcagaaggccttgaaattaatgaagtaagattatgtactttgtttctttacttccactagcttttgtaagtaatgctagccagttccatataacttacatctgcttgggactattgtctttgcgaaaaatctggttcgtgtcagcccctnttactaataagaagtatgataatagaagttttagatttggtgtgaagtttaagtgtcatgcaacgctcgttc

SEQ ID NO: 57910 - DNA, 951 bp, Arabidopsis thaliana landsberg
  unsure (1)..(951): unsure at all n locations
gaaaacttcctgtgctttcctcacattcttggatttacacaacgcactcaacaacccgttgaacgccacaagattcggcggcaaatcatacttctccatcacattaaacgcgtaaatcgcctcatccactttctgcgccctcgcatacttcctcatcacgatacaaaaagtctctacatttagcatcttcttcttcctcattgcattgataagatcccacatgagcttgtactgccttatcttcgccgtagactcaatcatcatgtggtacgcacgaacactatgctcgtaatgccgttgcttctcagaccattggaagaacctgtatgtcaacaaaccagcattcctgaatctatttaaaacatcttctacaacttcttgtgaaacccttaacccactttgatctaaagccgagtcaagcaccaattgcggagaagacatcaatactttagatatgttcttcgccacatccgcaacatctctcacttgttcgcttgaactatacagcctcgcagacagaaaactcttacagcagaatctggattgacgattgataattctgatcgtcatgttgaatctaacccagaccgtagcagaagaactacattcccatcgcataaaagaaaaaaaattaaccagctgacgaaaatcaactgatctaatcctaaaacgcttcattgaggcatttcgtcaaacagttgatgaacattatattattgtgcacataaacaaatacacaaatctacttgatcagaaaagattatgtatttacctgtatgaatcaagtggtgtctgttttcaggnnnnnnnnnnnnnnnnnnnngagaataatccacgcggcgacggcgtcgaatgacgaagactgaagagcgactagtatacgccaacgttttggatgtgagataaatttgccacgtgttcattttgtcaatgtcacgtgttcttttacta

SEQ ID NO: 57911 - DNA, 1439 bp, Arabidopsis thaliana landsberg
agttgtaagtattataaagtcatcttctaaaaaaataaagaaaatcaatggtcatattattcatgatctacaatatacaaaaagagatatgtaaattgtttttaaaaaaactattctttaaaaaagtaatatataatttgtatagcatatgttgaagaaaattttattagctaaatgttcaaaaaaaataactcatttacttaagacattttatttggatttatatgcgaaggttttataatttttaaatcgttgcaattttaggtttttaggtgtgactacaaaattttaggttcacaccgatttactcgtttccttcttatgaatactaagatttggagtataaatttcaatgactcttcaaaatacaagatacaagtaatttattatttatacaacaattttgttctcaaccaaagatattaaatctactgaaatttagtaatgaaaaatataaaagtaataccctttttgtccagtacagagaaaaagaaagtccaaatagactattaaaacgggcccctattaaaactcaaaaaaaaagaaatataatatttaaaaggcccaaacaatcaaggcccaacaataaatggcaagacgtaaaatatctggagaagcggcttttagtcaacttgacaaatacacgtagaaacgtaaaagttttgaatagtttggtactttagtgttgactgttgaccgcgacgaatccgtcggaaaccggaatcaccatggattttcctccgacgaagcttgattatcatgtagacatgttcaatcttcagtctcattccagatttctctccttatttaaggtcccgtcttcatagtaaccattctcgaagctcctttttaacagttctcaatgcttgaatccttcactctctgattcaggcgcaagatggacgcatagctctaatactagaatcagcggtgtttcatccacaaggtggtggccagccgtcagacaccggtttaattgttttctccggttcggatttgaaattttccgttcaagatgttcgatcgaaagacggaattgtatatttgaatctctatcctgatcttttcccgttgagtgattagtgcagatggattctagaatgttcgaaattttgaatggtgtgtgtgttttcgcttttgaaatcgtaggttctccattacggagttttcgaaggttcggatcctgaaagtggaattgatagtgagaaagggaaagaagtttacttaactgttgatgaatcaaggcgtaaactcaattccaggcaagtaactgttgattgaatttgattacaacgagagggaagctagatgaatgattgtagttttgaatgaaatgtcaaatgttggattcattcccattccgttatcagaaacactttttttctcagcacatagggtatagatacttcaaattttaagtgaatctgttccttttggtg

SEQ ID NO: 57912 - DNA, 889 bp, Arabidopsis thaliana landsberg
attagacgatgaatttatcatattttataggaatgttttagtatcaatgaatatgattttttgatgagataataaactcttttgagttcatttcgcttcatgtttattttgtaggtaaagtccaaattttttgatcggaaacacaaaattaacaaaagaaaatgttataataaaactgcttttgtagaaccacgagacaatataactatttcaaactgtacaaagtagtgatatgactacagtgagtctaatgtgattgagtgtataatcataatgtcaatttaaaacctaaaaaaatatttctttctaaaactatactactattcatttatattgtttccttcattatttgtcagtatgtattacttttatcgatttatcagtttctagacatgttcccccgagtacgatttttttctttaatgggcccaaatgtaggcacgcttgtggggcccatttataaaagacgaaaaaatttgcgccgatattattcgcggggacccacattctttaagtggcctctacttaaaataggaaagtattttcagatgcagaaaaaagaaactaattttgtttgtctaaaaaaaacaagaaactaaaatttgatttttacttgtagggtttctttaatatattcctctcttttatttttattttcaaacttgacaacataattaggttggctataataataatttacctataatacgtttttttattgagaataataatttacctgttatacgtgttttgcaaaaaaataaaactaaaactagaaatgtttttattacagtgtttgaatggtctgagatcgaatggtgctgatttgctatggtgtagttgggccttagctaaaaaaagattggctgcaccccataattgatatcat

SEQ ID NO: 57913 - DNA, 266 bp, Arabidopsis thaliana landsberg
ttaccaacaatggtgttatgaaaaaatgtcttgagttgtaccgagacaatcatcaactaatatgaagtctactagcaaacaatgtcttgagctggcagataccagcttatcttttgtgtagtgagcacaaataaaaaggtctattgaaatatcataactggtaagaaagcaaaatcatcagtataaactactaaagcatttagagcatatggaaaaggatgtctggtcaatatatctacctttcaggattttaaaccggggtaacc

SEQ ID NO: 57914 - DNA, 497 bp, Arabidopsis thaliana landsberg
  unsure (1)..(497): unsure at all n locations
cttaaaataaaataaatccggacttgacacaactttgtaccctttttcactttcctcaacacctaaaaaggaatttcttttaaaaaacggttgtagtcataattgcataatataagttttacaagatctatatgtatgtttatgttcaattgtggtgtgtgagaggtactttatgcttattctcctactactcacatgtaagcaagtcttcggtagcttctgcaccaaaggcaatcatgcattttgatcatacaatatctattttaaaataaaatttgatagtgaaaaatgttgtgtggtattattgagaggcattggtccagtcttgagaacatgtgtaatgtttcagtactaatctttgaaacaatgatttgccagcccatgcacatgctcgtgtcacatgcaatgacatatactcttcattacantgtttttctttctcttggtcttttataagaaaatcaacaatttcgtggacttggattttcattactcga

SEQ ID NO: 57915 - DNA, 1495 bp, Arabidopsis thaliana landsberg
atagagatccctctatgatttgggcgttttggttcgctaatattggcttttatagggtgataatctggaatcaatggttatgttggataagcatggaaatcggtttttatgttacttaccgaaagaggaaaaagcgacgagtggatggacttctagtcagcaaaatattagtactgtgatgatggaaacacagcaactggtgaagctaaagactcctgatgaattgcttcaaccacttagtgaaaaatgtctttttagggtaagcatttcaaaaatggtttcttttgaccctatttaacaaattcttgaaactaatccctccctggatttgagcagcaagagggttggtggtcttatgagttttgtcatcagaagtatgtgcggcagctacacgttgaggatgaaaacaaggttggcttttattggttctcttttcttactcttctttaatccttcattgaatcacaatctaatggtatggcccttgtatcctgccactgcagattgttcaagagttttttttgggtacttttgacccagaggcaactgcggcgtttaatcaaactgtttctgatgcttcaactgatgcatctcagaggtataagctgaggttttacataacctttatagcagcagaaagatatatctcagctaatctgttatggtggtgtggttgcaggtatcactctcatgtatacaccaatgggaccacctgtgatcttacaggatcacctcgcgaagtcgaggtatgtaatctagtttactacattgcatttgggctcattgaattatgattcattatgctcgaaattgctctatgcaagagaggtttgtatgcgcagaaacaagggcaatggtcacttcaatcactgaattatcaacttgcaagtacgcactgactgttcaatgcccaaccttgtgcaatcatccgtaagcaaaatctcatttacttgaaaaccagttgtcaaagtgaatttactcctgctccattgaaagaccatgtcgtaacggaaacactagtgtaactatatgtttcatcttgaatgctaattaccaaacacgagtcactgctttataagtaagcttatgatccgttagtttgttaaccttgttcttgtggaaattgaaggctgttccagctagagaaaccagtgtcacacacgatccactgcaatgcgatcccagtggaagaagacgcaacaagaaacaaggaagaacaagcagtagacgaatcacctaagatgatagctgattcttgaaaaccgcctaagtgaatcacctaagagtaagagttaacagcgactgtatatacaagaactagcatatctccattttcagtgttacccgctgtagtgatcatggtttcaattgggatcgcttgctggtaggatgatgatactctctctgtaattttttgcatacttaaaatagcatttcaatagaaggtactgataaaccacttgtgaagcaaagactgcaagcttcatgtaacaca

SEQ ID NO: 57916 - DNA, 385 bp, Arabidopsis thaliana landsberg
  unsure (1)..(385): unsure at all n locations
atttgaagaaacctgaagaagaacaaaagcatatgcacatattaaacttggacaactaatcggatgtttgcggcacaggagcttcagttgtattaactgatggtggtggccgcggaaatatccaaaaaaaaaaaaaanaaacaagttactttctacatcatcattatttttagctaattatagactatcaaactcaaaatactaactccggccaatgtctagagattccaagttttttctaaaaaatactaatctgtccccaactagaccatgaaaaatccactaatctataatttcaaacgaccaaactagaggtgtataaaaccattgaaaattgcccacaaaatacgattaagtacccttacgatacgtccccaaaaaaatt

SEQ ID NO: 57917 - DNA, 814 bp, Arabidopsis thaliana landsberg
ataaatatttttcgaaaacgtttatgagccaattgcccttttacttcttaatgtataggaattaacattctaaggaaatttctatttttccagatactttcgcatcacgttttccatttttttaatttaatatttggaaaaaatattcaacagatttaaaactgataaaatctttataagatttgttccctttgtttaagggaaaatttccttatttttctcgaaccttatatgtgcctaaaaccctagtcgataagcgagagtcgtgtttccttgaagaatgaattcgtgtgatattgttccgatggaagcagagctaagtccaggagccatcgaagagtggctttcgacggtaaagcatggaaagatgacggagaacggaaaacgacgatcggatttgtccatcaaggtgaagagacatctctcggctcttggttgggtaatctcttactataacaaaaggaacaagaaagagcagcgttataagtctcccaagggaaagtggttctactctttagctaaggcttgtatgagttgtgtcgaccaagactctcaacagcaactacaaattgttcccaaatatgacttgtcttgccttccaagcaatattgcctcagagtctagttctgatgtttcgaatcaaaaacagaagaaaagtaagaaaaggggtagggtcgaggatttggatgtcaaaagcacagcttcggaaaaagataatcatccgtctgctgatatgatcaaaatcgttccaaattttgatgtcgcacaacaacaactaccgaagatgataataatgtatagagagggttctgat

SEQ ID NO: 57918 - DNA, 1846 bp, Arabidopsis thaliana landsberg
  unsure (1)..(1846): unsure at all n locations
gatgaagcaggaataacaatatatatgagtaatagtttattagtttaatggttttatggtcgtaagtttccttacgtcgtctactatgaagcggtctattctactaagttgcggttgtaaccattcaagtgaatatgccaacaaattttgttgtcccgtttgtaaagactgataatcagctgcagggatgataaaaagtaaacttttttgttgtaaagtagagagaaagcgaaaaacagagaaaatattctaacctgattttcgtatgatgatcttatgtgttacaaatgcctgcaataagggtagtgagaaagaatcatcctttgaaataatcaataaaattttgtaaatcctgaaatgattgtatcaaaagagatctacaaagcatttcaagaagaggctctaagggttcacatcagaatttgacctgccaagaagaaggcatgaattcacgaaatggaggttgctgagctttacttgcaacattccctgaaaaatggtcgtttgaggagaccttcctgaaatttttgggaagtttgagatgaagcgactatagcaacaaaaaagaagccgtatacagagcatgtgattaaccaactaaccgattattctcatttgctgggtacttttcttcgtaaattgtacccttagtggcaagtactaccagcgaatgtaccagcaggagcttcttcaactcttgcactatcgtctccaccacattcgtaagggacaaactcttcctatatatcatgaatataagtctcacataaaaaggatcaaactcaaagttcctcaaactctctaacatgttgaattaagtaagctaaagacacagaatccaactaaagcaacctttatttgtatagaaacagagaagctgtctctttacatacaccatgtcagtatttttgggtttcctgagtctttatgtagatatcttacctgttatgtgtctccaatgccaatgatgatgatagacgatcagtccagtgaaaagcaccaatgctggggaaaagattgcaaaatagttagctcaaattcttcctgtcagcttgctagatagtagtgtgcataaaaccctacaatgcatctgcgaaagttacattggactaggtcatctagccatatggcatcaatagtagcgccactcatgtaacccttatctaacctatgatggactagtttcagcatttagagaataaacagttctggaatggtcctggaaggaatcttagcatccgtagatctaactgaatcagaaactagcagaattcaaagacaaacctgtcaatcataagcactccgacttgacttccacacgcctcctgttgttggatccggtaatgcaatgtctgcaacacagtgaaatactgatacaaacttttaaacagggtcctagaatccaaacacaaatccaacaatgtgagatacatcaactcaaaacattaccttgagactggacaatagttcaagactatcatagcaacgaacatacagaaaccttttcatgcatgaagcatataactcctcatcaaacacagtctttgtcttctcttctgcagatttgcaactcttaacatttgactcctcaagttgccaccatgctccatttcctaaccctgatacgctaaaagaactaacatttgaacnnnnnnnnnnnnnnnnnnnnnnatgattgagattatctcaatttcataaatttgaaactgactgcaaaatccaaagcaagctaagaagaaggggaaaattcaaacgttgcacacagttagcttgaagaagacgatgattcagcatttgagataaccggagaacatcaaagcgacaatccggatttagcgctaaccag

SEQ ID NO: 57919 - DNA, 1346 bp, Arabidopsis thaliana landsberg
ttttcgctttgccttgtcctcatttctctttcacacaccttttctatcttatttagaaccactctgttcttgttttctcagtcattcctctgattcaatcagattcttttagttttcctgattctttagcagattcatgagctcataagaagaagatttgttgttgagtgttaacccagaaagaaaaaggaagactttagaatcatggatcttgtaaagccagaggagataagtcacccaccaatggatcagcttcagggtttagagtactgtattgactcaaaccctccatggggtacttagccttgaaaccattctctgtactttattggttgacttttcactttccggaatcctgatgatgatcttattgcaggagaagctatagctttaggtttcgagcattacattctggctttaggaactgcagtgatgataccttcaattcttgttcctatgatgggtggagatgatgtgagcattatttcttacattcttcactgtttcttaatccaacgaatctctgttgtgaattttgcttgtctgactgagattaatgttcctcccaaaaacaattgagtagggtgataaagtgagagttgttcagacactactgttccttcaaggtgttaacactcttcttcaaacattatttggaactcgtcttccaactgtcattggaggctcatatgcattcatggttccaatcatttcaatcatccatgactcttctttgacccgtatcgaagatccacaattggtatgtttgttcttctctttgaatagtattctcaagatcctaactccatactaatttgaatctgaaattaaacagagatttctaagtacaatgagagcggtacaaggcgcgatcatagttgcatccagcgttcaaattatcctcggtttcagccaaatgtgggctatctgttcaaggtatatatatacatacatatttcagtacttgttatcatataaaggtttatagattttaacgagttttcatcttaattttttttcagattctttagtcctattggtatggttcctgttattgcattaacaggttttggactcttcaacagaggattcccagtggtacattactgtcattcctctctttaaacatccaacaatcatcccttttggttcttattttatactgttcgtgttgtttgcaggtgggtaattgtgttgagataggactccccatgcttattctctttgtcatcttctctcaggttattttcctatgggactgatccaattctctttgatactgcatatgtttcttattaactgattttataatctgtgctcttgtgcagtatctgaagaactttcag

SEQ ID NO: 57920 - DNA, 1452 bp, Arabidopsis thaliana landsberg
acttactactatacctttttaacaataaagaaacactatttctttaacttgtcatgtctttatatcgcccctatgagaataaagccattacctttgtttgttttataccaaatgttctttatatataagtatatgccaccttactctattgaagtcaagaacatattaaaaacccatgcaagaagctcacagagaaagaccaaacacttttgtctctttcttcaaaacttttacatatgatctttgcctcttttcctacaatgggttttgcataactttcaccaaaaccctcctcaaaagcccttcacatattcccaacacaagaaaataaactctaaatccactttcaccaaatcttttcatttttcagctaaaatggattcaactgtgttcatcaataacccatctttaaccttacctttctcttacacatttaccagtagcagcaacagtagcacaacaacgagcaccaccacagactcaagctccggtcaatggatggactgtcggatttggagcaagctaccacctcctcttcttgaccgcgtcattgcttttcttccacctccggcgtttttccggacacgttgcgtctgcaagagattctacagtctacttttctccaacaccttcctcgagacatatctacaactacttcctctccgacacaactgtttcctcttcttcaaacacaaaaccctaaagagttacatttacaagagaggaggaacaaacgatgatgattccaataaagctgaaggctttttgtttgatcctaatgagatccgatggtaccgtctctcttttgcttatatcccttcagggttttatccttcaggatcatcaggagggttagtgagttgggtctccgaagaagctggtcttaaaaccattctcttgtgtaaccctcttgtcggatccgtgagtcagttgccaccaatatcaaggccaaggcttttcccttcgataggtctctcggtaacaccaacctctattgatgttactgtcgctggagatgatctcatatctccttacgctgtgaaaaacctctcatcggagagtttccatgtcgacgccggcggattcttttccctctgggcgatgacttcttctttgccacggctttgtagcttggaatctggtaagatggtttacgtgcaaggcaagttttactgtatgaactatagcccttttagcgttttgtcctatgaagttactggaaaccggtggatcaagattcaagctccgatgaggagatttctcagatctccaagcttgttagagagcaaagggaggcttattcttgtagcagctgttgagaaaagcaagttgaacgttcccaaaagcctacgactttggagtttgcaacaagataacgccacatgggtcgagatcgaacggatgcctcagccgctctacacacagtttgcagcagaagaaggtggaaaaggc

SEQ ID NO: 57921 - DNA, 411 bp, Arabidopsis thaliana landsberg
aacagctcgccgcttttccagctcaattgactgatttactccgcacctcatgcctggcaatgccgtcggggcttcggtaccaagttgcgcaatctctgattcttcttatgaatcgaaaggtatgtttttttatttattacgtgattgatacgaattctgagatgatcgtaatcgaaagtaatgtttttttaatatgtttgctttggtgtgtgttaaagagtcttgtcatcgaggatttgttagctctgtttctagatattcaaactcttggtgataaaaacttgcgaaagcttgctttctctcatattgttcaaaccattcgtaaaatgagtatcactgatccaaggcacaaatctcttcacaagattgttttctctatgttggaggtatttcttttttcttttccctttt

SEQ ID NO: 57922 - DNA, 336 bp, Arabidopsis thaliana landsberg
acccggaaaaagacgacacggcgaacatgaaaacggagaacgccccaaccaacaccaggggaacaagcaactaaagcagaatagtgaccggaaacacaaaaccccgaaccaacaaaagcgaaaaggaagccaccctcaaaggacacagatacccgacggccaaccgacgccaaatgcggagccagccatcgacacgaccacaagaaagcaacaaccgcgagggaacaagcaagacaacaagaaactcggcgcaaccacgaggaaacggcgacaccaagaggggcgactcagaccgcacatcaaacaccaataacaccccaggaaacggcacaaaaa

SEQ ID NO: 57923 - DNA, 324 bp, Arabidopsis thaliana landsberg
tttcatattgtctatgcgaccgtgatcctcccgcgcgaacgtctgtctggtattaggatatagatctatcatcatcaatcagagcctgattagcaatacgattgtaatcccctacaatggctaactgcctcggatagactattattaccttgtatctatagcctaggtctgaatccttgttcagggaatatgctcccctacatgactcttccatgcctgcctattggccatatatctcacgctccccaccctcaatgagggcgacctgattcaatacattcttgcactttctacatgaacgtatacaaatggcctttattctaa

SEQ ID NO: 57924 - DNA, 951 bp, Arabidopsis thaliana landsberg
tatgggagagccacaacggcgcagaaggtatattccctaaagctctacgacgctcttcaacgatcgcggcggagcgcaacagtccgggacacggccgacaaagtccttgcgacgaccgctcgtggtgcaactcggtggagccgagccattttggttagtcgattcggaacgagtctgaggcggcgtaggaataccaaaccggcgtcggcattagctgcggcgatcaggggaagtggtggaagtgggaggaggaggaagttatcggcggtgggaaatcgggtccgggttttgggtgggttggtgccgggttgccggagaacggcgttaccggagcttttggacgagacagcagattacatagcggctttggaaatgcaagtccgagccatgacagctctatcaaagattctgtcggagcttcagccgtctactaatctcggctcggctttatagccgagtgtataagccgatgaatttgtttcaattaattcttttacgattttatcgtgggaatgtcttattgtttttaatgatttgtttgccctggaaaaaaaaaaatgtcaaaatcatcacgagttggacgaaaatactatgtttttctaaaaaccttataataggattcgaaatattttggtgtcgtttcacaagtttgaattgtaaatattttctaagaaaatgaaatttctaaaaaaaaatttgaatataataagtgtttcaaatatttactagaggcataattccagaaattaacttttaaagtttaaacccaacgatttgtctttagtccacatatgtgctgatgctcatgacaactttgtatatttaagataaatccgtaagtaaaaaaattccatcgagaatttaaatgtgtcaatttggagatattcctcaagaatctaggttccaccagttagatataaacattagaggttattctaaaataatatcaaa

SEQ ID NO: 57925 - DNA, 1158 bp, Arabidopsis thaliana landsberg
cgaggattcaaacaatggagaaagtgacaaggttgttgatgagagtgaaggtggaaatgagataagtaatgaggaagctagggagatcaattacaagggagatgatgcgtcgagtgaggttatgcatgggacggaggagaagagcaatgaaaaggttgaagttgagggagaaagtaaatctaatagtactgaaaatgtcagtgtccatgaagatgagtcgggtccaaagaatgaagtattggagggttctgttattaaagaagtttctttgaacacaactgagaatggtagtgatgatggtgagcaacaagagacaaagagtgagttggattcaaagactggtgagaagggcttttctgattctaatggtgaattgcctgagactaacctgtcaacttccaatgcaactgaaactacagaatcttctgggagtgatgagtcaggatcgagcgggaaatccactggttatcaacaaacgaaaaacgaagaagatgagaaggaaaaggtacaatcatctgaagaggaaagcaaagtcaaagaatccgggaaaaatgagaaggacgcgtcctcgtcccaagacgaaagtaaagaggaaaaacccgagagaaagaagaaagaagagtcttcgtcccaaggggaaggtaaagaagaagaacccgagaaaagggagaaagaagactcttcatcccaagaggaaagtaaagaggaagaacctgagaacaaagagaaagaagcgtcttcctctcaggaggagaatgagattaaagaaactgagataaaggagaaagaagagtcttcgtcccaagaggggaatgagaacaaagaaacagaaaaaaagtcttccgaatctcagagaaaggaaaacaccaacagtgagaagaaaattgaacaggtggaatctactgattcttcaaacacacagaagggtgacgaacagaaaactgatgaaagcaagagagaatccggcaatgatacttcaaataaggaaacagaggatgatagttcaaaaacagagtcagagaagaaagaggaaaataacagaaatggtgaaacagaggagacccaaaacgaacaagaacagaccaagtccgctttggaaattagtcacactcaagatgttaaggatgctcgaactgatctagaaactcttcctgaagc

SEQ ID NO: 57926 - DNA, 268 bp, Arabidopsis thaliana landsberg
ctgacacacttacggatcccaaccataatacatttagtccttacatcgaaagaccaaaaaacaacggggctgtgaacttctaactttcacaacccaacaatccctatagtaacttttataacacctatatctacacaataccaacgtctaaataatctattcaccaccctttcactgatcctctcccttctgaaaattataatcaaactagcttatatcctttaaaatcacacaaaattacttttttcaataagacaacaattattac

SEQ ID NO: 57927 - DNA, 1209 bp, Arabidopsis thaliana landsberg
  unsure (1)..(1209): unsure at all n locations
aatcaagtgaaatagaagagcgagtgtgaggctcaggatgtatagcctgagaaaacgagcaatgttttagctgaaaatggctggtaagagattaaaatgcaagtgtaaggcaaacagtcgtataacagaagtgatacgagcgaggaacagtaacaagtgataattgaggaagaacttctggttataggtgtagaagatgtaaacaaggatgtgaaactcgtacactcagacgatataagattggctgagatgcctataaattgcactctctttaaacttagggaagttgttcatgagcgtttccccagctgaagcgcagttcatataaagcacagggaccaagaaggatattgagtgacaatcacaacagatgaagagttaagaatgagtgaggtgtcatcaaggtcacagggcactatgaggttctatgtagtggaagttagtcctgagcaggatccctttttcggaagattagttgagatgaagaagctcaaaattaccgctgattcttttaaagcaaaggtaaacggaagaggtggatgtaaagttgaagattggatgattgaatttgctcatctttttaagatccaggccagaattgattctgatagatgcttgaatcttcaagaacttgggatgaaacttaattcagaagctatggaagaagtggtaacctccgatgcagctcaaggtcnnnnnnnnnnnnnnnnnnnnnnnnnnnnnnnnnnnnnngctcgatcattgttaaacttgggatatgtgcacatgtcaggggcaaggaaaaggttgagcctcctacaaggtgtttctggagaatctgtttctgagcaagttaaaactgcttatgaatgcgctaagaaggagcacgcaaatgcaaaagaaaagtatgaagaggccatgaaaataaagccagagtgttttgaagtctttctggcactaggtctgcagcagtttgaggaagcaagactttcatggtattatgtacttgtcagtcaccttgatttgaaaacatggccgtatgcagatgtagtacagttttatcaaagcgcagaaagcaatatcaaaaagtctatggaagtgttagaaaatttggaaaccggaaaggaaagtgagccttctcaagcaggcaaaaccgattgcatgacacatgaaaaggatctgggtagctcaactcaaaataacccagctaaagaagcaggaaggctaaac

SEQ ID NO: 57928 - DNA, 549 bp, Arabidopsis thaliana landsberg
ccatggaaagcaatggaccgaagtaatgaatggaaatgatttcaggtctgttggtttggagttgactcttgacgattttcagaaagttagcgatgcggttccatttctagcagatcttaaacccagtgggaagtatgttatggaggatatacataaggtaaggctttggcgaaatcgttttgcttattacttatctgtttttttattggtcagtttgtaagttttgttgtttaatctacagataggtggtacgccagctgttctccgctatttattagagctaggattgatggatggtgattgtatgacaggtagaaatgctcaaacattttataaactgacttagcaatttggattgatgtgaaatggcataactacgcttttgtatctctaccagtgacagggcagactttggctcaaaatttagaaaacgtcccaagcttaacagaagggcaggtatttgtaatgttattagttatctcattagattctaccgcctgtttcttcttgattatgatggttgttagttatacaggattctaattaatt

SEQ ID NO: 57929 - DNA, 858 bp, Arabidopsis thaliana landsberg
cgaggatagagcaagttacatcaacagaatggggtagaaaccgattcttcctcaaacaaatggcctgaaacaaagaattacagcaaagatcattctctttttacatagcgtggcacttgatgatagaagaaacaaagaaacacaaacctcggaagtaagaaacggtctgtattgagtaagtctgtttgccgaactacgaagacaactgcttctaacaggaacctgtaaaagagaaattaacataattataaacatataaagatggaacaaaacaaaacagaagtcataggaacacaagaatcaagaacaatttcttattcttacacaagttctttccaaggtttgtgtacacaaccgaattcaaaagtaaaacatgtaaaaactaaactctcaacaaaaacatacaattcgaacagaactccatcattttaattatatcatttctattgtcagaatcaatcaaaaatacaactttctatatctaaaacaaaaagaaacaaaaaaaagagttaaagggtaatcacaggagcacgagagagcaaacccagaagattgactctcgccagagacgaacttcgacaaggaattatcaaccgagccatttaaaagaacacccaaattccaaaaatccctaaagcaacaataactcttaacaataaaattaaattaaaaacacttcctccttgttgcggctaaaatctccaatctataaaccctagatgataactctctctactcactataaacagagaagaatcaaaagagaaaacacagagcagtaagttatggacttttataaaactaatggatagaatttaaaatgaaaaatatggccgagaaaaatcgatataatattaa

SEQ ID NO: 57930 - DNA, 1144 bp, Arabidopsis thaliana landsberg
actcctttccaatttatctacagcccaagcatttaatattttgattgttttaggttgtccttctaagtggatagctattatatttcaaaaccaattgactttctaaataagtgatttactaatcctggcctcttatgctaatcagtagggcttaagaagctagttcatgttctttctttctttgagattttacagccataagaccgaaatggttactgtaatgcttctgtatctgtgtagcttcgatcaatcttggggtattcttgtactgatcttttaaaaagaagaaagagaactgtttagtagagaaaccaagaaatcgtaactcttctctatcactaatatcatgatatatttggggataataagttaatcatataatgacttgaaatggttcgtctcaaggtttctgattcagttcttgagactttgttttgtaactgtttccagtagaagaaactgatttttggtttactgccttatttcagaccagggtcgtttgaccacagaggagacatacatgaaccattcgattcaagcgggtcatacccgaagaagtcccaagatgctgcagttggtgcccttgtgagaatgctgaagaaagcgccacctctcagacaagatgtctctgaatcttccagacctgaaatttgctcgaacaacaacaaacccgcaggggctcatgagatagcagtagcgtctatcacagcctcggggattgctctggcctcaaagacaacagctgatgctttggaagagttgaggtcttacaaagaaatgaagaatcatttgttgcttggtcaatccacatcaaacccttcctcggttactattacttcaccctttgatgtttgatgtttcagaatcttgacccattttgggtttcgggtagggctttttttttttaagattctatcatataaagtgggcctatgaaaataatattaagctctctactctttggatgatattggcccatgtaaataaacttatacccaggaaaaaaagaaaaaaaattccatgtaaataaaatggtaaacatatgtcaactactatttataatcattacaaagctttcatttgttgtcaactaatatgaaagctttctacaattttttattttcattttccaaatcaaatttaa

SEQ ID NO: 57931 - DNA, 957 bp, Arabidopsis thaliana landsberg
  unsure (1)..(957): unsure at all n locations
ggatgcacttgtgaaggcttttactagccaaatgaagtctgcatacacagcttcgagttttgtaaaagaaatattcaccatgggatatccgaagcttgtgtctatgatagaaaatcttcttgaaaggatttctcgtgatacagatgttaaaggagtgttacctgccattaatttagaaaggaaagaacaaatggttgcatgcattgctatattccagactgctttcttatccctatgctttggccgcttgtcagaccttgtaaactcgatattccctatgtcgagccgtgggagtttaccttcgaaagaacagatttcacaggtattatcacacattcaagatgagattgaggctgttcatccagatgctcgtttgactcttctagttttgcgtgagataggcaaggcccttagtaacctagctcaacgagctgagtgccaggtatgatagacctcttgttggttattgtcctcttgttatgtgcgatagctcccttagtatggtatcaatttgtgcttgtattatatagaaattcttaaagttgcatacagttgtataggagagattgagtacaaagtaataattcgtggggcaattataatttcttccagacagaaatgaagagaattagagctacatctacctctactatgcaaatatatacgtgttaactacctgacataattagagttaacagtgtaaagaagttattctgctacttatgcgtttatgtttgaaatgtaacacagctacacttatattgcagatttctacaggccctgagacgcggcagatatcaggtcctgcgacttcaacacagatcaggaacttcacattatgtcagcatctgcaaggaatccacacacatatctcattcatggtagcggaccttcccagtattgctactgatgtattgnctccttatctggctgcaatctatgatgcggcatgtgagc

SEQ ID NO: 57932 - DNA, 1045 bp, Arabidopsis thaliana landsberg
attccgatacattgcatgttctttttacagaggctggacaagaaaagaaagaagatgtcaatggagagggagagaagaaggagaatgcagcaggtggggagtcaaaggcatcaaaaaagaagaaaaagaaggataagcagaaggaggtaaaagaatctcaagagcaacaagcaaacaacaatgccgatgctgtagatgaagctgctgggtctgaaccaactgaggaagaatctccaattgacgtcaaggaaaggataaagaagcttgcatccatgaagaagaagaagtcaggcaaagaggtggatgctgcagctaaagctgctgcggaggaggcagctgcaagacgtaagaagctggccgcggcaaagaagaaggagaagaatcactataaccaacagcctgtgcggtaaaatcctgaatcaccaccattttgatcttgatggaaatgcaaatatgaacatgtatttcgccgtatattgttcatatgagtctctgtcctaataaatcttttgaagggtctggttcttagagttaaagacattgaatcctttttctagtcttattacaatgaacaggctaaagacaaaacttctcttttcatttctttttgaacacctttgttttcttaatatcagaccttttttaggttcattatgtcttcaatcagcttcttatctatggttcgatggtgttattttcttctttttttcgttcagttgcctgtgttttgattcatgccttgccacaaaatcttttttggttatatgttccaaagtgattccccacttgagggtaatgtatttttatttttgcaatcacgaataataacattaacctgtatttagtctactatgcctagttcatcaataaatatttagactccacctgaaccacaaccgcacttgattgtgcttcgttaaccacacttaaacgtgcttgactcgacctaaaactctcgatttgaacccctaaattaattcctttgctaagtcagtcggcccaagtgctttcttaacgatcataactctgaaccattctcatgtta

SEQ ID NO: 57933 - DNA, 457 bp, Arabidopsis thaliana landsberg
tattttgtatgaaacaaaccaatgaagatattgggtggggttatattagaattcatgaataaaaaagaataattagttttgagagatatatggattaaatgatgaatttaatctcaatatagaatattaagtatgatgtatagattcacttaatctagattcgaatgaaattcatactgggatttcatctttaacaagcgtgaagagggggaggaaaccacgatgcgcgcgcgctgctgaccttggcatgcggtatcgcttttttcaatctgtgcttatcgcgtgctctgggcagtgataaatatgagtggatccgtcaaccaagtgcagctttacttgtttattagtattcgtatggtgcaacacatctctctgcgtcttgggtttagcaggaggctggcaaatggcgtgcccggtagaggctccgtttcgttctcaaacggctggagatattcat

SEQ ID NO: 57934 - DNA, 565 bp, Arabidopsis thaliana landsberg
ctatacaaattacaacaaaaggtcttcatgttttcttgttagaatcatcccatccttttcattttgttgtgaccatattaagtacattcatataattaactttgaaatgaagcttttagcttcaaacttcaaatccatctctcttttctttccctcatccaaggctcaaccgattttccaatggtttgatgttagtctgcctacgtggtgttccaatctcgcaagcattcactctcgctgcgaatctaagagagcagagagactcaccggttgaagaagattccggtgcaatgttcacaaacattagcgtctttgcgtcaccgcctaagcaaggctgaattaaaaatcaaacatagtttttattatgatgccacaaatcaagaaacaaaagttttgaaagatgtttttaccgtttggtttggtacctggagaagatatgtgagctttgagtttcggaatggtacatgatcttctttctttgctaaggcgaatatgacatcgcctagcgacgacaaacttttgttgattgcctgaagaaagaatgaaagtttaagagactaaaaat

SEQ ID NO: 57935 - DNA, 903 bp, Arabidopsis thaliana landsberg
aaagtttttcatgggaaaggatctgtgcacgtctgtatcaaagccaaagcccaccttcgaagcttccctttcttttttcttctttatcttagtagttgtctcatagctgtaacatccaagtacattttcatttttggatatttaataaccgacatattttatacataaaaattcttttgtattacactgttttgtgttttgtatttttgtttacagttagctgtcattgagtgtctaatgtattactgtgaaatattttttttttccttcttgaaaattgtgtttttgctaattcgtaatcaccaaaacattcatgcttatatagttttaagtcggacgacaaaaatattagcttagatcgaattgtacggtatcaactacattgactacgacatcaatcgtacatacataacaaggcttataccaaccagactacatttgtataagttgttaagtctgaatacttaaattgaaaattttaaattaacgaaattgataggatatttatacagacaaatattttgtttcaagaactttttcgataataattgttaggtatcacaagtcacaaccacaagtaataagtaaattatcaaaactgtatattcttgtataagacttctgagtttacgtttcgaacacaatgtctgcaaattataatatttcatacacgacaagaaaattcatgacgtaaagaagataactagggacacataaaaaagaatatactacttattagataaatcatacaaaaactcatccaatgagattgcttaaatagtttcatttataaaaaaaaagcaagactgaatttgagtcagaaaaattaataataaacgaaagagaaaggataactaaaatttagagaagcacgtggtttcagttttaaaacatttgagctgt

SEQ ID NO: 57936 - DNA, 1079 bp, Arabidopsis thaliana landsberg
  unsure (1)..(1079): unsure at all n locations
gagccaaagtatgtgaaccaaattaaaattagtgttaaattttgttttggttattctcgtgaaaaggaggaatagctcgaacgtcattttcacactttctttaacgactccactccagcattaattacccaaacagttctgttgcaaaaacatttaaagagagaccagcaaaagttttgagttattgtctcttttgtgtacctaatccattttttttttttttaaagaagtaatattacggagtatattgctttcttaatgatatgtcagaaatgtcccgtgtaagtaatatgaaaaccggttttcaaatcaaagtgcactttctctagctcacctgtgtttggtcgaactcgaatccctctgaccactactaacgtaaaaaagctcattgcattaatgtttcgaccgtttcatcgtttattatactgtcttaaattaaaatcattaagcatttaattgatttgtcatttcgaaatttatgttgacaaaaatgactttacgatcaaaccggtttgattaagtaacgtagactaatgctattatggtgatatatatgcaaaagataagaatagtttatcaacgaaaggatctataaattatgcttgttcgacttcttagcatagaaaattggtaatttatttacacctcatgccgttaaaaaatcacaatcacaagtattcataacctaaaattcaacaaagaaatcaattacgtattcttcatttttccacattaaaccagaatcttaaaccaaaccaatccaaaaaagcgacatttaaaccaatccggttatcaaactatctctctctcactcacacacctttctcttttcgcatcactttccctctcattcttctttcttatctctctctctctctttctctgactctctccttgatgcctcgtgactgcaaccaaagcaatttaaaaccgccgcacttctcatgagtcttcttcctcatcatcatcatcatcaccgntaactgtaatttatcttctncgatcttcattctccgccatgcgctcgccgcatgctttccgtaacggcgaatctccgactttacgggaccatactcact

SEQ ID NO: 57937 - DNA, 596 bp, Arabidopsis thaliana landsberg
  unsure (1)..(596): unsure at all n locations
tcgggttccgtaacggcataccctacgcccgccccgcgagaaagtccgccacctcgtcgagcgcggcttagcttctggaagcagcgaagtgaaggcgtgccaaacgtgcggcaggtccggccaaatgctgagcacggcgcgccgtcgcgacgcagtcagtcgcgacataaagcgctgcgcgtcgtcgagcagatattccgcgccgctcgcctgcaacagggttggggggaagttttcgagcgtctcggcggatgcattgatcggcgagagctcggcctgctcgagcgactccgcgcccggcgcgtagagcgacatcatcatcgccacgcctgcggcatcgacgtggacgtcgccagcggccacagacttcggcggcgccacgtccagcgccgcgcaaatcagcgccagtcggtcaggcaccgcttcccccgccccgacaagccggacgcaggccgcagccgcgagatttccgccggcggaatcaccggccaagcccaagtggctcgccgctccgaccccgtcggggccgttcagagctgcccagcggagcgccgccagactgtcgtcgagccncgcgggatagggtgctcgggcgc

SEQ ID NO: 57938 - DNA, 474 bp, Arabidopsis thaliana landsberg
attttctttgtgacctcggggagacggtctcctccgggacggtcgtcctcaacctcctttgctgtctcaacgagcgctacgaccacctacgaacttggattgtgggtctgttcctttcccctacttctagaaggtccggaatgacttcatcctttaggagcccactaagggggtctcgcttcctcccaccaccgcataggctctctacagcctcggtcccggtgggccgtctcagcacccctcaccctccactcctacctctgggatcccgtcacctcatccacttgccccctctagccctcctaccggctatggtggaggtaaccattgtcggcacaagcatggtggtggtggctgcactggaggcggagatggtggttctggcaaggatggcacaccctggccattcctctgcaacctgtggatcggccatatcactatgtaacctggtccgacattttgtggccccacatc

SEQ ID NO: 57939 - DNA, 252 bp, Arabidopsis thaliana landsberg
tccccttcttctctggctacttccttcttctgcagctctttggctttccccccctctctggcctccttcccttctccatactcttatccctctgaggtccgtctctcctcttcccagttgtccttgcctcccacctttttcacctacccctcatgtactgatcgtctcacgacctccattcccccgtggtaacaccgggcgacgtgcacaagtgcgcgtgtgcgggagcaggtgctgttagcatgcaacagc

SEQ ID NO: 57940 - DNA, 994 bp, Arabidopsis thaliana landsberg
tgtgcatcaaaagatttcaaaaacaatttttttttttgatgaattgtaaattagtctgtctcttcagcttatcagatgttttagctaaactgcaagaattattatgtaataattttgttatattaaaaaaaaattaatatctaaactaaacaatccaaccaattgtataaaatattacataataatataagtctgagaacatatgaaattaacacaatctaaactaataaaattgagaaaataatattagtttttctagggtaaaaacgattaatgttagtttaagattatagatttaaactacaaaagggctcatgggaagttcttgaaccaaaaaaccgaacgccaatgactagtttcaagtatgtttttttaattatgtgaaccaagtagtaaaaaatcatttctcttataatagggttcttatgagcatatgataaaagttttggaaatatttggaaatcatatatataaagattgttttctataaataaaaaaacttcaggagtttacagctttttatttcctttaagggcttaaactattacgaatttatcaatttaacccccaaatgtattctctttccaatcggacaaaggacctttgcgcgcgcaattttatccattagcaacaacgccagaaaaaatctcgtcggaattttgaagagaatcacgttcgccggaagtatataccaccgtcgtcgcaattggcggtgcaatttcttttcctttcctctcgtgaatcaactaatgcttgttgcagatgaaaaatgttgttgaatcttcgtctagatggaagtagcttacatgttctctgttctacaaaaaccttaccgatttcttcgcctctcgataaattcccatctttcaagaaattgaagcagaattacgtaccaggaactcacgagagtgacaaaggaccacagagaagcaccagaaatggcgacagaggttgtggtaccgatgctcatgaagttgtcgccggaaaaaactta

SEQ ID NO: 57941 - DNA, 489 bp, Arabidopsis thaliana landsberg
tgggagtttaaacctaaagttggtcctgttgcggggtgcgggttgattgctaaacttgatcttcgtgtgtgcattggtgaaattgatgcatttgaggagtctatcatggaggctcataatcctagattctcttctatctctacgcaaaccacaactagagacattattaagtatttagtgagtgtcgcggtgagattgtctattgcttagggtctaatgtttcatgtttttctcttacatccggtatatggtctaaaaatgataaggaagaccaccttagtgcggttcgtcaatatattaatgctgattggtccttatagaacaggatcattggccttaagctagttgacgttttacattctagttacaatattacctatcgtcttgttcttgcgtgataagagttttctctaactcgagatatttttatctataacacttgacaatgcatcttttaacactaaagctatagacaatcttacaccttaa

SEQ ID NO: 57942 - DNA, 1297 bp, Arabidopsis thaliana landsberg
  unsure (1)..(1297): unsure at all n locations
tactggtattgaaacaacaagaatcctaaaaacccgcctagaaacttcacattatacttctttgttttggttcacagtaagtcagtaacggatacaaactccacaactattaatcttaccacaagaatgcgtatttcatcaagaagagtatgccctctctctgcagcttgccttgcagctgtctcaacagaaatgacgagatctcccatcataagctacaagaagaacgaccataatgagtaaccattggaaccatcctgttaaaaaccagtaaatcaaaaacaaacacttactactggaagcttcagttcagggacatgttgtgacatggaaagcacatcagtagcatgatcttcacctctccactctttgttgagtttacaaataaaatcatcattacaaagcatcaccgataattcaacagtttcatacccaccaagatcttctatatcagtctctcttgttttatactttgaatctttcaaaccattgaaagccaatgtcattgccataggtacattgagacgaagcatttctgcaatattctacattgattggaatttgataagaatctaaaacaacacaactagaaatggctaattgattccaaattcgattatcaaagaatactcaaacctgaatctcgagatcatcaggaagctgttcttcgatgcagatactaacactaagctccaattcctgtttcttcttcggagctctccttctaatcttcctgtattctctcctctccgcaaaaacctgacccggcggtttcggaagctttctccagtctcctacggtgctgcgtaaagcgtggaagctccgacggaacatggaagaaaactccgatgaagtaacatcgagacgattcacaagagcagttttgggggaagagtggaagaagttgggttggaggagaagaagggtggcgcgtggcatttcacgcgcatgagcagaccagatacgattatagcggagggttgggcagacacgagagagcattggagagacacggaggcgagagaaggaggcgtctctgcacttctggcttaaagggtggggagatacaaatactaaatcgaaccgagattattaaaatctaaaccgaaaatgatttttatcnnnnnnnnnnnnnnnnnnnnnnnnnnnnaggaccatatgagaaaaatgaattgggggctgggggataagaaagaaggggaaatcatgaaattcattgctttttaaaccggatcaacgatcgaaccggaaaaatccatgggtcgcattcgcatgtcaacacagttggaccgggttt

SEQ ID NO: 57943 - DNA, 1102 bp, Arabidopsis thaliana landsberg
tcattgtaaaacatttaaatttctcaacttcttccatgttctttgatttgttgcttgttcaattttgatatttgtctcagatcaaccaagaatcatacatatttccaatcacattacctttttactcgtcgtctctgatctgtttcgtgattcttcgtccaaagattatcctccatttttgtcattaatgggcttgggctagttagatgtacccattttaatttagcccatattcattgacacttgttatctagtgttgaacaaaagaaaaacgaagaataaagctagtgcatgtaacaacgtggctgttttaaggcctcttttgatacgtaagaacaacaacaagcccgccaaatccacacacagagacaacacttgtttctctctatctgtcctctccaatggccgccaatttctgcggcttgacgcttcagtctccgtttctctataactttagtcgcccaacgatcagatcttcttccttcatacggtcttcgtcttcttcatcagcctcttccaatggcaatcttaaagaatccttctctggttaactctctctcacttgtttcagcaaaggatcgagttatagaacccataagagcaaaatttgatcttgtgttatttatgcatttcctatttattctgtaactgaaacaagaatctaaaaaatctgccaaatgctgcaacatacaaatacaattgccttgtttcttgaaatgtgtgtgtaataagcacactagaattaggtcgtgaatctaattaagtagttgtctaattgatcagttactaaagtttccaaaagttagctagttttgtgtcatgtaagtaatttagtgtatggttgtgtgtgttttaggggagcctgtagcagatgttgtggtaattggaagtgggatatggaggatttatgttgtggtgcattgttacctagatatgcgcaggatgtgattgttttgcaaagtcatgaccatccgggtggcacagctcaatcctttgtgatccaaggttacatagtttgactctggtccttctctgttttctggtttccaatccgagggctctagcaatccactgctcaagctcaatgtttctcttccataaa

SEQ ID NO: 57944 - DNA, 507 bp, Arabidopsis thaliana landsberg
  unsure (1)..(507): unsure at all n locations
ctcaaatagtgaattctcacttcaacggaatcctaattcatgaccaaaccaaatccttttgcaattacactttatacgttcctacctgtattatgcagcattctagaaagggaagaacaaacctttagagtttcaaaaaaaaaaaaaaaaaaaaaaacctttagagtttcttctatatgattcttaaggcagacaagtatgaaataaagacaacaagacattgtagcttgggagaacatattgctgtgaagagtttacaaaataaaaataaagaccaaaactatgacagaaataacaagcaaaatgcttctttttttttgtaaccctatataaagataaacgtatcatcagttaaagaatgccgagaaagacagaaacacatcgatccgaggttacctcttctccctattttttcctctttccggnttgtttgttttcatcgttctctctttagagaccaaaattgcacatctgcacaaactccatttcgttatcaacatatttagt

SEQ ID NO: 57945 - DNA, 114 bp, Arabidopsis thaliana landsberg
tcaaatgttactgcaacatattcatatcaggatgatcaatgccatatttttgagaaaaccccccctgtaaccaacgcgaaaacacaccgtggcaggaccataggatgaccagat

SEQ ID NO: 57946 - DNA, 1346 bp, Arabidopsis thaliana landsberg
cgttttctttttccttctggaagagactgttaaagccattaaaaattaataaagctttaaaatcattcattgtgttttgcaatgatgatgtcacaagattttgtgaagataaataattctttacgacatgaagatacgtgaagagttgaagatagtcagatgactttattaaatttgatcttcgaatttatgtgttcacaaaatgaaaatattgcgtatattgatggaaagtgagaaccataaagttgaaaatacttacatgacgaataatatgatctgaagattggcttccatcacagcctaacatgaggttaatgttactgttccgttttttgtagcaggtcattgagttcttggtatccctttatgccatgtccgaggttgaatagtatgtttgtctaaccagtgctacctgttgagaaaatgactaacaagttgctgttttgctaaagaaaaatgactaaccagttgtttcatttccagtgacctaggattgttgtgttgaatgtcgtatgaggttaaccactaaagaaagtcaacaaacctttctcttggagttataccacgaagataattattataaacgtcatttaatactttcttctatccatattgggtctctgttgtgtagggttcgtcatgtcaatgatgtaagtgaacatctttttgctgaagatgtgaagtaaaaaatatatgaacaaagtttctacatgaagaagggtcaagaaatcaagatgaagtaagaaatctgaaatatctattcggatccttattcataacacaaatatacagagaaataacattctctttaattatgaggatatcaaatagtgaagcatcattgaaacacaaaagtgacatgaacctatcaaatcccacattgttatattaaacttacataagctactaacagaagagtgcataaacaatacctgtctacactaatatttgaaaagccgacaaagaaaagtgacaacttaaggagcgtaccaagttggctctatgacaacttcaaacaaaactgagggacctctgttcatacggacaatcggatctgaaatcaggaaacaaaaacaaaaaaggtgaaaagaaagccttcaatgatgtagatatgagtatatgcatcggttattagaactgaataagtcatgggaaaggaaactgttcaacttactgacattatcatctatgtaaaccctattaaagtctaaaattttgaagcaatttcttaaatttaaaagaaaaattgtgtcatataagttttttgattgatggagatgatacaccaactgtgagaaaattagaaacgcatagttgttaggctgatgaggcatcctcttagatag

SEQ ID NO: 57947 - DNA, 932 bp, Arabidopsis thaliana landsberg
tctaagaacaggaccaagcctacagccttcttaaaaggatctgaaatcttaatgttcttggtccactttaccagcttgtccaaaaactcgtcagcaatcctttcctgacatttcaccagattctttcatgaaaacaacagtacacaagaagtatagtaaagcttcgctatcctacttttatcaagggttcccaaggtcctacgacaactgatacttatcaatctatccgaattgctgatgaccagtcttacagataaacatatactgaaactctgtacctttgcatcggtggtttcatgtaaaagataagttatatattctacttgttttatgactagagtagcctacataattataacttaatttccaaaggtaacctttaattttacaacatataattgtgttaacggataacacataacttgttttatatgtgttaacggataacacataacttgttttatatgtgttaacggataacacatatcatgaacagttcggtgcagaatttaaaatcagaggtactgtagattataggctcacttacatgcacaagaagtcgagatgtggcactacaaatctgcccattcgtccagaaacaaccaaacatagtccattccacagctgtttagagcaaaatattagtcacaaattaaaccagcattttagaatacaaatatatagcatagttttcttaaggttccaaaagtacccacctttatcaatatcgacatcatcaaagacaatgatagggcttttacccccaagctccaaggaaactggctgtggaatgaaacataaaacaagattcatgtacagaccccgaaaaatcataggtcgaataaacaagccaagataactactagttccaaaggagagtaacaaggacacttagacttactttcaccaatttggcagcggaagtcataatg

SEQ ID NO: 57948 - DNA, 406 bp, Arabidopsis thaliana landsberg
tcggagaattcgtatggcttttctccggagagtctttaacggacaacgccaacaccggagtgatcaaactcggtgacgggcgggtcatgtgtctgacggagactcaaaaaggatcgattttagtcgaccatgagacgctagagacgatcgggaaatttgagtacgacgacgtattgtccgatcatatgatccaatcagcgcatccgatagtgacggagacggagatgtggacgttgataccggatttggttaaaccgggttatcgggtcgtgaggatggaagccgggtcgaataaaagagaggttgtggggcgggtgaggcgtctaagtgggtcgtggggacccggatggggccattcgtttgcggcgaccgataattatgttgtaataccgggaatgcccctgaa

SEQ ID NO: 57949 - DNA, 463 bp, Arabidopsis thaliana landsberg
gaaagacgtcgagcttaggttagtacaccatgttcgtatttatatatcaatatattttgtgagaatcagaagaaatagagaacaaagggtcagattttaataaagaagatatgctagtttccaaaaagatatatatgcacatatatattattagtctaggttatatatgttctattatttctacaagttttgttttctctattatttttacaagactacaagttctaaactggtcataggcatggttggtacttctacaagttgtactcttgaccattgcaatctaaaatcagcatacaatcatgtttcataaaatacaccaacaatcatgtaccaaaaaatctattttttttagtttttgataaattaataatatttttactaaaacaaaactccataaacaaaatcatcaaaatttttaaaaaaagaagtaaaaatgagacaagaaaactaatgatttaaa

SEQ ID NO: 57950 - DNA, 270 bp, Arabidopsis thaliana landsberg
  unsure (1)..(270): unsure at all n locations
agatgttgccggaagcattctctgggttggtaacggcagttgnaagcatggaagacaagtccctcacgtgggatatgttggttagctgcaatcctgatcctgggattggcactgctctgtccctcacaatccctgggaacacatttcaaccattacgtgtttttgtctttgtattgaaatctttgggtgtgtgagagacttacggtcgaagaaccattcttcgcagtctttgttgttgccagagccgatcatgtactgcggtcgaaagga

SEQ ID NO: 57951 - DNA, 316 bp, Arabidopsis thaliana landsberg
ttatttggacggggaaaaaaataactgacacgctgtggtttttgacaatagacaggagatctcaccgattatgacaagatttgcaatgaccgctgtgggaggtgcatttatactaacactacaaaatgtgagactataagaacggaattaacttgtttgagatggactatgacaaatatgcgtgcaattcaggcaaagcattattcaagttgtcataatgtggaaaggacttacggcaaatatttgccaaaaaacggtgtccgaaatgatcatatacatccattcgaatttccgatggatggatttgtcactaata

SEQ ID NO: 57952 - DNA, 464 bp, Arabidopsis thaliana landsberg
  unsure (1)..(464): unsure at all n locations
tgatgagatttgcgtgcaccncaatcaacacattgagtagagagacggaagactaggcagttaagtaaaaccatanaccagaaaagaatagaaaaacaaacctgttgtaaaggaacaagaggaagttgaatcgtagtcgggtaacagcctgggttagccacaagtcgtgccttttttatgtcctcccttagtatctctgttagaccatacacaacttctttctgaaccccgtaggacacttggtaagtataaccattatgaacacaacagacctaaaatcaaggaataacattgagagaaatgtacctgtaactctactgccttgtgaggctgaccataccattcttcatattctgcaatattacgcaaccggaagtcctgaaaagcgtattttagatgggcttataactgaaagaaaaggaacaaaaaaaaaacagttcttcaaggattaccgctgaaagatc

SEQ ID NO: 57953 - DNA, 903 bp, Arabidopsis thaliana landsberg
ttcctcgtgcttacaaattgttcttaattttataatatgataaaatatcattttccgtattgtaatgtaatgtccttctgtttcacaataaaattaatttaagattttatttgacaaaaagaaacaattaaggtacaatgatttttttaataactcatgtataaaaagctcatataaataccattttcatacaacttattagaaaagaaatttgtttgtttattgtgataaaaatattaataaatgatataccagaaaatttaatatttttagtgagtgcaatatcgttaattaaacgaaattaaatcacgtacaaaatattaaacatgattaaaaaaggatattaaagactaaatcatattttgaggataatttttttttttttaatatacaacatactcgtgttgcgcttctttctatacactaatatcttctcgagtgcgttttgctagaactagaagcctatagaacatgtgaaaaaataaagagttgttcaactgaaaaacctaacaaaaataacataattttttaattttatttttcccatgcaggtgggagaggagatggcgtcactcacaaaaatagcttgcccgattgtgatgacatcactcctcatattctcaagatcaataatctcaatgtggttcttgagtcatctcggaaaagtcgaactcgctggtggtgcactcgctatgggctttggaaacatcactggagtctccgtacttaaaggcctttccgttggtatggacccaatctgtggccaagccttcggagccaaacgttggaccgtacttagccacacgtttcagaaaatgttctgtctcttaattgtcgtctctgttccaatcggcgttacgtggcttaacatcgaacccattttcctacggttggggcaggacc

SEQ ID NO: 57954 - DNA, 848 bp, Arabidopsis thaliana landsberg
cacagatcactattattacggtggagagaaagttaaagtaccggaatataataggatatgaccggttagcggcggcaggaatgatagagctccggccaaccacggcggtggagcgaatgatccggtgaacgttgatcagagcttttcgggtagccattttttgttttgttttctctctctcttttcggcaggaaagtgttgttctgtaatgaaagtgggtacttatggacccattaatgggcctatacttgtcgtggccttctcttgatcacatatgattataactaatttttattctttttggcttagatatgtacaacagtacaaattgatatgacgagccgaaagtagacataaaatcttgaggaatagagaactacatattcttttagatgatttgattgttgattcaatattatgccagagttaaaaactgtagtaggatatttagtttaattgttttttgtcaattgtttttagggttgactaattgcaactaataaaattatatgtatttttggatttattcttaaaactatgtttctaattgaatcgatcagtaaatagacaatattttctatttatccagaatttaaccaaacttactcgattttaactatattttaatctaatattaatcccaaaaatatgtgaaagaaaaaatatcttatcttatctattcaaaatatatttatttacttttgataaaaataataaatataacataattttacctataaaaaataatataccaaaaataaatataccacaattaaaaaaagtttagttgataaaaataattagtatatggcattaatagtgtttggcaaaaaagaattttgaataaa

SEQ ID NO: 57955 - DNA, 1024 bp, Arabidopsis thaliana landsberg
aataacaaaatgagatgatcaataccgaaaaaccaaactgtataaaaaaggatcaacatgaacattctaatatgagttcatgaataagagtttactcaaggcaaaaacatcccctgacagattctatgtaacacaaggaaattggctacaagagcatataaacaggtcattctgaaacttaaatgtttgaaacaaagaacaatgatataatcataattggacacaaaattctcggtgatctgttcctatgataagtttgatactaaaaacctctgctaaaccctcccactatcaaaacccccatgaaagtaaaacaacatcaatgctcataattggataaactatcaaatgatccatattgatcttaaaaaaaagaatcaatattatgtttcctctgtaatggtttgattctaaaagccattagatgaaaattaaacctagtgtacattgataatatccaaaacacaaaaatcttcaggcttctgcttataaataaaactctaaaagcatgcaaataagtaaaattattcagaagatgattccataaaaagaaacaatcgcacatatattcacattttgatgatagatatataaacatattcctaaatcctgaattcaacagaagaactataagaggaaaagtaaaagcatcaacttcatgacgaacataaaacatagtactacttcgactttacataaaaaaaactataaaaagaataacaatctataaatattttactgtaaattaaggaattacccagatagagaaaaaaagaaagcttgaagctttccaatggtaagattgacgaacagatctgggagacgagaacaggagaaagaaatgaaaaatatctcaagaagaaaagagatccatggtcagattccaatggttattgtctctatcaatatacacacaaataacgtgtatctgtaattatcacataaattttttataaattatattaaaaattcgatcatgaggagcgatatagagagagaggagagaggagactctctcaaatct

SEQ ID NO: 57956 - DNA, 516 bp, Arabidopsis thaliana landsberg
cctcatagctaataccaagtaatctacggagcttcacaagttcaaagtatcgatttcatacctccaactagctctagcttcgaattaaaacagcatggaaagatgaggctgtagctatacaaacttacaacgggatgtgaatgaagagtagcaagtgcacgtgcctgtgcacgatcatccccttccactttgggtaatggaagggcatctttttcctgcagatccctacgtcagaattcatagaagcttaagtttgtttgattaagtacaactaaaaagaaaaatggaaaaaagtttaagaaagagaaaccttaagagagactagtttacgaagaatcccattgacaaaatctccagcaccaggtctgagggcaacctttgcaagccttacgttctgataatgagcaagtaaacaataaagataaagtaataacgaatatcagaaaaatctttgacctcactaagttagtaggaagaaatcatgcagaatatgattaaggctatttggcgctcatt

SEQ ID NO: 57957 - DNA, 1196 bp, Arabidopsis thaliana landsberg
atagtgttatataaatacaccatatatcattatagtgatagattaaacgaccgcaatccgaagatcaaaagatttttcgatgctggaagaatccttacattgtaggactacattttggaccgcctcaccatccccatcaattagttcctctttctccgacacggtcatctcactatattcggtatcaccatcgtcctcatcatcagtatcgccatgttcataatcgtcgtcttcccttcacagaaatcctcatcggactccaccgcatattcactgtcatcgcattcatcatagccatctaataaatcgtagtcgtcttcacttacatcagaagtatcatcatcagaactcgcaacgcaatcgtcgcctttgtccaattcaccatcttgttcattatcatcgatctgataatcaagatcatattctacatgattaacgtcttcaacacacaaatcttcatcactattgtaacgttcatgcatgataatgtcttcagaaggctttatacacatcttaagcaattttcgaagataaaaatattctggcagagtatcatcttcctcacaatatttggcttttttattaccactcaaacaatccgaatctggaaaatcactaacatgaacgacttgcccaataacgtctgaaattcatacatcaacgttagtatcacaagaagtttataacacattattaataattaaatagaaccctattttaaaatacttaccaaccaagttatcatcgcaatcaacttcatccgttatcttgttaaaatcaacgaaattaaagaaacaatcatcgatttcagtcgaatacaatacaattattttgtatcgatgtttaatagccctacacgaaccatactgttcaacaactttaaaatctttaaaatcaaaccaatcaccagcagtaatcctgcaaccaaaacgatggtaagcacatcctctaaacgaagctttcacctttgtaccctacataatagaaaaaaatatatttgtaatccaataagttgatagaataagataattaaaacagaacataaattcacaaaccttgctatctgataggattacttctaaactcgttccaaatccacgttcattatgttgccatagatttagtacacatactcggatgagccaatcagtcttggatgaattcaatcgcgaacgtcgtaaaaaatcatggccttt

SEQ ID NO: 57958 - DNA, 282 bp, Arabidopsis thaliana landsberg
atttccttcccaactaataatattttattataattctaattcctctaaaataaaggtatccaaacccccttaagtctaattctgtggtacatcatcttccgtatatcttataacgtacaaacagctcgactggatcagaatctaaaaaaaataccatcaaacaggcaccgtaacataccctgtctgggtcatccctccacctcccaatcccacattcagacactgtgctgcgactccacaacacacaacgccaccacgcatttcgctttaccctaccaccct

SEQ ID NO: 57959 - DNA, 379 bp, Arabidopsis thaliana landsberg
tatttacattccacagcctattcagagcattatcaagaactgagagacggaacataaacatctcaaaacacctaaagcagctatcgaaagataataatgataataataaaacttacaatctaaaacagtggtgatagtaaaagcatcaactttagtcagccgtttccccaatgtcattaagaaatcatatataagatcactgcaaaacaaatatagagagattcatatttcatccaaagaaaataacagaaaaatatcatttttgtttctgttacgtgagcggactagtgattgggttgggtgatgagtaaaaacatattaaacatatcgctgtaggaaaatctaaaatccataatacatgacaatcactcaatatctg

SEQ ID NO: 57960 - DNA, 882 bp, Arabidopsis thaliana landsberg
tttgttttcttcgttttcttttttgttaggcctccatattctttttctctttatcccccaccagttttagtcgcaatatatgtgtccgtttttaaaagtgattatgaaaatacaaggcttttgtggcccaatcactttttatggcccgacgagtattggatttttcgcttgaatttgtagcaattttttgagtcgtgtttattttggaagttacttgcattaatatgaatgcatagactatatgcaggacaggactgactatatgtataattattttctattgttcgttcatgtcatggcatggcatgtgcaagttatggcctaagctcatgaacccacgtgactgtattcctctttgtacatattttacatgttaatcatgagttttttatattagtttattcaaaattaagttcacatcaaccatattgacgagaatttatattatcttggacaaatatgtcaaacaatgacgagacataattccctaataaaaatatgtgaatctacatttcgatctatcgttatagaaacaaccgaccactttgctttttgttatagatatgtgtgatctaaatcatatcgagacaacctcacaaatctcaaaatttagtaatatacggtcgataatacagtggacaaattctggttgggtcgtatgcaactaataaacagcattgaactcaaatcatatgaacatcaaccaaaattctcaaaatcaattttacgtgtttttattatttctttaattggaaaattccttatatgttatacaacccaacgaccactataatgctcctcacatgtaaagattatatgtcgtcacggccgatttctccgcgtttcatacaaaaaggggaacaatatcgtcatatttggaaa

SEQ ID NO: 57961 - DNA, 1687 bp, Arabidopsis thaliana landsberg
atgaatctgttataagaaacatgtaagttaatttgacagatttttaaggaaagaaaaatttaaccaatcaagaagttggaacttggaactgatcaaatatgaaaccaacaaaaacatgtttctctgtatcagttaacattacctcattctgaaagtatatcaagaaagcgcgaattgtttcactgtagggtcttgatacaccatcccacagagaatgattaccttctacaatatcgtacctgtcaaagttccaactcagccaatggcatattacacaatattgtccaccacagaaccttaaatgtgtagcttatagagtagaccacactatgtgcataaagaaaacatagtcattggataaattaccaatctttcttggcctgatgtgcatcaataggtaagcgatggccaagcaaccgcctaacagcaagtgcctctgaagtactctcatcagacagccttaaacacctcgaacgtatatcaccaaccgctggccctcctatagcaacggagatattgagcttagattacttgtgataatgaactttagaagctaaaacatataatctgggtcttataccattgttattgaatcctagaacttacctaaaacacgaacaatctcagcagtacttcctccatcatcagagacaggaagaacatgagcgactcgtgttgttaacttcttcaactcttcaaccacaccattaaatccagtaccaccttcattgcaacaaatataacgtttttaaaattcagagcaaaagaaaactaactaaaccaatgtaagacaatgataaagctttgcactttgcaacaaacagaattaacaaatgtcaaattttaagtaattggtcaagatctaacacaaatagacgatcttatcgacataaaaatcgtaactttagggagacccacgaaacaaggaagaggaagaaagtggaacctgagaagacgaggagagaaggaggctccacggtggaggaggagagacattcagccatgagagaagtggaattgtagtaatgtggcttcttgctgcggaagagagaatgaagagacaaaggaagagatggtgatttataatggactagacccccaaaatagcaaatctccgccattaccgaactgaaacagagaatgatgaaacatctcaccactacccttttcgtttttgtcgattttccaagcctttggatttttcttttttcgcaatgagagtgcataataaagccataaaagatatttattacgcgttagaaaagaaaaaaatcacggtactggtggtttagttggttttctacttggtttggtccaataaaccaaaactagtgttaaatcgattttggtgggattgtggttttgcattagtgtttgagctcaaaatacatgtatagaccaaatgtcgatgattccactggaaaggtaccttaagataatctaaaagatcacatgatcgaatggcaaagaagacaaacaataatgataagaaaaagtacactatttggtattaaaaccccaagttaatagagtgacataagccttgtgaaaaacgaatgaaacactcaaaaaactacacaaataaatattattaaagccgatgtaaagtataaactcgatcaaatcacacacattttttgccaaaagatcagagccctaagcactctttacattaacccaatcacca

SEQ ID NO: 57962 - DNA, 867 bp, Arabidopsis thaliana landsberg
aactgttcagactctgagccttccttttgtgccttagtgggttcatttggctgaacaaaacagaaaaaccaagaatcagaggttccaccatatgtgagaaatgagaggtaagttccgaaatgtagaaacaaatataattaacagattaccttaatcaaatccaacattctttccataagttcttgatcttccgaggaagtaagattgccacaccaagtgaaaacagtagaatcaccgtgtaatatataacagtgcgaagaatttagtcctgcggaagcctgttggaaccagatacttatttgaattaccaagtataaactgatgaacaagaaagctatttgattacggtttataatacacataccgcttctatctgtatggcttgcatgttctcgggtccagaaccttgaacccgaaacagtgcaacaccttctgcttcgtaagtagtatcagggatgtcgttctcagctatgtactttttgaaagcatcactttcactaccctgagacgaagataactttttttttagagattgtgataaagagtacttaaaagaaaatctgtagggaaaataaaaatattggaccttaaatgtgatgaagctttgcatgatcacaaaaaactgaattggctcttttccctcattaatgcgagcctgcatggaatacgacataatgttatatccataacgtaaatcgaccttagcatctataacggaaacaacaggaagaagcacctgagccggcacaaacttcatggattcaaccatcttgtttgccaaagaaatagcagatgctctgtcttcctatataactcataatcaatgagaacatatagagagtaagaagggtatatatatatatatat

SEQ ID NO: 57963 - DNA, 1354 bp, Arabidopsis thaliana landsberg
ggggatcaaaagacatcttatgtgaatgaggatatatttgttaattgatatatataatccgatgttattttgacatactatgacaatacatatgttatcgtcaccgcaatattaattaactgttttcgtcaacagtgtataaatgattcccataacattattaaacgttgaatggtaggaagaacaacttggtatgttatatatataacagagatctcatattataaaagtatgaaaatcatgtgtgcacatagactatatcacatctacatgaaacacaaacacaaacacatggatttcttctaaacacaacgacatggatataaatccaatgttatcggcgtattaaaaaaataagacaatgtatgagtgtgacaatcaaccatgtgaaatcttgtctttctataaatatactagtttagttatttttgttttattttatttatttgttattatactatatcttaagataagcttatgccaactgactttcaaattaaaatggaatattctcgttttgttaggtggttggatctcatataaaaataaaaaataaaatactaatatgcaacaaacacttatattttatttaaattttcctatatccgtcttaccgagtaatttaacattttttacaactaagaatatgctcttttccgtccatgattgggaatatgcttaaaactatcatggatgattatcctaaatgtacaataaatttactacttaatcttcattaatgttatcatgttaatatactattgaaggattccattgtaaactatttcatggatgataatcctaaagtgtctttggcttccccagtcaatattaaacaaattcaacgcaaactttttaataacagtaaataaacttacccaacgttaatatttgaccaataaaaagtcataaataaagctttgaaaatattaatggggaagaattcaatagttttcgaaacatcttaaaccttactctacctaataactagacttaaaagcaaagaatcgaattaaacgaaccaccccactcttctgctaataggcaaaaacaaattccaggtgtaaaagcacgtcagcaagagaaaacacgtggaccaatgatgtaaaaacgtgcacggaacagtgaaagaagggataccacgcggtatcacagcctcataatattcccttcaaaatgggaatattataattattatccaatcccgaaattaactctctcttttttggttctgacaatgacaaacacaataggtttcgtgtagtaagagtatcctccacgtgtcattaaaaacataaaaaatggttcgaagagtgacttgctctacccggtaaatacactatccttgaactgc

SEQ ID NO: 57964 - DNA, 943 bp, Arabidopsis thaliana landsberg
gacattattttaatgtcgaaggtaaataatgaggatagtgcttgactttagtttccaagtgatttcagttcctctccttcctcaaaacgggtagtttgccttacgaaaaatgtgcatataggtaacgatcatagttgagattatggtaaggaagtgcggcacccgcgcagtccagttagccacaccagacaagcacaagagtttcatcgagacagttttagaggttcctctctctcctctgtaaatttgcttgaagattcgaatagtataaattgaaagaaacgtctgcatcatttcgcaactttcatctcaatgtgcagaaccgttcggggaaatcaaaagacaaagaagagaccaatgagtcacagactacatccatcgatccatccagagggtaagatccttaagaacaatcaattataatcccgagatcaagaacacatccaatcaaatcactgcttgctcattatatgcatacaaaataacaattggttctttcttacaggccgcggaaaagaaattacagagaagcttcatcagaaactacagccaaacaagatggcaacaaattcaaacggcaaaagagaacatatcaacaacacacacctgcttccgacattaatcaaagtagaacaggaccacagcgccccggtaacagaagcttcggaaaacaaagggaagcttctggaaacaatcacaagtcaggaaaagagacacgaaagccacagaagaacagattcaggaaagcaacatgaatctaatctcagtaatagagttttgcagtgatcatcatataccaaaaacagtaacattggtgtgtacgtatacgatttgtagattatacacatcaatatttttgaaagattagtttttaagactaaaaatcgccaaagaaaagaaaaaagagaaaagtttttgttgttattgaggatttacaagatta

SEQ ID NO: 57965 - DNA, 1266 bp, Arabidopsis thaliana landsberg
atctgtaaagtaaaattttggggattaaaacccgaatatattatagaatttatagttgatcatttaaaattcaatatgatatttgtacaatggcaaaaaaaaacttactaacatttctataaaataaacaattatcgattaaccattgtataacgcatgtccttatctagtcacgcttcttttcctcaattatggttaccatgtaaatccaccaaatcactaatcaatgttttttcaaaaattataaaatctaacaaatcaatccaaatatatattaaaaagtccctcaaatctctccaaatctaactttcatcaaatcttctaaaattcttagctcaataaatattgaaaaccaaataataaattattgataatatatattgataaataatatatagttttggttttaatatatttataatatatcgagtatcctcgacacactctcatccttcacatttgaatattcttcactaattccaaagaatgagtgagattaaagaactcgtgcgtattgatgaaagcgttacacgtaaatctacatctaacacaatggagatctaacgcgtagaaacaaggtcattgtagtatcaagcactcctcatccgttccacacccctcaccttcttttgaacaacatcgttggctttgatgtatgcaacatatatacttctctatgcagagctccaatatcccaacttatgcaacattatgtcctacaatatcgcttccgaagccaaacgagttcatgggccattgtacatctattttcacatcacattaatcccgcaaatcgagactccatgacaatcaaagtctaggataattcatactaggattaggaagtaatttaaaataatctttagattttatttatttgtatatatagatgatattaccttgggaattaactaagtttaaaatatattaaaatatatattttcacatattttacggtaaaaaattaataatatattaatgtacgtatagtttggttaataattttctacattcaaaaatgacttaaaaatctggggtttaacatgatggaaagtggtatatttcagttgaacaaatcgattctctcaaagatttagtattttaatttgaatgttatgtgtggaacaattcgattctattaaagattagagttgaaatagatattcgttatgttattctctcttattttattttattcttggatagtatagaatgtgtgggataatttctacttatttcctaacttagagtttagaacattatagt

SEQ ID NO: 57966 - DNA, 544 bp, Arabidopsis thaliana landsberg
ttctttttattagactgttcatttgtaaatggggcaaataagtttggagttgtttatttttcgatcttgatcgtttgtatatttgcaggacaagtttggtgcaatacttctttcttattggactagagtatacatcttcaaccttttccttagcatttagcaacatggttccttcggttacctttgctttggctctcgtctttaggtaatgaaaaaatcgatcaaacgcatttgaattcttcatatatattctctagtattatcacaaatattttataaactacatgactaggcaagagacgctgaacatcaagagcaacgtaggaagagccaaactgctaggcacaatgatatgtatttgtggagctttagtgcttacgctttataaaggaaccgctttaagtcgagaacacagtactcatatggaaacacatacaagaactgtttccaccgttgcaatgacgcaaaagtgggcaatgggttccaacatgctggttttatcgaccaaatatgggcatcttggttcattgttcagcttaaataa

SEQ ID NO: 57967 - DNA, 485 bp, Arabidopsis thaliana landsberg
atgacacaggagagtcactagtggcttcatctaaagatggttactctgttttgttgaagatactatggggcgttttggtgttggttgtatcagtgatcatcttgatgaaagtgatagatcgacaagtgcccacaggagctactggaacggcaacatacagtggaaatgcagcacagggaacaccagaaagaagaagcggcacagttatataccatgaggaatctccaagaacaccatcaccatttatggagtatgtgaagagaacagtggatgaaactccctactacagaagagaaggaagaagaaggtttaatcctcaaaacactatgtagaaatttagattttgatgatgatgattttgttgtgagttgtaaaactaccgaacctaaagccagcaatgtttatatcatttgtgcattgtcatcaaaggatccgtaatttgcgctgataatgaatctttaggtttttgaatgaagggattatta

SEQ ID NO: 57968 - DNA, 913 bp, Arabidopsis thaliana landsberg
ctttctccattattcaggctctcgcattcgtcagcccagaagagatgcgcacattcataaacagctctacactgatctggcttccttaggagtcttgcagaatactacaacaacataatttagccttgttagtattcagtgtagcacacacttactcaactggtttgtcaggaaagatacccctgtcgccttgtgagtcagagtatctctgttctcaacattaaatacacgcatcctctggagtgtccctattattaaacgtagtgctgttacttgtgcctttgaatcctaaaacacccaaaatttatagccacgtcaaggtctttcttgcagaaagttgcatgtagcctcctaagaaattcacttactgaaatttcttcttcatacagaagatatgcctttgtgaagaactcataagcaactgtttctaactcacagttatttgctgcctaaagattcaataaaagaaaatttcagctcatgcactatatcttttgttggttttgatagtggatacaccaaagtccaaatgatcatatacctgagcacactgcaagtagaggcgcaatgccaaatcaggtgcggaaacatcagatagaacttccaccgtctgtaaaaattgagattcaaaatcgactggcatcatagaaattctggcaaaacgaaatacaatgtttcactgggacaaagccaatgatgtttgcaaggcaactaaactgtcctcactattttctaacaacaagatgtatgtacacttgcctcgcttaacagctgtagaattctcttcggtgttgctgatgcatcatctccaaatgggttttcacctccacctcgcagtcgccgaattaactgcacaagcatatcaatacaatgtgcggagttccaaattcaaacacaatgtcgccttatcgat

SEQ ID NO: 57969 - DNA, 1184 bp, Arabidopsis thaliana landsberg
ttgaacataagctttctcatttggtgcatttggggaacggcaccaatctagttgaattaaagcctttatgcacaaaagaacatcaatttttttacaaaaagatgcatactatgtactttagtccctacctactaaaagcttctatgccaataaaagctgaaatttgagtgaacctaaggtagtggtatattaaatttcagttgacctaaactcaagattttagaacgtctcatgtcctcaacgctaggcagtacaaacaaataaaattagctttgtatcagaatcacttggatgcttatctttgctacaataagatcctgccactagtcacaaatgaacgtactgtcgagacctgtagtgtccatttttataagacaccaccatacttgtctctcccatcaaaatgacaaatggtaatgtgagattaccttctgcattgcagattggccagtctcagcttttgcttttgcatacccaatgataccttcatagtttccgcaaaccatcaatgcagtgtacctttcaaccctgccaccctaaaaatacatgtcttttattatagccgagcaagtgaattaagagatacaaaagagagaatgtcaaacaactatacctttgtgaccttacaaactttttttacatctatcacatgcacatcatatccctgcaaaaaataagaaataacctgatcagctatgctaataatttcagtaataaattgagagaaaagatgtatggcaatatccaccatggtcaaagaaaagataacttcagaacataccaaacaaagggtatcataaactcatgtaactattagactactggccttcttaagtattcatattgcatgaaaggaaattgatccatttgttataatctaatagaatgtatggttgaacttataagagaattaaggtaatatcgtggaaaatgcaaacatctcttaatagagatatgccgcattgtactagcacataacgcattttgaaacaacaccaagcctgaactttttggctatgtgcttctctcaataaagcagttacagcactacagctacaatggttaccacgaaaagttctaaatcaagatcaaactctattgcttaccaagcctgacatattgagactgcacagctgagatatgtggataaatagagaatgcacttacttttctgtataaaggtt

SEQ ID NO: 57970 - DNA, 424 bp, Arabidopsis thaliana landsberg
ctcccatgtaaaggagatttgttattttttgagcacattgcgtttttttgcccttttcttgggttttctctctttctctttcgcttctttatttttttataaataatttgcttctctttttttttcctaacatactaagaacaatgatgttggtcttttccaaaatctgatagaacacttggcaacttgtgtagctgtagtataattgtatttctttttatcgcaataattaatgccaacatatcctcaattatatatattatcctagctaatcgtatttgcaccgtacgtctatttcttatatttttctactctattaattacttttattcccttaaaacattaacactaatttttattgcgtagaaataatcatatttcattatgtaagaagaaaattattttaataatggaatatattttg

SEQ ID NO: 57971 - DNA, 230 bp, Arabidopsis thaliana landsberg
ttgtaatagaattagtaaaaataatactgtagacatataattgttcaataaaattactcatatagattttgaataatatgacatgtaatatttgataattagaaaaaatgaaattatgatatctatgtatatgatacaagtaactaaaatacggttaaaatagaaacagtcaaaatacaattgattattcatttaataaaatataattcaatttacggttttattttttt

SEQ ID NO: 57972 - DNA, 568 bp, Arabidopsis thaliana landsberg
ttatttattttgatttataaacatataagaaggggaggtatttgctgataatttcttagctttttttttgggcattctctttgcaacttgcggaattatagaaatcatcatgcaggtgtacattgttttctctattcatttcatatttatttattatatgtgttccttacttatttatttccaaatattacgacaatttcaaagagtgatgataccagaatttagaaagaaaatattacatcctttaatttgattaaaactatctatagtttgatgcaattctactacgtttccttaaagactgtctaaaactccggcatgaatgtagtagagtcaaagagtttgcttgtccaaaattccaaattaaatatataaaacaagaatcgtcaatctaataaaaataacaattttatgtgaaagaatatataattggacgtattactccaaccatactactcttcaacaagaaaatagatcaaccaacctctaacttaaaattcaccatcaaaccaagaacaaagggaagaaaccaccaaccactatgatcaactcccaaaatacattcatc

SEQ ID NO: 57973 - DNA, 1142 bp, Arabidopsis thaliana landsberg
catatacgatctaccacaatccgtaaaaaaatctctatttttcaaattagataagaacagaatctggggaaatgtctggggagaaaagtgatagaaatcgacttacactatcgaggaactggataaaatctcgcttgtggcgaagcctcgtctcctctggcacatccatttcttaacaaaatctgggttcttcgtcgaacttttcttcttctacttaaaaaaaaaaactgattagagattttcgatttccgatttcgagaggcataaagggcggatcttctccttatggcgggatttcgtgagataacctgtaccctttttggcgggaagggtcattttgggccgatattagttgggcctttcgtctacgtgctttttgattaaccaaatttgggccggtacaattttggacttacgtctacgcgcttgtttggcgcgtttgatttcctcaaggcggtataatacacccagattctaaaccaaaaaccagacataccaaatcaattcattgtaaattcggttaacttttgctactgccttcaagccagtaaaccgaaaaatgtatatatgaaaaccaaaataaacctgtgtgatttgagaacattttcggatgtatcacaacatatgtataactgaaaaaaaattcagtataaatctaatttcttcgaatgtaaaaacacgacaagaattgttgagaaataaaagatgagaatcccctaattggattattctgacaataacaccgttactacaagattctctcagtttctgtttttataaattacgcaaatatggaacgaactaagatacacaacattccgcagacaagagagagaacaaacaaaatctgaaatctcagcaaccgtaagaaacggggaatgaaagaaccgcaaaaggccagaggaagagctccaacttgtgaaccaagaagctgcatgtggtggtgatggatgatggatgatgatagtaaccgatagggcagagaatctaaaaggtatgaagaaatcagggtttgaaggcagagaaggcgactaccgagttgtgtccaccgaacccgaacgagtttgatatggctgcagcaaaacagaaagacattaatcagtgaaactgttgccagtttaaccaatgagaaggcggtcatg

SEQ ID NO: 57974 - DNA, 942 bp, Arabidopsis thaliana landsberg
atcttaaaagtagacaagctgagcatcattccattttccttcatctcatccagaatacattgggttttttgccacaatccttttctaaaaagcccacttaggatagcattataactatacacatcgggtttataaccctttgacataatctcagataaataaagaaccgctcttttaatatctccttcatagcaacaccaaccaatcaagataccaaaggtaacttcatcttgtttaaaacccaagtgttcgagttcctccatatatacataagctctctctgagccaaacctcctgcagagagaatgcagaatcctattgccaacaaacacatcaggttcatatttaacttcaccaatgaaactcaacaaatcctcaaagtcttgcttctcgttgtatcctatagtaatcttactatatattgagctattcaggatacaacctaaagccacaagctttcttgccagaactctagcctcctgaaccttctggtccaaacaaagcaactctataactttcccgatgctatctatgttcatgtgatttaattcagcccttgtctccacccaatccaaacaaattctataagctgattctgttctatgaactctaaccaattgatcaattagaatctgataacacgaagttagaggtactaaacccttacgcctcatccaatcaaacagcataactgctttcctggaatcgaaatcatcaacatatttaccaatcaaatcacagaaaatcccctcgttaaccattgtgtctccatgtctctccatctccataagcaacaattcaacttccttaaccattccttccctgataagcatcgacgccataatttcacaagcctgaggtaaatgcttaaacccttggtattgcacactagcccatctgaaaatctcccataaagcttgaacctttatattttcaattcca

SEQ ID NO: 57975 - DNA, 1846 bp, Arabidopsis thaliana landsberg
atgtcaaatatgcaccatattgatatctgtactttgtttttaatatcaattgggccaaacaaacccaaaagtcgaccgtgcatttaaaggatttttagaaatattttgctcctttgcacatttccacattacctcatccatttttgctccgtgcatatattcattatattacttttgagtaactttctcgtgccttctccgaattccgtcatgtatttctcatattatttcctagtgattctcaacagccatgcaatccaaattacctcagaaactttcctttgatatgatccgatccatatcaagccaaatagacctagtttgacccctattactatgtaagaagctccagacaatttttaacctagtatttgtttacgctttttcttctaagttctgtctaagtgtttaagagggacttacaagacttcaactacatttgtgatgacgatcttatcatttcatccagcttagtaatataatgttatgctcgaaacgtgtttgataaaggggttagaccaaatttcaaaaacgttttttcttacttaaccagtatgaattactggactactaagtgacattgttttcaatgctctagttagcaaatcaaagtttagctaattaagtgatcaatgaagttatttgtcatgaaagtggattaatcttgtttgagcgttgcaagattatataacactacgttgttgcttaatgaatgtcttagcatgaaaattattttttctatcttatcttacgaattatcttccccatgatcaattgtttgtttatttcttgatttgcctagtaaaccttctagtttttggttataaatttataagtttcaccctccagggtttgagtcttcttggaaacaaatatcacatccttgtggaaagtttgggtttaggccaaaggccaaaacattccagaaattattccaaattaggcgggtaaagcccttttctactattatatgttcgatattcttcttatttggaaaaaaaacatatgtgatattctactatatgttctcattcctattcttcttagttaggcaaaagatctcattgctattcttcttcttatttaggcaaaagatatatatatatttatatttatatcaaatatggttcgtttttcaatagttagtggagaagtaaaaaaaaaataagagttggaaactaatagtaatgaacctcgttgagaatctttatttgatctcgccaaatattttatggaaaaatatgcaagtgttgtttcatgatccaaagttctcgctctatgtatgtgtctttgggacccagagtttgggtcgaataaataagttatcatcataaaagagaaaatttacaacaaataagaaaatagaaaattaaagaaaaaaattaaaaagagccaaaaataatttcgaaatataaattaagaaatattttaaagttggggaaaaaagtgtgatgaacctatctcaaagatttcacgtttttgcgatatgtcccaaatcacatatagtggaaggtcggtgctagccctctttcattcattttgtggctataaaaaggcagtctcctgtccatcattatttgcttctgtggctaacaaagagcaaacaaacacttagaagaaactaagaatactctcatcaaggcgatatagaaaaaaatggtttggataatctttttcttcttactcgtaaactattggttataagattcgggaactttggattgacgtacgtcggtgttttcaggagagcaaagggagttggacagtggctgatgccgtagactacaaaggacgacctgccgacaaatccaaaaccggtggttggatcactgccgctctcattctt

SEQ ID NO: 57976 - DNA, 1029 bp, Arabidopsis thaliana landsberg
ttttatcattggtgattttttattattttaatatatatttttaacttttagttggatttaaaatttttgattacattactattctcgttagacttcaatttttttgttaaacatgacacactcatttttatttttcatttataaaactatataatctctataaatacataatataaaaatatcaattgatttgcggttcgactcgatggtccggaaggtagtccagtttgccttctagatgatgtttaaaaacattgatattattcctacccttatctataaatagtgactttgattgctagcaaatgaaaaaaatagtgttattgatctaattgaatggaaataagcagcaattgtttggaaacacttttttttttattataaaaaaaattaagaaggtggatatgttgtagaagtgcgtataaccaaatccattaaaagatgtttaccaaacataataatactatgtactattgtggtgcatgctgtaccgcggtataataacaaaagtaaatatacatgatcaaaagtaaaatttatatgtaattgtttaagtattgggatgaaaccatagtttcttagccatttcaagaccttagtcttaaatcagaatatgatcaatgttattgaaagcaattttatccaacaattgaaatattcatttgtctcaataatgttcaataatagataacaaaaattctacatcaatacacaacatgaaaaaaacggacaacgcaaagaaagttcagacgcgtgttaaccgccaaatcagatcagcagtttccgttttctttctttagaatccaatgagccagaataaacgctcaagctttctcataatacaacattcttcagactatacttggaggatctccagaccagctacaagcggcacgcgaccaccgagttctgatacaatccaccagtggtgcatgttggaccggttttggctgattcacttctgagtctttctcagagctgctcggcggcagtgcacatgtcatgtactcttctggtgtccatttggag

SEQ ID NO: 57977 - DNA, 467 bp, Arabidopsis thaliana landsberg
  unsure (1)..(467): unsure at all n locations
aaccggacgatcgatccaaatctgatccatgttaacacatgtattcgacggaagtgcatataggggctttcggggatttacacgaaaaacctgcccttccacgaaacaacagctgaaacggtgctaaaccccgtagctgagagaaaaggaggaatcccccaggaggggctccgtctgataccnnnnnnnnnnnnnnnnnnnnnnnnnnnnnnnnnnnnnnnnnnnnnnnnnnnnnnnnnnnnnnnnnnnnnnnnnnnnnnnnnnnnnnnnnnnnnnnnnnnnnnnnnnnnnnnnnnnnnnnnnnnnnnnnnnnnnnnnnnnnnnnnnnnnnnnnnnnnnnnnnnnnnnnnnnnnnnnnnnnnnnnnnnnnnnnnnnnnnnnnnnnnnnnnnnnnnnnnnnnnnnnnnnnnnnnnnnnnnnnnnnnnnnnnnnnnnnnnnnnnnnnnnnnnnnnnnnnnnnnnnnnnn

SEQ ID NO: 57978 - DNA, 506 bp, Arabidopsis thaliana landsberg
ttaagaaggcctccttttggtcattataacttttcttatttattgataatcggaaaactctttttctttatcaataataaccttcttcctatgctccacacttttgagacttctgactctgtatatatatattatcagaatttcacaatggacaacatcttcctctctctgcaaaaacacaaacagaacaaaaaatttagcattcattagaaacataggctttgcattgacagttttgtaattggtgatgcagaatttgtgggcgaaaaacgcaattgatgagataagcttaagcttagctaacaggtgaaataagtaaccaaatgctataataactaaaccattcatgaacaaccacttgtgaatcaaagagtcaaatttacctttgccaacaagatgctggcactcacttattagcttgaaccagaaccagtcgcacatgtttctttaacacctctttcattcacagaatgttcatcacccgctgctgctctattgtgctcatt

SEQ ID NO: 57979 - DNA, 314 bp, Arabidopsis thaliana landsberg
  unsure (1)..(314): unsure at all n locations
cgtttctaaacgttccatcatgcgggacacagtggcgattccggcactgacctctcttttaacctcagagccaagatctgccatggacgtgttgcgagaaaaaagtctatctttccagttccttgtattctttgatatcgattctttgtatctacattgtgcatggggaatcacttagaattgataaaattattatacaagccaaagctgccagatataggcaggatacctcgtggagacagcgtttaatcgagacttaagtgattccaaaaatgactggagttctgatggtccagctcnaacttgttaacttg

SEQ ID NO: 57980 - DNA, 1778 bp, Arabidopsis thaliana landsberg
tgtgtattttaataatcaatcattctatatagtcgaaacattactattgtttatgtattgaaaacacttttagttgatgttggagttttctaattagctttatccatggcaagttatgtagcttccaacctttggctatttttcatatatataattttcttacaaaagaagaagagaaaccataactttaattatattaaagatggcgcagccgggtctttatttgtttaatagtagaacactgacaagtgacaaaatgataaaattcatttaatgattttgtgttgtgatttcttagaaataaagttgaattttctgaaagaaatacttttatggtaatggagggtttatgttcttactacttatgtcatacgatccagcaggatgattaaaacattattccttctaaattaataacattattatgttatatactatatgcatgtttgttttatatgtgaaataaatcagtattgatcaataacagtaataaataatcattttttaatgtcttttcttttcattacataggaactttttaaaagtattttccttaagaaacaaaagtatatttgttaatataattcattattaaaaaaagaataaggtggacaaaaaggaaccgacactctttcttccacacacgtgtcgattgataattggttatacaggattcattttccttttggagtgtggaccctctaccttagacagagagttcgtgcagagactaatatggctgctgctgacctgtctcgctcaaagcaacgtcgtcgttttaaaatttgcccagctcaaaaatttagacgtaaattccaaagattgtttttgtggtcgattcttttagatcaatgtgacgatagtgacgacgattgtaagaaaatcaatattttgaggttataagaaaaaagattttagatcaatacatgtaagttagtgaatgatttttgttagtgtactattatcagtcgggttaaatcggtatgaatatttttgtataaacgatttcgctgacagttcgataaacataagtgatgattaatgcgatcttacgtagtttatggtttattagtttagtttcttaagtttgtgcaactagtgagtagtgactataaatgcagttcgtatagtcaaaagcaaaagtcgtaaacattctcgatgtggtaacactgcataatcgcagaatgtttgcgtgtggtttattatcattattaccttgagaaatactaatgcaacatttgttaaccattctgattcccaactaattgtgtgccttgatttgttgttgcacagtaacaaaaaatgaaaatgttaccaaatttgtgggagaccaggtcagacataaatgtggttgttgttgctctataatttcctttcttttctggtcatttcatgattctgatcaataatttaactgcatttacttcgacacacatatctgtcatgttcatgtactatggaagctttgctagcaacatacatagaactagaacaacaaaatcaaatggtgtctcaattgtcaaacgaatccaacaccaatatattgaaatttcatgagtttacatgtagacactgttcttttacacaatcaaaataatgtgcaatccagatcaaagaatttactacccaccaccacacaactgtcctgacccaaaaaatgaacgcatgtttgacaaaaaaacaatcattacaataacacaccattttgtggttaagaatatgaagaatcaaacccaaaacccacccatgagaaagaagaaatatattgaaaaaccaaa

SEQ ID NO: 57981 - DNA, 501 bp, Arabidopsis thaliana landsberg
ccgcgaacgaacgtcctgaaagtcgggccagcccgcagacgccgtgaccggacgtgcagccattgccgagcctcgtgccgatacctaccgcaaggccgccgagcagcatgccgggccacgtggtctgcaggtgaatcgtcaggccaccgctgtacagcgcaaacagtgcagcaccgatcagcagaccggcgacgaaagcgatgcgccagccgcgctccgatatcgtgcgctgaccgagtacggctgccgcgaagatgccgctgataccggagattgcgccgctcgcccacagcagcagcgcagcagcgaggccgatcagtacgccgcctgtggcggcgtactgccaggcaagtgggtcgacaacgatattcatttgcgagcgtctgaatggtgtcaggataggatgcaaagagtataccccggggggtatcattgcaaacatactcattgatcctcacaaggtgccgaccatgacgactcgcgacaacagcagcgtcgact

SEQ ID NO: 57982 - DNA, 684 bp, Arabidopsis thaliana landsberg
aagcttaggacctgtgtagagccgatatagggttttgctgcttgtaaaatggacgaggaggcttgtagaaagaagctgagaagtgaaaattgattggctttgtgtttaccggagaatagattggagccaaaaccggagaccaaccggcggcagtattcgccatgttttccgtccttgtctctctgtattgactggattattggagccaaactaagtaaatggtagatactatgtttcgggtaaaaattaagagataaaggtaaaattatatatatatatatatatattgaatatataaacatattctttttatttatggatatatttcttttttcaatagggttcataatttttctacttttttgcttataaatttaataaaaaatttaacttgatacttggcaaaattcaatgttttatttaacatgtatcgtgattatataagataacaactttttaaaaatccaactttatataataggatattaatactgtgatttgtagttgatgaaagaagacaataatcagaaaaatcgtaacttaaaaattgttttttagaaaaagtcgtgaaatctatagttaattaaaccacttgatttgtttgttttaatatttagttaaaattttttgttttttgtttgacttattgtttatcgtgctaacattgtctattatatttttttt

SEQ ID NO: 57983 - DNA, 1436 bp, Arabidopsis thaliana landsberg
taactgttaatggacaaaaagaatcatagattaatttttcagatagtgaattctttacaaatggaatggttaaaagaactcacaagatcattttagatcaaaaattgaaagagactcacttagtttctcagtctcgagttattttctctccccccttaaatacattttaagagaaacacaaagatttgtataaagaaacttaatgaatgttgtgatgatcaatgagctcccttatcatgaaccacttagaatagaagctagagcggtgaagtaatcttcagtgcaagggatggtgagacctcccatgggatggtcgaacccgaactcttcttccgcgaggttcaacaaaccttggaacaatgggtggtttaaatacgatataggtatcacaaatctcttcctgtgataagtctctcccacatagacggccacatgaccctttgggacattattagtacccgacgtagccaagaggcttgcgattctcgctgataagcttctttgaagcttttgctttgcctgagagagtccgatcaattggatacccatctttgaggactaatgcaaatgagtaagaagggagattttgaaagaactttttaggtggtgaatatttgaccaagaatgtttgaatgtcttgggcttctactgaaatgggttaggtttgtaagcaagtttctcttagttttataagtatatatagagaatcaaaagaaattttgaccgcaagttattgaagagtgtaaaagtttgaggaacatatcaggtggagctaatggatgaagttcacatgcttatgccttgtccttttagaaaccactttgtttttctttcatttccgtgaaacatgtttataagaccctaccattcctaatatatatgaattataagaccctaccatctcttatatgaatagaaccaaaataagaaagtggaaacatgttaacacaatcaacttgtaagagattattacttttgataaagacgttatacattccatatatatgttaaatttaaaatatgattcggaaattggatatatacactgctttgttagatacttagcgtgagtgatttgacgtaccatattaagcaaactatttcaaattttagacttttgtttgtggggtgaggcatatgatcgatcatagcccccattactttcaaaaggccacatgcgagaggtagagaatatattatacacgaaacatcggatcatcccatatcgattctctatacaagcttaaatccaatcccagagtactattagaataactttatttggttccacgttaagactgtccttaaaacatatacatatgaacatgagagaacgggaaccatttggctacttgtctatcacaatttttggcagttccagatttggacgattaaatgtttcttatcttaaaaaacagggtcaataacaaaaatga

SEQ ID NO: 57984 - DNA, 1001 bp, Arabidopsis thaliana landsberg
ctctagatgatcttctggtatttgacatggtggttgcttttgttatcacaactatatatttgtccttgttatatggtttatatgtacctgactgggagtatcagattttaaaagaacaccaaggatcaacattgacaacattcttggttagataatggtttcttccttctacaacaacttagttacatattctgtcgcggtcataatatcgaaactgtttagaatctgaaggtgaaatgtggggtacgaggtcacactggaccaggctgtaatgcagttggaatgcttgaccgtatgtttctaggaatccagcatttgtacagaaaacctgtatatgcacgaaccaaggttctagattttaacccaagtcctgtttttctcaatctttgttttatgtccatttcatttgatctcttatatcttctcagcaatgcagtataaattatccaaacaatggaccattaccgccagacgctccttcttggtgtcaagcgccttttgaccccgaaggcctcttaaggtctctgcttctactctccaaaaaaaatattaaatagtaagttgtgttttaccattgttcacaaaataacttgcaagtttgtttaattgtagttcgttgatggccaccgtaacatgtctagtgggtctgcactatggccatattatcatccacttcaaggtaaacatatctttttatgaagaagttcggctgctctgctcaactcttagctatatgtctcctctatgtagcatattagagctgttgtgttttggttagagaaatggtagtaagggacaggtttataacgagccttcaattagcataagacgtacgttaagcgtctcttgttagtctagtccctatggttttggtgaattggaataagaatatcagttgtatagcatttttttttatcttatcagaaacttacttgttgctatatgtaattaactttttcaggatcacaaaaagcgtttgaatcaatggattttacgttctt

SEQ ID NO: 57985 - DNA, 1847 bp, Arabidopsis thaliana landsberg
ccgtacccaatacccctcagagtcagcactcatctttttacacatcactatcaagtcagttggttttcttgttacttaccctcacgcggattattcctaattgtgtctataagagggagtcatttctcattctgattattgtattcacgtctaattctcttctttctcacattacttggtatgcttttgattttcttcctagtgtattgctttcttttcttaatcttgtgtttggtttgattcgtcaatcatctgattatttcactaataatgctgcattatggggtacgtacgatcatcatctgattatttatctactttctttggtttaacacttgaaaactttggaaagaatcatggagggagtaagaggtcagagtcaggacatgaatgaggtttatgacacaatcaacagggttgcttcgcgcctaggaatttttaaagatcgagctactgctttacttttgagatacaaatggtctgtatcatctacttttcttatttctaattagatcatacttggtttgttttcgtcactgattatgatatctgaaatttggttagggatggagaaaaacttgtctcagcttacaaaaaatctcctgataatggcggaatgtcctattcctttgaacccaatcctacgaatcactttcattctggtagggtatgttccttattctctatgtctttttttaaaggattgtgacaaattttagtttctgaatttatacttaactcttcttttatacgtttctagagaaaatgctgtctttgcaatgatatcacttcctgcataaacattggatgcggtgactatgtttgtgacgacaaatgctttaaaggtaacacatttcagcttgtgtgtgttgatatttttttgtgagctaaattaatgctctactcatttctgcatgtagaacacatcgagtccaaaatacataaagaattggacatgcggtgtccaaagtgtcgcaaattcctctcatattcttggatatataggaaaatgtctaaggaaggacgagagagatacgaggcttcgctgctcgagaattttcgccatgccaccaaacaaccacccactgtaactgtaattaagtattattttcaatactacataactatttttgtcatgtgttaccatttaacaattatttttattttaggaggaggatagccttttgaaaaaattggttcgcaaactatcgaaaaggggtaaaggtactacaacgatattgcttatttttcagttaattatttgttaaattgttttattgaatcattttcaaatataacagatttggcaagtacgagtggagaaaacaaaaagtaattacttcttgtggctggtgtgcatgtttgctccaaagtattgaacaaggcaaattgattggaaccatcattaattattcacaacatcttatcgtcagtttagtgttcatattcccatagataaatttgatagtaattataatttatttatataactaaggtgtgattattaaaatatttaatagaaagaaaagtttttactttgtaactgactctaagttaataatgttttatcgactagataatgtattggcagattttattgccaagcgggcattagttgccatggacctttatgttctagtttattagtaagaaataaaatgcgtttatgaccacaatgtgaagaatgcactattgcaaatttaaataattgattacgtcgtccttattaattgggccataaaaaggcctttaaatacatgtgcttaattataattcacaaatatcgaagatgattaacaaaccagtgtagttatcaacaagcttcaaaaaatggggggaagaagaag

SEQ ID NO: 57986 - DNA, 1253 bp, Arabidopsis thaliana landsberg
cactaagcattaaaacatgagacattcacaaacaaaaagtttcaatatttgtgtatctcttaccatcaacatcttgaccatcatatatgcctttgtagacaataccatatgcaccacgagcaatgacattcctcatctctaatttagccaattcaatttcccattcctccttaggcttagggtgcttctcaatgcttcttgaccaaaccctactcagatgtttctctagctggatatacaaattcttcaaatcaatcttatcagctagaaaaatcatgtctttcttgctattgtttccatcagctcctgtgattctgaggctgttttccggagaagcttttgtctcgtttattgtttccatctctctcttttttttttttcttgtaaaacaataatctcaaagacacacaaactcaaataaccctaaaattcaattagacttaattcaagcaatcaccaaacacaacacagaactaatcaaaattttcatcattatcaaaaaaaattttatagacaaaataatgatttaaaaaatttggtgcagagaacctgattttatttttctttgtaagaatttgtttaaactattacaccaaccccaagttcttgttcctgcacacgttcttctgacattccagattctaatacaacatgaatattaaaaataaagttttcaaaatagcgttgaaattcaataatgtttaataaaaataagagaaaatcgaattcacaaaaagccaataattcaacaagaaaattttctttacaaaaagtaaaccctaagacaccgactcgtcgtccactattaatcattgacccaagataaattataaacacacaaaaacaccaataatttttttctatattatcgtaaacaagatatacttaaatttcagaaatcaactagaccatgcaaaaaaaaacacaaaacccacaaggaaataaaatctgagaatttggtagaagtttttttcatccaaaaaaatatatttggtagaagaagagatttgaaagggtttaggtgattccttctccgaaaaacaacctcagaataaaaaacagaggatcaaggagagatatgagaaaaaaagaatctaaagagagcgaagaaaaatgagtttaggaaacgaagaaggagaggctgagagtgaatggcggaagaagaaaaaaagaatggcttaatttgagtaaggctggaaataaggagacgtatttgctatttgtttctctactcagagaaaaaatttgaccta

SEQ ID NO: 57987 - DNA, 327 bp, Arabidopsis thaliana landsberg
  unsure (1)..(327): unsure at all n locations
gaattttaaaatttttaacacccaaaccaaaaaaccncggaacncttgcacaattaacttatacttatcccatctaacaactacattaaacctaatataattatctatctttatccacactaataccaatccaacccatttaatcaataaaattttaccaattaacnnnnnnnnnnnnnnnnnnnnnnnnnnnnnnnnnnnnnnnnnnnnnnnnnnnnnnnnnnnnnnnnnnnnnnnnnnnnnnnnnnnnnnnnnnnnnnnnnnnnnnnnnnnnnnnnnnnnnnnnnnnnnnnnnnnnnnnnnnnnnnnnnnnnnnnnnnnnnnnnn

SEQ ID NO: 57988 - DNA, 499 bp, Arabidopsis thaliana landsberg
cctgtgggcatgacaaacctttgagaatgagaatgattaatagaataatagataaatacataccactacatatgtatatatgtctacccattttgtagtgcagaatagaagaaaatataggtagacttttctttataaaaagtgatccatatcatgaaacttttctgttttggttttggttaaaagtctcgacccatatcacgaaacttgtttgatatcaattgggaaactaaccaaataatttcttaatataaagaaggtccacatcatcggctaaaaatggtcacatggcatgtgtgaccattgtcatatttctggactttggcaagagttagacgagtagggtttcaaataccatgataatgatctaataattaattaagacagtgactctcttttgtttagtcttcacgtttctctttttacaagggcttcaaatacaatatatatatgtatatatatatatatatatacactattaaccaagaactttaatgat

SEQ ID NO: 57989 - DNA, 545 bp, Arabidopsis thaliana landsberg
aggacctttttagtttctttggcattattgtgatgtgtatcaattagcatacgcacctttgttttggattacagaatcaaaaacgaattttggtcacctgttcattcttaatctcttcagcttgtcgtaatcttcatttcaatgtagtagtgagaagaaaaaataatcaaaccttaagataaaaacaaaatttctcaactttgctatatttcttctggtaatataagtaaagtaacaatgtgatttctatctttcctcttctaagtctttatgtgtccttacatcaaaagctccattacattttcgacaaacaactataaatttgatccctaactcagatttcagatggcttctataactcatctttaccagactgatccttccatttcaactctttgttgattaaaacagccatatccttcgcactggatttcgtcgaaagctttaactgcgcaacacagcagtgtaagaaaaaagctacgtggaggaaagaagaactgaagatataaaagaagagccctctcaaaatagtattaccggattct

SEQ ID NO: 57990 - DNA, 315 bp, Arabidopsis thaliana landsberg
tttgtatatgcaagtgggggccatgaatgtgacagctggatacaggttaaaggacaacacatcatcgaccacatccccgacacgtgtcccatctcacacatggcgttttcctctctctttcaccatttttttaatttcgcgtctccgtttttacatctttttttttggctaaattgttttctttttcttattattcatttctatatattatattgaaaataatttgattattagtagtactgtagtattattatttcatacaaagtatatatatatatagcaaaaaatagttgtttaatgcttgtttttttcttc

SEQ ID NO: 57991 - DNA, 543 bp, Arabidopsis thaliana landsberg
tctctgctcaatctcatcaaacctaggaccagttttacccaaagctaacccaatggcttttgatttctcaagactcaattttaaagactttctagcagctatcaagctctgaatcccacgatccaccccagtagactccgccatcattaaattcaatcaaaataaaaccctagaaaacccagaaaaatctcactccaaggaaagcaagtaatcttccaaactttattcctaataaaaatgatgactttggagattaatcgattcagaatcagatgcaaaacatcaaacactttcctctctctttttttttcgtctcttttattacccttccaactttcaataaatcaaaccaaacccagaaatctagttagcaattacacaaacagaaacaaacaaacccagacacagaaattttcacagctaccaaacaaccaccgaaaaaattgcaagaaccgaaaccagagaattcccagaaagggagtaactttttaactaagacactcaaacgaaagaaatcgagtatagataaggtcttctacttta

SEQ ID NO: 57992 - DNA, 1234 bp, Arabidopsis thaliana landsberg
ctctgatttggtaatcctttatcttgtgtttttttttattgtttgggatttctttcaacttggagaataataatggacccctacgccttatcttctacgttcaatcttttttcctcgttttgttttgtcgaatccaattctaaaataagtttttttaaaaaaggtgaaaacttcgaataccagactttaaaacgtgcaatggcggttgtgctagatcggtaggattatcatctgcagtatttacacaggttaataagatacgtattttattgacctgtaaatgaaaaatccaaatgtaaaggctttaaagtttaaactaccaaaaatgttaaaagtgatctgatcatcattcttgtctcttgggtaatggtttgtaaccacgataaaatggagtaattcaactttttagacaaaacgagggaactgaatcctagaaatgcggatttttaagcattgggtttgacaaaagaaaatagagaaagaggagacataatggctctggtctcggtgtaacacttaactcacatttctcaaagataagtattttcgtttggactaaataaaatagtacagtatagtgtttggtaattgaatctagtagtaacaaactaactaacgttttctagtcgacttgttcattttaacagaatagaagttagagtgtagactaattacactgcagtgagtaacagtgaccaaatgcaaacatatacatacaagttacatattccgaaattcgtgtgaaaattacgaataattcagatatacattttttttgggcaaaaataattaagatatacattactcaagaattattgatgtctttttttacgtttcaataaaatatatataaagtcaagaggaaaagtgtagttagtcatactgttatgttttcacttttcatattaaaaaaagaagttaaatatataatgtcagagaaaaagatgtcaccagtcctcgtcagtgatcacgacagaagctttcaagcgtgtttgagagttttttttgtttttgattcagtagacttggtactaaaaactcaacgcaacgtttttgacttgttatgtgttgcagtagcatcttcttcttaggctttgtaacttaagtgaaaaccgtctagacttttcggaaagtgaaaaccaaataacctgtagtaacaagtactatattgacaatgaatcatttgaatcattagtataggacttgagagcatataaaattctctttcattgct

SEQ ID NO: 57993 - DNA, 821 bp, Arabidopsis thaliana landsberg
ccataatttattcagccgttgtatttcagataacaatgtgtttaagctagccctcaaaccagcagcttctctttcctttccccatacatccaactgcaaagataaaatcggatcgtttgttcaagcaagtaaatcagcatatatattaaacataaaatgaactttaatgataactgagaatcagtcatgcagtgcctgctacataacaagtataagagtgtttggattgtaagatttgtacaggaacatgattttgtctttttagattcaagtgaagggaaaaaaactaaagaaaccaagggagtctggcatctacctcaaattgcctaagattgctaccactctgtgttgtgcctccaacaaacgaatgagtagctgtatcagcacttccatgcaaacggttaataaacttgtggcataaatcacgagcttcagctgctttgtttagtgcatcttcagtagccaaaaattgttgaacatgggctttctggaaaaagtagcacaggtgaaagttaagataaacagactttaaacatatagccatacagtgcaacatatacaaatacagcactagaagaccaaaacatatctttctgaattaaacatttgcctgaagcttaaccctcctttctccatatcttcaaattaacaagaagaaaccagcaaaactagacatagaaagcaacctgccgttcaaggagctggttgttagatccttggaaatgagtatctgtgcctatcttcccgtttccattaaactgataactcaaaggggagctcacatcagaagaagattgtctgttacacggttgttctcaaac

SEQ ID NO: 57994 - DNA, 665 bp, Arabidopsis thaliana landsberg
  unsure (1)..(665): unsure at all n locations
atttttcttttcttacatagtaatttagattaataccctataatctttctatgttgagatggacatccacatgtcacggccttctttcttctgctcttattcttatttctcctccttcttctttttttctccgagactttattgcttatttttttcttcaaaatagatttaaaagtaaattatatattagtgacaacaataaaaatattaaaaataataatattgatgaatggacgtctagacctaccttttaactccttgatctcttcaaccgctccttgtattacaatggcttgcctacatctttccatacctctttgaccgtctccttctttggtagacgagacctaataaacttgtaagttgatttgatcatgatcttaattctttctttcttacctgattgtgtttttgaatgtgtaaacttagtgattttagcacctcgtttataacttaatttttggctccttacggcaaacttcaaatcaaagttctatgcattctatttttttgcattgtttaaccacgtcaacacgtttttcaataaaaagaattacagcgtagttctttattnaaattaataaaaataattcagcttaattctcacttaccaatccctacttacttacttatcagtcataactaatatatatattagacgattt

SEQ ID NO: 57995 - DNA, 948 bp, Arabidopsis thaliana landsberg
tggaagataccaactgtacttcaacaactatagttggggatatcaggtaaaacttatgagttttattcttcaagagaccttatctccttcatgttaactaatactagctcaaaatcgttgtgaaggttggcctgaaaggggagaaattccatgtttacactgaagatgggtccgcaaaagttcagtggaagcagtacagagactccaaaagtcagcctttaacttggtacaaggtagaacaacaaaatggtaaaatagtactagctcaaaatattactcaaaactttcaatctctgaggtattttatatctacaggcctcatttgacacaccagagggggaagatccggtggccttgaacttaggatcaatgggaaaaggagaagcttgggtgaatggccagagtataggtcggtactgggtctcatttcacacttacaaggggaacccttctcagatatggtatgatattgttcactctccttatttaaataatcttggtatattagttggatattattttttgaagctatgttctcctactttaggtaccatataccgagatcttttcttaaaccaaacagtaacttactagtcattttggaagaagaaagagaagggaatcctcttggtataactatagacacagtgtcggtcactgaagtctgtggtcatgtctccaatacaaatcctcatcctgtcatatctccaagaaagaaaggcctcaaccgaaaaaatctaacataccggtatgataggaagcctaaggttcagctccagtgtcctactggcaggaaaatttcaaagatattgtttgcaagctttggcactccaaatggaagttgcgggagctattctattggaagctgtcactcacccaactctttagctgttgtacagaaggtaagctacttttgtccctggaaattctatttgttctctgaaatcg

SEQ ID NO: 57996 - DNA, 800 bp, Arabidopsis thaliana landsberg
ggtttccctttccttcttatccactgatagctacagaaccaatgaagatatactaacattagagaaactagcaaacatcatgaaacaaactatctaaacacctttgaaaccaaattaaccattcctcaactccatttctctatgactcaatcaatactcagcaaaacagtaactttaaaatctaagacttaaaaaagacacaaactttaaatgcaatcacaaagtaatcgactgacccaaaagagaagaggatacatctggtacagatccgagtaatccacatgattctgcatctccaaagaggcatagggttctctttatctttccagccagcaagtgccaattttgtagccaagtaaccaacagctaagctagcagcaaagagaacaagtctaatcagagcaatcggaagacaaatcacgagcttaatcgcttcgtacaatccgctaactccaggtgtattgttccggaatggatccaccgtcgtcggaccgagaaccggaggctctgactcgctgagaaagccataaggattaagatggtcaaactcaaaacctcgtgaaacacgagggtcaacaacggctggaagaagattgagtcctgactcgtcgtcgtcgtcgtcggcgatagagataacaacttcaggttgatcggaggattgatggtggatcaaaggagaagacagatcaggatccgccattctcggtgtctgtaagaagaacacagagagatggaggaaagagagaaagagagacagagcgggagacgttggtacaccgttgtggtggaatgttatttgt

SEQ ID NO: 57997 - DNA, 321 bp, Arabidopsis thaliana landsberg
tttctttcacatcatcagacttacaaaaataaaaggtagtgttaccgccgttcaggaatccagcttttgaaactagtaaattggacacaactactctgttattaacaattgtttttccttacctacaccaacggttgatgcaagaacaggttttgttgggagctgactgaagacatacagcagaacagcagctgacagtccacctgcaagcaacgatttctggctaccgctcttcagataacccatcagcccaccaactacatcaaaaccatgtaacagttcatgagcatttgagtatcgctgtataggcaagcataacat

SEQ ID NO: 57998 - DNA, 1173 bp, Arabidopsis thaliana landsberg
cgttttcagagtctatgagagatcatggaaccctagctagtagagtagaggtctatccttactaccaagattttttatttacatgttgttccaacttacaaatgaataacagataattaatgcaaatatagtcttgttaatgccaaagttttgtttcatgaaataaacacgcttctagcctttcatgatcaccctctttgtctctttatgtagtttttttttgtcgtttcttattgatgtgtgtttcttctcctctctctcataagtcataatacacttaatatgtagtcaataatattcctagtttcatacattcttgtttgcaattctttaaattttttttgtcaagagtttgttattcttatatctgcgaaattgtatatatttttaagagttaaatatcatagtcaaaacccgtataagcataatagaaaagccatgaaagctatatcgggaggtggaatcttacctatgagattatgtacccaatcaatcatcattcggagaggccacaaagaacaaacccgagtccgaaaccgatttgatcgatcattgtcgatgttgtaagaccctccttcgtctacgttactctcggaaacacctaagttaacctcaaaacgacaaatgggacaagtgttgtgaatgttcaaccaagacacaatgcagcttgaatggtacaaatgcaagcatttcaattcttttccttcctctccaacttcaaattcctccttgcatatcgcacaaaccttctctttcaccaaatcttcatccgtgattatcaccgtccttacagcctcgatggcggattgcgaggctggtggtggaccgatttgtacactaggcatgacatcagcgaattcctcgtcagtattataaactagatcatcatgattgaaccggttacttcttggttcgttgataagatggagagtgatccaatcggtatcactatcccaataaggtcggcttggcctcataatgtcaagctcatcgtgaagattgatctctctagaacagaaaggacatatgggaccatatagaccaaagcttcttagcctaatggtacggctacaatggcgacaatagaagtaatggaacgttcttgttcttcttgttccattcacaataactcttggacgataagcagatgtcatgttttcaatctttttattt

SEQ ID NO: 57999 - DNA, 675 bp, Arabidopsis thaliana landsberg
ggggattcttaatttggaaaataatgtgataatattgtgtttttattcgcggcaaaaaggtgcagataacagaaggatatgtataagggaaggcactgatagtatcatgggtgacacaagaagcaaaaggatctaacaaagtcatttactggaaagagaatagcaccaaaaagcacaaagctcatggcaaaaccaatacttacaagttctacaattatacttctggttttatccatcattgccctatcagaaacttagaggtccatcatcataatcattttttatttatgtatctcattaccatcatctttggtagtgttgttgttagctgatgttgtggtttttcttattacagtatgacaccaagtactattatgtgttaggtgtgggacaaacggagcgtaagttttggttcttcactcctcctgagatcggtcctgatgttccctacacttttggtctcattggtactgtcctgaaacatattgtcatggttttaacttttaacaaaaatgcattttactagcctctcccatggacttgatcttgtgttgcaaatttttgttttgcaggggatcttgggcagagttatgactcaaacataaccttaacacattatgagaataacccaacaaaagggcaagcggctttgttcgtcggtgatatctcatacgc

SEQ ID NO: 58000 - DNA, 422 bp, Arabidopsis thaliana landsberg
accacccaactgggaactgaaaattttccaggcattctagtaaatattacacgacaccgagctttatcagacatcagtgatcaaaacgaagacaacacctaccctgtttcaaaagtaatagaaagatggagctgagtttcctaaccttgtccatataggctccataaaagtgaccaggaggcagccttaccaagctaaagctgagccttctgtctcataagttttatccttcacagcacgatggctaatatctgacccatatctgtagataacaggaaaagatgaaccaagcacatagtggaagaatgtttgacggtttaactctcatagccagaacactgtcctaattgatttgtgaacatttctgcctgattcttgcagccttaaaattagatttggaatggacattatttctgcaaaac

SEQ ID NO: 58001 - DNA, 839 bp, Arabidopsis thaliana landsberg
  unsure (1)..(839): unsure at all n locations
ggacctactacagggtaagtaaagtcttgcttttgtaaaagaatgaatttggtttttgtttttaacgtaggtctaatgggggtgggtgtttggttttgtggcaggtggttgtacctttggcgaatgtagcgacggtgaatccggtggtggtgaaagagactccacctgagaagtatattcagttgacgacggtggatggtcatgacttctggttcatgggttttgtgaattatgagaaggctnnnnnnnnnnnnnnnnnnnnnnnnnnnnnnnnnnnnnnnnnnnncggctctgtgtctggttaaaacatactattcctctaatgtttttctttagttgtgtggttggtttctgctgcttctcatgtttctatatgtttatgaaaattatataccagagctggacttttgtgtgttgattcagagttggtttcacttattcattgatttcttttgcaggacttgtttctttttgatggttattgcatacatttgagctgaattctatacattaataatttctcccaagctacagtcactattagttttgacaatctttgtatagttttcaatttttgaaaggtcacagaaagctcattttgatcttttgcaatgctgattccttctaccttaatatccatttccagtttttaaatacttgaccagcctccacattcacatgtacagcagagtaatttctgcaatctcatcagctagcatcgcaggcaatataatgtttttaaatttctgtaaatataattttctctcagtgtcctttccacgttgtttactgtttgaatccttaaaatactcgaaaatagtacatcataatacaatgtc

SEQ ID NO: 58002 - DNA, 504 bp, Arabidopsis thaliana landsberg
tctaaggcaactgataacaccacagactttggtccattaggtccttcgactatcgcttccttcatcttaaagtgttcatccactgcgaaccgttccagatctctcacggtgcttcctggatctcttattgatcaagaaccagataacaaacgctagaaacgccaggaacatgacccaacccaaagagacaaacacaactacgacaacagtaatgacatggtctggagttggtgtgggacggtgaacagaatccgcggtggccattacttgtgtacgctgtgtgaggctctgatgatgtatgcttggtggtggcaaaggtttgaggaagatggagaatcatggcgcttattagtagagagtatagagagtatcggacgctgctacagccgatatgacttagaaccgagcctaaggcattgtgtgcttgttgattatgacaagctaacctagattgttcaataaatggcggaacgagttgttgcctatagtcacaggcactcagct

SEQ ID NO: 58003 - DNA, 117 bp, Arabidopsis thaliana landsberg
cgacgcagaacaccgcggcagcacacgcggaagaaagcgacacaccagaagagaccaaggagcctgcaacgccgactagcacagacacaaaaaggcgaacaagagcgagaaagccca

SEQ ID NO: 58004 - DNA, 471 bp, Arabidopsis thaliana landsberg
cttttttggcgataattgtattatggaatatgcctacatatcaatggtctttaattaagattattgtagcaggagttgcttgttgctaatgaattatattgctcatttccttccatatgtgatatacagtggcttgagccactagcttttgcaggatgggcggtgaatatgtgtacctagatttgttcagacaataagagagtctcaaatatagaacatattggttgtgaggctgagtcgggtctgcatggatcgtctaatcaacttgtagtaatcacaattcacagggaagtggttttggttttcatcatacgtagagaaaagacaacagtgagttgcaatctgcataccccatgaagcaagccaaactatagtcggttgtctattcatttgacaaatctacatcttgaaaggcagactcatcattgatcaaaccaatatttggccgcttcccgtgaccacaatgcttcc

SEQ ID NO: 58005 - DNA, 850 bp, Arabidopsis thaliana landsberg
cacctcaccagtgttctctccaccaccacctgtccactcccctccaccgccagtatattccccaccaccaccagtatattctccacctccgccgccagtaaagtcaccaccaccaccaccagtctactctcctccacatttaccgccaaagatgagttcaccaccaacacaaacaccggtcaactctcctccaccacgaacaccctcacagacagtagaagcaccaccgccaagtgaggaattcatcattccaccattcatcggccaccaatatgcttcaccaccacctccaatgttccaaggctactaattttagagagagtgaagtctttaaatgaatcacgtcatgaggaaaactgaagataacaaaatttgaggaagacagaagaagaagaaaaagaaagggagggcaacgtatcgtagtggcattaactcctcaaattaagaagaatcgtacaaagtttgtgtagtaacagtttataacatcattttggtccataaaagattttaaaacttcaaaaacagagttgttgtatgcttcttctcttgtgctttaaggccgtttatgatggtatcctagaatctacatatttgccatatcttattcgttaataaagatattttcttaggtgaacaagtctacactagctgagtgatcgggtctttaaatagttgactttgtttggcaaagctaatgtgtcattaagccaacaaagaaagttacataaacccataaaaagagttagtaattctggtcagtgtggacactaacgaagtttgataatttcatttttcaaacatttgttcacaagctatcgttttagtgtcctctaagttgtctaaacgggcc

SEQ ID NO: 58006 - DNA, 721 bp, Arabidopsis thaliana landsberg
gtaaagaattctggtagcataatcctttaccaagaaaaaaaaaatggtagtagcatacgcattatattattgttaatatattttatacaactacaatgtctgatgtttcaaaatacaaattgaatcgagagggaattagatcaattcatcaacctatttttttaatatttaaaatcatttagagatttatagtggtagtgctgaacttttttaaaaagtttagtcggttacgttgtaattacaagactaattatccggtttatagtcgacttcatcggattagaggtttgtggattaagaagcattgtagataataaacagttgacacaagtgattagacgtaagccacaatatcattacccactccgccacgctgcatcaaatcatgctcctcattttattagagacaaaataaatattaacaactgtttgattttgatttggaatgatccacttaaatcataattttgcagtggaattactagtataaatctagcatatatgaatcatataccataaaaatccctatttgaaagttttaagcaaaaggaaaaacagtagcttacgcgtgaaatgtagttgtaaagttgaaaattccaccgcttgtagtttttacttatctatctatgtagttgtgatttaatttaatgtgatagtgaatctatgaccgttgaagcataatctttggggtaagcaataaaaacgatcacgcgactctatc

SEQ ID NO: 58007 - DNA, 119 bp, Arabidopsis thaliana landsberg
tcgattcttatagattatgttgagttgtttgagccgtagatacgattagaaataaaccgatgtactctaattgatattatatgtatgccatattacagaggtatcgcacatatgcatac

SEQ ID NO: 58008 - DNA, 1489 bp, Arabidopsis thaliana landsberg
taaatatatcatagaagttggaaatcagttcctacttacacttgactattgtataattcatttcaaaatatttgctgatcagtatataaataagatttatttaactaactatatagctttgggttgaattattgttctatgcgattggcaggtggatatagaactgccagaggatttgccattgaaagaagctcatgcgattggtgaatcattgcaaataaagcttgaagaacttcctgaggtggaaagagcttttgttcatctagattttgagtgtcatcacaagcctgaacattccgtcctttctacaatccccaacgatttatgaagattatatatgtatgtgtaactgtttgtcttgtttttgttgcttcgttaatatattgtactatgtgacctctgcagctagatacattgcagtatgagtttttttgttttttgaattttgctttaatcaatatgttatgtttacctttctttttcttcaactcataaaatatttacatatctaaaatgacattttaattagctgtgctatcagttttttttgtaaaacgaaaattatgtttgaatttgcgtttacacaatatagaacattttagttttcttataaaatctttttagaaaattttccttttacatagaatttcgcatttaattcacaaatgaaattgtgagaaactaaaaatattaagttcaataatgaacagttattctaacatgtaaatcatttcaacattacagaaattatcatttatcataaaagactcatgttgaatatattgaataataccaaatattcagtgaaaaaacacttcaaatcgggcagatcttaacattgctctacatcaaataaaacattgaagcaagaatataaaaataagtaaaatgaacagagagtataaatccaaaacgtgagagaaaagtgtaaattgtaaggaaaaaaaaagctaaaaaaaaaaggtttaaaattgaaagattttttgttttgttttccagacgaataaataacgttgcggatgatacaaagtcataaaacacctcacactccacagtttaaatcaacaacaaacccaaaaccgttactttagaataacgaaaacctcaggccattgccagttgcaaataagttatactcttcaacctctttgctctctttcgctttcgtatagatatttccaacaacgtcgcgcaaaatcccgtctttggaatgagcaggcttcgacttacttccagtggaaagacctacaggtccactgaaatggaataaggagaagctgtcttcatttacggtctgtgtttccggtggagccaaacagtttagttccagtggcggctcaagattctgagcttggtcctcggtgttggttttggaaaatggatggaacactggaactggcccagggttgaagaagggagttgccgcatgattcaatgggctaccgtactgcaagcacagcggagggatctccgttcatactatatccga

SEQ ID NO: 58009 - DNA, 136 bp, Arabidopsis thaliana landsberg
  unsure (1)..(136): unsure at all n locations
ggcaaaagtgaggagtggagagaggaataataagaggggtaagcgtnggacattaccttcttcatttctacaggttcaagatgagaagggctagagagagaaagaatgcaaagggtcctttggaagcctatgatag

SEQ ID NO: 58010 - DNA, 1009 bp, Arabidopsis thaliana landsberg
  unsure (1)..(1009): unsure at all n locations
acttcccagggtttatctctagccttaagcatcatgtaagtcgttttgtaccccccccccgattgattgttgttcatacatatacacacatacacccacacacccacacacatatatataacgggggggngcccncncccccccccccccctccncccccctccccccccccccccctgcttcccccccccccccccccccccccccgccctcccccccgctcccccccccccccgcgcgccccccctccccccctcccccctcccccgccgtcccccccctcccccccccccccccctcccccccctcccccccccccccccccccccaccccccccccccccccgcctgcccccccccccttcccccccccccccccccccccccccccccctccccccccccccttcccccccccccccccccccccccccccctgccctccccccccccccccctcccctaccccccccgcccttccctccccccccccccgcgtcccctccccaccggcccctcccccagcccccctccccccctgcccccctctcgggccccccccccccccgcccccccccctgactcccctccctccctcggccaaccccccccccccccccttcccgcctccccccccccggccgccccccccccccccccgcctccctccccccctcccctcccctcccaccccccgccaccccccccccccttccccccccccccccccccccccctccccctccccccctcgcccctcccccaccttctccccccccccccctccctcccccctttcccccccccccctcccggtccccaccccccccccccccccctccctcccccccccccccctcttcccccccccccccccttcaccccctccctcccccccccctcccccctccctccccaccctacccccctccttcccctccccccccccccccctcccacccccccccccccccccccactcccccccctctccctctaccccccccct

SEQ ID NO: 58011 - DNA, 821 bp, Arabidopsis thaliana landsberg
caactccaagattggaatccaattgataatcaaattgtatcattccaagctaacaagacttacaaaccaacgagaaaaatattcaaaactggaactcccaatagtaaagtaagggataccaaaacaatagaaagctcataattctcacaagaaaaaaacgttgagaaaagatgaattaacattagaactcaaagtttgaagactgaagatacagttacaaaaggagacagagctaagaaaagactcaaacttttccaggaaaattcgagagagaaaactttactcttcgaaagcttcatcgtctctccaattttaactcttgaaatcttttgaccagctcccgaagactgaaaccatctcttactccatcggagaccccatcggagacaattctcactgaagtactttaagtctcatctccggtttcgaagtttgacattcattgttccagttttggctctactgtatctgaaatctccgccactggaaatatcctccgtgagaaacagtcaaacagagtcgtatctctcttctccgatatggcagtccattggcagcgatgctcgagttcactcagtgagttctcttttttcattttttgtctttttagcattctgggcccaaaccgttgggcctattatatgaatttcattcttgctacggcccatcctctcttgaccattgaacatcccaacaaataaatatcgtacaaggtgattgtcaccaaagacatgatgaacgcaaattttgcattttttgaagcattctttgcgtttgtaacgctttctgcaacatacaatctgcattagcatgaagccatg

SEQ ID NO: 58012 - DNA, 633 bp, Arabidopsis thaliana landsberg
actattttacctaatttgcttccatggtcactcttcgccgggacttcttggacttgtctttccctaaagctaacaatccgaaggtttatttaaattaaattaaaagagcacttagtgtttaactttagactagtgataagattttcacacctgctcccaaactaccaaagtaaatggagcttatgtggaaagaatgtcatcataagattattcaaatagtaaagtgactagctcttggtctaatggtttccgtgaaaaggaacaaaaacactaaagggtatgcacaaagtaggagatttgtccaacttagaggttataatttgtatgcttagaaaaagtgtatatgtgtgaagtaagaaactcatctgattttagaaaacaacattggttattagagtgcgtaaaaatggtaaacattattgtggccatccattgcttatatccgagaccgtaactatattgaaatgtaggagctcatccaatttttgtggccaattctttttctccataaacccgttaaaatcatcgttatctctagtccgaaccatgacaaaagcataaacattccaagcctacacataaatacaaagtttcataaagaaacaaatcacccactaggacaaaaaagaaata

SEQ ID NO: 58013 - DNA, 1097 bp, Arabidopsis thaliana landsberg
gattgtggactatacttattcgagatgaaattaattctttaccactggtgttagatactttcttcacgccatgttctactgatggagccctcaaggccggtctggttggccatgtacgaagaatttaaatgtcaactttggtaatacaattactgcacaacgtacatatattatatatatatatatatatattttaaatcttatgttaaattatattaaaatttaaaagaaaaagtaaacatttttacaaataaatgcaaacttttcttattagttggatgttcaagagattaattatgattcagttaataaagtttttaatgaagtaaatagagtaactatatatctatgtggatgttacaatcctgttgtgatggataaatcatgaaaaaaccaggatcaaattttcattgattaacacaaaattaatcaaaccagaatggacaaagaaagagattgagagagatgttgaaagatatattgttcttgttgacttaagcttacacggactgaactacaccaagaaaagctccaaaaagttgtagtcgtctagctagttgtccttgtctcgacccttctccctctcctttatagcttcgtttaatgtcattgaatgtagtatttagaatcaaccatgtcgatactttttttttgttaaaggtcaaccatgtcgataagattatttagtaacacaataggctcggtgtaaaatgatggcatgtgtacttttttactcttgcttgtctcatactctctcttgttgcattgggcttgttattgacttactagtatatgttcttggtatgggtactgaatgggtcattagaagaatacaatggtcattaattggcttttaaaagcctgctatagtgtttctaaatagaatgagcaatttgatccattcaacatttcgattctaaatgcattatgtggataaattattaattagcattgtagtctatttattgtttaacgtaaacataattatcacttaaccattattttttatgaaacgactgtgaatcatattatgcttactgtgggctatttttacatcgcaaccaacttatagtttttatgaacccaaaaacaacccg

SEQ ID NO: 58014 - DNA, 464 bp, Arabidopsis thaliana landsberg
agaaaaatgcagagagacagacgtggatttatgtaagataacatcgtttggattgaatttttttgcaaaagttttgtctcaaatatttttttcccataaagtttgtttatattagcagaaaacacaagcaaatagattagagaaacattgaaattttgattatggacatttaataatcttctttttcacaccagcatcatcatttacaagtatctgatgaggctccattgcatgacactccctgcaagcaaacaccaccgcctttagaattctcttccaccacttcattaacttactacttattcctcttctctcctccgccttcttcggcttcttcctcctcgtcgacttctttttccgtccaccgaccttaatccctcctcccttacttttcaccgacccttctcttttaaagaccggagttatatgctgccaccgccgtgaatacgacccgtaaagctgag

SEQ ID NO: 58015 - DNA, 843 bp, Arabidopsis thaliana landsberg
taaaccaatgaataataaaatcagcttacaaattcactatttaaatattcaactgaaaaaataaaacttgatttattcaatcaatattatttgataataaaatacccaaatctagtattagcttaaaagtggaccattaaccgtaattgtgtgatccatacccaaattagtgataatttgagaattgaagttagctacaaacattttccaatcccgtaatattacccgaaattatccaaattatatgtttttcatcatagttttgctatttcctatcttgatactcaattaaagtgtcttactaaatgttctaaaataatacaaatctaagcaaatgttctgaaatatataaatgaagtttgtttatgaaggtgtgatgtaattagtagtggatataaaaaaaattgggaacacggtatttaaagtaaaaaaaaatcatttaaatttatatgattttattaacaattaaataaaaaatatatcttatactttaataatataaatcagaaactataagttaaataagaaaattctaattgaacttaactatatgggacaactgttttaatttatcatttacacattggccatgttcctttgaaaatcacaagcgattgcgactagtgactgtgattttaaaattgtgggatgttgttcgtttagtagtcgcgggagtgatcaccaggttgttcgtattattagcgttgcgattgattttttaaaattttggattttttaatgattaaatatttatatgtaacatcaacacttggaatggatttttgtataaaatctaaaatgtaagaaaatttacataagctttaaaatttaaaattccaagcc

SEQ ID NO: 58016 - DNA, 468 bp, Arabidopsis thaliana landsberg
agctgaagagcaggggcaaatgattgaatcactgcacacatctgtaagtatttccaccctccaaatcttttctctatcgcagcacttggtaaattgatgttgggtttcttttcaacggtttatttattttgtacatttttcttccttttcaggttgcaatgtataagcggttatatgaagaggaacagaaacttcattcatctgattctcgttcttcagatttgtctccaggttctacttctatgcattattacgagtttactgcactatgtgttcttagataccctctattattgacctcatggctaagtttaattgaattaaatgatgtttcagttttatcttagaaccagttcttttcaaaattttaccccaaatgtcatcaaggtttagtgctgttctcaaattcaaacgaaatctgcatttggaacagctaccaaagtttggtcttattttcgtatatctcaa

SEQ ID NO: 58017 - DNA, 1355 bp, Arabidopsis thaliana landsberg
tagtatatttcttaccgattaatcagtataggatgcagtcctcttattgataaacattttctgtaccgttttattttttttgatttatacttgataatcttatgtgctcagttttttttttatcatttatggtttataactgatacacgcatattaataagttgaaatctaatttgtgatctatagtgatgcggctacaagcccccgtcactagcagctacaaaaactacgtttcctcatatcattcttcataaagtgtaaacctaattgaacatgaatgaaatcattatttataaatgaatacatcaaatgcgagcaatttgttattcgactattttgtatcaaaaaagaaaataattaattgttctgtttgtttgtgtttcacattttggttagacttcaaacactattacaagcctttttttttatcgaaaacactattacaagactttttttcatagaattttcttttgcaaaagttaatggatgaatccaaattttataaacgtttttttttttttgtaaaatctacccgtaatcacatatacacaaatgactacgcgatactttctaaataatgagatcagtacgcgtcgacaagagtgggggccatggtgcaagatcgagtcataaagtgacataagtcaagtcaggagcgatgaaccttgaactccgaattccatcacaaaatttcatggaattttctaacgcaaattaaattttctcttaattaacatctaatcatcattctatttaacattataaaatcaaattccatgttttcaagaaatcataatcattattgcaaatctagctaaaagagagatagtactagattgcgaatcatccatgattcatgattctaaaacggaccacgtttgctcctttctcgaaaacgacactcacgtttacaattcaattagacttggaccaacacccttgtatcttgtgggtaccttttactctttgtaatctcatgtaaaacacttaattttactaatgaaatgaatggaggagagtcaaaaagaaactcattatacttggggccaaatctatatatatcggaatgggccgtactaactgtgagcccataaaggtccataagtcacctctagtatttggcggcgaaatcttgtttcctggtattggtctcagactcttaagattaagaataaaattacaaaatgcattcacttatgtatagagtctacagagtacagactatagagatagaactaaaaaacattttgacacatggataatcttctctaacggaatcttcgtaattagtcttcgatctttatctttagttctctatctcagttggctctcctaacaaagagtatatggtttcc

SEQ ID NO: 58018 - DNA, 930 bp, Arabidopsis thaliana landsberg
aaatacttgcatgtttggttgtcatgaaggcattagacttactggatttgtcttcttggtgtaggtgttagctgactacatcaatgcaggatacactgatttcaagaatttgaaggtaattaatgcatttcattgaacaactctttaatagaggctgcccaaaagcaccatgagttttcttagagaaaagaatctggaaccagaattaaacccaaaacactctttatttaaactgaaaataaggatatataagagtataaacttcccaaaatagaactatgttctcttccctcggcctaacccgcttgaaacctccaaagcactctctagcttggatgagtctcacaaaagaaacctcatgcttacttataatgaaacgtaaaagcaaaactctatgagaaaaataattatgaaaatggaaatcctaaataatttcctaaatcaagaaataagaagtattcgtatcaaagttcattccagctttgattataaagtattatgaccggaaatgaaaacaaaagagaatcatagtgttgcactcgtgagtgtctcgagaatgaggtctatggtttactaaaatgaccaaaaatatatatttatggtgaatttaggtaataaaagtgaatggagttcaagtggaaaatctaaaacatctaactgaattggtagagacatgctggaccgaggatttaagactggacttagaaaacgagaaggttgtggtcctcaactatgcaaatgctaaagaagctacttctttgatcttagaactgcatagaataccgtcggccaatgagtatgactaccagtggcagagctagaaaaaattattatgaggatcaattattagttccagctgagtcataggggtcagttgagaagaaccaagccaaattatgtcattatataccatttacataaacatgtaag

SEQ ID NO: 58019 - DNA, 1577 bp, Arabidopsis thaliana landsberg
ggggggggcggttttgttctagctgatattgttgagttgagttcatggttctttagagtttgtaactgggttaggcctgttgagactctaatgtcaacccttggcgtccagagaaaagtatgaaatattcgtccctagatacatgacttttaaccccttagtttgttttacctctctcttcctcttatgctgagatttttctaatttattgtgtttcagggaccaactgaaaaggagcaaattgatgttcaaggggatataatctatgatatcgttgaattcattacagacacttggcccgacgtaacatgacttctccttttctaatttgttcttggttctcactgcattcgtttgaaaacttatgattgttactttgccaatttctaggtacctgaaagatccattttcttcatcgaagatgggaagaaggttcaggctggttgatgatcacctttgtcctcgttttttggcatggcgggttcatgtagacgagctagttcctgagttttcctatgtgtttggaggaaatcgcatcttgattataactttcaacgtaacgtatagttggatttatcatactattttcttattcgggttgcgatagttccagacatgtttctccaaacatttctctttttgggggtcttaatatttaaaatgtgtcttgaaatgaacgcgttcttcatccttgacccatcatcagctttgtaagaccaaaatatactctcattggccaaaccggtgatgatctctcttgtcagccaatagtttaggacagccagattcgaaaactgatcctaaacaaagcctaagaaaccaagtgaaacttttatgatcgattttgtgttgagatatttaaatagactgtatactaccaacaagattttatccataagaacattttggtttctaactgtgtttatcaaaccgtttattatcacccccgagaccgtgagacattaagtaactcagcaaagcgatttaaattcgcgatgtaataggaacaactgatctcatggagtcttggttacttgtactgatatcacctgactcatcatctttcttaggatccaatttaaagaatgagagaacgattgaagcaagctgatgctggtgagaagtgaactcatgatcagctccttcaataacatacagcttatgattctttatctgtttagcaaattcggacgcttctgttacatgcacaatcctatcatttgacccatggactgtcaagaccctgaaattttaagagaagcattagttcctctattagaatgaaaccaaaagagaaaaatccttatagagtatgatgatagacctgcagttttcacgaattgagagacatgcttcatgagcattggttgtgagacggtccattagactctcttctgttacccgatattcaaactttcctgcaacgacctcgaacagtaccggtaaatgccaaacaccatgtaacctggttctaacaatcataaaactaaaaagataaaagaattaccctttctgttgctaacatcaatgaatccattatctttgattctcttgaagtagtccttaccaagccgaaa

SEQ ID NO: 58020 - DNA, 1341 bp, Arabidopsis thaliana landsberg
caggtttgagaatgatgctcaaggagaaatctcacttaacaggtatattcattttcttatatatatgaaagaatataagttcttgaatcttttctagagggggacgatgtcatattacatggcctatcgctctggcaaggtttgtcgacgatcacagaagaacccgagaagaagaaggaaggattgatgatgcaaaggaagaatcttgatcccttggagtgatcaatatctatgaagcgattttaattattctatctcattagttttttcttttcgttttctattagaatgtttggtacttttgtgatggattagtatcgatttgtcaaagagtttaagtgttgtactaatcactatgtactagtactactagaattcttatttatatcgttctttagtttataaaatggttgcattaagattgtatttactcatccacatatttactaaaaacaaaccctagtaatttaaagacaattttctccaatgttgttcttttttttatattctttacgacttcatctaccacaatcataaccataagcatagtattattattattttcttaattgttttccatctaatattagtatgaaacttttcctaattgagttttcttctagtctatccttagaatttgaagtgtattgtctatataaagataagatcgaatccttaaatattatgaaaaagctacgatgaaacactataaacataattcaaattcgtgttttcaatatatttatgggttcttagtagttacaacgttgttttcttggcattgaatagagtgaaaatgagtattatatgcgaagtagtaaatgggatagaggtgcgagtcacagaaggtggggaggaccacaaaaccacaattaagttccgcgtgatctttactcattcttttacttgaataatatggtttagtgtagacaaatttcacgagtttgcgtgtattatttggactaaacacaatatttttatcatctatttacaagaaatatcaataagagtaatgaagttatagcaactatattaattatttgtgattctttatttgatgggtccagtcgataactacacggtgtgatacatactgtatatgatttaacaaagagtacttttgtctttcaattttgcattggatgcaaagtattgagatatgagtcgttagaagatgtgttgtaaattgacgtttgagttgaaatggccatgaaaaaacaatgaacacaacagaaacaaatcacaatggtataaaaataaatgactttggggccttgacgattaaaatatcatcagaagcttataaatattaatgattctttttttctaattgaattaaat

SEQ ID NO: 58021 - DNA, 109 bp, Arabidopsis thaliana landsberg
gggggcacacacaccgaacccggccgatataaaacccggcgagaacagaaaagaaacaaggcgggacaaaccaaggaaaacgcaaggaaaccaacccagggggagctgg

SEQ ID NO: 58022 - DNA, 755 bp, Arabidopsis thaliana landsberg
cggaacatctctcactatctcattgacaattggttcagtagtctcgacctgagcagtggcaagattggcgttatgtaaagtatctctttcttgatgatttgaatgattgaggaagctttgttgacccgtaaaattatccgtttgttggattctcatgatatcatctggacgagaagcatggaaagctgagctcacatatggcacatacattgtagaaccatcatttccctcccgcataatcggatcagaatgcatatgaggaaaagatgtctggcacatatgacaatcatttaccctttgaaaactttcagccatagttacttgttgataaaaacttccatcggggagaacaacatggttagatggtggaacttgagacccgccataaccatcaaatggtataccaggagaaatcgtaccttgatatgcagtgtttcttggctctgtaggaagcggtactaacttttgagcagcatgatagttccccaacagattttcttgggtttgcattaccgggttaatcaaaactggtgtggaactaatctgagaattcaagggagccattgacatgtgagcagcaggaaggaactggtgggatgagacacttaaaggactatcttgaaaaggttgttgggagaacaaagaagtactacttggcaaaagctggataggtgaatgaacaatatctgggttgtctaaagcttcttggcgagattcacataggccggtgaatgatgttcagatggtgtagtata

SEQ ID NO: 58023 - DNA, 951 bp, Arabidopsis thaliana landsberg
gcctacaccactatcgccgccgattcaattgcttttttccaggtttgtttctcaatcagtctctgacttaaagtttgaatttttaaaggaatcaaagtgttgattttatgttgttatctgtgtagagactgcttggtaagaaggttatctttatcacaggaacagatgaacatggtgagaagatagctacttcagcagctgctaatggacgtaatcctcctgaacattgtgacctcatttctcaatcttatagaactctttggaaagatctcgatatagcttatgacaaattcattagaactactgatcctaagcatgaagctattgtaaaagagttctacgctcgtgttttcgcaaacggtgatatttacagagctgattatgaaggtctttactgtgttaactgcgaggaatataaggtttgattttgaaatttggaaaggtatatatactttcttgcctgtgccacaagctttatgggtctgctttgtttttgaattctgtaggatgagaaagagttgcttgaaaacaattgttgccctgtccatcaaatgccatgtgttgcaaggaaagaagataactacttctttgctttgtcgaaatatcagaaaccacttgaagacattttggcccagaatcctcgttttgtgcagccttcgtatcgtcttaatgaggtgagacacattctttgaagttctcttccttgtagcattcaagtagtgcatgtgaacctttggtgatacagattattcaaaagaaaacagagagttttttattatagctaattctttcttaatccctttctaatagtctctttttttgtaggtgcaaagttggataaagagtggcttaagagatttttccatttttcgagcattaatggattggggaattctgttcccgacgaccataagcaaaccatatatgtttgggttgaagctctacttgggg

SEQ ID NO: 58024 - DNA, 1704 bp, Arabidopsis thaliana landsberg
  unsure (1)..(1704): unsure at all n locations
ttactatctacccaattaccactatatcaacttggattctcacgcctgccataataccatcacattcacatcactaagttcaatatttgattttaaaaatactcaatttttgtgatatttgaacaaagtttcaagtgattaaattaaaacataatcgtacagttattctcttcaaagatgaaaacattaggaagaaagaaatacaaaacaaacgccacaaaattggagtgactatctccagcgttacacagtataataataatactcaacataaggagccttgcatagcaagcaacaagtcttgcttcttactctgatgctttagacttcttctttttcttcttctttgtgggctctgatgttgcttttcttttagtcttcgaatcctctttctcgtcttggtctatcaaatgcttgtactcttcaagactcgcaaatggagatttccgttttcttttctctttctttttcttcttactacgaccatcatcaccatcactatcatcatcaccaccatcaccagtaccatcatcatcaacgttgttatcatcttcatcatcaatcaggtccatgtccatgtctgtgtccatctctgcatcgctcacatcagccacgagctcttcataatcctcgccggctactccatctagatcatcatagtcatattcaccgccctcttcttccacagcattatcatcaacatcatccagcatattctcaatctcctcattgtcactctcatcaccagcctcgaattcaacatcactatcgtagttttctccaccatcttcatcattcacatcgtaaagttcttcagcagcttcttcttcaggtagcttcttcttcttctttttctttgactgcttcgtactggtcatcttgttcacatagaacttgtggaagactagatcttcaggagccacatctccttctgctaatgagagaatttcagctccaatcacacggtttgacatgtcaagctgcaacatgagatgagaaaataaaacgttacaggggaaaggtagataacaatatggttaaagctttaatagttgaagcatgagctttttaccttcttggaaggttcaatctgggaaccaccatgccaagtgttttgctttggtttcttctccatgaatttatccaagaaagcagttagagataaatcgttcagcgggtttccgttgtaaacaatatttgttcctgagagaagggttccagccattgtagcaaccgaggggtgagcatgttttgaaagaacccccaattcccaccaacttgcacggtctgcgttactgttaatttgagatcaaggattcagttccaaccaataaggctataatatcaagaaagtttttaaaatattatcgttgttccaagtatcgcttgtttaatggggacaaaagcagtatacttaaggttttgatgaaagatgagattaactaaccagtaagaaggttctctatgacgaggatcatatcctccaggaagagaactcggtctcattggcggttggcttcttttttccatatcattagaaacctccatgacttcttcaagctgnggagtttcgtttctaattagctcttcagaatcatcagaagcattatcatcttcttcatcagatagcctgattgccaaagcctctcgtcatctgaagaagatcaccatctctacttgacttttcgacaccatcatgatcaa

SEQ ID NO: 58025 - DNA, 1065 bp, Arabidopsis thaliana landsberg
ttttttattgtcagtatatttccacggtagaagttaaattgtatcgatcaaaatcaataggttccaaacacaactgttgacaaaaccaaacatctgcttgaaaacaaacaaaataacaacattaattaagctcaaggggtttgtctttgcatgattttgtttgtatgttgtgtttgatacttctaagaaagggttttcaaaaaacaattgcagtcttcgaagaatttgtatactagcaaataatcggagaaaacaaatggcagcggcacgagcatggtgcaccttttcctttttgtatagaaaaccacacgcaccacacagccttatgtgttacacgtctcgtcgtatttgtgtttagcttttttatgctaaaacgacaactactacatgacaaaacgcgagcttcggccaaacccccaaaaatctcttcccgttgcttttgatggacttcatagtctattaatctttgttaagttggactatataaaagaatagtttacgatactaaatagaggtttctgtaaacttacgtttaaatcaaataggcaaacgataacatggagtaatatatattaggtccacaatggttcaagacttgaagttattgaaaattgacctctcttggcttttatgtttacaagttcaaaacatgcctgccggtttctagccttgagttcaagtttcattaagatgtttatgataataaattctgaacggcataatgtctctgctacctccacagatttacggcacttgttctaacaagttattataaaccaatcaatgtatgattttgtattacaaacgatggtctttcactcttttgtaacagctaacaaatcttatataattagtcttcaactcaattaaatttgacttcttaaagagttaaaatcaatcactgattataaattaggtattgattgaccaattaaacttttagttttgtcacacggagaaaccagaaggtcgagaatataaattaatatctcaaaaattaccaaatgtgacccaaaaacaaaatctttaagataatgaattaacgattagactgaattttttttg

SEQ ID NO: 58026 - DNA, 387 bp, Arabidopsis thaliana landsberg
aatattacatcaacagttgcaacatacacggagagggcacttttttcaagacagaaccaccaaaccccaacacgaaaggaagaaacatcgattctttaaactcgaacacctacgtagaaaacgacacacatagacttgacgagactacctgataagaattctgacctctctatcctacggttctcattacaaaaagacgacaactctgctctccacaaataaatgagactcacagaagtgaactgcacgacatgccatatagaaaatataaaaaaggcgaaccccttttgtgcaagacccagggggcccaaaactaacacatatgtataacataaggccccaatcctataatcaaccacaagactcgatccataactaacaatcttt

SEQ ID NO: 58027 - DNA, 553 bp, Arabidopsis thaliana landsberg
  unsure (1)..(553): unsure at all n locations
tttatctttacagagtaaagtcccttctttaaacgcgagatggaaaacgttatccaaatttaggaactattcacgctacagagtaaagtcccttaacattaccaaattcaattgtatccactatcaataaataaaactcacacgaattctatgttaagatgggttcaacaggatagaagatcagacagatcctagtgacnnnnnnnnnnnnnnnnnnnnnnnnnnnnnnnnnnnnnnnnnnttgcagaaaacttacgagctgaagatgtcctgcatattcatgccgcctcctcctcctcctcttcctccatttgcagaaaactgtttaagtccctcttcaccatacttgttatatatctccctcttctcctcatccgataacacttcataagctattacatcaaacaccaatacgtcaattctcaaaactaaaaacgggtgagttaacaaagagagcagaatcacacaagttgcaaaacgaaaataccatcgtcgatctcagcgaatttgcgagtcgcttccttcattccttgattcttatcgggatgatact

SEQ ID NO: 58028 - DNA, 489 bp, Arabidopsis thaliana landsberg
tgcctcaagtaagctcgttgaaggtttgctcctttgaagttggcattactcaactttgcaccctatacatataagatccagttaaaaccgtaactaaacactactcatttaagactacacttattagcacaaatcaaataaggctgaatataaattgtcaataaaaggaattgcttaccttcaaatttgcaccttctagatttgctccttctaagttggcattcgtaaggtctgcattctgttaggtaagaaagagaatcaaacattatcgccgaatcacgctatgctcataaacacctactggatacgtgggattgaaaggtggggattaaaccggcaattcataaccattaattgtcatggtgaaaagtctaagctaaaattctaattctacacagactaactacttaaggcacaagacaagtgtgcagtgcggagatctgcaccacagaagctgcagcccactagcgaggcatccacagaacacaa

SEQ ID NO: 58029 - DNA, 479 bp, Arabidopsis thaliana landsberg
ctgactgtaagtctcgtctttgtaactgattatggcaaaacgtgtttgtattggccatttctcaatgctccttggggttgaaaattgaaataacaaaaatatttctttttttctaagaggcattttttctaataatgttatctttctctaatcccaaatgaatttggaaattataaaccttctaatcctacatgagtttgcttacgttaaacaacaacaaaaggaacactatatatatattcaggtagagagaacgaagttacaatcataagacaaacgaaataatgttgaaaatattagggtttagtggtaataacaaagtacccaaagataccagcttcgagctaccggaccatgttaccactatagagcgaaactgtacgtgtttccacgagtcaaagacaaccaaggaaggcattaatctcaaagcttttccggtaaaatcaaattcgttttccttgtcagtaatttatgaaaaa

SEQ ID NO: 58030 - DNA, 1615 bp, Arabidopsis thaliana landsberg
tatatgctttagagtaatataaagtttattcagagctagaaactatttatgagatcattagtcatacttctcatgaacattaatacataactagccaggtaattatactcgaattcaaatataactatgttctaataaaccagctcaaattgcacttttatttaatgattggataaaaataagtatggtcttaaatcttaatggaatacatgcacactaaatctataataaatagggtcttttgatccgcaaactaaaaccaaatcaacagattattcgatatatctaagattaatattcccacacatattgagcaaatcaattggcattaatctatgcaaaagtttagccaactttctaaagtacaaggatgctgtgtacctagctacgacggtccactgaggtaccaataccatacgaagtaaaataatataaagttatttaccctttgaatggcatggtttattgtttaatagtttaatatctaatctaatcatatgattatgtaatcatatcaacaacggattaaggaatccgtgcaatttgctcgtagatttagtcagcttttgtaaaaatggaacgttatacatatttgataactatatagctcacccaccaaccccaattgaaatacaatatttgcttattctgcatcgtttaagctatctcgtgtgtcaatcgattatgagttatgatatctatgattaatactcttttttaagtcctagatatatagtggtagttttgtaatctaccttaacctatgtttgatgattgaatatggtggcatacacacttgcaaataactttgtaaacagaaaaacatttaacaacatgttacaataatttgccccttctaatagggcaacgaacacacatttatcatgtaacgttaagttctagtagactagtagtatatatatagatgtgtccccctaataaattgacttatcatactcatcaaatgacaaatttcagacaaattaatggtcctaattgcaataatgttctctcgtttttagataatgacaaaacattcgcttacaatttaattttttccatatacatatttccattcttgttgatggtaattaattatatggaattaccaaaactggctcgtgattttatctaaaagcatgttctctcaattttttctaattatgaatcattgttattaggtgggaagttgcaatcagaatttgtgtttgtgttgacacaattcagctcattcttagtcttcggtcctcaccttattaacacatattctcttttattgactagttttcattactccgtctaaaatactatatctattttgtttgaattattataaacttttacttgccaaataaatttggattatatgatcatttgtataatcgaaaattatccaacatttttccggtatctttgaatacaaaaaaaatagtatgtggtaatagctaatgggtaatggcttgaagagtaaattttaatcctcgaaaagtaaaacgaattttaaaattattagcaattgacttttcattgttaaaaaacttgtgcagtattggctacttttataaggtcaagtctccttgttaatttactctaaaaaaatttaagtgatcttttc

SEQ ID NO: 58031 - DNA, 573 bp, Arabidopsis thaliana landsberg
tattttatattcttcattactacacatcgcacttggggtatcggttttgggtacctagtttgataacaaattcttcttatttcttttcttgaaaaaggacaagttgatgaaaaagacattatcgtacgccttaacttaaattaaactgatcacgcctcgttctccggttttgccatgttaaacaagtttaatatttacaagttggatgcatattcgtataataatacgtaactaatccgaattgaatgcttaattgacgtgttgatgcgaacttaattagggattacgttaggcgataggcacacacaagcatggtgaaaacataaatttatttaataatcactatgtttccgtatttggattgatctttgaagactcgatctctaaatttgctttattttactactaatttttatttgatagacatatttaggtatctttatcgcctaagggataaaagctactgtatgttttagtggaataaaattaactggattattttataaagggccatttaatttcttaaaagggaaatgacccgtgataaaggttatccagttttttttttttttt

SEQ ID NO: 58032 - DNA, 199 bp, Arabidopsis thaliana landsberg
  unsure (1)..(199): unsure at all n locations
aacgcnnnnnnnnnnnnnnnnnnnnnnnnnnnnnnnnnnnnnnnagctccgtggggcggggtctaacggacccccacccacccctaagccaatccttccaagttacgtcctttgcacttcttgctcattgtccatcaccaagctgtcaccttgaacctgttccttatactcaccggcgtgacgactctgcctcgatttt

SEQ ID NO: 58033 - DNA, 482 bp, Arabidopsis thaliana landsberg
cgttgttttaatttttgtgtgtgtttctaatcttcaatatgacgaagattaatatatgtatagctgtgtttctaatgtgggcatgttgaataaatatgtgccagttttattttcaataataagcatggcttgatttctatagtttgaatttattgggtatatcatattagaccacctagaattcaacttgaaaacatccagcgcttaaacaatttgacttcactccttagggtatctctttttgctatttggagatgttaattttgtgatgcggtacaatacgaacttaaattttcatttattttacttaattcatgttttatttaatttttttcattataagtaacattatataaatgtgcaattaatgaagattttaatctatatcaaacgactaaaatcgatccgaagaaaccaaaccatatatacatgaaccggaaaaatgaaaaaccaaaattgaaaaaccatatcaaacgaaaccg

SEQ ID NO: 58034 - DNA, 180 bp, Arabidopsis thaliana landsberg
  unsure (1)..(180): unsure at all n locations
gggggggaanaanangggaaaaaaaaaaaaaaaaannatattaaatatttannnnaaacaaaaaannaaggggaanggaaaaaaaaaaaaaaaaaaaaacccaaccaaccccacaaaaaaaaaaaaaataaaaacacacaaaaaataacaacacaaaaaaaaaaaaaacaaaaaaaaaaa

SEQ ID NO: 58035 - DNA, 158 bp, Arabidopsis thaliana landsberg
  unsure (1)..(158): unsure at all n locations
aaaaaaaaggggagaaaaaaaaaaaaaaaaaaaaanntttattttataacacaaaaaaanccaaaaaaccggcncgttttaaaaaaaaaaaacaccccaaaccccccacccaaaaaaaaaaataaaaaaaaaaaaaaataacaacaatcacaaacaaa

SEQ ID NO: 58036 - DNA, 560 bp, Arabidopsis thaliana landsberg
cttttatatattttctcaaaattcatttaaaaggggggttggagatccttcttcttcacattaactccagcgtctcttcttcttcttctgttaacaatggcgtcaatgccattgtactggcaaccaccaccagctacagaggtttcacaagactcatcctccgtctcctccgctggaaattccaccattggtccttttatcgccgtctttatcgttgtcaccgttctttgcgttctcgctagtgttattggacggctttgctccggcaaaaccatcttagggtatggagattacgatatggagagatgggctgagagtatatgtggttcttgtatcgacggtcacatcattcctcaccggccgtctccgtcgcctccgcctccacctcgtcagcatttgcaccacacttcctccggcgtctctggtgaatctgaaggacacgtggcagatctagatcatgagactgatggagagaaacaagattctttagaccatgagcctccacaacaaacaccatcatcagctcattctgggataggctttctctgttgatctttttt

SEQ ID NO: 58037 - DNA, 1017 bp, Arabidopsis thaliana landsberg
gtggtgcttgaacctcctgcttcttgcttattgatttctggtttcaagtctttggtaaagagaagaagattatggtgaaaatgttatataaatgtatggttaaggagtttctatctttaacaaccagttggtcgacctaaacccctctctcttcatctttctcccaatcctaaacctaatcttaatcccaatccttatcactctctgtctcttaattacacattgattaaatcaatatcctccatataatcacatttctattttctttacttaagttgaaaatgctactagcttcttgacatagagtcatgtgtgaattaggaagtgtgcatgtgtgagttatatagtttattttgcaagtaaacaataaaaatttagcagattagtagatcgtggtgaattttgattaagtatatcacaacttgttttctgatgaataggtcattaatttatcattataaacacataactaatgtttattagctactttactttttaagtaagccaagccatgattgtttcttcttccttttctttatatatttctttcatacttttttggtatctaattatacattcgtggactctggtcgtccagaggctatgcaactattaaagaaataagggtcccaaaaaataacaaacacaactttttcttctttttttattttcattttgtaaacaccataagtgctcgttttccccactgattttgtcttttcctggaaacaacttgtagatatttatggattagtactttttctttcaaatgcttctaaacttagcattcactttcttgtttgacagaagtctatatcctaagtcctaagtcctaacttggtaactactataatctttaagactagggtccaatactgattagaggctgagagaatcgttagttccatgggcgagacttgagagcaacaacacaaagataatgagaatgacttagatagtgataggaagttgatcagggtggatttttgaagaaatataaagtattaggtgtagaat

SEQ ID NO: 58038 - DNA, 470 bp, Arabidopsis thaliana landsberg
tataaagatacaaccgttactgaaaagatacgattgtaatagaaataataaactgtaaaaactaaacgtaaatattttagggcatagatgcgatgaaagacagccatacaaaaagttactgtacatatttaacaaaaatatgcgataaaaatacacaatcgaaaaagataactgtaaatattttatcaaaaaaatgcattaaaaagacacaaccatagaaaagtgtaaaagacattgcgataaaaatattaaactttttaaaaaaaaacctttaaatatatcaatgaaaagatgcgataaaaagacacaacaaaaaaacctaaatatttcaacgagaagttgcgctaaaaaaaaacacaaccgttcataagtgtttgcgaaaaataacacaaccgtaaaacataactgtatatatttcaacggaagatgcaatacaaaaacactatataaaaaataaccgtaattttttt

SEQ ID NO: 58039 - DNA, 1273 bp, Arabidopsis thaliana landsberg
attattcgtatcagtttttttaataaaatgtgaatttctatttttcatatttaacattgttcatatataataacttttatgggattacctatggtaatagacaagtctgcaaagatataaggagattgcccaaaccgaagcattatcatgtgccaaatttcctttgtaaagagacaatgtagaagtaagtgattccttgtttcttcacacagaactgttacattgctcaatgatagatttaacatttaagatgttaatagcaaaaagaaattttttaaatgggatgattgattaaggtgctcgcgagaacaaagtagattatatacaagaagtttgatcactacaagttattatgatttgtgacggattttcactacataatattacttaacgatatatatcatatctttacataatataacaatgttattaaatacggcttaggaggtggttaggctctatgtaggttacatactccgattttaaattgtagtgtagtttacgcggttttaaaatttggatgtctaataacacttacaaaatttcatattttctctatattcgaatttatagttcaagattcagtaatttcttttggttagttaaacaaacgttaatgacaattacatagtaggttttatgatgtcctttagccaaaataaagtttgatgtttttcaggctttactaaggaattacgtataatttgtatcttattttgaaaaaacaaaaaattagtttttattttcaaaaaaagttatatagtaatttttgcctcgtggctggtacgcatatttggcgcgtgtaaattatcattttaaaataatatttttgtatatagaatgaaatccagaggtaatagatatatgccatagtaacaccccattcatatttttttcttaattttatttaattcaagataagtactactaaatgtaacatagttttgacatcatgtattacgtcgcaaacgaggaattatctaaaatattgtccgaatttagttctaatatcatcttttgacagaaagttttgataacacatgttgaatatgacttttctaataaagaaattaatggtaatagttcagaataaatgcatgtaaaaagacattcgaatattttagcggatcgccattaccagcatagatagacgtttcattatgtagtgagcaaattgatcccgatccatctataaaacggagaaatagtgctcgccataacaacaataacagcaaaaatctctctaacaaaaaaacggttaggcatttgagga

SEQ ID NO: 58040 - DNA, 426 bp, Arabidopsis thaliana landsberg
  unsure (1)..(426): unsure at all n locations
ataaaaaaaatatttgcataaataattgacggctagttgatgtcatagggggaatataatggcactaaattctatacagaaacagaaataaaccaattatgagatactctactttaatgtatagtttgaaaaacaaaaaaaaatccccagctacgttcaaaacctaacgagagagcattaaattagacagcagtgatgtactagattcgcaacaacatcaatacgtcacttaaattaaaacaaaatacgaaaacattaaattaaaataaattttagaaaaagtaattaaaacgaaggttacttattatagtggggagattaagctttttgagtaaattcctatctacaaaatacacgcttctattaaaaaaaaatagaaacncaacgaccacacaaaaacaaataaataaatcataaaaactcata

SEQ ID NO: 58041 - DNA, 1387 bp, Arabidopsis thaliana landsberg
gagatataatttcgaaaaattacatttaaaatcataaattaacatttctgtaaaagtattctatataatcataaattactctaatattgccaattaatatgaattagaaatcaagtagccaacttattagcagttgatatttcttcacggatgattaataattaatcatgtcggaagattagtaatcatttcgtaaaatctatgaagatctttgtggtataatagaaaaggggagacaaaagacaatcattacgcatatacatgtaatgtaaccatgttcgttgttcagtgttcacttgatattcgtctctttatttctataatttgaacacaacaactacattaatgcaaaatagtagactagatgatctggtcaaataatttcatgcaaatttacatcttatcagatgctttaaaacatactctaataatcgcagtacatttttttaaaatctatataccatgaagaaaatgagaaataggtgaaataagtgggcttgatatcgtcagccaattttgctggacaaaaagcaacagtggcaaacaagagagggcagagtaatgaaatatgcgttgaaaggagatagagaaaagatcaaagtcttttttggtttattgctgcatgctccacatgaaaatccagcttggtcacttatgtttcttacgcatcatcattacactcagtgctctcagatttctcaaatccaagaaccctaaaataaaatatgtaattccttttcctttgtacattgtgtaatgcaaatttttaaatcttttattttttctcgtaaagtttcagactttttaagctttctggttaatgggtatccatcaatcatctcacttttgtttttcatatatatttcattaaacaaatgattgaacaagtagattttttctttctttttcaattttggattatgccctcatgtttcttgtaatatatatacatacttgtgttatgctataatatattcttttacgcggtagagtttttattttcctccactgccacaaggcattgattctctctttctctctctctcctctgtgtagttttgccgctagctctgctctggttttgattttgattccttgtgttcccaaaaagatttatttcttttgtttttataacgagaaaaagagaagaaaattgattgtctctttccatggatgccttctcttagactacgactagtatagtttttttttttgtgtagctgttgtacacatttaacatcccatagtgaatgattcagattcacatttcttttcttttattccttcctctcaccatcacacctccaaatttgctctataaatacacattttcccttccttaccttctcttatattttccattgggatttcaaacttttaactacta

SEQ ID NO: 58042 - DNA, 506 bp, Arabidopsis thaliana landsberg
acgccactatgtaagtactctctcacgtttttatatatggcccgtgcgtcgcttaacgaccctaaattgtatttctgtggaaaagtcaaacaaatcaaaaaggccaatgctagatgtttaggtgtaataacaattctctctaattacattacaaggttttgtctgaactccgaatcatgtgcatctttatcttatcttataaaattctaaaaaatatatcggctataagaggacagtgttattacctcctatataattacactgttttccatgttaccatgtttaatcaatataacaacctttgttattttctcattttttattatgataattttggaattaatattgattgcataaacagaaaccaactactgtataaactaatgaagggatattatatatttatataaagggtcgaacagaattcgtaaaatagtggaaactggaaagtataggtcaatgttgtgcacgggaaaaggaagtacataataacactagtgatgggc

SEQ ID NO: 58043 - DNA, 1159 bp, Arabidopsis thaliana landsberg
cagcgaaatgaagcacacagttctacgatggttcactgttttaatgttactcaatatcatcttaggcaaatatcgaacagcgcgaaaggctaaatgtatcagagatatgcgaagaacatagatccatcatcgatttcatgtaaatacacatcaaaacactcaaatcaccaactagtctaagctacatcaattggaaactgaaatagaatcgaaaaacagaactaatccaaacaaatgaaagataatcgacgaatcgatcatctgtgaagaccaatccaagtactcggcgctcaaaacgaaacgaaaccaacaagaaaatagcaaaatcaaacgaaaccgcttcgattcaacaagaagtgatcaaaacaagtaccattaacaggagaagataaactaaaaatgacctaatcgacggatttcgaaggaaaaaaagaaacgagagaagaagaagaagatgatcttacagatgaaatctcaagcttcaatcgcgaaaccgaagcagagaatccgtaacgtttttttctttctttcttctctcttcgtttaagaaaacaacaagattttgcagttacagtagagttttcgtgtgactgtgtgtgtggcgcttctttatgggacgttggaggaggaagaagacgctgacgtcactttttcctcggttattgttcatcgtcaatcgtacgatgaatcgtgtccgttgaatttgaaaggttaatggatctgacggccatggtttttcaagattttaatatctttcttaaaaaaatagttagtgtaccttttaattgaacgaaaagaaaaagagacgacagtgatgtaccaaaaaagtatccgactaacaaattgttatatgacgcgtgtcctgaaaattaggcaatttctttcagtgaattccttattttattttgtctgtttttggcaaacaaatttattattttcttaggataaagaaatgaatttatatcactcattcttctttctttcttttttggtttcactcaaaatcagtcactcattattctgggaatttattattttcttttttggtttcattattctggcacaaaaacaagttgaataaccaattaccacctttgatatttttctttttcataagtatctaatatgtcaaatgggaaaaaatgatcattattgagct

SEQ ID NO: 58044 - DNA, 930 bp, Arabidopsis thaliana landsberg
cttttttaatagttggcaaatgtggactttatgggattaaggattgatgattattataaaacatctttattccaaataatattatcaatttttcttttttaaaaaatctttgaaatcataatgactttagtacttaaaggaagaaaggggtagaattggaaatatgtagagaaaacgagaataactctgacgcgaacgtttctctcctccgtctctcgatccctctcttgacgtctcgctgatctgttttgctaagattcaagcttcaaaaccctaatttctctagccattagcatcgatttcagctcaacttcaggtttgctgttccctttttttgtatcatcccatccaccgatcgatatttctcaattttctgatttgctgctctctcgagagagagtcaccgttatggagttggattcactatatgatctgataattatgaaattcacagatgcttctatatatagtaaatctgatttattagtgacgaatagatgaacatattcccttgattattcttctacaaatctcggtagtgataaattgttaggttttgacgataattgtacttgctcagtttttcatgtgtttagttatgattcttcttgggcatgtctgtgtcttcgaatcgattctcatgtgattcccattattgttttttttcttctggttatttcagattcaaggaaacaattattagcttctcaagtgcttcagtgatccgatacaatggtagttattgccttctctgtttcattgttaaattttgttaatttcagtgattttgagctaagagttttgtttatccttgataaattcagtcagctttgttcaatttccattcgtttctgacggtggtgctgcttgtgatctgcacatgcacatatctgaagatgcagttccctgccattttagagcagaaactgg

SEQ ID NO: 58045 - DNA, 850 bp, Arabidopsis thaliana landsberg
gaaaagaaagataaaaaggggcaaaattcatatacatgaaagtatcacaggaaatgtgtgttttattatatccaaaacaagcttaagtgtaatgtattgcctggttctgccccttggtctctttaacccttggtctctttaacaaaaatagtaagtgctgaagcttgagaagtttctggtccatagatcaataaactacaatgcatgctgaaactaagacttattgtcatctagaggcaataacaaatgagcacagttaatgggatttggcaatcaagcttgctttagtgtaaaaagggttttgtagaaggaaggtcagagctctcatcacataatcctaaaacctttgtttcttcagttccaaaaaaaccaccatttcacattgatttatgtaattctctgttcttcttctcacacttatcgaaccgatatataaaagagaatatgttttgtcaacagttcactacagggagattagaggaagagagaaaaacctgttatggatgtgaggaaatcagtgcaatccatatgcccttcgcataacgaatcaacaagtttaactaacatatcactgaaaacacagaataaatccatcagatggttagtaaagaaacgtcacattatatcaacacacgataactagatgaggcagaagtcacaaccttctaaagtttatttgatgcagaccaagagcaacaaccatctgtcaagtgtagcaaacatgttaacttgatcctctgaaatcacttcaatgatattcgagaaccagaatacctgatcgagatgcataaaaaccattcgttcaacaagtggagctgtgacatgatccaaatatgatattggagaaagc

SEQ ID NO: 58046 - DNA, 682 bp, Arabidopsis thaliana landsberg
aaataagagtgtgttatcagttgtgatgactgtggctgaaccacacatggagctcaacgaagaaagtaagcaattcgatgttgagaggttatcgccaaagaaagagcaaagtcctggaggagaacataaagaatgtggtcttaccagtgctaatacaagtgaggaaactgttacttcagtttctggtggtgaggaattggatgttgatatagttgaatctgatgaaaacaagacttccaccactgatgaggacccgaacgctactgaatactcaagctcattttccgacactgcatctgagaatgctgaaatgttgcttgatggactaaccggagaagctgaggtcgaatctcattattgggatgaaaccgatctaggtcctgcttatgattcttttagcagcatttttcattttaggtgtgttttctgcctaaatccttctcgtgttctttcttttctactgttcttgctgttctgtaattagttttctcttccgtgtgttttttctaggaagaaaaggctaactaaccactggaggagatttatcaggccactgatgtggcggtccaagtgggttgagttaagaattaaagagtcagagtctcggacattcgaatatccgaaggagcttgagttatatgaccaagaaaagctcgcagctactattgatccatccgtgatg

SEQ ID NO: 58047 - DNA, 520 bp, Arabidopsis thaliana landsberg
cccccaccgttgatagacttctttcggtcatagtgtcatactctatcactcccgtcatcttcaactctcgcaacatcatggtcaccgtctcttcaaccaccgtcgatgtcatcctcctctcttcaaccacccgcatctttgagggaattctttacgtcgtcagtgtcatactctcatcagccatcttcatcttcaactctcgcaacatcttcgttctttccgtcgtcaatgccatactctgttcgacctcccgattcgtctgatcgaccatctttgagggaattctttccgtcgtcaccatcatcctctattcagccacccgaatcatcatcatctaagcgagcacggcttagtaacatctttccgtcacctttatcctcctctccgtcaccgtttgttaacccgtttctccgtccgcaggcccaagaaccaacaataccaaatttcataaacccaataccacagatctctccaggcctacctgctctattcccaaaccctaaccctaatcctaacccta

SEQ ID NO: 58048 - DNA, 510 bp, Arabidopsis thaliana landsberg
tttgattctacgtgtttctcgagttcatatcaagcgcttcgcctacacagctgcacgtgaaccaaagccgggtcaagaatattttaaaaataaaaatttatattttaaattattttataataattatcatagaaaaatatcgtttagtgcttagatatttttgaatagatataaacaaaattataagtaactacatgaataatgaattgttaacagtacaaatcaaacaaaatatcattttgtgattggtaaaaatatattaaacttgatatataaaataagatattcagtacagaaatatgtatctttcagcttttaaacatatatacacataattagctttgataaaaattgattaaaaaaaaagttgataaagacacaaaagagaagaatttatggtagtggaaaaaaaatcaagctcacgagaaaaaataaatatataactgatctaaattttaagaagaaaaatagattaatcgtgagctaatggtaggcttttaaggtcaacac

SEQ ID NO: 58049 - DNA, 1172 bp, Arabidopsis thaliana landsberg
agaggcggtggttcggaatcggctaggcttgtttcggtttcttctgctgttggtgaagcaatggagtttgttgctttatttgatagagattatgggagtaataatgcttttaagattgattttgttgtggaaggatttatggatgcgcttcagcgatctaggagttcgtttaagctcttgtttgtttacttgcattctcctgatcatcctgatacacctgtgttttgtggtgggacgctgtgtaatgaagccgttgtagcgtttgttaatgagaattttgtttcttggggaggtagtattcgatctagtgaagggtttaagatgagtaatagcttgaaggcatcgaggttcccgttttgcgctgttgttatgcctgctgctaaccagagaattgctcttcttcagcaggtaaagatacaatcttagattctaaaagaatgtaatcaaagaggcaatttatcaactttaggtagacttggttatgaatccggtaattaaattattagtcctcttagggaactgcattggaactgaatccattctactaccttgttgttgaagtggttagtagtaaagggggaaaagatagttgtttgattctgctttcatctgtgagccgtcatttcatacatttggtgtaaagttctgcgttctgatccggcttttgtgagtttagtagtgtgttgtgtggcagaagatgtagttcttgagtttatcgtgttctttgttctgtttgtttgtggcaggtcgagggaccaaaatctccagaagaaatgcttgccatactccagagagttgtagaagatagctcacctactttggtaactgctagggttgaggcggaggaaagaagaaccaatctgcgtctgagagaggaacaagatgctgcttaccaggctgctcttgaagccgatcaagtatgttttctgttctttgtaggcctgttcagaatttacaagactttatgattagtctactgtctaaatttgttgcgtcatttgttctgctgattaggcaagggagcaacagagacaggaggagaaagagcgtttagagagagaagctgctgaggcagagaggaaacttaaagaagatgaagaggcttcggagagagcagcgcgtgaagcttgagagagacaagctgctagagtgcgaatgagacaagagaaagc

SEQ ID NO: 58050 - DNA, 1315 bp, Arabidopsis thaliana landsberg
gttgacaactatggactgtttcatggaaaacgttgtcgtgtgtagactcaaatcaatacaatcagaaaacgaatcttatgacaagcaaagacgcgacgaagtttcgatgattgatcaaaagacgatcaccataatgatgatgatgatgatgatatgtagtgagtgggtacgaattacatatttaagataatatagtgggcacaaatctcacagagtggaaagtacaatggactcacacaagagcaagagaaagagaaagagaatctttttctaacacttttgattttagtgagaagacagagacaaaacaaagaccactatgagacactatccatatccataacgaacagcttctctgtctctctattatcagtatacaattgtgtatatatagacatgtattacctacctgtcattgtgatgttatatgtctgaagaacacaacacatggaccataatgatgatgatgataagaacaagaacttaagatgaagtaagagaacaaaaaaaagaaggataagtctttattgaaaagagtttgagatcagtacatgtatacacataaaaggatagattttttaaaatggttacaggacaaagagttttaagagaatgcagagtccccctgtaccggaattcataaaagaaaacactgacccttaaaccgaaagaactctaaaccctaaacgctaaaccctaaacagactttgggttacttctaaaaccttctcttatggctttagtactactactaaggtgatctgtataggcttaaaaaggattggtatcaagttctgttacacaaacccttttcagccacttatgttacagacaccaatttaaaaacactacatgggttttttctcctaagctctttacatgttgaaaaagttaagaaaacggatgatggtaataagatcaaaccgataattagcaggaaaatgttaatatattctgtattaactattaaccccccatttttttgttgtttctaatcatctaccttcgtccattcaaaccgtcctggtagtggttgttcgttcacaggatcaaagttgtacctgaagaaagagttgacagaaaccattagagacacaagaccaaaagagaagaacagaacaaactggaaactcataaccaaaagaacagaacagatgaaacgaggaaacacatacttctcaatgaattgcttctgttgttcttcttcagcacccgagaaaaactcgtcatttaggtgtagttggtcggcgacgatgcctgcgtgacaactgtctttctttggttgctttcacttcacaaatgttagctttgtaga

SEQ ID NO: 58051 - DNA, 482 bp, Arabidopsis thaliana landsberg
taatgttcttgtgaatggaaacgcattgaacttggatatgaaagataaacacttcggctaatatcccccctttgctttttcgtaaggtttaacagaaacctgcatattgctaataccttaaattccaaatttcctctacgttagcgtttcaattttcaaagcaaacctagctgtcgtgtgcttttacaacaaaatctaccatgtccaagccgcaaattcaaatactcttccattactttaaaagatacactgctcacttatgttttgtacattagaatactacacagaaaataagtttcgttaacacacactattacacatttacacattttaaaaacatgatccttacacttatcgagacttaaaaaatgagtaaacaagcttcactcggcagctctgataatgcgcatgacagccaagaggatgttgattttatctaagtagagcgaaactgctgcccaaatatactcatcttaccttgt

SEQ ID NO: 58052 - DNA, 1381 bp, Arabidopsis thaliana landsberg
gttaattccttaattctaagtgaatgactatagtgcaaattgataaataagaggaaatatattttggactatagtaatttacttaatttatcttccaaattagactatcaaactatagtagattttttgctaaacaaactatagtagatagggatacgctaatgaagagtctcttcctattttcatgagagatcaacaaccttattacttgccttaagtctttgttttatttggttaatgttcttacgtgtactattctttaccattttttaaaccatggacgtaacgtaataatcattgatctctccaatgccacgaatgcatgggtaggtactattcaatttatttgggccaaccatatcgaccagagattttcattgtagtaattcatttaatgttccctttttacgtaaaactcaaataaattataactattgtactaaacgtagaagttcttctgaccctccttttggtcattcattcaaataacgagcctcttatatgttacaaacatacgaaaagtgaagttgatgtcaatcaatatataagtacaatttattgctcgttgaagtttgcagaaatggacaaaacattttcttcttttttagttagttaaaaatcttgatttattagtataaattaaaacggattgtgtacgtattacacatttaagttgaagtttcagacagcttctttcaattaataaatgcatggtgtgtgcacttttattactctctaaagaaactgcaaacttaactttatctttcaatgaataagttctaggtaagaataagttctaggtaacaaccaaccactaaggctcgggactaaccaatttattgattaccaattgtaaatgtgcatggaaacagttgaaaatttttacagcagcaaaaaaaacggttagcattatttcgactgatttgaaaacgacttttaaccatcatctcaaaaagtcaagtgatttaataatcgtttacaaaagagatggatacatttgtattggatagacactcctttgtcttttcgtgcttttttgaagatttttccatctttgaaagaattttttaaattattgtactgaccaaatcgttacagttttacttttaccacttctcataaaaaagttcgaacataaagttttattcatcaaagaaagagataattccacatgtaaaaatatggctcactggtctatattctaaaccaataaagtgaattcttaacaagacaaattgatctttctctattcatgaatagtgcattaatcagaaatcatgttacataactaatttacctcacttttttcaatctttctctattctctatgataaaactcgaaactagggagatgagccaatcaaagcttaaactgagttgt

SEQ ID NO: 58053 - DNA, 144 bp, Arabidopsis thaliana landsberg
  unsure (1)..(144): unsure at all n locations
cgccgagcaccgacgagacagaaccngaaccagcaaccgaccggaagggaaacaaaaaaaaaccacccccaaaccgancaaaccaaaagaacgcaaagccaaagcaacaaccaaagaaacaacgaaccaaaccaaaacacagcg

SEQ ID NO: 58054 - DNA, 1127 bp, Arabidopsis thaliana landsberg
tgttttttttttgtatcatatgctgagatatacggttgctaccatggatagttgcaatggtgataacatttttcttatgcattacaaaaacttgagatttacataatatatcagttttcatctccctcatttttaactaaaattttaccaatttttgctacttcaaatatatgatcaatggaaataaatattttggtaatataaaagggaataaaaagttgttagatcgattaaatcacacgttagatatatgaacgatcttttgcatagtgtgctgtttttctctaattaaaaaaattatgcaaacacgttaacatatatatagatatatgtatgttaactggaatgacatgtgttgatgttttacgttttacactttttaaaactcttatggttcttactaattctagaaactcagtacatcgttggttaataattaagcacatcactgctaccttaccaaatacgccaagggtcgtttggatcggatcattaattaattgtcatatacgtctatgtattagacactcgtttaagcttaaatagatggtgaactatattataatacataaacaacaattgcttagagatttggttaggccggtggaattatacgaatcttaaagagtttaatatgcttgattttcgttgtcctgcctccattgccaataatctttccaattttagatctgttgacttgcattattagttcattactaaatcaatcaatagcctctaataaagctgtaaataatcatttttctattaaatgtactaagaacctttttattaccttgtagaaagagtacaagaacgttttggctcggtttattgaacaaagaccaagaaagaaccaaaccgaagacaactatttggttaacacaagatgaccggtacaactttacaattttatcaggttctcttctcaaagttgtaagtgctcataccacgggaccaaaacctgtcaagatgcttgagatttgagactgtggccgctggttagatgattcttctcaggctctctgttctcctggaaatggtattgaaccacagcaacggtaataaccgttctggtcgaacacaaaacgctgtgagagatgagcttcttggatcagatattcttccca

SEQ ID NO: 58055 - DNA, 539 bp, Arabidopsis thaliana landsberg
gatttttcttaataagttttggttcgtgttgtttaaagtattgagtacttaactactaaactaaaatcatgtatatgtggatgcgaaatattgttttcgtatttttttttctacggtgatttcaatattggtagctatataatctttgtgtttaatgaacttaaagtaccaaaacattacaagtgagttttcggtaaggaactcagattgtttacatctcattaatctatttacattaattcgtgatcttctgtctacgttggagtttggagtatttcaaaatgttttctctagctgtatcttcacaagatgggcctctcaaaatatgttttgtttctgtttaaacaacccaaatgtagcttttttcctgtttaaacccaaatagtattgtttttattttctaacaaaagagaagtattttttttttttttttttttaattaataattttatttcttcccaaagggctttttcgttttgggccaaacgaaaaccacagtttcaaaacgttaaaattaaccggcgacaaaaccgaaaact

SEQ ID NO: 58056 - DNA, 901 bp, Arabidopsis thaliana landsberg
ttctcttcctaaactggttacagcaagacaataataaccactagtctttgtcatagagaaagaacatttttggctttgaagcatccatcttcctatgtgagtgtccttagagaaactgatacacacaagtactcattttcttacaaacactaaacatcgaagcttcctttctaaagtaaagtcttcagaccaagaaaagggaagatcacgcattcttataggcgtaattcgtaaatagtggtgagtatgaatgatgcagacacaaacttggggagtagtttcagcgatgatactcactctgtgttcgagtttccggagctagacttgtcagatgaatggatggatgatgatcttgtgtctgcggtttccgggatgaatcagtcttatggttatcagactagtgatgttgctggtgctttattctcaggttcttctagctgtttcagtcatcctgaatctccaagtaccaaaacttatgttgctgctacagccactgcttctgccggtaagtttctcttttggtttctaacaataagaacagatcatcgtaaattcaaaaacataagcccctaactatgcgaacgtagacattaggacttgagcctaacagttttaggtgaaccaacatttgcagtttacaagtcattaactctgttttcttttttcctatttccatatgcaagacaaccaaaacaagaaagaaaagaagaaagttaaagggagagttgcgttcaagacacggtccgaagtggaagtgcttgactacgggttcaagaggagaaagtatgggaggaacaaggtcacaaacattcgaacgtgcatgtacggaacacacagtccaaatggcttgataacaattttgccatccaaccctctgatgcaagagtccttgaacagtaca

SEQ ID NO: 58057 - DNA, 878 bp, Arabidopsis thaliana landsberg
taggtccactcttactgcccgactagcgcctaacgaattattgaacataagtctgaccagataatataaaacgataaaatctagcttgacgagataataataaactattcgcatgaatctgcatttttttgagtaaaatagataagtcgaaaaatgaaaaaataaaataataatatattaactgtttttattatataaattttacttttacgcaaaattatatattaaacgtcacataattaaaatcccttaaatctttatcctactgtatgttctgaatcgggcttttgtattttgattcgtgaaaagtctttcacttcaccggaccgaagatgattcgtgaaaagtccacatttcacatttctcaattcacacttgtgctttcgaaatgggcttttaactttggtcctaaagactttctctcatctatatgtctctgaattctaggacacagtcaacaagtcaacgtcggtaagagatcccacaacaacatctacacagacacgtgtacactatctcccactttttcaccgacacgtgtcggttctttcacctacaagtaaaactctctccattatcttcaataatgtcaaaaatgtcacacacacacacttggtcatagtaatacccaatttccacggcacctatttgccatcgaacaaacaataaaaaactttattagttttcacaattaatacttttaactctttcccgagagtcgtaagaagagaaaaaacaaaacttttttctttttcgttgaagaatttttacataaaagttttggagattctctgatcagaattgtgtaaaaggtattctccttttttttttacttggtgaagaattaaaggcagtaaataatttgatttcttattgga

SEQ ID NO: 58058 - DNA, 643 bp, Arabidopsis thaliana landsberg
tcctttgggcgagctcgagctcggcgtgcatctcaacaacgacctgacgctgatcagccgcttgcgcgcgatctacgatccgggtgattacgactatttcaatgcgcgcagcctcgacggtgcgcaaggtggcatcagcggcggtcagccgagcctgtaccggggcaaggtcgactatttcgactatcgcgtcgaaggcgacaagcaccccaatccgctcgagtggaccggcaagaactaccaggtctatttcccggcgctgtttctcgaatacaaccacggcccgctcaacgtgcgcgtcggcaaccagcagatcgcgtggggtcaggcgatcttcttccgtgtgctcgacatcgtcgacggtctcgatctgcgccgtcactcgctgctggactacgcccaggaagagttctcggacaagcgtgtgccggcgctcggtattcgcctcggctatcaggtcaacgacgacatccttgccgatgcctacgtgcagaaattccagccaacggtgctcggcaatccgaacacgcagtacaacatcatcccggtgcagttcaccgttcatgacatgtaccacgaaggtggttacgacaataaggtcaactacggcatccgcctgaagggcagctacggccagtggggc

SEQ ID NO: 58059 - DNA, 538 bp, Arabidopsis thaliana landsberg
tctcctttttacctgaaatacagccactgaaagtattgtttcgcagatctatgcattaggtgcaaaacttggtagatcattagaaggaaataaaccgaggagagataacctgttgaagaaacctctcgggcagagctggattgaagtcagaaatttaattcacacattcacgacaggtgatcagtcgaaattatgtactgatgtgctgtatcccttggtggaaaaaatgagtaggctggataatagaagtgaccaatataatggagaactttggattgaggaagaaggaagggaagaaacttgtggaatccacagtgaaaaatttgccatggcgtttggtctcatttcgtcatccggtgcatctaagacgacgataaggatcttgaaaaatcttaggatgtgccgagactgccatgatactgcaaagtacgtctctaagagatacggctgtgacatattgttggaggacacaagatgcttgcaccactttaagaatggagattgttcctgtaaagattatcggtagagtgattattga

SEQ ID NO: 58060 - DNA, 812 bp, Arabidopsis thaliana landsberg
tttcaatatatctcctgatgaaataatagagtctgtcaaatcaggattattagcacccattgaagctgagcctgaggtgttctttcttttgtaactctatcttcgctttattcaagtataaaccaaaggctagttctgaatcagctttttgccttcatccttgcagctcgaggtgccaaaagaattgatctctcaatcacaattgaaagagttaaccttgcagagaaatccatgttttgtccctattcctgggtcaggtttaaccaaattgcatgacaaagagactgggatcactcagcttcggttatccaatgggatatctgtaaattacaaggtacgtctttcatctttttgctcttccttactatgtaaggatctccgtagtgattttctttctacattataagacatattcctcaatatttatattgttgtttgctgtctacttatcaaattgcagttcttaacaacttaagaaaatatgcttcgttctagcagaaaacatttatttggtgttgattgatacttcagtttttactgtaccatcttgtatggagaaataaagacccttcccttgacatttcccttttcaatatagaaatctacgaccgaatcccgggcaggtgtcatgcggctcattgttggtggtggacgagctgctgaaacatctgattccaaaggagctgtggttgttggtgttcgtacactcagcgagggtggtcgagttggagacttttcaagggagcaggcaagtgaagctgttgaaaactgtattgtgatttttaatctaaaactaaaaaaaggatatgaac

SEQ ID NO: 58061 - DNA, 228 bp, Arabidopsis thaliana landsberg
ttaaaaaaaacccaaccacacccgaaaacgttttattttaaatcccgataactacctcccacctaaacgattccctttaacccaaaaaacctattatgccttcgccaattcttgacactctaatcactcaaactgaaattccttcattcaccaaaaaccagacattagacattcaagaccattataaataacaatccgtgcttcctacccaacaaactgctactttct

SEQ ID NO: 58062 - DNA, 553 bp, Arabidopsis thaliana landsberg
gaagagagactctggaagtttctaaagaaactgtcagtgaattggaaggagaggcgaattttttaccaaattactatcggatattgcggattatgtacgatctatggaagatcgcttgtcgaaattaatccgatgtttaaacgaagagaatgttccagaagaggaaagagggagaaaactggaaacaaaggaatataattccaaatctattttggagttagtcaaggaggttgtaacgaagttagagacgttccaggaatctacgaagaagaagaagatggagctaagtagaagtgtggagttcttggaagaggagaatagagatatcaatgtcttgttaagagctgctttgtttgagaaacaaactgcagagaagcaattgaaagagatgaatgatcagaagggattggctttgctggaaaatgcaagaagagggttgcaaagaataggttttggttttgggttaggagaattcagtaagggaaggttttaggccggaaattttcgccaatgaagaagaagagtatggagggggatggttcattactttatt

SEQ ID NO: 58063 - DNA, 236 bp, Arabidopsis thaliana landsberg
  unsure (1)..(236): unsure at all n locations
ttcgattagtcatgccatccgcaagatgctatggggatgctggtgcttacttaaccaaccccttctaccaatacggtttgatgagcccacatattgcttgacttggctcagtacctgatgaaaccgcgctcaatcaacggacattaccagtgctcataaagggacaacnnnnnnnnnnnnnnnnnttacaaacgacaacaccgttgtaagagatcaacacgaagaactcccatttc

SEQ ID NO: 58064 - DNA, 725 bp, Arabidopsis thaliana landsberg
gcctagttcaacttaaaacgaatatctatatttactgttattgattgtgagttaccaactaaaatattgttaaaagacattgtaaaactacaaatggttcgaactgtatactaatgatgtaaactcgtgtttcatcattatgtccgatatttttttcattcaaccattattcaatttcaacatttctttattgtctttttttctttctagaaagcctatatatttaattaccgactttgcatattcagaggataagttgatacgtacttgttagcaacctgtctagatcatcttttgattgtagatttgactttaaatttctcaaaattataaatatgaaaaataacaagcaaagaatttacaaatgtatataattatatacacgcattgatgaataaacatatttagaaaataatgtgttctaaggaaattttgtggcatttaaaaaaaaataattaaacaaataagaatagtgtaaagttgtttaaatatgtatgtataagtggcatgcctttgaggatacgaacttaaaagggagttaggtaacttgcttgggaaataaaatagccaaccttaatttgaggtttcctcaatgttcttatcaaaaaagaataaaaatttcggaaattcccttcatggattttgatatctaaccctaatcgtgaccttctttgatagctacaatctccctatctttgcttattccccaagcaattttaccttac

SEQ ID NO: 58065 - DNA, 824 bp, Arabidopsis thaliana landsberg
  unsure (1)..(824): unsure at all n locations
ctatatggttccatgaattttttgagtgaattaactaaccatactgcatttccttctaatttttgtttacctccgtttcattatatactcgttttaaaatatttttaatttttaattatatcgttatgaaatacacttataagggttttttttttctattgaataagctgaaataataacaataaaaatgattacgatcgtaaatttggtgtaatttctatgtaatgctttaaatttttgagacaaaataaattgatcgcgacaaaacaaataaagacttacactacacgtgtctatgcattaaatagcaaaagctattgacggtgcaaaacgtcaaaaacaaatgccctacgtcgcgggtaattaacaaactcatccacatatatatacgagtttcgtatctcaaacatttcataaatcaaaccatcatatacctctcaaatcatttctttgatttctataaacactattcttgttaatcactgaccataaaaactaatggctacttctcgtctagctaggtttgtatcagaggttgctccacctcaatttgtgacggttatgaggaggcatagagcagcgaagcagaagctagacacaatcaaagaagaagagaataaagaagattctttcaatggtgggatggtggtgatgatgaagacatctcatcaacatgtttattcacctaattcttcttattcctcttcgtctacttcggtttctatttccggatctagcagctctaagaattttcgaagctctttttctgtcctcgaaaactaagatctacgtactaatggtngtatttttgtaatgatcgggtc

SEQ ID NO: 58066 - DNA, 119 bp, Arabidopsis thaliana landsberg
ttacgactaaactgtaccctatacaatgcaattattgcatataaataaaccttgtgtcggacaaagtaatcaggcggcgttatgacatctagcctgtccttttctgaagactcgggagc

SEQ ID NO: 58067 - DNA, 889 bp, Arabidopsis thaliana landsberg
cgaagtttctcttctagtgtagccaaaggattttccttgcatgcattcatgacatcacgaagtgtgaatccagactccagtaagatatattcaggtgggcgtttgttattgctagaagcatgcaactcgaacatggcagggctcaccacctgtgaaatgaaattttaaaagttacatcaaccagctagcatttggcaggaccaattacaagacttttaagaacagaagatatcactaacctgtattcctttgcaggcactacaaaagcacaaaacgcctgatccttttatcactcctttaagccctctagtccccgcctctctcacctacgagaggatggtgacatacatatcagctaaataaaatttgtttttacatgaatagaataagaagtcaccatatacctttgctcctcgaacatagtacacaattagtccctcaagtattccacaatcaaaaatatctttcagctttgctgggaaattccttagaaatttcttgggtctgccacgcttgttgggagtagtaactgaaggactttgaaaaccatccatttcaacatcattggcatgcatatctacatcgaccaagtctgctggttcggtagtatttcccaaattaggattgtctgaatcactttcttctttgaccaatgacctagtaaacctgctcaatggcttatctactgtatcattcactgccttcttatcaacaccttgagaatgaccactcatctggaatgatctacttggaagcccgaggcatagagaatgaccattcatctgggatgatctacttggaagcccaaagcatatctccacattattttgctcaagaagctcctcctccaccacatatgccactgaaccagatacatcaacacaattat

SEQ ID NO: 58068 - DNA, 552 bp, Arabidopsis thaliana landsberg
ccctttgggatttttatttagttagccggagagagtgggcttgtcagagtaaggagacatggaaacatttgtcgtagtcctttttcagatttcaactctttcttgtttcatccaattgtcaatttttttttcttcctattaacttattcaccattggttcccaagacggtcgtgaagagaaaaaagatgtcacaacactacaaagttgttgtaaaacaaaaaaaataaatactatatacacgaaagatgttacacaaaaagtattattttgcattttcaatgcaataattaaaatgaattccaagtttattcttttttttttttttttttgtgcaccttccaagtttatattcttataaactgattcttattatgtaaaaagtagagaaaatgcagagagttacatggaaaaaaattcaatgtagtcttaatttgtgagatttttttttatagaatgacacttagtataaaatcgggaaatattatattaagaataatcctaatcaggattatacaactgtacctactttaaataatgttgattagaattta

SEQ ID NO: 58069 - DNA, 163 bp, Arabidopsis thaliana landsberg
aaaaaaccccgagcgcaagcacagaccaccaccaagacccaaaccagcaggaaccctctccccgcacagccaagcacagcccaccaagagcggcacccgcacagaagcccgcgcacaacccccaacagacacagacccagccaagcccaaaaggcacaaacca

SEQ ID NO: 58070 - DNA, 170 bp, Arabidopsis thaliana landsberg
  unsure (1)..(170): unsure at all n locations
cccgagaacagaaaacncggggggaacaaaagggnaaaagcacgnncgtccttcaaacccagaacaaaaacgaaccaagaaggcgcngccaaaaaaacccccccaccgncccaacnngaagcgagaggggncaaaaaaggcaccaccaggacaaccggcccggggcaacc

SEQ ID NO: 58071 - DNA, 455 bp, Arabidopsis thaliana landsberg
aactatgggatcttggggattcgggcgcgaaaaaatgttaggttggttgaagataggttccgttccgcccttaatatatcttatacaaaaagataagatcattacgaatatgtgctcaattccttttccataaagttgggtattaaattatgaatattatctagaaattttagaggggtgtatatagtgtgctattttcgtgataaaagtaaataatgcatccaaaattcaaagtggatcattaacacgttttggtatatacatcacaatttgtcaaacccgtaattaattgcgccaaacaagaaaaaatgatcttatggggcaaaagtaaatcacatatatggcagtgggaagaaaaaaggagattatatttttcccctaaaatagactaaagtaacaaacctaaatttctctggaaagaattatatcataaaacctcgaagccgacaaaaact

SEQ ID NO: 58072 - DNA, 320 bp, Arabidopsis thaliana landsberg
tttctatttttctgaaccaattggtcaggtcatgggggaaggtggccacaatctaccaggaagcgtcatgaagacagaagtagtatcgaagctgatcattacacttgtcacctgaagcaatgtaatacaggctgatcaagacgcgacctttgtttgcatcatataaacatatggggacacaataccagtggggcacgatataccacaggtgagtaggccgcgacaccagaggatacggggacgtcagaacacgagagagtctgtctccgcgcggaacacctgcttataaggacatgagctttatgcgctcacaacttggg

SEQ ID NO: 58073 - DNA, 1826 bp, Arabidopsis thaliana landsberg
  unsure (1)..(1826): unsure at all n locations
agttttcatatctcagtatatttagattttcttgattcctgagatcaatcaattatactagttgcttgtcatgtattcatgtaatgcttagaatatagatgaaggtgtgatagtggggtacattagtctgtaatatgagagttgcttccgtcaataccatactggttgctgttatgtaatcttctggtgtctagcaaattttcaattagtttctttcgttctacagttccttccaactggcagtgtcatggatttgatcggcctatctatacgaatgtggtgtaccctttcccgaatgatcctccttatgttcctgaggataatcctactggttgctacagaacctacttccagattcccaaagaatggaagggtatgtaaacatatttaactaatgaaaataaatattattttccatatcttttcatactctccgggggaggcggagagacttcattatctatgtaccttcctcatattatgattanaacaatgtgttttcatataatttggatggaaatagccaactttgaatcttttcatctttcataagattagtttaccaagttttattctttgacattcttacatgaccaggtctaatgtacagatatatattttgtcgaataacagcaacattactattaaatggttaacagtactgtttccttattaactgcattgggccatgatttgtttcgataagcatgcctctcgcatttcgagccttttccaactatcttgctgctagagagactagtgaactatattttaaaagttagtgttataggttttgaagactttttcgaactttcagcaaagctgctaaattcagcaagttatgcaaatgaccataaatattgtgccttttcacatgttaggtataagtgaaaatgtgaacaactttcccaggatactacttttgtatgatctttcattttcccttgcttttctgaactgaagttgtgtctttttggcagacagaagaatacttcttcactttgaagctgtagactccgcattctttgcttggataaatggcaaccctgttgggtacaggtgagaaatatgctctaagaggactaacctccattttattgatcttgttctgtccttgtctttagtcatctactagtatatagaggcaaagtctgtcttctgagcccagcttgagtctaaactgcttagtcaaggaaacgtatagataagaattgatagaaaatatagtctatacttccaatcgatttctcttttttaagaacgtagccagatttacttggaaacataagacataagaaataatactgcatttactgaaaaaaaactagtgttttgtgctctgttataaaaaacatctaacttagaatactatctttaactatagccagggttctagtcaaatcatgagatacaaagacttgtctcatttcaacttcatttatgttctagcacctattttctgtttggcagtaaagttcagaagtaaccttaccaaactaattttcccttttctcttaaaccagtcaagacagcaggttacctgctgaatttgaaatatctgattattgctatccatgggactcgggaaaacaaaatgttcttgctgttcaagtctttagatggagtgatggttcataccttgaagaccaagatcattggtggttgtcttggtttcatcgagatgtgcttttggtagcaaagcccaaggtttttcctctagtttcgtttaccagagtgtatgtcaattttaattcatcttcttcactatatacggcccttgaattgattaacttctgtatgcaggtctttattgctgactacttttt

SEQ ID NO: 58074 - DNA, 1598 bp, Arabidopsis thaliana landsberg
  unsure (1)..(1598): unsure at all n locations
agatataaccttatcatagttgtttctgttttcgtattaccatctgatttatttgttcttttagaaaagacacatatgtaattgcgagtctgctgcatgagaatcttgaacttctttaagtactggattaaggatannnnnnnnnnnnnnnnnnnnnnnaatgtattgttaataaatggaccaatcccataaccctggtgttagtcgaatattgagagtagcgtttcttatacaatgcttacattattagcggctgttggtgattgttttgttgatttgcagcagtcctgaatttttgtgttaacacgtgagtttgtttatttttcatttaagacagaatgccagtaattcttggtgataaggattcaatcgacacatggttagatgatccctcgacgacgaaactgcagcctttactttcaccatatgaaaaaccagatttggtatgctttttacttagttccttgcatataagagtggtctttcctttttcacatacttgagattgaagcttgaactttcaggtatggtatccagtaacctctgcaattggtaaaccaacgtttgatggaccagagtgtattcaacaggtccggttaaccacattccctttgttagtagtgtacaactcaaatctcaagttgcatctcaagtcgcattaaacatattgtcaggattactatgtatttgtacagtctgtatatgcttattgtcatttcaaataaggattatgccacctgcagataccgcgaaagacttcacaaaatagcttgatctcgaagtttttctcaacaaagctgcccaaaacagatgaaggagacaaagaaaccaaatcaacagatgcaaatatcacagttgatttgaaagaggaacctacggctgaaaaggacacattttctgacagcattaagaaaattgaagaactagacagggtataatgatatatcgaatgtagccaaaaatctggagtttcaagagtgtttgaaaacagaaccatttgttgaagataactcagcagttgcgccactccccaagcctgtaaagaatgaagttgaggaggttacaaaggaagaaggcaaaaccctaaagactggtcttactaaagaaacaggtgagagtaatgccagcataccggctgagccctacaaccttgatctccaaagaatctcaaaagaagaacccgagactcaaagccatcatttctttactacagatgagagattgaatcagccgcatgaggctgtcgaagatattccaggaaatgaaaaccagaagacagttttaactagcccgacgacgaaggaaggtggcttagtgtttagcgaaaagagtgggacaaagcgagactatgaggtattctcagctcaagaaaagccacagaaacactatgagaggttgcaaaatgttaaaagcagtgggaaacaaggaaagatgcatggaatggggaaatctaacatcaagaaatctaaggagacgcagnctacattacatttctttttcgatgagaaatagtttgagtctacataacatctatgaagaccatgttgggctactttggttggagataatgttagataggtaccatcgttttgggaaat

SEQ ID NO: 58075 - DNA, 674 bp, Arabidopsis thaliana landsberg
tttttctaaaagaccttttcaccccttgacttttttctctaataagtacaagatggaaacataggcctaattttggttattgggcattagaattcctcttaaaagcccacatgtatccgaaacactaaaaggcccgttctcgtcgaaacgatgccttggttttggaagttgtatctcatcagtttcttacaaacgcgtttgttgtatctgaacattcgcgtctctatgtttcatacatttctgattttccctataagttcaatacactagcaacgtcgatgattagggtactataatctcttcgtcacacacatttctttgcatctacatttgtaaaagagactctctcttcttcttttggtctatcaaagatgcaagaaacccaaacgaagttgtctctgagtgtaacaccagttaatgcaaatgccccactcccacagaatcccgcaattcctctaggcttgattgctccatatcatcaacaagcaaaagacattaaccatatgttacaggttttgatctgttcttatatattacgatgatatttttatgtttttcatcaacatatatttatagttaatattcatgcatgtgcagaaccagatgacaagagaattgtatggtcaattaagaagtctcgaggagagagccatcttttgtgtgagggtaaaaga

SEQ ID NO: 58076 - DNA, 1014 bp, Arabidopsis thaliana landsberg
aactctttgtgcggaattagcatatctcgatcatcatctcgcgacttcggaagcgatgatttcagtctcaatgtagcatcatccaagttaggattataagtttgcacaaagtccttaatcttcttaagaaccatagacatcttctcaaaactttcaccaggatcatcaccaccactagaactaaccatatcaagtaaagccaatgactcttgcgtaaggtcagttatagtcatcaactgaagcttctccgccactctcctaaccatctcagactccattacactacctctaccactataaagagatagaacatccttatacaactcatcatcatacacatcgccaccgccttttcctatcgatcttcgtaactgaactaaaacaagctccacctacaacaacaagaaatgaatctgaaaagctgaagtttcatgaacaagaacaaaagcagagcagagaatgattttagtagtacctgttctctaagttcatctgaaatatccagattctcataagggattatacttaaagcttgttccaatagagaagtcactttctgaaatttcaccatcacttgatctctctccaacacctacaggaatcaatcagattcataattcgatttcgatttcaactacactcagatctaagtatgtttagaatcgaaatactcacacaccaggtaaattttgctaacatggctaacgaaagaaagcaaatccttagcatgaagaagcgattgcttaacagataacaaagcattcactacttccgaagatgattcctgattgtctctgatctcttccaacataggaagaagaagcgacaatcgccgggagaggttagcgcagtgcttcttcatcggtgtaacggaatcggaaattgaagcgatctcgtttattgaatcgattaaggtttgagctaatttgtgtttctctgatttcgccattttttgtattggtttaggaaacacgcagagggaactgttattctagtaatcagtttttttttttt

SEQ ID NO: 58077 - DNA, 1174 bp, Arabidopsis thaliana landsberg
gaacaagatcagcaaaacaaaaccagttcctaatcaaaatccaaaatttgaacttaacgaacactcaaaaatcaaagagcctagatcccagatcttagcataaggaaatcgaattctcttaagcttacacttccagttcaattatactagtggatcactaccaaaaatttcaaaagcaaaactcgcaaatctaaatccaaatcgagatcaacgaaccctaacacatcagaaacatgaaccacgggattcgacaggaaacccactaagaattgagaaaaaggaaaggcagagatcaaacgtaaaggaatcaaatttagaccagaatctgaaacaattaaggataattgagagatgggtcagtaagtgacgttacctgaagtaagatctgaggtgtgtgattgagtcgttgccatgaatctgatcgaaaggtcaagaataaggatctgattcaaaaacaaaacaaacaaaaaaaactggaaaaacagaatctttatatgtagggaaggacagaggatctttccatatatgtattgtataaattacgtagcaatacgtagagagattattacagtaaaaaagatttacaagtttgtgtttttattttgttttttttttacgaacgaagaagaacttggttgccattaatgaatgatgcaaccaaagtgagaaaaggttattaccttatttaatgtttggtgttgttgttgtctttaaagcgcaaagttttttactacaagagaaaaaaaaaaaagttatgagccttctttttagtgactctttgtgggaaaatggcaattacgatgatctcttctttttttttggcctttttctctgtttcattgagaattgagattgttcccttggagactccgagaatcttttttcttctttttctattcattatagttttatctattacttaatcataatcatagatcaaatcctaattttttttattgttaacaaaatatgtgatccctaagctaaatactataatggatcgactgatcaaagaatattttaatcagtttatggaccaccaatttacatttatgcccaccaataacttttttatacagatctattggttttgtattagatgggctagttcggtttgatgcccgtggactgaattctaaaaataaatgggtctaaattccgaaatagcgcaatt

SEQ ID NO: 58078 - DNA, 425 bp, Arabidopsis thaliana landsberg
agcaccaaagcgcaggcgcgggacggcctctgggtcgacaagatcaaccgcatgcaaggccggcttgccgacatcatcctgaacaatccgaatgtgctgggcgagcatacatgggtcggcctggctcagggcggcgtatctagcaccaacagcggccgcatgatcgtgcgcatgatgccattgggcgagcgtgccgacagcgttgatgaatccatcgagctgctgcgcaaagcggacaaggacatcccgctatcgcaggtctacttggagaatcgcccggcgatccgcatctggagcttccatggcagcggcctttacgaatacgtctggcagggagccaacttcgaaacgctcggaatagccgacagcgccttgcaaaagaagatggccggcgtcgccggccttcgctacatgcacagtgatct

SEQ ID NO: 58079 - DNA, 1003 bp, Arabidopsis thaliana landsberg
tttactcttttagagtagggtattgctctctttttaataatgtttttggcacataaaaaattgtttaaactaaaacaaatactataacattttctttaaagatgtgatcaccatatatataacaagacctcatgagttttttttttttttttttttttggatcaatgttaagtacttatactattttcacaagttttttaccgaagttacagcgaaatacaaattacataaaagatcaaaaactaagtaaaacaacaaaactacatcacaacacaaacaccagggagtacaagcaaaaactcaacgagttgagtctccggaaaaaaacattagtgattctgaaccgctcggacatcttgtcctgagctatcttgtcctgagacactaatgtttgctaaccaacgacttccacccttgaatcacatagtgtgaggtaaacaaattagagatcatgttcattcattatgcatcaacaattaacacacctcataacacatagataacacgactaatatattagtaacttttagtattaacgatcgttaacaatattattagaagattaagttagtttgtagttatggcatatgtcgtatatgtgctacgaccaatcgtagacaaagatgcgtatgcaactggatttcgattattcaattaaaagagatgtgatttcatggggtccatgaaagtgacaaatgccctgcagattcctctactccatcgcatggtccaatcatcttttcctaatccagataataaattacataaccctgttatttggtaaacacttttagcgtatatgtatatatttttttctttcttctttttgtcaaccattataagtatgggtttctaaaccaacacgttattgaatctatatagtcttacgtaaaacgaaagaaaagaaattcccaaacggttggcttcctacaaccatttatatataggaaaagaaattgaattgacgtgccttcatcaagtgctttccatttgtggttttcgg

SEQ ID NO: 58080 - DNA, 494 bp, Arabidopsis thaliana landsberg
cataaagagcatacgagtcgtgttgataatttgggccaccattcgcccaaccaccaccttgcctctgggattcgccactgcttgctcgaggatgcgagaagcgcgccagatcggaggatgtcacagggcccgcggtgcgtatggcgaaccccccgcgtgcctctggggagccaccaccgcacctctgggaatccattgatgccatgccttcagatcggggagcctctacgcctccggatcaaggaactgtcgtcatcatgcaaccggatcggggagccgccatcgttgcgccttctgatcgaggaaccgccattgtcgcgccgctgggaccggccgtcgccgtgcctccggatcagggagccgctgtcgttgcgcttttggatcgaagagccgccgcagtcgcgccttcaaatcggtgagccgccatctcgcgctctcgtgaaactgccttcgtcgtgcgtgcctatgtgggcgatcgtcactcgtgcataatg

SEQ ID NO: 58081 - DNA, 1782 bp, Arabidopsis thaliana landsberg
  unsure (1)..(1782): unsure at all n locations
ttatttgccattatatatcgttatcatcattatacaaatttttttttgataattcatatgattttaatggttttttatgtccaaagagtaatcttcaagcccgaaaaaactatgttaaaattcgaacttcggtgaccaatattactgaaatccaaatgacgaataatttttttctggtttattattggacgaatgcgacttaattattttatctattttatatcatttctattagcaacatcataataaaatttctaatatatgctgtcaattatgtgaccagcaacaatatagttaaacaatgttaattaaacccatctaacaacaataaaaatttgtcactgacatagttttcctatatagcacttatttttcttttgtcaataaaacacgccggcctaaacctatttctcagtttaacgcatgaagtgctagtacaaggaactaaaccacctggcttattattaaccattttcttcatttgtttgattgatcattacactaattgtccttttttatcacctagtagtttactaagtttgattaagagaagaaaaccatagggtccagtcaataaaaaagaaagtcatagcgtaggacaagactcttgttacaagagagcgagtaggagagatatattacactcgcgggcgcgtaaagagacaaggaaaaaagaagatatttagtctctgacagtgacagctaccatttaaaggtgaaagactgtgtcagataataaccatacacgtgtcatattcctatccaccaaagaaccacgaggtttttaaacaagtgtctctaatctaatcccacccaacaacaaaatatctagccgcggaaaattactttaaaattcatcaccctttgtccctactcttgactcgtgcatgttccatttgatttattccaccacgcaaccaaaatagtagcaatagaaaaaaccaaaatgttgataaaaatttggtaaactatgaatctctatgatcgatattcatttgtttgattgctccatttcttttctaatgcanatcaatattaaagtgttcgtatttcgtgactaagatatatggctggccgaacaaatataaataatatatgacatttgctattagttagcaccagtgatcatttggtgtaagcaaatgttttttgtgccaaaaaataatattgaaatatatgtataattaattcattaacaaaaagttcttatttgttatttcagaaaataaattataccatgtgtccttgattttcttatgtgaaaaaaaattgaaatatccttattgtttttaaaataaacaaattgcaaacctatgtaccaaacagaaaataatacaattgtttttggataaatttgtatagatactttttcccactagcattagatattttttgggtttggtattatcccaaaagtcacgagtgggatttttataggtactcaaaagctaaaatgtctgaacaataatataaaatacattttaaaataaaagtaaaatttagaagcatcaaataagtaatagtttcaatgtttagtggtgatctcttattaaaagaaaaataaacaagaaattcactaaatatttctccatcacaaatacataaacatcaattgcaattaatattttggtataagtatagagaaaaattaaattcaactttcaatatgaaccacagagaaaaaccaaaggcttgccaccacaccaattttttaaaaaagaaggttatttggcgtattggatctcttttgtctcgtatacagaattttgctgatgtggcaaa

SEQ ID NO: 58082 - DNA, 847 bp, Arabidopsis thaliana landsberg
ccgccggcttaggtttaattttaagggggaattttgacaaataacttaaaatattttagaaagaatccaaagaaaaatgagaatgtgacatattaaatcgagaaattagtaaatgcaaattttgactaatatgttcagggtgaaatcatgtacaaaatgatgtttgtaaaaaccattttcagtttatcctctggattcttctttagtataaagaataaacacacacaaaaaacaaaggaaaaaaactattgttaagacttgaacccgggacacagtcattttaacacaatacagataaaccatctgacctacaggcaccaattgtgatatgaagaaaacttaatataatatcttgtaacaagaattgcttcacctgaaaatgttcttgtcctctcctacctctttcagtcttttttttctttgttaaaaaaaaaaaacagtttgatccatttagacaaaaatttatcaccgaaaaacaaaatcatcctcaaaaccctaagcctaaaaagctttcagatctcttacggttttctcgttttttgttttctaatatctccctttgagatttttatggacgagtgttgtagaagacgaagaagacgaagaaactgatccctttttctcgctcatggattctgattctgagagagcttctctggagtcgattaaagataatcctgaatgtgttcatgtttccaacgaacctaatctcacggcaacatgcgttgattcgtctgttggagaggaaggagtacggatgtaattcgtcagcgctgtgcggagctcgtcgccggacaaggagaaggtggcttttgaatctgtcctgagatagtgaagggggatctgt

SEQ ID NO: 58083 - DNA, 143 bp, Arabidopsis thaliana landsberg
acctgaattagctacctgtctaataaagtgggagatagatgaaaaagatgaaaccccatgcattaaattcggggtaagaaccaaaccgggtttcgatttccccgggaaagcagaatctgaaattaaggcaaccggagtccatt

SEQ ID NO: 58084 - DNA, 401 bp, Arabidopsis thaliana landsberg
cttaatccaaacagaaccaatattgtgaggaaaaagacccagattgaaacgcatgcataatatttgtttaagaacaaaacgtgtttcgatttcacgggggagcagaaactgcaaatcaggcgaacggaatccattaaaaccgacgagggaaggaagaaaagaaacgtacaatctccagagacttcgagactgattaatttcagaagatctcaacgatagttacttctttcttggccatgaaaacctggagctttaaaacgacaatggttgatgctagggccgaagtaggggccttgggaagaacaagaactcgaaattcggaggaaccaaagttttattgtaaggtttgagcgaagatcaaaaacatcaatgtatcaaacatttcacatttcaatcattgg

SEQ ID NO: 58085 - DNA, 842 bp, Arabidopsis thaliana landsberg
atgttacttgtttaattggcatactataacagagtgaaccacaattttgaattacctattaaaattatataataaattaatcatagtacatttttagtttgaccaaataaaataaaattaactacacatttattttgccaaaacaatcggttccaaatcattagcttctcatcatctcatttttcttcttcttactgtttattagtgaaagagctaatcttctttaaactagatatttttccaactaatcttctttattttgcaattaaaatatttgtgttaatttttttaaaaataaatattttaaagtttacttgtcaaacttctgaaaagtaaatcactaaccattacagcatctggttcgattgtttcaacgttgttatttacaagacaacaagagttatggtaatgatttttgcttgttaaaatataagctttatattactaaactattatgattttgctttgatgatacaaatcatatatcttacatataaacgtaaatacaatcttaaaaatacaacaagacaatggagtctatggagtcaaatgaaaatataaggacacaaaactatgatttttattagattttcagttcaagtagattcataatttaagggtgaaagatgaattaattattctgtttttgtcaaataagaacattataacttgtaattcaattgaaaaaagaaatggtttgtggaaaaagaaagcaaagcactcagtgactctttataaatactttcattgcaaagttacattttttcaggcttacaaaaaacaccctaacccagaagagagagaaaaaacaggccccccccttcttcttctgtttttttttt

SEQ ID NO: 58086 - DNA, 535 bp, Arabidopsis thaliana landsberg
  unsure (1)..(535): unsure at all n locations
atatttgcatctaacatgatcgttcaaattagaagctgtgattatatcatgacgagctgatcatanctatcaattctatatcaataataatgaatcgagtaaccttgatatataaccatctcgcattttatttggtagatgtgttttgataagttttgtagctaaaggctctcttgttggactaaaatttatcaattttattattagcaatgaatttgatgtttcaaaaacacacacaaaaaaatacttggatagataaatttggtttgaccaacgaaaaatctatattttatattgtatgtatttgaggattaagggcggcaaggcccttgtcggcctccgctggcnnnnnnnnnnnnnnnnnnnnnnnnnnnnnnnnnnatcactttaagattagcacatgttaatcttggaatgcatgccatttatcaatttgaggccgcgtagatgagggatacttgtttgtgatttgtagtcgcggatgtttcttccctgtggtttttctgtaagacacctgcctgccaggcccctacag

SEQ ID NO: 58087 - DNA, 1476 bp, Arabidopsis thaliana landsberg
aacgacccgactatacaccctgaacccacagccaattctacagcggaacaacccggactcatctaggcctccacagatagtgaactgtctgagacatcctccatgcaaacaatcgaaaattccactccgctttcaacttggaaaatctcaactgcaggatcaaaggacaaggctaacttgtgaagggtccaaatcgagctagccatcgtgacaaacgattcatagaatgtgctcaaagatctccaagaactcaacacagcttcgttttcatccatgttactgaatatcgaagatgccatgttcggatgaatcagctcgtgatacttcttatcgcaaaatctagagaatgcacaatctttatctctatcaagaagctccatcggattactcgatacatgttgcatcaattccctcaaggaagaatctacagaacttctctcagactcttcataatcattctcatttagatcaaatccttctccatcaaaaccacgaaacatccccaagcaaacatacgacaacaatgcataccggatatgtctctccttagcataatctacctcaggatgaacagacttagccactaaatccaaatcccacccagctttttccatcaactcaatcagaatcttagtgaatttctgagtagctttaaaggcatcatacaacagagactcaaaaaccctaaccgataacagaacatccaacgatgaatttgaagacaatctcttagacaacttggaagtagatttctgaatctcacctaatttgttcctcagactccaaacctgcaaatcctttgcatccatctcagcttgtaaacgatttgagacggtttccaaagctctaagcttgctctgattctcctgaacacgagattctaagcaagacccaatagctaaatcagactcaaaatccaaactttggcgataattcctataaaactgcttcaaatcagacaatttctggaggttagatacgagagctctatcagcagccttgacattttcctcaacaaacggcgcgtgagcagcttgcaattgaagatacgaagcttcaaaagacgaagcagtagcgaaaacagaagaaatcaaactcaatcccatctgtgtatccaatttcctaacctgagaaagcttcttttgattaggtttaacaacacttaccacacccaaattcttcgtctgaacatcgttcaccggagattcaataggagatcccggagaagaagcactaagaagaggcttatcgggtttaagaacgacgactttctgatcggtgataaaatcctcggaggaatcgagaagagagaaaccctcagcatcggttctctcattatcgtcttcggtgaagaactcgtaggtcttggtcttgacggccatggctaatttctgaaacatttgagaaaattgtgaaggagctgctgtgattgccgttgtttccacttcccgcatcgctcaaaatacgcaatctcga

SEQ ID NO: 58088 - DNA, 1083 bp, Arabidopsis thaliana landsberg
accttatctcatttgggccctccatcggcggctttgctaaccgcagctgtgaccaagaacattcatttttcccttttaacagatctatatcgtgatcgttcagtttcccattcagcttttgtttccttatttcttcttcaacacggattaagataccctttcgatggtttctccttcgtgtcatggacatcacctctttcattgtgcttgaactaggaatccctagatcaatgcatccctgttctcctagtttctctctaagacatcccatgttactccatgtgtgtcaataccaaaaagacgtagtgtcgccgcttttaacctctaccatgactgttgatctctttaaataattaaaaagtggtgttccccatgaggaccgttcacttacatcaatttatggtcttcttggaccaatttcgtttatccaaactattacccctacaacatcgtttataaattgtctttacattttgatctagaatttgatctattttgcacgaatcctcttccaccttttcaggcatgtacgagcaatataacatgactttgatcaaattttgcatggtctctacgaaatttttacctataatttttgttctcggcatttttatagctctctacttaggatataactaacatggagttggatgaatccttttctttatattgaaatcgaatcttcaatgctaaaaataaaatccactcaatcagtgagagaattattttggaacaaactatatataaagacgaaagaatcactcaatcatacaataaagaaggatgtttttttcatttaaattaagaaagagaacttttccacgtgaattaaaatagacatctcaataataaagacgatttttttttctctctttttcctctcactttgtattgtatttctatatctttcttcctcttacaaatacccttttaaattggaaagaaaaaatctctgaaaaacgatttaaactggacaacgctatcattagtaatagtaatcattttatatgtggctgacaatttccatgtacgtgtaatatgtaatatataaacacaatcatggccagtataatattaatgctt

SEQ ID NO: 58089 - DNA, 630 bp, Arabidopsis thaliana landsberg
  unsure (1)..(630): unsure at all n locations
nnnnnnnnnnnnnnnnnnnnnnnnnnnnnnnnnnnnnnnnnnnnnnnnnnnnnnnnnnnnnnnnnnnnnnnnnnnnnnnnnnnnnnnnnnnnnnnnnnnnnnnnnnnnnnnnnnnnnnnnnnnnnnnnnnnnnnnnnnnnnnnnnnnnnnnnnnnnnnnnnnnnnnnnnnnnnnnnnnnnnnnnnnnnnnnnnnnnnnnnnnnnnnnnnnnnnnnnnnnnnnnnnnnnnnnnnnnnnnnnnnnnnnnnnnnnnnnnnnnnnnnnnnnnnnnnnnnnnnnnnnnnnnnnnnnnnnnnnnnnnnnnnnnnnnnnnnnnnnnnnnnnnnnnnnnnnnnnnnnnnnnnnnnnnnnnnnnnnnnnnnnnnnnnnnnnnnnnnnnnnnnnnnnnnnnnnnnnnnnnnnnnnnnnnnnnnnnnnnnnnnnnnnnnnnnnnncaaatgattaatcggtagtggtaagctaagaaaatacctttaaaggtttttttaaaggtttaaaaaaaaaaaaaaaaaaacccccggagaaaggcgcccccccaatttttttttttttttttaaaaaagggggcccccccccccccctttttttcccccttttttttttttataaataaaaaaaaaaatttttttt

SEQ ID NO: 58090 - DNA, 477 bp, Arabidopsis thaliana landsberg
  unsure (1)..(477): unsure at all n locations
ttgttacataacatcaataaaattagccaaatgatgaagtatgaaaaacaattttgctttattgacctcttttacaagagaaagacaaatgtctcttctttattttatttttttgaatcaagacaaatttctctttgttatcatgtcaagtaaatctgcgtttatgaattcaacattctggaaaataattgggcttagtgggccttcaaatatcattttatgtaaaggcccaaatctctatataccaattaaactttctatcgctgagaaagagatttgatcaaattaaacttaagataacgattgcccttaccgaggaagttgcctttgtcggcttgtcgctataattcatcaatcaaagattcaaaatataaaaaatgagattttaacttttaagcatatgtcatttgtgttgttatatcatcgtccaagtttaaatttacaaaacgtatattgttaagaaanaaagagagcaaa

SEQ ID NO: 58091 - DNA, 547 bp, Arabidopsis thaliana landsberg
tctgaccgcatatcggaattgtctcttctgtccccacacggagtgtaccataccaacgctattgcgattattctaatttatatttaataaaagaattttctagtcatcatcacttactggagtctcgaaatttgcttttttaaacgtgtctaaagagtcaaattcatgcttttacattatgatctaattaaaactttaatttataatttcacgcaattaggcctaacagaaaactgaacgtatgggacaattaaaacatttcatactaatataatattgactgcaacagttgttattgatactgattatagtatatctttaggtaatcaaagcttttcaacggactcatgctcactataatatggaataaacctgtacttttgaggcggccatagtacgaattggtacgtgcacgtcagctcgtgtgtatatattatgggttatatgtgtctacataatggactttcatcaaataattttgtttttaataaaccataggagtttcaggtttttggtctataatcttacctatttttcggagttagtc

SEQ ID NO: 58092 - DNA, 1532 bp, Arabidopsis thaliana landsberg
tagtatcaattctaaatttaagccaaaaagaaaaattaggacagtagaagatttggaactaagaacttaatgatttgtttggtaagccacataactcagaaatgttccacaagaatttgcgcgtgggatccactcgttatagatgagagtcctttctaatcttaaaacaatattaatgatgacaaattttaactaccatgtgaagttttgctaataggttaaactcaaagaccaaaaattatgaaaacacagtttctttgatgtgacggataacatattcaagggattaatactagaaaaacgaacttcagacactaaaaattatcctttaaaatgattttataagtggtttgattttctagaaaacacatacttttgttaatttagagactttccacatggtttcttgaagcataagtcgacattaaaaaaagaactaacagaggaccattaagatagagttttcttgaacaatttaagagatatcttccacatggttttttgttttcttttggtaaaatcgacatggttttcttgtgatcgcgagtgaaataacttgcatatataaagtgtgcgtggaaattactcaatgcttactcaaatgctttcatttcggtcttaacgcacatacaaaaaaacggaatattgtggtgcaaatgaattataaagcaaaataatatcaataaacatatgccaaaaagaaaaattaggacaatataacatttggagctaagaaattaatgacgtgtctggctagccacataacacaaattgaaatatgattttcggggatttttcatgatctatttctcgttgtttattggagaagaagtacaaaatgcaaacaaaatatggatgttggcggttggtactaaaaacaattgatcatgatgaacaaaaccatatgatgaacatgaacttaccataaaaagggaccttggaagaatctttgacaatataaaaacttttgaaatggaaattactggatatagtaacgatcaataatcgacggacactcatcatgggaccattaaagagaagaaatttccaaagaaccacaggagaaaataacaagtacagttgaaaacatccataagccatttctcacaagtgaaatccacgctcttgttttttactgaagaaaacatttttctaaaaaaattttaaatcacaaaacactatgatattccaacattatgttttttttcttctctgaatccatttaatgtggcggtttgttatttgggacataaagcatcatcgacttgcttacacgaataaaaaacacaccaactttttactgtggaccacatcttcttctctgttctacaaagaaaatgaaggtaatgtgtcatttggttttcaaagtactgaaaaatgagtcttttgaatttttatagacttggagtgttttgattaatggttgttcttcttctaatcacactttctctacagaaaaaagtggtgatgataaatgtttgcgacgagaggtctaaggagaaagtcgatccaaacagtagaataactgttca

SEQ ID NO: 58093 - DNA, 477 bp, Arabidopsis thaliana landsberg
tttgattatcaatcaacatatatttatcttttttggggggggggtctatttagaataagggatttttatctattattctacttttgaaaatatacctttctaaatctaccacattttagtggattgaaaagatttatgaccaaaaaaaaaagattgctttcccaatatctaccacattttagtggacgtttccttaactaccacaaatatgcattgggatattctgttgacaactttacaaatgtcataatgaaggaagaaaccaccacgttgattagacaaaccataatggaaaaaccctaatccggcttgaggtctcttggaccacgatatctaccacagccgcttggcccaacttatcatccatgatagatctatctaaaaggttgcggcccaacattaagagctttgatgtccattgacatgatcattatcgaagtccaactaacataatgtgtcaaggtctcttcatcttaa

SEQ ID NO: 58094 - DNA, 553 bp, Arabidopsis thaliana landsberg
gccgccccagggccgttcgccatagcgttcgtcgcgcgcctgcaggtccagttcgccggtcacgtttcaggcgatgatcgggccggcgccgctggcggatgcgcgcatcacatccaccggcaggttgatcatcactccgccatcgaccagaagatggccgtgatggaccacgggcggcaggatgcccggcagcgccacgctggcgcggagcgcgcgccaggccaggcccgcgcggtgttcatggatacgcccggcggtgagatcggacgagacacagaagaaaggcttctgcatctcctcgatgcggatatcgccgaaattctcgcgcagcttggcgctgaccttcttgcccttcatcaccgagatcaggggaatggtccagtcggtcaggggattggaatccacaaagaccgcgcgcatgcgttcggacaattcctccaggccccattcctgggccaggcccgccgcgatgatcgcgcccatcgaggtgccgcccaggtgatcgaacggcaccttggcttccatcatggcgcggatgaagccgttatgggcg

SEQ ID NO: 58095 - DNA, 883 bp, Arabidopsis thaliana landsberg
  unsure (1)..(883): unsure at all n locations
taataatgaccaacaatgaattaaatcatagtaggatgattcaaattcttgttcttggactaacagattaatttgcaaccactaaaacaccatagttggaaattatgaatttgagaattgagattttatttaaaatcttgtagtttggtaagtgaatcattcaattacagtcacattctaggatttgtgtatctatatgatcttcactcattaaggtttcggcgctagatttcatgctaggcttaaatttttactcaatccaatcttactccttcactcgccacctagtgaagtcaacggacaagtttgtcataaaataatgtagacgtcaatgtttttgaagacacaagtatttggtcccaacaactcatgttgctttctccagccgtacatcacggtcagaaccaattttgtagtgggcgaacaaagctgcttgcatattgattcagtgactcaagctgaggaacacaatcttaaagacatgctgatggagtatgttaagtagattaggtggtaatgtaaaccttgcttctcaagaaacgtattccttgtttctcaagtttgaaaccggataccaatgacggacgtcccaacacatatatcctattcaagttcccaaactccaagattaaaacgtgatatacatataaattttaaatttttgagtaaacctttgaagttagtaataaaaaatgaatttggattataactgannnnnnnnnnnnnnnnnnnnnnnnnnnnaattacttgttaaacaaaaatgttcacgggcgaccaatgaagttgcatgtccgtgaacccatgaatacaaaagagatgtggcattttgtatgtcaacttgagcacaactatttattgatttctactttattgtttgtcaaca

SEQ ID NO: 58096 - DNA, 1357 bp, Arabidopsis thaliana landsberg
gggaacaaccttgctcacgttaagagccattgagataaacctaaacatcgaaaattgattcagataaacttataattgcatcaaatttataaaattctcgattttagaacgacataaagatacaaattttcttaaatgtagcgattacccacttgcatcaagctcaaagtattgatttttaagataaacccatcaaggaaaaactgggaattggagagatgaaacagtgaagaacacagattcgatagaagagactaaccttgtgggaagaaattgaagaagaagagaaatccaaaggaggatttaggattttagggagaaagaagaagacaaagaaggagaattatgggattagaagtgaaaattgtaaccacaagagttacttgtggaccagtgtgagccaaccatgtcctaagttttctttctatttcgattctctggtcattgtagtattggccccactctttcccttaatatcaatttggttcaatccatatattttggtattgcgatttttattttaattttaaattgaaggaccaacacttatatataaaggatatacatcaatctatttattattaattagatttaacttggaaatccataaaacttaatatgtatcaaaatttcgtgtgttgagatttaatactgatcttaaaatgagattcagttcgagataggctgattagagccatcatcttgaaggtatatattaggattcaatagtgtaagtttgaaggaatcaacactagtatataagagacataaacgttggttgagatttgaatcgatgaattattcctacattatctctatttttcttaccattttaactctattcctttatctacattacgtcattacactatcataagatatttgaatgaacaaattcatgcacccaccagctatattaccttttaacaaaaagtaaacatctgataataataacaaaaaaaatagagaaatgacgtcaaaaaaaaaagtaagaacgaagaagaagtgttaaacccaaccaattttgacttgataaaaagcttcaacgctccttttctccttctccgtcgctctccgccgcgtcccaaatccccaattcctcctcttctccgatcaattcttcccaagtaagcttcttcttcctcgattctctcctcagattgtttcgtgacttctttatatatattcttcacttccacagttttcttctgttgttgtcgtcgatctcaaatcatagagattgattaacctaattggtctttatctagtgtaatgcatcgttattaggaactttaaattaagatttaatcgttaatttcatgattcggattcgaattttactgttctcgagactgaa

SEQ ID NO: 58097 - DNA, 1170 bp, Arabidopsis thaliana landsberg
taaaagttttcacatatgatctactataatttgtagcgtcggctctattcattagcatgtagcagaaatattgtaattcagtgtaatgacatctcctaagttctagtaaatattttgttatctaaatatagaacgggtttgttggttatagttgaacaaaatatgggatgcatggcggttcttggctcgtgtggtgtcattacagattgcagtgggtcatgcaagactaagtttggacaagatgctagtggcgattgtgaccgtgacggtggtcaaggaacatgtatgtgtggttatccttgtccacatgataagctacatatgtgagatctacaatactttgaaatctatatttcttcaaaatgtattaagtagaaatcaaaattgaaaaaaaaataaaatcaaaacagtttgtgctatggtctctcataatctttcagatggaacttttgatatcaatgaatgttagataacataacaaaatgcttgagaactgaaagccaaaattgggagtataatccggatagataaacgaatctgatctgaactaaatcaaaacaaaatactcaacctgaaaagtgaaaacgaaccatatatcttaatctaacttatatgttttttttttctatatccgaaaacccaagtcggaaaaataacgatattataccgaagtttttcaaaaatttcaaaaattaagcttatatttttagtcaaaatatgaatccgaacataaattttagtttgaataccattattcattttatataaagaatcggacaacttgaactgaactctagaacacccctagctaaaatgcatctttacattctttatgtttttggacaaaaaaatgcatctctcgctctcggacaaatgatgcaagaaatacttgtagtagtactctttttggatccattattgcaaacttaatctcgagtaaaatgaaattattgataagattatctctaacgtttcaagatcttgtctataataattatacgttaaatgattacgattattttaaagcgtttgacggttttagaagctaagtcaaagtttaacatttggattcgaaggaaaggaacatattttctgaattttacaagaaacagaaaggaatattttctattttcaactctactactaatatacaaatacaactatataata

SEQ ID NO: 58098 - DNA, 539 bp, Arabidopsis thaliana landsberg
tgtaaatggctgtatcaccttgagatatgtgacgacttgttcaagcttgtcacgatttcctttagtaggtgtgcgatccccacggtttcgacgagaaataagagtcgacagagcttccatggcatcatcatatgaagataaagctggattatctgccttgtcttcctttgaacccatattaatggcagctttctccacaacttctattgaattgcttgagtacctaagatctaaagacgccaacagagcaataagaacaccatccccaggcatgaaacagacaagtctaagcagagtggtgtatataacttactgttgttgaaataaacacggaccccagtgcccaaaggtaaactgtgaaagcccctcttagttttagtgaagaaggattttcttttgtcacaaaagaatggaactccaagtgctctgcactttagaaaccctttcccacaaacgagcatcagggaaagtcaaatctgcaaccaaaatatacttgataagttgttaagtcccgtctctctttccattcatgcattttt

SEQ ID NO: 58099 - DNA, 257 bp, Arabidopsis thaliana landsberg
  unsure (1)..(257): unsure at all n locations
caacaatattggtntgtcattattacgtatatcatcatgcagctttttggtattgtaggaggaccgcttttgcgctgtatcggtgtggggaaacatgccgaaaacaagctcgttgccgcacagctcacttttggctattgggcgtgcattagcctagcgattgcgtacttgattattcgctttttcatacgcgactatataaaacagcggcatactcgttatcgcgtttccttgcctgtcgcctggatgtgggcgat

SEQ ID NO: 58100 - DNA, 410 bp, Arabidopsis thaliana landsberg
aacacgacatgctctctacagaggtgctatactttgcctagaaacaatcatcggctaaccttttttttggcccttacataaggcatgatagccgaacgattttttgaatcaagaattgacgtatgtaattcaacggcaatgcaagatagtgaactagatgggaactaactctgtgcacgttctcaggcttataatgtaatggaccagcgctaacgggtgtgctccaggaactgggactggactgagaacgtacgtacaaagacgcattaacatctaacattccacttgagaacagggatccaaccaaagacaatggaagaggccaaccagcttgttagtatcactcccagagggagcttcctcatagtggatcgaggaggttctcgattaagtgctaatgaatggctctg

SEQ ID NO: 58101 - DNA, 753 bp, Arabidopsis thaliana landsberg
acacacgtccacatcgacgttattcagcgcctagtagacgttttccactgaagctatcaaattaattatttacaacatttatttatttataatcacaaaatatagaatttaacaacatttatttctatttataactgaaacatattgatgtacttaaaatttaacaataaaaacgtataatgatcgactaaggatttataaggatattgttgcttcaacaaatgacattatacaaagatttttatttgatgtgatttgtgtcctattgaaaacaaattaagcgattaatttattgtttgatcccatataatatactcatttcctcaatttgtgcgtgcatgttaatgcaatttggtgcatggaggcagaaagagacaatccattgccgattcatagcaaacgatcgactctcttgtaattatatctttatggagaaaaattaaataattgagttcgattcattataaccaataataataaaaatttgcagaagcattaatgaagatttgcttaggaagataaaattaaatgagaagatccttaaaacgtaacaagtggggtgagaacgtaacgtcgcatgggggggatgcatccataacatgcatttggacccacctttgtttatttcaattttttttttaatactatttattcaatatttagatttgaaatagagcaattcaatcatctatatcagactataatttcagtatgaaacatatatgtatatatatatgagtattcgacttaaat

SEQ ID NO: 58102 - DNA, 1024 bp, Arabidopsis thaliana landsberg
gagaaaaatcaaagtagtctactttttgcaagttggtccgtgggtgggtgcatttaagaacgagggacattgttcgtgaccacgagagcacgcacgcataccaaaactcaatgaaatgacaaaagacatataaacaagagagaaaaatgtatacacacaaatagaataacaactattcgtgaaagatagaatagaaaaattcaaaatatacaccttaaatttcatgtttctacccacaaaaaaaaagaatgtagaacaatcaaaaacttatttttttttgtatatttctgttaaaaaaacaactgtaatatgaaaagtcctaaaataaaaggtcaagactaaaaatatcttataaaaatctaaaattacaaaacaaggaaaatttgtttatcaaagtttgggataatagtcttatctctttcatccacactaatataaataggatacatacacaacacattacaagaagataaatccaaacttttctttctctctttcgtttcccattttttctcttatcactcatagatcctgattgatctgaaaaaatggtgaagaagcaatcgccattacacgttgtcggtgtgtctgttttgatggtgttgttatgcagtgttaattacagtctgtgtgaaaagatcaaaacgtataagctcacaagaggaagcttaagtgttactttcagtaactatggtgctgtcatgacgtctcttctcctccctgacagacatggtctgaaaatttcttttttttttactgatttttctgtgtttcaaatctgaatttgcttttcttatgattcaggaaaacaagacgatgttgttcttggatttgatactgttgatggttacaaggtaattttcattttcttactttttcttttaataggtaaagatttttgcttatcacattcttttggtcaaaatcttggggtttggataaaactcgatgtccggctcaaaaaagactttccttttagatggtcaccttgttcgatatatccacttactattaaaaaagattt

SEQ ID NO: 58103 - DNA, 103 bp, Arabidopsis thaliana landsberg
aaaaatggccgaatcacgtcaccaaccgcggggtcacaaccctcggccgaaacaagcgcaggggagagcgaacaccgggacagcaagggcgaaacgcccgccg

SEQ ID NO: 58104 - DNA, 520 bp, Arabidopsis thaliana landsberg
  unsure (1)..(520): unsure at all n locations
attgcgtattttaatggggcgtttagttagggtcgagatatgaaaacaccatctatgaccaaaacaaatcagggtcaagctagttttaaatctgcattttttttataagaaattgtttgtaagaaatcaatagtatataaggaaaatagacttggtgtaacagaaaaagttatttaatcaacagaggtgagaaaaagtgtttgatagaagatatgatgcagaccaggtgccattgccagcatgttgcattgttggacttgaagtaaccgagtaagtagataattgaaacgtgtcttataattgtcattaagggtcacaccacaaaaaggtttttgtgattattaaggtcataattcccctcacaaaagttggaaatataaaaattgaaaaactntggtcatatctaatctaatctttatctttggtttggttttatacgatcatcccgaagaaacatcatataaacctctcccatatcatacctacaaagaacatgcatgattntaactaattttcagtt

SEQ ID NO: 58105 - DNA, 315 bp, Arabidopsis thaliana landsberg
gctgcgactaagattcaggcaatgtacctacacaacaactttttttacgtgttgaagcttttttgatctagaccgcatggtagacagactggacgaggtttacttaccaccggctgacgggtgactagcttgggcggatcgtctttgtgatgaaaggagatgaaactatatggtacaacccatgcaagcccgcatacatggaccaccactcggaatcattgatcaacttctctacgaggctgagcatgttctccgaccaaatacagaacatgcagcccacaaccacaggaatcatagcatgacgagagtgctcat

SEQ ID NO: 58106 - DNA, 1143 bp, Arabidopsis thaliana landsberg
accagattgcaaaacgggaaaatgtgttaaagtaattggttcccaggataaaaagtcccgccttcgcgttagttctatggcccttgatgggagtgaaagctggttggtaagaactaagcaactagataatctaacattttcgcaacctgctatttgtttgaagggattgttgcctccagtaacctaagaatatagttcctttctcctgaagaatcacttagaagtttaaatactgaacatgtatttactgttattggtatgattttctcctctttcaggtttgtggacagggcaaaaatttagctttatggaatcttcccgcctcagaatgcgtacaaacaatacccatccctgcacatgtacaggatgtgatgtttgatgaaaagcaagtaagcagaacaagattagattgaaatctaagcagtgtaatttaaagccttgggaggccgtaggtgttatttgtttatcaaggcttaataggtttatgtagtatctctttgaatcatccctcttcaacgaagtttattaaaaaatttactgacttttctaaactagaaacagaggtcaacacctagttttaattcctgtgctaaagtttaaacatctttttaaaaatgttgtctttaacaagtatcgcactatcagattttgactgtaggagcagaaccacttctaagacgtttcgacttaaatggagctttgctttctcaaattcactgtgctccttgttcagtattttccatttccttgcatccagcaggagtatgtttccaatcccttcttttctccccatttcctatatatgtgtttgcttttctcccatttcctatgttactgctaatattctgcaaatatgttaccccttctggactagaaactcaatgtttaaccgttgatccaattcttttgtatttgcaggtagttgctgtgggaggttatggaggtattgttgatgtcatctctcaatttggaagccatctctgcacatttcgtagcagttcattgtaaaactccttacagtttcttgatttggctcgataccctaaagaggtaccgaaatgtgtcagtcagattattgcagaggttaagaaaccttttctttgttttcttaggatcttgctcctgactaaagaccaattagtt

SEQ ID NO: 58107 - DNA, 412 bp, Arabidopsis thaliana landsberg
aaagctaaaagctaaaccaaggggctattgggagactttaaatgggtaaagcgcgctttccctcactgaaaaattaaaaagcatatataaacctatcttctgcggtttttgagtggaaaactttataaatattacccgtctgtcactaataaatgaaaaataatgcttcgttcttttcttctatcaccccaaccgatagcggagacgtctgcttgtccgtaactcccacaactacagccaattccaccaaatgaatattatcttcttcttttcaacttgtagtgcacagcatatctgtcataacttactgtccacaccaacttctttttacagtcacagtctaatcaaatatatacagacaagccttgttgggactctaaactactgagtatacaacatataatcttactca

SEQ ID NO: 58108 - DNA, 374 bp, Arabidopsis thaliana landsberg
tgtgatataagatcatacacccataatggtcagaatcataatcttttgtcgcggtccacatatgaataacaatcagttcataacatcatctagtacaccttcagcagttataatccactgaatcaacatatatatgacctcttcaatgcaataatcgaaggctccaccacctatatattatccaacttactatatacacaatcacatccaccacttgtaaagcacttaatatgctttaaccaattcctcaattgcggctatatgtaactcattatcctgttgagcataaaaggaaaagtaggaaacacacaaatgcaaaaatttgacgagcactttatgttggatagattaagaaaagacacgacttaaactgg

SEQ ID NO: 58109 - DNA, 317 bp, Arabidopsis thaliana landsberg
tttaaaacttagatgtgtatgccctgaagtattgtgcttgtgacaaattaagaagacagatcttgagtaagtcgtatctactaaagctggagactttgagaatttcaagaaggctaaggaaaagtttatgttcaacaagaaagtaggagttcctgaaagttttaacggtctctctcatgaacttgttttgatgttatctagtaacttagtataagacttggtatgtatgttttgtacaatttaactaatataattttttttaataaattcaactaaatatttatgtaaaatagggttatatatataatatatatata

SEQ ID NO: 58110 - DNA, 1175 bp, Arabidopsis thaliana landsberg
cagaatccatcgttacttgggtacataataaaactttctcgagatagtggcttcgtttagcaggaaatcctctgacttgtgatctttgttgatcatcaggcagtacctaagctgagtgatagagctaatctaccaaacatattggatcctgcaatcaaaggaaccatggatttgaagcatctatatcaggtaaaaaagcttcaacaaaatctcacacagattttacgaaaaacacattagccaaatatagaaggaaaaagattcctctttgaactttgtgttatattttctttggacaggtagctgcggtggcggtgttgtgtgtacagccggagccaagttacagaccacttataaccgatgtcttgcactcactcatccctcttctaccagtagaactcggtggatcattgcggattttataaaaaaacatttcccctttttttttttttttttcttgtaacagatcaatgcgtttatgaatttgtctcttatgttggttcttccggagaatttattgttgtatgtttaatcactgctacaaaaaattcggaagttttgcttaaatggaaccgagagacaagttagtagagtttggttagtaaaagttaaaggtttaaaagctttaacatataaataaataaaaacgttgactttttataacagagtttgttgttgtggggaaatgaatttaattaatgaaccttatccgttttgtcgatgatcgataaaattttcaatttctcgattcccaaagaaagatatctgggaattagacaacgagtagtaatatgaaagatggaggatcaggaaacgaagcggataaccaaaaaaccgtcaagatcgatcatcatcagtctcaaagatattcctcctctcgacccttcttctattccctctatggtaaatattcattcactccaaccatattctcttctttctcgctaacaaaaaaattgatcatttgggtttgaaacagagaacaatctctgcgttttctatttgtagatgattcttcttctgtgatttggctatatcatgggttaatagtaataaatatctcaactttgcttctgtcaattgttagaaaccaatgccgcaagatcatcataatgtgggaatgcagagattccaagagaagactgacttcagtttgaagaagagacaatgccatt

SEQ ID NO: 58111 - DNA, 552 bp, Arabidopsis thaliana landsberg
ccatgtattcatattgttctggatatatgttgtcataagggaagtagacagttacgtcttcgattttaaagatcatcttcttcctcctacctagaaatcgaaattggcattagaactaacaaaaccctaaaaaactcgaattcactttagcaaaacaagcgattcaagttggagtagataaacccgaacaaccagaaagaaggaacaattgagatcaagcgaagagaagataacaggagaaaacttaccggtgataatggaagcttcgatgtgttatcaacgactgagagaggaaccggtagcagcttcaaggtagaagaagaagaagaagaagaagaagaagaagaaaattttgcgtctgtgtttgccgaagtaaccagaggaaacagaagaggaggactcttattagaaaaacttaaagctttgtttctttttcattctgaccccctatttatttattttaatgcgtttgaccccctaactttatgtatattaaacttctcgacgaaattaggtttttaaatgttaacaattcgtcaaaaatataaaata

SEQ ID NO: 58112 - DNA, 502 bp, Arabidopsis thaliana landsberg
  unsure (1)..(502): unsure at all n locations
tgccgcagaaatcagcaattagaaaatgcaccagatcacaataaaaagttgcatgacttaaaatctaactcaattcaatcaataatgtgaatagacaagaattttatcaaaactcaattgataactcaataaaaaaatatacgatctttaaatacttcaatactttgccacaaagtaacacactcatatcaatttttgtatgtagtaacttaccattccacctagaacacacatagtatgctttatgggtttcttattaactttgccataggacaaactattgacaatgagaatataccaacagtctataaacatcatcattaaaggtaaacactcctcattaaagccacacggaacactaaggcctcatttggatagggcgggattgacgttgattggaggccaaaccctgccacccgtggatcagatccacgccgggctagcaacccacgtgagggcttgcttagtttattcccattccatgtnngatcgagaggattga

SEQ ID NO: 58113 - DNA, 340 bp, Arabidopsis thaliana landsberg
  unsure (1)..(340): unsure at all n locations
acaacataattctatattttaatgctgacaagataaaaagaactttatgttaataatacgatgttagaaaacgtattaaactaataacatagacctatgatgatctcccacccctaagtttgtttatttagggaatatcgtaccacagaaaatcacttggaattggataacactagtttttaggtttttctttaacttttgttttcctttatttattttttatttttttaaaaaaaaaatgaaaaanagagggctatatatagnagagncattnnncgcgtgtnagtnatgcagtaatntgataaaacccttcacaggtttaattganaaaaaactcatt

SEQ ID NO: 58114 - DNA, 500 bp, Arabidopsis thaliana landsberg
  unsure (1)..(500): unsure at all n locations
ggttatcgtcatcttcgttgatcttggtgggcatttcgatccagagagtattgagtatgcagcaagtgatagcagcggagggagagaaatcgaaacgagggattccgaggtttttggtccaaccaaggaagaaatcagatacgatggctactggaggagaagggtgagaagtaatccaagagataagcggcgcgtggagattaccaagcgcgtggatcattaaagggaagcctgaaggaggtaagtcttggacgttttcgacgccggaggggattgaagggtgggagggaaaagggaggttaaggggntcgatgcttactcacggcggacagaggcatcgagagaaaaggcaggttcttagtatagactaagagggttatgatactagttgcgacatctcggatagcaaggcaatcaattaaccctgagacgcgactatatgagattattaaatacatgggagcatcatcagttgcgtactagggatttagccgttttca

SEQ ID NO: 58115 - DNA, 1103 bp, Arabidopsis thaliana landsberg
acatctcacttgccttcctaaaaagaccagcaatttcaagtcgtaaagtggtcagagagcgcagacaacataccatgaacgccctcaccagttaatgcattaagatatgcagctaaggtagaaactagtgttttcccttcacctgtcttcatctccgcaatggatccatcatgaagcactcctccaccaattatctgatggaacaaatgaaacataagtatacttaacaacctctcttcaagattatagaaatgcacccaagaaatagcatggactaaaacttgagggtaaagatatagacagacctgcacgtcaaaatgacgcattccaattgttctctttgcagcttcacggacaacagcaaatgcctctagacaggggaaacacacacacacacacacacacacgcacaaaagtgagagagtaagcgcatagactatcaaaacaacgtacattgttaaaataaagggtaactaaattcaaagtaagatattgatcaaaccagcttgcatatctgctggggactcccctcgtgctaatctttctcgaaattcagcagttttagctttcagctatggacaaaaacaaaccaaagtcaaaatacattaaagaaacatatcaataaataaaacgtctcaagcagtgaacactaagtttaacctgttcatcggaaaggctttgaatctgtggttcaagggaattgacagattccaccagacggtagtagtcccggacaacccaataattcatgctcgtaaaatcttgtacattcctcttcaaacgacccaaattcccctgaaatatgaatgaaactaaagtaaataaataaaacatgaagagaagtaaaataccactgagaatgttgagagataaaattctcatcccagtctcagaaaagcatcgcacagaaaatcgttagtagacaaaatattcacaggaaatagagacgagacaaatgatcgaacagttggtgtgcgccaacgaacagacagagttatacgattacattactaagagagttgacgcatatcataccgttagggaagctgagacgacacagcttcttcgaacaaggtgacaccttttaatcggcgtgacggacc

SEQ ID NO: 58116 - DNA, 1044 bp, Arabidopsis thaliana landsberg
cctatacttaaaaaaaaccctataataaaacgttttatacaattccagatttattcaatatattggatatgactcatgcgatagatatagcgtaagacagctatttagaattccaattataactttatagttttcacgaactgattctagacaacttgatttttaatttggactttaagattattaaagtaggtttacatgcaactttccgcttacttcatatgatagttttgcgctacaacttagagccaatagaaaatgtagtgttaaaattggttacgaattacggctacttggtccacaagagaatatttgacgttatatataaaggccaactcttccactttccttgtgctcaaactaagagcttctactcaaaaccatttgcttctttctgcttagagagagacacacacacaatgggtgctaacgtttctactccagagcagagatttcaggtaacccacttccgttcaaggaagtcatggacacctcaacctgagatttatcctttcaaagtcaacagtccttgtattgtggagatcaagaacatgaatcagtggaaatctaggctcaacgctcttaaagacaccaacaagctggtaatatattgactaatgcgatctataatctaagttaagccatttttgcttaagattctatttttaaaattttagaaaagtattcgaactagggttcttataaccagattcgagacatttataacataacaataatgcattaacttatatgaacttccaactcaatctaaatggtaaataagtagtttggtccatattcatcatattccagatctcagtttaaagatgaggtgagattttgaacacaactcacaagataatgactcttctggctcatctaaaaaaaactcgctctaaagttgaatcatatcccttttggatcattctatctagtcaaagttaggctattatagttgggtgcaaaagggtacatattttcatgaaacaaaaaatcctttcaaattttaccggtttgggatttcaaaaaaagaaggagtgaaaa

SEQ ID NO: 58117 - DNA, 177 bp, Arabidopsis thaliana landsberg
gttcttgctaggcattgaatggatttcgatctgactgacgagaggttttgtgggggacaactgaacgttggacgctcagatcctggtgacggacataacggctgatcatatcctatatcattgagacccatatcgtcgaatatgactacaagaagacgagccgttacctttactgaa

SEQ ID NO: 58118 - DNA, 347 bp, Arabidopsis thaliana landsberg
agctaacatatataagtctttctctaacaactctgcctttatgcggaaacctgggaaaaataattgggggataatccaatcgttttctcattgcaacctctaataacaaaaattactattcgtagcctcctttgacgacggatcaaaaccttcttcaccaaaaccatgcaccgttcctaacacaccggaaaccatcgtattaaggttgttcatgttactatatccaaccacggtattcacattgtttaaagaaaacatgttaagcctttgcggtggctacatctacgcgcgaggctagaaattatatctccaaggagctctgctgagaaaatccagctgatagatcc

SEQ ID NO: 58119 - DNA, 1199 bp, Arabidopsis thaliana landsberg
aatcccacaatgatatcatcatattagcatgcacaattcatttgaaaatttcaattttttctaagcgtaaattattgtattcatcttattataatcaatgcaacgcagtaaggcactagcagacgcaaaagagagtgagaagaggcttgaaagttaagtcgcaaaggaaagccttcgtcattgcttaacttgcaatcgaagtcaagaaacaaaaaattactctgaagggcctaacgttcacgtcaatcatccaaacacacacatgaattttttttagagtcttccattgttatcaattagatttttgctatcactactagaatactctcaccaaacactgaaagaaccatctcaaccaaagattaattcaagaaaacaactcaaaccaacaaacaaaaataaaataaaagtattgagtctttagaaataaccctaaagcaaatgttcagagacttttcttgtgtcttctattttctggactcaagagtaaaaataagagagaatgagttcgaatggagagaagaggatgatgaaaaggtccgattttgcgcagaagttgttggatgatcttcgagtgaggaaagaacagctttcaggctctcagaactccctacaaaaaggtatgaatgaactagcattgatccctgaaacgagagagcatgtagctaagctagattcttgaatcttttcgatatcgcacaacgtttcgtctgatagatctatatgtagaagttttcaacagaagctaaaatgctcccagccaattcattaaggcatcaaaagattatgaactaaccaataagttccgggcttaggacgataatctcctatggtcggtgaccacaacaggttaatttagtcccttcccggccgctaaagaatttttttgtatgcatatattcgaacaaaggctgtaagggattcacaacgatcatagctcgtgtattgcaacaagctacaaagaaaaaatctctctaatgtcaattccggcttttctggttgcagataaatatgcatattcgaacagaggatttaagggatccaaagcaaaatctgtaagctgtgaagcatctatctaacttgtaaaatctacaatgagtgttagtgtgttaccattatcttattaaaatcaaatgcttgtttggtggcagacaacatttcaagatcttactagcggagggatagaggcttcaaatgag

SEQ ID NO: 58120 - DNA, 1455 bp, Arabidopsis thaliana landsberg
taagttcgaatatttgacaaaagtcctctccagcctttcattattgcggttaaatcttgtgaactgaaatagccagcccctctgtgaaatgaatatacgcgtatctttcttgttcccccgtcagtttttgtaagatggtataagtgtaaagtaaatatagtaaaaatccatcactcttgatagttaagtgaggtggggaagagaagagatgttgatagttagaaaaaatgaaaggtcaacatcaatggagagttaaaggaaatgtgtcattgttccaaatctaacgagagaaagtagagaccacctttttcattcttgttatattcattatctcattttcgccctcttttacactacttgcatgttatacccaatttctctgtaaaaatatatttaactgaactcgtgagcttggggaaaagaataaaaacaaatgttatactattacatagtgtgaatggtttaagtgcaagttacagttaaagaggacaagtcataaagatgagcacaaacaagtacaaacaacctactgtggaagttaaagttgaacctcttctttaacctaattcgttttgccttcatttgtaccttttttctttaagctaaaaaatcctataagtttatcatttctgcattataaaacaccttccatctttttattttgaagttaattgatgtattagtttatataataagatagcttttgtcacgtttgtgttacaacacttttggaaatttttatttcgcatgtgattaatcgtacaaattttggtggacaaaactcgaatggttgatttgggaggttttaaggattcaatcatcgtctcttgatgcaaaacgtcacaattagacgttgatatatatattttatataaaacatatgctggcgtgagattgatgatttatatacaaatacaaaaacagaaatgaaagatacgttcaggatcgataaaaatcatttcgttcaaaattaatgcaccttcctctctcggttagacaaagtacgtgatgtagagactatagtagtagtctattttcgtttgtttaagcatcttcttttcaactattgaatatatccatcttctacgtacagaaaataacagaattcatttgatggtctagtgatcctaaatcctacgtacgcattattccggctatacctcataatgaaggttcaatatatagtggtgatcatgtgatcactagacaatcttaatagtggtcattaatttgaggttgcattactaaaaatcatcttccttgaggcgcttaacggcaaattacaagattatgttagagggattcctgttatgtgaattgtatttcattaatgttgttgtagatctagtagtctagactcatgcgtgcaaaacaataaaatttaacattttctctaaaaagaaaaaaaaaatcccaatgcatgtgttttgtggggatacatgatatattacaaac

SEQ ID NO: 58121 - DNA, 607 bp, Arabidopsis thaliana landsberg
  unsure (1)..(607): unsure at all n locations
nnnnnnnnnnnnnnnnnnnnnnnnnnnnnnnnnnnnnnnnnnnnnnnnnnnnnnnnnnnnnnnnnnnnnnnnnnnnnnnnnnnnnnnnnnnnnnnnnnnnnnnnnnnnnnnnnnnnnnnnnnnnnnnnnnnnnnnnnnnnnnnnnnnnnnnnnnnnnnnnnnnnnnnnnnnnnnnnnnnnnnnnnnnnnnnnnnnnnnnnnnnnnnnnnnnnnnnnnnnnnnnnnnnnnnnnnnnnnnnnnnnnnnnnnnnnnnnnnnnnnnnnnnnnnnnnnnnnnnnnnnnnnnnnnnnnnnnnnnnnnnnnnnnnnnnnnnnnnnnnnnnnnnnnnnnnnnnnnnnnnnnnnnnnnnnnnnnnnnnnnnnnnnnnnnnnnnnnnnnnnnnnnnnnnnnnnnnnnnnnnnnnnnnnnnnnnnnnnnnnnnnnnnnnnnnnnnnnnnnnnnnnnnnnnnnnnnnatttaaattttttaaatttaaaccccgccccacaaattttaaaattttcccctttttttggggaaaaccttttttccccccccctttttaaaacccctttttttaaaacccccccccccccccccttttttttccccccctttttttttttt

SEQ ID NO: 58122 - DNA, 711 bp, Arabidopsis thaliana landsberg
tggctgcgagaaagattatgttttttcctccatggcctctaggtgccggggtgcgtgcagtcattgtacctagttggtctcaactcctcgctggctttggtgttccttgcattgtgagtagtaaaccacatcatgcatctttcctcttatagtatttgctaagtattaccgtgcatgattgccactttgaaaaactaattatcactaggttacactcgaatttacatatctacatttggatacattgtatattaggatcatatatatacataaatagtttaaaaagttgtaagaacaagggtatttaattttcatcattagacacaaatagttcatttgatcaacttaaatttatagtaccaattgtaatacatttgatgattctccacaattttagaaactgaaaagttgtaatggatgcaggacgatacagttgcgaccaaatggctaaacgatccagctgtaaggaaagcgtttcatgctaaagaggtctctattcaattcatcatattactctcaatcagtatttgtaacaagttgatgatggacaccattttaacatcttggaccttttttcgaaacgttgataggaaaaagcgattggaaattgggagttatgttcaagcaacctcgaatataggcacgacactggtagcatgatcgaataccatagaaacctcactcttagtggctttcgagctctcattttca

SEQ ID NO: 58123 - DNA, 478 bp, Arabidopsis thaliana landsberg
tgccacttccgggggttcattttttgccgccaaggccaagggtggttaagttggttcaatcaacaaaaccaccgtccacgggggacaacaccgtgggggccgtttgcttaaacacatgtgactactctgggaagtccactaacactgaatcatttggcccaaacacaaaaacccaatttcaagcccaaaactttgtcaacaaatcaatgggtgacggttggataaatggttgcaaggaccgaaggaggtctctcttgtccgttgagcctttctgcattgccacataagaagacccttaagaccaaaaaggggtaatttacaaagaagcataaataaagcttatgatattatctatatgtgtatatgtagccgagtatgtgttttactcgaatatatatgcatattaacccaataattgttgttgaatcatggttttttctaccttattctttccctctatatgtttaaccacttaata

SEQ ID NO: 58124 - DNA, 435 bp, Arabidopsis thaliana landsberg
  unsure (1)..(435): unsure at all n locations
ttcctacttatatcattacgcgagagccgcccaggtgggtatgagggggttacctatttgtgtttgggagatttttttctcttgtaagaggtcccatctttcagttacatacgtagtattctctgtttacatggtgttcagtatttgtacagcggaagaaacagttcaagccacatcattaggtggaaacaagtgcactgactcctggttattaaattggtagactggttgccatgattttttatttatttacagctagtggtcacatgggcatcaaatggacagacatatttactgttctaggtttcatctgttcacccaaaatgatttatgctgaacctcgtacatgcattctcagtctcattgtcattcaatgcagcactgttcagtcctattgatatgtaacttctncagatccttactatttgttttggt

SEQ ID NO: 58125 - DNA, 1063 bp, Arabidopsis thaliana landsberg
acgacatatagtgttgatcctattaagcccgcttttcgccaagtagtttccgactttttaacacagagccgggtacgtagagatattataaccaatctatgtgatctctgagggtagatcataagcgaattcattagtatgtaacagaccttcctcttatgaatcttgtcaacagccctgtgtcctatgaaatcttgcttaacctacatgttcagatcagaggataccttagcatattgctccaaccgaaacgacaaatgatacgacgcaatgagatctctgagacaacaaacaaaccataaatgaagctctattcgtctcgtgaatcattcttggttatctatgacctcctcaaagcatcaaaccagagaaataacacattggaattgaagcctgattatggtaaaaatgttatccaacctctccagctatgtacaggtcacaggccacaagaaaaaaactttggtcgcaatgatgtttcaggctggttctgtttaggtgcttctgtgcctgaaggtcttgttaggttaagcaaagtcttccattgacacggttagatgacaactgacaagtgcttatcgactaatccaacttcggccacaaatctttgtaataccattctccttcattttgtccctaagatgagcaacatccgtccaccggtctaaagctgcatatatatttgacagaagcacgtaactaccggcactttgtggatcaagctcaaagaggtgccttgcaactacctctgctatctcactattcccatgtagactacaaccacccaaaagcgaaccccaagcactagcatgagcttcaaagggcatggatttgataagctcataggcctctttaagctttcctgtccggctaagaagattcacaatgcatgaataatgatcaggagacgccaaaatagaatattcctttcgcattagctcaaaatactttaatccctcctcaacaagcctggattggccacaaactttcaatattactgagaatgcaacttcatcgggaacaatgccttcgtctaccattttcttcaacaggcgaacagctt

SEQ ID NO: 58126 - DNA, 1177 bp, Arabidopsis thaliana landsberg
ttataattagattaaatttgaaaattatacgatttaccttttatttatacaagttcttcacttaatggtttttcatggtttggatatgaaagaaaaaaaacgttttcccctcctttatttagaatctctcaaacatatatttgcgtgctgattttagctaaagtatgtttgcgtactacttttacgcttttagctatagtacgactgcgttgtggtcctttgtcatccaaaaaaaaacacagttgtaaatgtactagttcctttaccatcccaaatttgtatctcatctacacttattgtacttattccatttgatctgcttatcaaattccacctttattgcttgttccttgttcgaaattgtagattatagaaccaatattttagcacaaaaacgctgaaatgcatttaaaaagatatcaaaaaccaaacacagagaaaaaacacgtgctcgtataggaaataaatcgtcagaaacacgtggcaggagaatcttctgttctcctctacgacacaagtaggaaggaaggaaggaagtacataacttgcttggagtaaacaaatgtgttcacgtgcattttgttgctttatccgtgttgacgtggaaacgttttactggtcttgctgatcctttaacgaaaaagcattatatgtactattaaagaacaaaaaaaagcattatgtattttggaaagaaaattaggattcctttgtcctctttgaacgagttaacttttttttttatcatataatagaaaataaatccaaagattatatttccacgaactttcataattttttccaaatgttttattgaaatattaaccattatttaacaatttgaagcaaattttaaaatgatgaaaggagtagagatgaaccagtccgaaaataagttctcttgtcttgcaaaagttgtttagacagagaaagtttcgcttgtcttgtcttaaaccaatgtaccaaactcatccatccaattagtaataggcacgtcagcattagcccgcggaaaccagaccatgtgagtcacacgtgatgtttttaattccttttatcgatagcctcaaacgcggatttgctgcgtttgctgaccaagtcgctctttgtttggccattttttaattgtgttttcttggagggtttcctttctttgctggcttttgaatcttttttt

SEQ ID NO: 58127 - DNA, 1168 bp, Arabidopsis thaliana landsberg
tggctctcagttacctcaattacttttggatgcaagaagtccatcacaaaataatacaacagtataagaagaggaagcctcagcagtactttacctctaaaattgcatgaaactcctctttcgccaccccgattctatctgtatcactcgagtcaacaacatagatcactgcttgtgtattcgggaaatagcatcgccagtatggcctgtcaaaaataccattagaaaattgggcaaaacaaaaacagtataatcttgatggagcatttctgttcttcattccttcacagtagatgcaatatgttcatcatatctagaaatgagaaacgaggtcattaagctacctgatgcttgtttgtccacctgtcataggaaagttcttgttaatgtactgtgtcgctgaaccaattttgtaaaatgcaaaagcattcgcatataactaacaagacagatgtacatacaacacgtgcaaaacaataataataataaaaactataggaagaagatgtgataatacagaactctttatcacccaaatttgaatacaaagaacttcatctatttcatcaagaccagttggaaaaggtaataacttggaacaagaaagtcgaatataacgacacatacgacaacaacttatctaaggactccaaatcaaggaaaattctgatcatgaattcgtgtaattcatacaaaagacaaacattccaattatacaaaagtgacactgaagatctactaccatggagctagtcaacttagaaagaagaacgcagagaatctctaactgaatccatcagaaaatggtttgatttggattaatctaatggttatatagtgttgtagatttcgaatatcccttccatataataccaaaaatcatttctactacttcaaattcaaagtttaatgcgttcgaacgcattcttagaaaacatacctaaatcccagacctgaaacttgatattgttgtactgcacagtctcaacgttaaatccaatagctgcaaagatcagatcaaaaccaaaattcgtaaaatcacgatacataaactagatccataatctatacaacaatcgagagattagatacatactcggaatcgtagagacaacttcccccatctgaagccgatctggaatcacagagaatcaaaaacagcaacgca

SEQ ID NO: 58128 - DNA, 435 bp, Arabidopsis thaliana landsberg
caagcgtacatttggggtttgcttctattcatctgttgccgagtttttctttgagatgaaaaggatgcataataaatattggctcttttaagaccgggatatgaacgcgataagctgttgggactaggaatgtcatctactagctacttttcagctctttgtggactgtatgtacatatcccttaacgcatctaaaggagactgtctaaacgtggacagttctagagtcctattaacctggtaagggttgctgatggattgtacagagagaaacatttatatgaaagtagcatatttctacaggtgattgctcagcctcggctgaatatctatcgctgtgcatagaaaataactaatcaatacttatatcccatggaaggccgacaactaagtggactattatagtgattgacgataccttgatcattcatgtgg

SEQ ID NO: 58129 - DNA, 463 bp, Arabidopsis thaliana landsberg
taattgcttgtattttcagcttatgtctacggggtaatgtggagagatcccaaaaaaagacaatgttgtcgaagaaaaagaatctccaatccctgagaaggataccgtccccgaacatgtaagtcattctaaactctataaagtatatcgtatatagtaaattatcccgagtgccaatttctatttttactgtacgtacacatggcttacgcacttgtgtagctgcttatatgacatgtttaacgcgtcattttatgtctatagccaggaaagaaagacgatgttgtgcatatgggtgtttctcaaactgaagaaagcgttgctcacgacgtgtaaaaggagaagaagaatgtaagacggaaaggtacttttcgctgatgatctgaaaagtgatggaacactcagtgatcataccaaacgtgatgatgtacattttatggagacaagagacccctcctaaaca

SEQ ID NO: 58130 - DNA, 1290 bp, Arabidopsis thaliana landsberg
tttatcagtttggttattgataaaagaaatattttgttgtggcagagtctctgattttgttgttgcaaattctgacccattgatccctgcgtaagcatatttctagttcactcaatgacttcacacttttctcgtactttgcccgctcttacaattccgttgtgctgtttttgtcttctcatataaatagacaacgaaaaagtcgaagatccttccggttctggaagtggctctggtaagcatttaaattggaacattatattttgaaaatattttattttcgcaattttatataaaatttgcataagacctcaactagtaagaaatgtttttagccaatgcttttaatcttagattttgctagaattactgatatgtgtagctatctgaataaagtgatactaattaattaactcaatgcagtggcccatgtttgagcctggtgagtttctgctgttgctgccaatccaaatgttcgtgccatctgaggaaacccaagtgctgcaactgtacatcttgcagctgtatagggtccaaatgctgtgacgggtcatgctgctcaaacatttgttgttgcccgagactaagctgcccgagctgttcatgcttccgaggttgctggtgttcttgtccggacatgtcttgctgcattcccagctgtttccgcagttgcagttgcactcgaccgtcgtgtctgaataaaaagaagagctcatgctgcagctgcaactgcaagatcagatggtcatcttgttttagttgtcccaaggtacgactttgttcttgttgtttttgcaattgtaaaaatctatgttctaatccttgttgtttagctttctaattaaactttattattattataatcattatagctgtttcctctattttttgttcaaattttttcttaatctcttaaaggaagcaacactttcttgattttgtaataaaattgcgaatatttttgtctttttgtcagtgatgaatgatgattactatcaactatcaagcgagtctgtcatgggatatgttttttttttttgggctttagccgtgggatactaatgtaaagtatgtacacaaactatgtgtgaaaaacgaagaaaaaagatacaaagccatcacacaactctgatgctcgaccggctcaataatagggaaaaaaaattagtggcctatcttactatacgagttatatatggaccataatcacgtgttaatttctcattttaattgtttaaaacacaccaatttttttatttgataatttgcagcggatcatgtgtaaaacca

SEQ ID NO: 58131 - DNA, 109 bp, Arabidopsis thaliana landsberg
gaaagcttggatccgtctcggctgtccaaaacgtgtatcccgcttgtacggatttggctcggataccggcccatcgtgagtggttatccgaggacttcgggagatttat

SEQ ID NO: 58132 - DNA, 506 bp, Arabidopsis thaliana landsberg
tttactataacctcagtttttcagcaacatgattatttggttatgggggtttgagaggtctttcgcatggaacacacgtggcgtctcctacaagctcggatcaaaccttatcatgcaaacaagactcacgacgtggtaaaggtaagctggcatacgaaaaagaagttactgaagccattgctaacacgttcttggctacatggggtatcgtacattcacgataaggcttaatgtctacctaagctttgtacatgatcaagcgctttgccgggtacgacaagtttccaaagaacgggttgaattggaacctttcaattatgatcatatggagtgggtgggggaatgttctaagaacttcatttctatgcaatatatacagaaaaaagtaaggagattaatgacacatagaagaggcgattaatatcgggagtatatacagtgagtctatacattgcagcgtgaactattaacgttgaaatggtagacgttggggaagagagttacac

SEQ ID NO: 58133 - DNA, 475 bp, Arabidopsis thaliana landsberg
tggtatatagcgtgaggcttctccaatggtggatggggtgggataggcgcggacgggtctcaggcgctaataaggttacgcgggtggccgagaggtccgagtggtgggcgctagttggccaattcccggagaaattgcggcggccgttgcaacggtgtgcgcgattcttccagggaagaaagctctgacttgccgggcccgcaagacagtgaaggtggagatgcgaggcgcgggagagaaatagcagacggggctgaccgatgggcccgcttcacagttagctgagtgcgcacggtgggaagtgtctggttcgcgggtccacacgcaagtgacgactcactcgcacaagagacttacgaccgggcccagggtgtcggcgccacctcaccaggtgttgggctgtgcagaggagttggccaaatgggccgaaatgaaggtctgcggcccaagtagaatttattcccttctctttttt

SEQ ID NO: 58134 - DNA, 1138 bp, Arabidopsis thaliana landsberg
aaattattagtttttctattccttttttttttttggaaaaatgaatggacttttcttaaacaacactttttctaaatgaaataaacattattttggtattatattttttatatatatttttttttgtaattcagaaagcttcgacactgttagatttagaccattctagatacgttacaagttaccacttaaccagaagccacataccagtactagttcatatatagcataaatagttaccagattttgatgttttcaaattaaatatgcgactaaaactctaaaatcattcaaagttattattatttatgagtttagttttcttcttttcctttcgtacaagttagatatcatgtataattaaccaactgtccatcataatctcatatattctggatcaaatcgtccgtttaatatagttgaatatgtctctataattattttaaaatgttacttgtgttatttaagtaatacagaattatgtaatagataaaaaattgtttgaccaaaaaaaaaaagagattaaaaacaatgttaacttttcgtccaagtagacaccacataccaagttaccaacaacacttcacatttgatcattttagttgatctcttccatccatgtggtattaatctaaaatatccaatgattatgacatcttgttttattttggcaacgatcgagtattaccattaattaaaatcaacatgctattaaataatccaaataggcaaaaacttcacaatcaaaagagaagaagaccattcgtcgaagaaaattactcacaagagtataaaactatatatatgatcagcctattcttaatgtgaacattgagaagtggggaggttaaaatgcaatgactttgatccaaagttattgttgacaaagacaatcaaagaaggaaaattcaaaggagagatgagtcaaggacaagtcaacgaccatttcgtcttcgtcttcttctttatactcattagctacacgacgtcgacggttcgtcattcttcctctaagctttatctttctgatctctgaccttgtgactctgtgcatgtgtgtttatctgctactgtgttttgtcggtttgatctccaaaaaccagacatgaacagaggaagcttatgccctaatcccatc

SEQ ID NO: 58135 - DNA, 500 bp, Arabidopsis thaliana landsberg
cctgcattatcataagtacgtctaactgatcttgtctttccatagttctttcgcttttccccgaacttcatccagcgaagaaacatccgcgaccaatccttctatccggtcattcccggtagtttcttttagctccgtgaccacccggcccgttttatctttatcccttccgtggatcaccaggcgggctccctgcttcgcaagattgaaagcagtgagctttccgataccatccgttgatccggtgacaaaaatagtctgactgtctgtaggtttcatctaaaaatattttttggactgctttcatagattaatgccgcctgttacttctattcgttgcccgttgatccattttgcatcttctgtacaaaggaaggcaaccacacttcctatatcatcagcatttcctgcacgccccaacgccgtttgctttatcataaaggccaccttttcaggattatccctgttacttcccccggtaaaatctgtctgaatagcac

SEQ ID NO: 58136 - DNA, 1187 bp, Arabidopsis thaliana landsberg
ccccgggagcttttgggtcacttgtaagtgcttcaagcgataatcacccgatatccgtctagatgaatccggaagcgtgccatgtgcattgtatcaccatgaaaaccagaaagcttgattccataatttctgatgatgtggttatcaaagctgtagttatgccatacctataagtaaaaggaaaggtcaagcttataagcgttatttgatcatgaaaacattttcaaatgatttacaaaattaaaacatgattcagaagtcattagtgcctgcatctaaacaaaagagagccaaggtgaagaagtagtcaatcatcttttcaggaaaacacacaacaagattcgtaacaccaaattatcactgaataaatagaaacgcagcacgttgtttttcgttttagctcactttttttatggatgagtcttcgaaaaatggcttaaactcagccaggatatcccttccattttcgccaagcacatctacccagatacatgatttaccatctccaaaatctgcttctgatccacaatagatactgaaacaaatcatctccccatggtctacaggtgtttcagtcttcacatcaatcctggatacctacagaatagattatcagagagtaaaagcagaattaaacgaagcgtctatacgtcaagaacataagcatttctaggccatgtgaacaacaatgtattagcaaacacatgacccaatacctctgtatcgcaagcatggacaagattcctatattgattcatgagcagagccacggtttcctttgcactagacacattatcaacaacacgaactctattatatattttcttgaggtttgcacggacttgcgataggttggtgcatttttccactttggaaatggttgctgttttcttatagctggcattgtcaagagtcgtatcactgttaagaggtttcagagtcacgtctgttgtttccccaacctcaatatccttgcttggtaatgctatgaccgatcctcttatactattcgtttgcataaagccattcaattctctaccaagtgtggtaatatcagttccacgcttcagattgtaatcaaagttctggccgtttccataagaatggacatcatctattttggggacaaagccttttaaaatataactgccattaccaaaagcatcatcctggttgttagcatattc

SEQ ID NO: 58137 - DNA, 185 bp, Arabidopsis thaliana landsberg
tttcaaaatcaacaaccatttatatatataaagatgactataccttaagcatgactttgatgatttactaaattcaatatattacaacatgaaaggaacacctaaaacattaaatactgtgaagttgacaccatatattatcttcacacaaagggataaaggctaacaaccttattacttcacag

SEQ ID NO: 58138 - DNA, 166 bp, Arabidopsis thaliana landsberg
atggtcgagggtgcggtcgatcgggtagacaaatattgggaccgggaggtggatttaaactgctgggagacaagtcctcgaccacttattgatgtgggcgacgagttctcggacccggctaacgatagcagcatctgggcgtacaatcctttgacccgatagatgg

SEQ ID NO: 58139 - DNA, 582 bp, Arabidopsis thaliana landsberg
  unsure (1)..(582): unsure at all n locations
ttcaaactttttcgaaattcttatctcttcagtttatataattgaaaattttaaagtaaattttggattaaattcatgtttagtcaggtttctaaatatatatatatatatatatatttatatcaaatttatgaatttgttctctcatacttattttttcttttttgggtatatatatgttcaagttagattatttcttatattttctgttgatttttccggtgtgttcgaaataacgataaaacgtaggataagtgattcgtctactaggtgaaaaactgagaaaaaactcgtgtgatgttcgaccgcctnnnnnnnnnnnnnnnnnnnnnnnnnnnnnnnnnnnnnnnnnnnnnnnnnnnnnnnnnnnnnnnnnnnnnnnnnnnnnnnnnnnnnnnnnnnnnnnnnnnnnnnnnnnaaaaatgtgtttgaagaatgtatcggtgaaagatagtggtacaactatcttttgcacatatttctactgatataaagtaaagatagaagggatatagcatagtgacaatgtagaaaatgcaatatttgattgggattacatagaatccaatttgtttgaatata

SEQ ID NO: 58140 - DNA, 549 bp, Arabidopsis thaliana landsberg
tcctgactcaaccctaacatattgcgaattcaaagcaatgtgtcacacgttctatttagtgggcaagtgagaagaagttgattggtaagtgaaggtatcctgatttggagcaggattcaataaacatggacccaaactcataaatgatagggctttgtccttaaaacagcaaggcaaacaacatgtgcaaccatacctctcaattttcaaaagtctttttccatgtgaatgtcacatcttcaaactctcatccatttttattccatttcccaaaagcaaaacattagttcatcttacagcttctttattctttatttagtgttttattcttgggttcaaatggttttggggaaaaagtgaatataatgattacctgcaaattaaagttctgacatctaaacatgggatccaaactctgcaatgtatattaacgaagtcgtttgatataacacctctcttgataaaagatgattagaacctaaagtaattttaaaatatggtgaaaaattagactcttggagtatataaatggctcaatctgtattggcc

SEQ ID NO: 58141 - DNA, 1551 bp, Arabidopsis thaliana landsberg
tgtctctccggttcttccgttgatctttgctgaggttggttctggttcgttgaatatgtttggagctagtagcagtggggttcaagctcctcctgggtttttggatgagtttttcaaagactcggattttgatagcttggactcgattctaaaggagctgtatgaggatttgaggtctacggttataaatgtatcagtgcttggagatttccagccaccactgagggcactcaagtatcttgttagcttaccagtaggagctaaatctctggttagtcatgagtggtgggttccacggggtgcctatatgaacggccgagcaatggagttgactagcattcttgggcctttcttccatattagtgcgctgccagataatacactattcaagagtcaacctgatgttgggtgagttccaacttatttatgggtttctattactgagaatcatgtagtctttggggctcttttcttattgagaaagtttggatagtaagaattattgattagcttttactcatagtagagagacttgatcaaaaaaggaaaaaagcagatatatttggcttatatatgatgccactgttaggttgtatacatattttaagcatgattatataaatttagcatagttagatgatcagtagaggcgaaaccaacagaaatattagtaagcactatgttaagttagaatattgtggatgaaatccattattttgagcattttttctggtctgtactgaagaatcttgattgtccatttagtatttgacaaggcttaattgtgcgaacataagagttttcctgatccacctcagaggatatactttacctgttatgaaaatgctgatatatgtctattgtttttgtgaatatcaggcagcagtgtttctctgaagcatcggaacgtcgtcccgcagatttattatcatccttctccacgattaaaaatttcatgaacattttgtacagcgggctgcatgatatattgatgattttacttaaaagtactgatacccgtgagcgtgttctacagtttcttgcagaggtgatcaatgcaaatgcgtctagagcccatatacaggtaatcatccgtttataagatgcatatatacttcggatctttattcatgaattgctattgtctcctctcggttttatcaagttggtatttgtcttttttgctcaaatcagcattctgtaatatgtttatcttgtatgacaggttgatccagtctcttgtgctagctcaggcatgtttgttaaccttagtgcagtaatgctccggctctgtgaaccatttttagacccacatttaacgaaaagggataagattgatccaaaatacgcattctgtggccatcgcttaaaattaaggtatggtcctcaagatgattctacttgtatttcctcactgattttaatggtttcattgatgagcaatattatttatgatccccaccagcgacttgaccgatctccatgcatcatccgaagaagttactgagtggattgcaaaaatgctatggcaaacgcaaatgatgctgggcg

SEQ ID NO: 58142 - DNA, 1087 bp, Arabidopsis thaliana landsberg
agagaggtcttgaatgaggttttggtttggcttctgtttcggttggttctgtgattacttgtgcagcgactgcagtttcaatcgctggcactggcactggctctggcactggctctggctcaggtactggtttatctacagtggttgttgtagctgcaactgcttctggctcaggtactggtttatcgactgtggtggttgtagctgtagctgattctgcttctgctgttactgttgctggtgctgggagagctttgttgcttgttgattgaggaagaagagcctttcctatttcctgttattccacgtagagttatttctataaagggttttattactaatggagatatgtatctaaattagttacctttaactcatcaacaagttctttaggggcaacctttgtgttcaagaactcatccacctgttttagagtttgctttcggtcctgtagagagtatagaaaagtaaccatcaaaacatcaccaattgcgataaatacattcaaactgaatcttgatgaatgaaaagatgggaagaacttgcctcagcaaatagaagtttcttgcctgcaagttgaacaagtgcagctgaacctagtagttggagtatggtttcaatctgtagggatgatgatagatataagattaataccggaattttctggagacaataagagggataataccgaaagactgacctctgtaaatgcaaaaacacttaatccagcagcagcagctactccaagagcgacagatacaccatcagaactctcctgtacatttatgttaaatcattgttcgatgtttgttacagaaacttaaattaaatgaatgtaaaattggatactcacaccaaatacaccgctgatgctatccgtcaaactgcttaaatcaaggctgagagtcttctttggctctatccaaggcaagctgctattctgcaaaccagatatataatgccaaatgtaaataagtcgaatcgaaaggatttgttgaagaaggacacattgtgggataagaggaaagggaacacacaccaaccagcctctcggtccctctgcaccatctttaatcgaataatcaaa

SEQ ID NO: 58143 - DNA, 1020 bp, Arabidopsis thaliana landsberg
tgaacaatgtcaatatccacaatcaagtgcactagttgcatctgatctatttttataaaagaagtatccattcaaattttttatatactgtcttcgcatacaactgattttgatctgaaatttcactagatgaaactggatttgattttcaatacggtttctaaattgtctaaactatgaaaaactgtaacaaacaaaaattgatatcaaaacttaagactgcaaccgacgagttgaggtagactatgaaatgatagaacatatgtccttggtgtgggtaaactgttgctttcactttcactttcacttcttgatggttacattacaatattgggtccatttttcggatcttatcaaccaatttacaaaaagcaaagagagaaaagcagtgcactacagttttctttataaaacttaacaaatgaacatgtagacttttagttttcaactgtgaaacatgttttgtacttctttgctttaggctttattatttttctttcttatacatgaaaaaatagtggaacaatgaagtacttactgcgacattgcaacctttggaaaaaaccactttcaggccatgatgcaatatcgaatgatctgacgttgcatcagtcgtataaccttttgcaattcatagttttacccctaaaaaaaaacaattttatatgaattcaattttcgattttaaacataaattttcgattttggacattttacatgtctagaatatctccccaaatcctatgatcaatataataaacaaataatgctgaaattagaaagagaaataacaaagtgaccttttatattttatagaaaataactctttgttccttgaatataactcactttagtaaagtctctcattgaagaaggcccctacatgaatactgaatagtctgagtgctttgaataagtttccctctttatacatcaatgctgcagtatatacacactataaagcaccagaatggcaaaaaaaaaaggtttcgttttacatttgattatgaaatatcagag

SEQ ID NO: 58144 - DNA, 413 bp, Arabidopsis thaliana landsberg
gaaatcgaccagatgtacacaatacatgtataaacgtttatttagtatccttccttcatgggaaataaaaacattttgctacattattttcattatacacaaagccatgcaagtaaccaaagtatgcttcgaaagcttaagacaaaacaaacaagaaaaaaacattctaagattttgacaagacacattcaaatcctatacagttcatcgcaagaaataggattccaagctacagaatatacttctataggggttaaattataaaacaattaaagtatatatgcttctaagaaataactcaaaactaatgatattagagaaaatttcgaataaaattacaatagataaaattctaaatttatatagatttattaatgtcttcttcataaaatcaaaactggatttttaacttc

SEQ ID NO: 58145 - DNA, 790 bp, Arabidopsis thaliana landsberg
taaaacttgcatatgacttgttcttttctgtagcgtacttttcttttttattgcttttgagaaccttcattagtattattgtgataccacttcttatacttgttagattgtagggaatagtggtggccctgcattcaacgaccagggggaatgtattggagtagcattccaggtatttgctttgggattttcaggaatataagacctttttctaattctcattccaaacgtatgtctcacaagagacttcctctaggtttacagatccgaagaaactgaaaatattggatatgtgattccaacaaccgttgtttctcactttttgactgattatgagaggaacggaaagtacactggtaatagttttctcttgacgttcatatgttccaatgcaagaccattctgacattctcttctagttgagcctttcttttgttaatacttaaaagatatttctcttgtaggttacccttgccttggagtattgctgcagaaattagaaaatccagctctgcgggagtgcctcaaagttcctacaaatgaggtaggtttgctttgttagttcgtctgtctcttgtcggattaagattttaccaacatagtggaggatattgagtcttccttgttagcagtttgagtatactcaagtgatataacctatatttgtagggggttctggtgcgaagagttgaacctacatctgatgcaagtaaagtcctgaaagaggtaaagagtgtggatcataggattgttgctctaccaaacttctacaatgcaaaatcttcacgtc

SEQ ID NO: 58146 - DNA, 1383 bp, Arabidopsis thaliana landsberg
gaaagataattatattagtttcagatatcatattccaatatattgattctctcacgtataattagaatattgttttggttttaattagaaattatttgcttactataaggattgtaaaagaaattgaacatgtcatgattatatgtaagtggagtactaacgtaaataataggaatgatacatgaaaaaatggcattttaattaaatcttgttgataaagtcattcatctcttgaccataataaggtttttatttgattggagcaaacaaaacatttgggtctatgtagtaataatatgcatccaagtcaagcgtatatacagtttatttttcgattaaataatacccagaaagcaagttaatatagttaaaacatttacgttggatatcgtttacgtcttaatcaattgtgtctgtgtgaaatggtatccataataaggtcaaacgttaatcgatgagatgaggtttagcatgcaatgcatcattaaatttacagcttaaactaccatgcgcatatatacatttctgactaaaataagtcacattaaaataacatttaagtcccaatatttctcttcctctttacctataaagtataaactatatacatatatatacaaaaatatttcatccttaggatttttttagtaatgatatctcgtatttttataatttttgattctatatgcatattattttaagatatcatagaagtaattttggttcatatctgttagtaactagtttatagaatctattgaacaaaacgaaatatcagctatttaatcagccgtatatttataagtaaatgtgatgttgttgcgtccagtataaaatccaatctagatttaaatgatccataattagttgctttgaagaatatggcttcgcataaaatatgttaaatattgatattgcaaccttatagagatcataggggaagtggaggtcggctgcattagttgacatttaacgaaggagtggcaagtcaaattacattttccacatatccacttattaattatgtgtttggtgcaattctcattaattgtgcttgaatatatcatccctccagctacctcaaaatcaaagcgtagaagtagttatcttttgattatgtatctttctttctaacgaaaatgtaataatctatatggtatactataatttatgttggaaagaagatgaatacttatgatggaaagaaggtcatctaaacctttgttaaagtaaacaatatttgattaattgataatttaatgacatgaatcttctgtttccacttacttgaccccaacaaactttcggttaaagatttaattataacaattgtacgaatgtgaatatgtgaatgtgatcatggaagtcatgaaacacgtcaac

SEQ ID NO: 58147 - DNA, 1093 bp, Arabidopsis thaliana landsberg
atgtagagaatcctatggttctgccaaagataaggcaatcggtcggttatgagttctttggtgttgcatgaactaatctggcttctttcttttcttatttttcaagtttcaattaagtggtcggatattatttgtttaagactagttcttattggatttgatggtcacccattggttagtcttttgatcaatggatatttatgtctgtggaatattgtaatgcaatgttttttttctcaacatctttggaatgcaatgtttatgacttaacaagaaaaatgtttatgacttgattataataatctctggttttgtgcggagcttatacagcttcggttttcttcttatttgatttcttttggggagaacaaagagttttgtgtttggctagatggatctttatcatcattttggtcgccttttgaattttatttcataaagaaatcttatgtataagaaaataaaactaatatcgattctgaaatagcaaaaatacctcaatattttcactaaatcataaaacgaactacattcatcatacaacacattgtaacatttcaccattaatttcttaacccaagcaacaagccaataagtagatagtttttgtttgactaaacatacacacgtgttcggagtttgatgtacacgcgctgactgcgcgtggatgtaatataatcttaattcttaagtatattcgtcgacgttgccttgttccaaagttataaaccgtgtggaaccatcgagaagcgaagccagaataaattttcgaatcctccgacgatgacggaatcaacatccgtggttgctcctccgccggagatacctaatctgaaccctagcatgttttctgagtccgatttgttttctattccgccgctagatcctcttttcctatctgattctgatccgatttcaatggatgcgccaatctccgatctcgacttcttactcgacgatgagaacggagatttcgctgattttgatttctcgtttgataattctgatgatttcttcgatttcgatttatcggagcccgcggtggtgatccctgaggagatcggtaacaaacgttcgaattggactcatggaa

SEQ ID NO: 58148 - DNA, 1099 bp, Arabidopsis thaliana landsberg
ttttgtattgcattgattcgtctgggtgttgttggaattaagttttggttgtaaaaaggtgcgttgcaactaaattttggttgtaaaaagagtacacaaacttctatgttccgttttttttgtaatccaaagctctttgaataatggcattacaagacaagggaaatcattacttataacttaattttacatatgtatacgcctttatactatgtccaatgatattggcgagaaacgaatttggaaatgtccaatgatataagtaaaaataagggaataaagaaagaaatgaaaagtcagatctggaaaatgtctctgcactatgagaaaaaaatgttccacttgactgacctttgtccctatcataagcaagtggcaaatgtcaactatttaacgttactcgactagagttgtattttttcttgaacaaaagaataaaaagactcgaagttgagttatgcgcagtgtagctcacgctctttaattacggctgagaaatgcaaaacctgaatgatggactggtatgtgtttgcaccaagacaattaaggcccattaacatataggctattacgaaacatgaagctaagaattgaacaatatagtataaggtgctaattacaattttacagggatactgggagaccaaaatacgaaaaagaagaagagaggtgaactaaaataggaaattactactacactttccttaaaataggaaatggttttttcttcagctgtatagtaaagaagagaaactttaagaagcagcaattgtgtgtctccttatcatggctacctattttatcattttgccctccacaagctaaaaacccaaatcatttctattgactctaaatagccgttgcgaaaatttcaacactgcttttctaaattatgtaatatttatgtcacacgccaagaaaaaataacaatataatataattcaccacatgtggtaagtttgtcctgttatattcaaaagattcactagatccaatgatttaataacgtaactcgaacatttgtcccttttttgctcttattcataatctctaatttttaaattaactaaatcctagagactagagagtaaagggtata

SEQ ID NO: 58149 - DNA, 472 bp, Arabidopsis thaliana landsberg
  unsure (1)..(472): unsure at all n locations
ttcagtaaggtgagccacgggaggtccaactccgagaccagcctgctgcggccgaccacggcgtcgacgttgagtcgtttggtcggcggcgctgggttgcaagatggaacatccaggtagtttaatgcgagatagagcagtccgtttgggtgcaatacatttgtggcactctaggaggtgccctttattttttaaacaaaaattaatgaattagggcactgttggaaggcttttttctgttttaagcccacataatttaatttggggcactaatatagggcactattggagatgctctaagagctaatagggaaaatattcgaaaccttannnnnnnnnnnnnnnnnnnnnnnnnaatacgatatggtttatgcagaaacgattgtcagtcgatcgaaaagttacctggttttataattaatctcgatttcgatacatatttaaaccttaaattttaaatctggttaatctc

SEQ ID NO: 58150 - DNA, 476 bp, Arabidopsis thaliana landsberg
  unsure (1)..(476): unsure at all n locations
tgcaatattacatgtatgataactaaccactattagcaaatgtggcttcctaaattttctagggttcaaacttaaatcacgcgatgctgcacaaagagagaacaaaatctactgnnnnnnnnnnnnnnnnnnnnnnnnnnnnnnnnnnnnnnnnnnnnnnnnnnnnnnnnnnnnnnnnnnnnnnnnnnnnnnnnnnnnnnnnnnnnnnnnnnnnnnnnnnnnnnnnnnnnnnnnnnnnnnnnnnnnnnnnnnnnnnnnnnnnnnnnnnnnnnnnnnnnnnnnnnnnnnnnnnnnnnnnnnnnnnnnnnnnnnnnnnnnnnnnnnnnnnnnnnnnnnnnnnnnnnnnnnnnnnnnnnnnnnnnnnnnnnnnnnnnnnnnnnnnnnnnnnnnnnnnnnnnnnnnnnnnnnnnnnnnnnnnnnnnnnnnnnnnnnnnnnnnnnnnnnnnnnnnnnnnnnnnnnnnnnnnnnnnnnnnnn

SEQ ID NO: 58151 - DNA, 512 bp, Arabidopsis thaliana landsberg
agtgctgtcattttcagctgtatcatcttgaagatttgattcctgctaagagaaacaaaattatgcaagcaacaacaacattcagcaaccaaaagtagatgcatacttgagaggaggtatatgactcttattacttaattctggttttgttggtcaggatacgctagttatctctaaccaaaagaaaacgtgcagccccattcacataaattctaattagattatttctggagtagtgtctcatatgaaaggaccagaggccaatatcttaaaaaggaaaaaagggattgagctaaaacagatggacctcccctcaccttcttctcattttggaataatccagattccacatcgtcagtagatttacttgagtcaaaagaagagatgcttgtatcatcaacattctcctcttgaacagtattcagtttggcaatgggagcaggcagtgcaacttcttctttagcatggtcttcaaatcgcttcagattcttgtctggcttctgatgcaaaat

SEQ ID NO: 58152 - DNA, 484 bp, Arabidopsis thaliana landsberg
agaccctggatcagttcggcgagcacgagaatgctggccggcgtcttttctttgggcttgagcacgatggcgttgccggcgccgtgcgccggcgcgagtttccacgccgccatcaggatcgggaagttccacggaatgatctggccgacgacgccgagcggctcgtggaaatggtaggcaatggtgctcccgtcgatctcgctgatgctgccttcctgcgcgcggagaacaccggcgaagtagcggaagtgatcgatggcgagcgggatgtcggcgttgagcgtctcgcggatcggcttgccgttgtcccaggtctcggcatgcgcaagcagctcgaggttctgctctatgcggtcggcgatcttcagcagcacgttcgagcgcgccgacggcgacaggccggcccactcgttcttggcggcgtgcgcggcatcgagcgccagttcgaatgtcgcggcttgtgaacgcgcgaccttggtaaaca

SEQ ID NO: 58153 - DNA, 919 bp, Arabidopsis thaliana landsberg
  unsure (1)..(919): unsure at all n locations
gattgattggtgctttggctctcagttgattatttttattttcttaatttgaaggtgtatgcgaagggtggcaagaccattgtttttacccaaactaaaagagatgcagacgaagtttctcttgcattgtcaaacagtatagctaccgaagcacttcatggagatatatctcagcatcaaagagagagaacactcaatgctttccgtcaagggaaattcaccgtattagttgccactgatgttgcatctcgtggacttgacatcccgaacgtagatctagtaagttctcaaagtttcggtacatagtttatcatctcttatggcatgtttgtctgtttgttctgacattttcttctacaggttatccactatgaacttcctaatgacccagaaacttttgtgcaccgttctggtcgtactgggcgtgcagggaaagaaggctctgccattctcatgcacaccagcagccaaaagagaacagtgaggtctctggagcgtgacgtaggctgccattttgaattcattagcccaccaactgttggagacttgttggaatcgtcagcagaccaagtggtggccactctaaatggtgttcaccctgactccataaagtttttctcagcaactgctcaaaaactatatgaggagaaaggaacagatgctttagctgcagctctagctcacctgagtggtttctctcagccgccttcatcaagatctctcctcagccatgagaaggtataattctcaaccatgctttaaaaattcaaaaaaacaaatacgagatcattgaactttctagaatgcttcttgatactcttacaaactgcaacataatctatatagcanatctttttttcatagaaatgtgttattcatgagctgaagttaaacttttggactgcagggatggggtgac

SEQ ID NO: 58154 - DNA, 1183 bp, Arabidopsis thaliana landsberg
aggtctacaactagaaaagattgaaaaatcaaaataatattgcgattttgcggatagaaagctaatgggcttcacaagaaaaggcccaaattagtatcagttatcaacgtcactttgacgtgttcatcttctaaaatctaaacccctaaatcctaaccttccacgtaactcgtgtcggtacgaggcaaatcactcggtctgtattaattcagattaaccggatcaaaaccgtaaccggtttaattatactacatggtttcgttctgatttagggtttatgcaagttttcaacttctcttgagatattccatctctcagccaacaacgactcgagtcgaggagatagattctcaaagcttccattaaacgttgtgggtatttttttagctcaaatcaacagctaacatggttacaggcgataaagaatcttccttgatgaagaagaggaacaagagaagccataagagaaagcgagaggaggatttcgaacgtatagattcacttccttggagctcttctatacccattggagaagacgacgaaggcgaatccttctccactctattttcaggctcaggccagctcgacggaggtaaaagttttggttttgtttttgaattttttgaatttttgtttcctctgtgaactattattgtgggtgcctgatttttgttgaaatttatgcaattcatgttttttttttaggtaactcaaattatcatttatctcaaattagtgtctggattcaattgctttgccttgttagttcactgaaagtctgaaactttatactttgtttgggcaggttttctatcacttgaggagattgatgaagctgattaccatctaactctccctaccattgaaagtgaaataacagagagaaaacaatctccagaagatgatgatgataccaacgagacagtggatgagatgattgaaggagaagaagctgaagaagatggagaaggaagggatgacgaggatgacgaagatgacgaggagactcgtctgaaaaaagagaagacagcttcgaggaataaggagaagaaaatagagaagaagaagaagaagcataagaagattaatgaggccgcaaagaatcaggacgcttctgctggttagtatttcgtatactcttttccttaatagtttttggctcagaagaggtaatcatcactcg

SEQ ID NO: 58155 - DNA, 1447 bp, Arabidopsis thaliana landsberg
tctttggctttttcttcttttttttttattcttatgcaccttgatttatcatttttcaattttattaagcccgccaattagattgaagaaaaaaaaacttaaccactgaaaataaattaaaaagaattcgacactgttttttgacaaacaaaacttgatatttacggttaaattcataacgtcaagtgaatatttgatcatttttgagacgaaaatagatatttaggtttagtagttccaaacgcaagttttattatgggattatttcatggcgctatagagtttggtgactttggtctttaatattaacctaatgaattttcagaaaatatttttctaacaacttgattgatttccgagtgaggaattaatcaagttaacaattacatattaaaataccatttgcagcttttattaaaacctgttgaatccttagcaacttttctacatattgcccaatttttctgacttgtgtctttttaaatatctcttccgtgtcaaaaatagtttgtgtgttcttgattatacgtaaattcatctgggcatctcttaattttttctaatcgttaaccttaattacaacctcacgatctgtcttaatcgtgtcttaatcgtgtttttactttatcctctttttattgcaacattagagagttttgtgtgttgcagctttatcggtgtgtaagaaaaagacttataagcaagcagttgaagtggtggttgaggtttcggtttcatttccacgagatctctttggctttcttgttgagatctttccacaagaaagtttagttgttttcttcttcctgtgatttcttcgcctaattttttctggatttaaaaacacgagaagtcaaggtgaaatattatcgaagtctctgaatctgtgtttgaatggaaccatcatctggaaccggtcctgagaagagaccaaccgttgacttggtcaaggatagaaatggaacggatcagattcttcttcagaatcctagaggcgcctctgtaaaggttatagcttttgtatttattcttgtttcattttggttctcctatgttattggttgtgtttacgaaagtagaatcattcttcgatgcaagattcaggattataggataagatgttgacttttaagatatgcccactaactgttcgatgttatgcctcttccaaactcttgatacatttaaattggtccaaaaggtcttatttttggggaaaattgtgtatttggttcttagtatcagagtgtttataagcgtgtttgattgctctgtttctactggttatttgggttctgattcttgaaagttgaaggcctagttcgtagttgtggctttaaactctcttaacaagacaaatctgatagctttagatatagttttgatgttgttggccatggaaactttggcttttatgattcatggaccacattcataagcatttcca

SEQ ID NO: 58156 - DNA, 291 bp, Arabidopsis thaliana landsberg
gtttctgcgctaacaccaaaggttgtgtgttagttacgccactgcacctaaccgcttcgttcatcccattgcagtctcttaccaaaaaggccactgagcttcgattccggtgacgtaacaaacaccgacacgtctaccataaagttgagaatacgcaggcgttccccccaatgccttaatcattggcttacccgaagaactgcgtcaactccactatcctgaggaaacttcgagggaaccgctctaaatggttgaatagtctttccccctatacccaatcaactaacgatt

SEQ ID NO: 58157 - DNA, 1011 bp, Arabidopsis thaliana landsberg
tctatgcccggagcttcaaggaggatctaataaaaacccgttaatttcctcaggggcacacaaaagaaagaagaaagcatccaaatgtatttttaaagtataatatacgaaagccctagagagattccaagatagaacacgaacgaaacgtgtctacctcttatgaatcgagatccttgaatcggaaaagaaacggcaattttccggagctgtgtctgggaagattatatgggttatctcgggtaaagagatatcaatttcccaggaaagagatggggatggagagaagacgaagaagcgatggtaaaagaagaggaacgacaaggaagaaaagattggaccatgtggctctgttacgagatagcttgctttgtcgtaaagccacgacgactcgttgagccaaacactttattaaattttttaataatataagaaaaagaggagaagacgaatcgaatcatccccgtttgttgacacgtgtcgaatctttacagcgaattaatactttcggaatttattcaattcccatttcttctattcatgcatttatttttatttaaatacaatctatactgtaatgtgttttttctcaattgaaagtatatctaagttaattcatagtgattcaatggttgaaatattcaaaaaacaaaagttaattattctttcatatattcttgaaattattttagctttcggttgtgtttacatttgtaatttacaagttagtaataatatgtcgatttgttgtaacaaaatgcaatggccatgccatcaaaaattgcaatggtgtaactgtatcaatacagtgataattttccgtttttacactatcgactttcataaaagttgtgattgtgtgaccataccaaaataatagcaatgtgcaaccattaattcgtcacatattgcatattgtgcactaatttatcaccataaatacataatgccagaagaaatgtacaaggtacaacaagtcaacaatcgttaagaaagctccttaacatgtat

SEQ ID NO: 58158 - DNA, 778 bp, Arabidopsis thaliana landsberg
ctgttttctcctaaatattcgcacacctatcgtaaatttgggaatgttgggttttgatcacatgatattaatctctagcatccatactataatcagtcttaaccttaaacgtaaaccctcacacgttgttggaactagagagacacatgtagagatcttcgccggtcgatgattatagaacatcaaacttctttagtgattacccgtatattgagtacaaaaattgtgagtaaatgattggtaatggtttggcagggatgatgataaatggtgggtattaccaacaatcctcttgttactcaagtcaatacaagctcggttccttgattggcacgtcgcaaatctagaagtaccagacttttctcttctttgtccagatccagataccttctgggcatatgaatctggagcttgaccatcaacatgattataaagaaagaccagcaaaagatatatcttatttttcatgtaaatcttttaaaagtacaaagttcttctcggtgatagttgttaaaaacagttctctagaacatctggttatatatctggtgctgaattaggagttcgccagatcaatggtagttgtagaaactagagcgatagtatgtaatgcttaatgttttgcaacaacatacaaatctggaacacaatggtgactaatgctaaaacataaccgaagttttaatttaatcaaatatatttcgatatatatacaataaagattaaaaggtttcatatttccattacatgcaataatgcatgaaggtaataaatcaaa

SEQ ID NO: 58159 - DNA, 568 bp, Arabidopsis thaliana landsberg
caacttaatctcatcaccatcactcgagctttacatattcttttatttaaataaaataaagaaaggatagagtgggggtgaaaaataatggtaagatagagaaaactaatattgatgttcttaaaccaaattgttgccttaaactaacaaaaatagatatgattaataataaggtcagaatgaacctagacatacacatatggggaaatcgtaatgttttaaagagtcttaagatttcggtttagtgaatgtctgactaattctcaccaattatttatctcgcgctttcgtgtgtagaataaaaataacctatatgtcaggaatgatttaacgacgacttcggcttctaatgtaaattctcttctgaacatcatcttggattcacgaattaattcataagacagttgtttttctttaaatagacagagagacaaaaacctagttttcccccaaattttaccccagggtgggggcccttttcctataaattgcggggttctttttttttgtggatttttttcccccccccccttttttttttaaaaaattttcccaaaaaaaccccccc

SEQ ID NO: 58160 - DNA, 782 bp, Arabidopsis thaliana landsberg
gagtctgatcagatttggtccatgaacattatatgtacgtgttcaaaaatatttatgaacaattatgatgtcggcagcaagaagatgaatgttgtacctacgaggttactaactaccatattaaatttcataccaaatattgtgggtttcatgtaatttttttattatttttttaaatgcgattttgaattgaactcaaactaatttccaaagtttgtgaaagagtcgggtattaataataccgtattattgtcactgaaaacatacgtacactgtggttgaaatcgcagtggaaagacttgacacgtaaaatcagtctgcccactcttagtacacaatctagcagcattcaattgtcttgagttcggtgataacactagaggcttaagcatgaacattggcccctcctcacatcaatggaacgtatcaaattacatcggatactagattaacatcaacccttgatctacacccacttgtaagtcaaattcttgcatcacatgccaacatcgagtttgagatacgaccttttagggtctacacttcctccaaattcactccagatcgatgtcgatcaaacaatttaaatcgaaccaagagagcaactcaattaatttaggagcaagaaagcaaaataagtctaggaatcaaaggattaataggaagaaagcaaattataaacaatttttttttttaaatgaaattttataattgtaaaatatgtaaaaaaaaataagtttcggtcaaattttcgggagctttcatacgattaaaaactttta

SEQ ID NO: 58161 - DNA, 533 bp, Arabidopsis thaliana landsberg
  unsure (1)..(533): unsure at all n locations
cgcccgagncgttggctgtgctaataagtatagatgtccaaacggctctttttttttttttttatttctttatttttttatttttttctctttttttattttttttttctttttctatttattatttattctcttactttttttatttattttttttttttcttttatttttttttttaatttttacattattttttatattttctttttttttttaatatttttattttttttttctttttttttttttttattttattttttttttctttcttttttatattatcttatttcttactaccttttctctttttttttcttttctattttattttcatttttttatatattcttatttttttttattatatttttttctctttttttataatttttttttttactttattatttattatctctttttcttattttctttacatcttttatttctattttttctttaattttattcttcctttcttttcttaataattctattttttctaaatttttttttatttattatatta

SEQ ID NO: 58162 - DNA, 412 bp, Arabidopsis thaliana landsberg
ggacataaaattctgatattgcatagaaatgtttttaaataacactaatccaaacctaaataaaatatctctatacctcatctagaaatgtatggcttgatcaagaattgtagataataataccctgagttaaatgattgtaggtattatttcagttttcaaaattgtccaaatttatgagctatattaaagataatattttcaataaggtgtgtagttctaaatgtttcttcttcttccaccaacccctctttctatatgtatgttcttttttctaaaataattgtttgttcttttttagatatatcaaattaaatattaaaaaatattgacaaaacttatttaccattgttaggtgaacttggcaaggggtaaatataaagaaaacattccttttcgttctttatatata

SEQ ID NO: 58163 - DNA, 820 bp, Arabidopsis thaliana landsberg
tcctaacacatctgtgatctgtggtttctgagagatcttcttttacactctttaccataaatacatagctcgggttttactcaaaaagaaagatatggaaacgaaaagaaaaggatatctcgattttctgtgatcaaacccaattttacaaagatgctcatgtgtgtcaccttattgcataatggctctgagtgcatccttcacgtatttatacttgaattcaaaaccaagctctttggctcttacaggtaataccttctgtccctccagaactacagtggcaccttctccgagcaaagctttgagtgcaaagtcaggaactggtagccatgatggtcggctaagaacactgcctagctgctggcacatttccccaagcctaaccggattcggcgcagtcccattaataactcctgccaacaaccagcaccaatagcattatgcttcccttgacctattcttaaaaggtaacatagaggacaagtatgtatgttgttacctttataagatggattagtgagggcctcgtaaattaagttcaccaagtcatccacgtgaatccaagagaacctacacaatgaattatggaaatatgatctttaaattcgtagagagacattcaatagataagcagaaaagcatccaacgtttaccattgttgtccggaacccagaggtcctccagcaaacatttggaaaaagggtatcatcatggctacaatgcacaaaaagactttggacgatcagcagagtatctaagtccttcacaaacatattacattagcgtgtgggagcaaacagtaatacgcacccaaagctcc

SEQ ID NO: 58164 - DNA, 1343 bp, Arabidopsis thaliana landsberg
acattccctacgtagtggtcagacagagagcttgagaatagactgctctcccagtgagtatcatttgtagttgttcttccattagggataaaggagggaagcgccccagacaagcttgattgttgagagagctggtaactgtcagatgtccaagaactagtcggtagatttgaacttctatccacaccaccttcaggcattggattgtttttcatgaaaccaaattgtttctgcaaaataaaacatcaaaaagtcttgagaaaaaccgttctaaacatgaaaacacttgtgcagcgtatgtggaaccaaaatcgaagaaggagttacctcaggagtgatgcgaatgtcttcatgaaaatgagaaggtgtaggcacacctctcggttccaatatatcagatggcattgttccagctgacaagaaattacaaagaatgagactttttaactttctagttttaccacctccagaaacaaacataagggacccaacccagtctcaaatgccagaatgtattacaattcaatggataaaacaggagctttctattacaaaaccaatccaactcaaaatcaaagacacctaattaagcaaattcaagcaatctatagggtaagaattagtttgactagaaaaaaatattataaagacacaaaattcggaattaaaaacgccataaaactacaattagcctaaattcagatcttttaatagaagcagagaagaaccaactcctaccaaattcaaaagttgagcacaaagataatcaataacaaaaaccctaatcaacaattaacccaacaaacaaagacaaaaacttaccagatcaattgtgcttcttctcttcgtaattcgtccaaaagcaaattgaagcagctaaaaattactgaaacggatctcgtaaaccttcttcttctctaaacttcacgtggcaaaaggagcagagagacagaaacagagagagaaagagttcttcttatatctttggctttcctttttgtttctttctatccaatcatcatcataaccagcagagagaattatatctatatataatttccaaaacaaaaaaaaagtgaatcggtgcttcaatttcaaattctgcttcctctgacggacacgtcgtgaattccaaacgagcaagtaaaaactttgcacggaagcaaaaccgtaattccggtgataactccgattagattccggcactccctccaagagagagagaaatggagaaaagaaagagtttggtttttttcgggtaggtggattacgcaacaacaaggaaaaaaaaatgaatggggtgaacaagaccaaacaacaatgagaggaaagaaaaagatttt

SEQ ID NO: 58165 - DNA, 1120 bp, Arabidopsis thaliana landsberg
acttttatttatttaaaccagatctaatcgaatgaaataaagagctaaccggatgtctgaatatatcttaaatggagtaatttgattaattaaaaagttatgcgtaacaattttaatgaaaagaaaaatacatgttgaagaactcaaaatagaccaaaatacacacacaaaaaaagttttgtttgtttaatatcctctaggaaggaaacgagagaggaaggtggggctttaaagagagacccgtggaggctctactgaagcgatgcgtggaacaaagctgacacaaaatggccacaccaacttctccttctccttcttcttcttcttataacagcaagtgatacattctcaatctctgattctcaaaaccctaatttccacacgctttctttcatttccatccaaaaggtaacgcgctttttatttcctttcctgcattcataaatttgtctcctgcatgttgaaaaaaaaaaatttacatcgagattcgtttttattttttagagagagatatgacggagacgacgaaggtgatgtacatagtggtggtcgatggaacggatacggcggcgacggtggaagaagacgggaccgggacttggaaagattcgtttaggtatacgcgtcctgttttgcagagtactcttcagcttatgggatgcaaagctcgtcacgccttcaaggtgttatttcgattttgtctcattgaatgttgtttctgattttagttttgatggatcaatcttatgaagagactttttttgtattggttagatcaatgatgtgtttggatcttgaaaggactaaacttgatcttacatagtttggaaatttggaaattttgttatactagtattgagctttctgctgtgagagttagttaatgcacgtctttatcaatgtctctaatagtctttttaggatttggttaaggacaagacttttcttaaactcgtagtatatttcaagattggtgtggtttgtgctcagtcctgttacttttctctgcaagcctgatatagttattatgtaccatcccttggttgccctggcatgaattgttaatcatgtaaaagacttattatgaggtcctttgatgatctttgtgtgtgtggtattt

SEQ ID NO: 58166 - DNA, 1111 bp, Arabidopsis thaliana landsberg
  unsure (1)..(1111): unsure at all n locations
ttcagcgatgaaagagaagctttctgagctcaagggtggcgtatctgatctgagattttgtattaccatgtgtcaagagcatgacaaatacactgaggcagagaattcactaagttctccagcccactgtagtgaaggacaggtgggctaaaactttttttatattaacgatcatgccttgttatgtatagtaatgttttagtcctttactgaaaaaaattccatacaggaacctggaaggaatgtagttgtctcctcttgcatagagaagactccaaacaacaatcatacagagtccatgagattgagcagtaaggtgtctagtgagagaggtaaagtgataatactgctaaagcaagaaatggaatctgcacttgcaagcttgaaggaggttcaagttgaaatggccaatctcaagggtgagaaggaagagctaaaggcatctgagaaaagaagcttaagcaacttgaacgatcttgctgcacagatttgcaaccttaatactgtgatgagtaatatggaagaacaatatgagcacaagatggaagtcacagatcataaacttaaggcaagtaactcgttattcttgtccctttcaaattactggatttaaaattatgatacgttattaaaaatcactagattaactgcacaaaactgagatggctcgcatactttgtacatttgctatcttcattacatcttttatgggagggagggtttcacctattctttacatctctctcagatgctataaattttctctctttttttttctgaaattattatgctattttacagactttggagcatgaaatagctaagatgaagatagaggctgaccaagaatatgtagaaaacttgtgtattcttaaaaaatttgaggaggcnnnnnnnnnnnnnnnnnnnnnnnatatcacagtcaatgagctcgtaatagcgaacgaaaagatgagatttgacctggagaagcagaagaaaagaggaatcagcttggttggagagaaaaaagccttagttgaaaagctgcaggagctggaatccataaatgtcaaagaaaatgagaaacttgcgtaccttgagaagctattcgagtcaagtttgatgggaa

SEQ ID NO: 58167 - DNA, 379 bp, Arabidopsis thaliana landsberg
ctgcctttgcttccctataacaatgctaaaacaaagggtgaaaataaaggtgatttctcaaatattctgaaatgtcaaaagtgtaggcggaacgtaaaacatttgtcaaggatcaaaagcagcagaataaagtttaatcgtgaagaacatattttttttattttttttttgaaaatctgtctaaaactattttgattataaatcacaaacaagttgcatgtttaccaaataattaatataaattatgatttttgtccaccatcaagacacagatgaaactgaatcaaatctgcatataatatataaacggattcgaatgaatggttagctgatgcatagagcactctctttattataatagcaaaacggtgtaaagcct

SEQ ID NO: 58168 - DNA, 966 bp, Arabidopsis thaliana landsberg
tcttcttcagtaggtttaggatcagtgaactccatgacgatgagccagtgctcataatcgcacccatcaagaagaatcgtctccttcggcggacggttgctccaattcggcgaaggatcattcagcggcgagtatccggacccggatgtcttgggtcgggtcgagatgtaacacgggcccaggctggttcgggaagaggaaaccttttcaattagaggcatggcgaatcgagaacgagaagagagcgtaggaaatgaagaagaatatgaagtagaggaagagagggttttgtttaggagtgtcgataatgttcgccgtgtgctgataagagccatcgccggtgagggtttcggcttctgttcttcttcggtccttctctttgcagaagctttgagaaactatatgggcttagtgggcctttcatttatactttttagatgggctattaaaaattttctctacattaaattccttggtttagtagttaaaagtttcccaacagaaaaatactttaaatcttcttgtcaaatacttcaacactcctaattgaaacactttcagtgttaaaaaaatgtttcaattatcgcttgtcaaattgtttgttcattcttaagtgttttcagaaagaaaatttcgtcttcgttagctataaaacgtattcattttgtattagctttcttaatgtgaatatgacgtcctaagtcaaatcacctaatctaaaattttgatttgagttagcaaaatgtccatcaagttaattcatggataacttttccaacctatatatggttagtaattagtaattatctttgcctttttttggatgcatataaaatcacaatgacgataataacgatgattatcaaaatcaaaatggttactgtatttactatttataaaaaaagaaaacatagaattatctctccaaaaataagataagtagataaacctttctgaaattgctgt

SEQ ID NO: 58169 - DNA, 524 bp, Arabidopsis thaliana landsberg
  unsure (1)..(524): unsure at all n locations
gttnnnnnnnnnnnnnnnnnnnnnnnnnnnnnnnnnnnnnnnnnnnnnnnnnnnnnnnnnnnnnnnnnnnnnnnnnnnnnnnnnnnnnnnnnnnnnnnnnnnnnnnnnnnnnnnnnnnnnnnnnnnnnnnnnnnnnnnnnnnnnnnnnnnnnnnnnnnnnnnnnnnnnnnnnnnnnnnnnnnnnnnnnnnnnnnnnnnnnnnnnnnnnnnnnnnnnnnnnnnnnnnnnnnnnnnnnnnnnnnnnnnnnnnnnnnnnnnnnnnnnnnnnnnnnnnnnnnnnnnnnnnnnnnnnnnnnnnnnnnnnnnnnnnnnnnnnnnnnnnnnnnnnnaccattccgcgtcttcgacttctattagtttcttttcttctttaatgcaatagctatagtttgatatagaatccatttctcaaagtaatggaaaccattctcttataggaaatggttcgaaaatcgctattccaccttttaggtttaggtatcgtgaaaagtgatacctgtgnnnnnnnnnnnnnnnnnnnnnnt

SEQ ID NO: 58170 - DNA, 288 bp, Arabidopsis thaliana landsberg
ttttaaacaccaaaaacaatatacaaggtaggtgaaattcatttccctggcaaacccctaacctcggcaccaaccaaacacagtctatttgcatgacaatcgttcgagaataatgtccaactcacaggcgactataagatacgtcgtttgcattattgtgatattaataccaacttcaatagttctgcttacacataccttaaaatgtcactctattcttgattcccaccaccaatagcaccatacacatactcccccttttcaaacccttccaaacaacacccccat

SEQ ID NO: 58171 - DNA, 289 bp, Arabidopsis thaliana landsberg
cttttttccgcacgacgttgcgcagttcgcggatgttgccgggccatggataggcgagcaggcaggcgtaggcatcgctttcgatcgcgatcggtcgctcggtttccatcgcgatgtagcggcggatcaggcgttcgagatcggcgcgttcgtgcaacgccggaagttcgagcgtgatgccgttgaggcggtagtagagatcttcgcggaattcgccgcgctggatcatttcgcgcagcgaccggtgagaggcgctgacgacgcgcagatcgaccttgatcgcggcgtc

SEQ ID NO: 58172 - DNA, 376 bp, Arabidopsis thaliana landsberg
taaaactaaacaaaatgggtacccaagggggctggatctatcgttttaatcaaaacccattgttattgatcatgtttggtgcatgctattggctggtcggctgtttttcacacactctactaattatttttctttaatgaagatcttacatttgaatcatcacgtttttcaattctttattttttatatcttatcttacatgctttgctgtctttgcttgaagtttaccccaatattaatcttgagtgtgtaatcgcatcaactgaacatgattctcaggctcaccaatcttaaaagccattcatctcttatcaacaggttctcggaactacttttgggttatgttcctgaacttaagacctcaacattcatcttt

SEQ ID NO: 58173 - DNA, 1020 bp, Arabidopsis thaliana landsberg
tccatgttaatgttattgttaattaccatcaattttactgattgctctgaacatgattttgtttttttattattttttttgctgcaagaacattattatgtttgaaattataaatatgtcaagtatgaccttatggccatgtaatgttaatgattcgattttataaatactgtgcattatgggtcaagtcaaatatatactttttcactagttagaaaataacatacagtatatggtattattccagaaaatatgtattatgactaggattggtgtagtcacatgactcatgagatggtatgtctgaaaaatcccatcgcaactttaagattttccaaatttgattcgacactgttggcaaaatgtttaaagcaatagactcccccatcacaaaacctccaataatttaagttaaacaattgtttgggtccaatttgtagcccattaagtggttagtcatggcccatatctgattaccaacaaaataaaggaaattaattaaattcgcgcaataaaaagaacagaaaaatggtgggacaaattagggttactaatttgggaattttactgtccaaaacgaatcaaaaaaaaaatctaagctttttgttccttttgcggcttttcgtcgtcttccttgcactatcttccttctgtagcatcaattcgtttccaaggttacgtagtagaatttacgcgagagagcgagagatcaaaaaccataaccatcttaagttacaatgagctcgtatgatcgtagatttgctgatccaaattcgtatcgccaacgctctgggtaagtgaaaccaatcgaccaatttcttcgtttttgtttccttcgatctgtaacacttatcttctctgtgttactttagcgccccagttggttcgtctcagccgatggatccttccgccgcaccatacaacccacggtacactggtggtggtggaggatatggaccatctccaagtaatggccggtgataattccggctataatcggtacccatctgtccagccacc

SEQ ID NO: 58174 - DNA, 1215 bp, Arabidopsis thaliana landsberg
cttaaatttcttttttttaagccaaaacttttcatcaaggtacgtaccatatacaggggaattcaattttttttaaagcgtaaaaacgtaaaaatttgttgaacgtgaatggtaaaaaaacaacgttttcatacaactgtgaaaacgtgaacacgtggtataccatccaactaaaaatataactctaaacttcacacttttatgtacaatcatgatcagcagatctaaaatacatgttttaccatcatgtacgtagtagtagtttaaagtttaaacccttatttagaaagagtccaatctcggccaaggcactatggcgtgtcttccaatactaacgtagatgaggatttagaaagggtttatatgattttgagacgaagatccggtgaaacatatattgaattccgctggagtcgttatatacccttcgtttactatctccaaattgtttgtagatctctcttgaacatatccgttttgttgatatgatttatcgatttcgatgttttggtagtggctcgcagcatattgttggtccaaatcatcacctatataatcaaaattacattgttgtaacatactatataatcaacgatgtttcgcaattatagaaaaactgaaatggtgtttatgttgacactattgtaaagtaataccttgtgtcaaaagagcagcctcgttcgctgttcgttcgcccacttctaaaaagttcccctttgagtaagcatctcgaactaagttcttaacgtagggctgcaacaaaacattaccatagatgaattaaaaaaataaatacagtttctaactaataaacaatcattgagctatcaataattgcttaacttctttaatagagagaaaatgaccattcaatacctggttgagggattcttgactagagagaacatgaccatcgataagtgctttcataacttcgcatatcggattcaaaatcatgaaaaaattcggtcctctagaaatgtataacttatttcccaaaatacactctctagcatgtttcaatgttactttccactttctatcagacattccaggccccagaatctgtacatcaacaaacccctattcctattagttctctaataataataaaaatttaggggtcaaataagctaagaatttaaacctgacggagttcgtcgacgtcaacgacggatagtttcaaaaagtctggacagtgttgatgtggcaaga

SEQ ID NO: 58175 - DNA, 470 bp, Arabidopsis thaliana landsberg
atatgttcctcttcgagtcaccgcggcccaggtcgaacaattggaacactggattgattccgtcaacgagcttttgcaaccgctgacgagcttcattctgccgggaggctcgctggcagcggctcacctgcatctggcccggacggtctgtcgccgcgtcgagatcggagtgctggaactcacagcgcgcgacaaaattaatccgcaagttgtgatctacctcaatcgcctgtctgacctgctgttcgtgttcgcccgggccgccaatgatgatggcaaaagagacgtgctatgggttccgggcgcgaaccgctcgggctcgtgaagtcgaactgctcgtcggccagggaatgccgatggggatcacgccagagttgccgccgagccgtcgggacgccgtgctgcgcttgtttcaaaccgggtactgactggcatccaactgccgcgttggctttgacatcaatcagccg

SEQ ID NO: 58176 - DNA, 1062 bp, Arabidopsis thaliana landsberg
catatactttgcgataattacgaaagtgacattgttcttttacctgtcttggcccatgggctttttcaagattcataagacccgttgacccattaaagggctgtattaacgacaagttccaatttttatttgtttatcttttgttggaaaatgaaattctaaaaccctaaaaaatccaaccagaagggtagaagctctctcgccgacaattaccggctacaaggtttctctgctcgtcaacgttgtaagttatttcctcattgtaatcaaatttgtgcatgaattaggtcaaattagtagcttttgtagtaattcttcccgaaattagagcttaattacggattgataacgagcttgcgaatcttatcgttgtttgtttcatgcagctctgaattagtggtattgaaagatgagcttatctcagaatgctccgaaaagtaagggtattaaaagagaggagctcaagaaacagtacgaagatgttgaagatgaggaagagattgggtccgatgatgatctcactaggggaaagagaagaaagacagagaaggagaagcagaagctagaagaatcggaactggttgaaatgaaaaagcttgagaatttgatattcgggtcactctactctcctgttacgtttggtaaggaagaagaagaagatggttcggctttgtttcatgtagaccgttctgctgtgaggcagattcctgactacgaggatgatggtgatgatgatgaagagctttctgatgaagagaatggtcaagttgtggcaattagaaagggagaagctgcctgggaggatgaagaagagaaacagataaacgttgatatagctagtgtcaaccgtctaaggaagctaaggaaagaggagaatgagggtttgatctctgggtctgagtacattgcaaggctgagggctcatcatgctaagctaaacccggggactgattgggctcggccagattctcaaatagtccatggagcctcttcagatgatgatgatactcaggaaggaggagttgatgatatccttcgaacgaatgaagatcttgtggtaag

SEQ ID NO: 58177 - DNA, 145 bp, Arabidopsis thaliana landsberg
ggagcatcctcttgcacccacctttaggggggagttttttgacaacctccggagatatgtcatcacatacagtacatggaccatcataacactcactaacccatacatctgtactgagatgccctacattagcttcgccaggggc

SEQ ID NO: 58178 - DNA, 1419 bp, Arabidopsis thaliana landsberg
ttcccaaactccggggactccctttttatataaaaggaatttcatttaagatttcgactatacacatatttaagcaactcacaatgatagagcgaacatgttaaaaaaaaaattgtattcgtgttacaagattcgagtttaaattcaatgtttcattaagaatgatgatttaagtactttataattgccacaaataatacaaaatctcctgctacaaaaaaaaaatgttataaatttctggacgtaacaattttcgaccaccgtcccccattcgaagaattgtagtaccacttagaaattgttttcgatcttattcaaaaaatttctaaactcacgctaaacatcagactgagtttaggctcacattttggcaaaacctagagctaaactcacactttttctttcataaaattttgtctctcgaactaatcaagttatatcattctaatttgaatgttggagaatctttggaatgacaaaaacaaatttgtcttcctggccatggctatgcttttgttttttagaagttttcgaactgaaaattaaacctagctagtaaataaatttgaatactgaatgaagattagttaggttcgttcctcagtgtgattaatatatatcacctagtcgcgttctttagtaatctagcatccgtgttttctaaagagcaattcctacaaatttaactcgctttaactatctgattagataaattcaactttctgtgtaaaatctctgttgtatggttcatggttgtcaagaaaatatagaaaaagtcatatttttggaacgccactagttaaatcatcgtcattttgagtttaaacaaacatcgttatcggttttgtgaacgagagattgtgaaggaatattttaaggacgtttttgcaaaagttgacacgtagggaatttgggtaattcatctattttgtctacgttatttattgcaaaatacttggaatatttagttctcgaaaaacttttataagaattagagttcgtacgattgtttgcctctctatctgtcacggacgggcggctctcgtcaaaactttatatagtttatataacggacaaaaaataactatatatggtcttaatatataagcatgagaattatcattgatgcattacacacattgatattcaaacatgttgttttgaaccatcgtgtattgtcaattgttgaaagttttgagtcgttattaacttattatgatgaagtggagaaatctcacaaaatgttccttttttaaacatggtgaaaatatattttaaaaccaaacatggtgaaagtacagatctagctcttctgttttttttttgttttttttttctacatccggcttctcccgtttcactaacctagttatttaagtatcacttagctaacataaattatatacatgttggaaaaaa

SEQ ID NO: 58179 - DNA, 499 bp, Arabidopsis thaliana landsberg
gtccgagatttattggggaaatcccagagtgtcactcgacaggataatgccacggcgcccctgttcgtcttctttagccagcacgcggataaacagatcgtgctgcgccccttcggcgggaccagtacggccgccgtacccggccatccacagtgactcgctgggagtgatcaccggcttcgccaggccggccttatagccagcctgagcagcggtcggcagactgctgcaggcaacgatcatgccaggaatcaggatcagcggcgcaaatcgcatcaggaacccctcggcagcaatgactcaggccatcgcctatcaaatgggaatcgggtgccacagttttggagtcctcgacaaggccgtgccgattgagcgttcgcacggtctgaccggggacggtaagaccgaggcaccccatttttgaaaaatggcgattgccccttgggcattgtccggttcgagtaatccattatttacacctagtgccccaaaaaagaca

SEQ ID NO: 58180 - DNA, 1154 bp, Arabidopsis thaliana landsberg
tagttagattttgttctttaacaacacgaataatacgtttagcgagttgtgatatatataagaagaacattaatacaaaatgctctttaatttcttttttgaaaaagggttgttatggtctaactatttgattatataagtattggaaactagatgattatgcattgaaatttgattatatctcctttggttatttgactatattaaatacaacgtgttattgtttgtttcctgtttctttcaacccaaaatttgtcaacccaaataaatgaatatggaggaagaagaataaaaaggaagaaagattacatgaaacttcccagcaaatacggtacttattattaatctattaaatcatggatagaggaaaaatgaattatccaaaaacattgttagctagggttaaaaacaaaaagaactgtggatccaacaaccttggaccctgaactcgaatagagtgtttgttgacccaacaaagttagattaaatttccaacgctcttcatttagttaaatcatacgtatctataaaacacgcgtacacgaggagcaaaacctggttcatcagttttttaatttgttaacgatcacacccaccagttatgtaataacctgttttgtcccttttaaggtttttcaattcttttgtctgttgtgcttgctttttataactctcatatttgagttagagccaattggttgggaaatcatccaacttttgttcttttttctttctaacatgttttgaatcttaagatatagatgtgagaaatacttacttaatatatgtacatactatctctaatctctcaaggtattcaggttattggtttagattggagatttggttaaaagactaattggctattttaacctaatgtgaatagctcagtttgattaaattgaagatatgaagttgtcgatgaatttcggtttagttagttcatttggattattcgtgtccgagttgatgtccagcttttacacagtatttaaatttcgtcataaagacccatatatttgttacaggcccaattatcagtaggcccaactaaatttttgtggtgtttcttttggtcaacgagactctcaaattacagaactaccttaactgtttactgaacagacatcagacctgacgtcacacgaaaaaaa

SEQ ID NO: 58181 - DNA, 551 bp, Arabidopsis thaliana landsberg
atttttttatattttttccactgtagaacgtaaagcggttgattgtgtttgtgtttggagaaagtatattttaattattttgttatttgtttacgtttaaattattattttagatatctcatatatatgattaggatcttagcgcaaacgaaggaatataaatacttatgctaatgtctgagggattctcattataaatacaaaacagcttttaaatctcaaaatcgagtttgatgctgccagtgataatgatcatagggaccggatatatcgtttactacaccatattatgcttttgggtaatcgtattcatcgttctattgtgctgcataactccttcttcttccccttcttctccttaacaagacattgaaactggacatattccagcgatcaataaaaccactgtcgagacgatcataaaggttgaagatgtcgaataaagagatgagggttgctgttaacttgtctagaagagttcaagattggccacgagcttatgtgcataaagaaatgtaggcatgtttttcatcgcttttgtttctttcttg

SEQ ID NO: 58182 - DNA, 1067 bp, Arabidopsis thaliana landsberg
actatttatttcatttcactgaagctatttgaacattggtgctaattaagcactaattttggggatattgttaggaaatgttcaattccctcccatgttgtcaagtggatcacgtgcaagccacatgactggatcaggtgaaggtgacatatgtagtcaagatttaaaattttgagtaatgagaagagatctacaacaagtatagttttattcgtcagagaagtgtcaaagatgaatttgcaacagattctttctggaacaaatcaaatataactttgaatcgattcctaaatttctccattatacttttgctaattctttgctcaaactttattgttttgagccacctgatcttcaaatacacttcacacttacttgttttacaatcaactcctgctttcttcacctcgtaccttatatgaacctacaatatcgtcattataatttagtggacaaaaagttgtttctgtattggactgtatatattaaagcagaggaagaagaagacttacacgaaaatgatctccgaatggaacatcgtggagagccacaatttcattcaagatccagccttcatcatttggagctggagatttctgttgtgcacatgtgactccacctccaaacacagacacatagtggttatacttgtaagaaagccgtctttcgtagactcccggttttttagattcccatgttgtactagcgtaactcaaacatccagatttctccatgatcttacgctccaattctcctccaccaaagatcttcattactaattctacctgtaacagaagaggactgaaatcaaattcagggaacaccatcatcaaacagatacgcactaacactccagagttgtatagccttaattaaaatggaagtagtacaaagaagagtgaactatgattcatacatcgcaaggtagatcacacgtgtacacttttgacatcattaatgcatccgcatctgaaacaactgtaacagcttcaggcaagaggaaaggatctgccacatcttggtcttcttctactatttgtgctctatgatccacacataacgtcctg

SEQ ID NO: 58183 - DNA, 228 bp, Arabidopsis thaliana landsberg
  unsure (1)..(228): unsure at all n locations
aaaaaaaaaaaaacaaacanggcatcctttgaatttttttaaaacatcttccataaatatcctttcaaatttttataaccccaattttttaacacttaatattatttattataaaattttaattttaaaaaaaaacttataattttatattattactaaaatccattactaaattcctaaattacaattaccatccaaacttatacaataattacatttaaaaaacta

SEQ ID NO: 58184 - DNA, 542 bp, Arabidopsis thaliana landsberg
ttctggaggggtcgctcaacattctcccaagagacgggaaattacaataacaataacaaaatcttttagtcccaacaagttggggtaggttagcgttaaaacacaacggaagtcacaagtcaaggttcaggtacgtgaatagctctttttcatgcactcctactcaagactaaatcttttggtatatttcatccttacaagtctccttttactcttcctatgttaacttcggccttcctctgcttctcttcctattactatcgtgccttaggatcattaggtaaatagggatggagagaagctttccaacctaggaggctgtcaaccaccttgtcattgagaggctggagctcacttttagtgggtttgcgaactgttaggtgaaggccaaggtatggtaggtgaattttttatctgacaaggtataatttcagagatgacagctagctcatcaccagactatccaataggagttatcaacttttttgcatattagtattcaaccccggagcatgaccaaagaccttaagcttcttgatgag

SEQ ID NO: 58185 - DNA, 460 bp, Arabidopsis thaliana landsberg
  unsure (1)..(460): unsure at all n locations
cccctcacccgcgatgcagggcgttaattcccaatcagagaggggctacgcgatgctcagagaagggcagacaaaatagggtagctcaccaggtctttgctgcgcagacgaactccggccacgatggtaggcgcgcccgtggtgaagaccgtgctccggtgacaaattccggggcccccttctccgaatcgcagcagcgaggccaccgcattattccacatggcacggcggatcacccaagcacggattcgggcgcacgaagccaatgaggttcacaattgaagcaggcggctacactaccctcacgctatctcggttacggtcgtgggtgccctcggtcattcccaagtgagcggtcgcggacgtaccgtgagggctagcgccgtcagaggtcactcttatacccagtatgggaggccgcatgcgtggaagtcngaaccgaagcggagcgaccagcgcg

SEQ ID NO: 58186 - DNA, 505 bp, Arabidopsis thaliana landsberg
tatgaaaacagaaacctaatggttcaatataaactcattgaaccaaaggccacacatagtgtttatacaaaatcaaatgaaaaaatatcaatcaaaacgaaagaattaaaagtgttatactaagatacaacgtacacgatgctgtctccttcttcatcttccgaaacaatgtcatcaagacttaacccacaagagaaagacaatgtaggtttcatcttcggaaccggacttggctcaatctcattgttaagtatctgaagaacacgtctcatagatggtctctcattactatctggatgggcacatttaagacccacaagcaaaagtttcttcatcatttcttcatcaaactcacctttcaatctctcatccacagcttcaagaactcttccttcactgtgcaatctccaaacccaatccactagattcactgtcttttgactctctggttctttatctattggccttctcccacaagcaacttctaggatcaccactccgtagc

SEQ ID NO: 58187 - DNA, 511 bp, Arabidopsis thaliana landsberg
ctttagagtattttctctaagtgagaaatcaggtaaacactcttctgttctttacatataatcaaacccgatcgacattcttcgtagaatacgattttatgatcaggagtccaaaacacgtgaaagatgggatgttgttttgacatcttttctttttctatcatttatgattatatattaaagccagtcattagctgaattattacctcatccagcttttggatctctcgagcgtccatttctctatatccttcaaccaaatcctcctcaatcgcttccttaatcaccgcagctgctattctttttgttatgtctcgtatcctgaaatttcaattccacatgccaaatgtagcaactatatcaaaacattttcttatgtaacagtaaggatgttctttgattgtgttactcttaccttgatattggagggtatataatcccctctagcacttcttcttcgctcatgtatgctgctaggctgcagtagtttagcagaacaatgtcatgattc

SEQ ID NO: 58188 - DNA, 406 bp, Arabidopsis thaliana landsberg
aagagttctctactgtcatttgatgtaacgattaattagtgaaatcaattttatggctgttttcatgacaaaacagacgtattatatgataaaaaataatattatagaattatagaaattggaatgaactcatttggttttaatatgatatttccatgaattaaatgggtttgtgcaattatttttaaactaaaaatcaatttataaactccttttacctattttctttatttcctggactacgtcccaaattctagaaagatcaggggccaagctgttcatgtctctctagactcagtgagtatacagagtggaccgcggcttaaacacaaaagaagccttagttgaagtcgtacacatttcaacatgagtcacgttggctagagggtacaaggctatgcattct

SEQ ID NO: 58189 - DNA, 1047 bp, Arabidopsis thaliana landsberg
aaaagagcctcgcaatatatctaacataatgtatgaagtttaagcagagaatgagagaagccagacaaaattgatgtaaatagagccaactctaatcagtaaacagtatagatatcttgctgtctttattgaagagaaaaaaagaaaaaaacagagtctcagttcaaaaaacagagaaacaacaaaagctctgcagaacaatggaagctttctccctctgaaacagatctaagagccagattttattcaaccttttttaataaacaattatgtaaacacgaaagatacaatcaaataaagaaatgaatgaactcctaaagtagaaattcagaaaggattgaagatataatatttttctaacaaatcgcaaaattttcccaaaaagaaagactatactcctacatatcattaacaaatgaccaagttgaagaattaaaaaaacaaaaacttgattatggatgacaacgaaatcagaaatgattcccccacttgtgtactaacaatatatattaagagaagataatgcagctcattttaggtacatcaaacccaccaactagttgccaataaagtaaatgaacagtgaaaaggagacaattctttctaaatcctctctagagtttagagttttcttcaaccactaaccactttctcccctcctttcctcttctgataaagtttctaccaaatttagtatgtttcaataaacaccacaagtccctcacaatctatgttccacacaaatatcgtaatcatctccaacaacacagagaacacactctcatattccccttacaaaacatattatcattcaaaccaagtgatttcttctgcaaattatcagactaagttgatctacgattccttctctaaagcaattgaatttgcaaacaattaacaagaaatcgacttaagaaagaaaaagaaaaaaatcgagatttagaatttgctacatcaatcaatcaaccaattagatggaccaagacccaaaaaaaaagtcaaccaaagagaaaagaaaaaaggtacctggagctggagaaatcgtag

SEQ ID NO: 58190 - DNA, 1355 bp, Arabidopsis thaliana landsberg
cgaacagtttaaaattgtttatgttcattttaaaaaatgcatttgttgttaacaaccaatgttatgcttacaacttaaataaacccgccataattgttttttattgtgtttttgaaaaacaacttgcccgttgttatcttgtggcctgagtttttttttcttttttttttaatatatgtagtatgaaaccacgtttcaacaaatgggctgcgccaaatgttcacgcatcttgccttaagaattttgaataacaactaattagagattaaggtatggaaatgtacaaaaatcgccacgagatcctttcgtagatccacatggtattaccgggatacatggagaaacatgttttcttaagatcagtacattactcattaaatggtcgatattagtaaattatttttgtacgtaattgctcggtgcatggtttaagacgtgtgttcttaaaagctactccaattaataatgatgctttcatgtggtgtggaattaaaagttttggatgcgtagtggctaatcaaaaaatcaaaaagttcatagtttaagcttcgaaaatgcaaatagctaggggatacaaaagctatctttacaaaaatcttagaaatggtggagtcttacataatcacgtgtgtgatccaaattatagatgtaatagaagaaatttttcttgtattttcatgtattatatgcatcgcctttatcgtctacacatgaccaaaattttttcccattttcccatttttaatcctatacaaaagaagtttttttactgtacaaggcattaggtcaacaatgccatggtgtgaacaactttgtctccacatttttggggacatatcttaatctaattatcgctttcttacttccctaagcaacaagttgcttcatcttaattttcccattattgtataaaactatccatcaaccctgacaaatttaaacgatgaaagcctgaattattgataatgatattgatatcattatcatccaaacgatgaaagcctgaattattcagttttaaaaggatattcagttttctctcactgtcagctaacttagtcaaatcaaacattcataaatatatattacacaacatatagatctataagcatgacatttataaaaccatatattataaatcttatgatttattatcctaaactatttagaaactatttagaaagaatatgatgggttccttattcctctcaaatgcgtgtcctagaagttccacaagtctaaccaagacgtatacacaatgatacacaataataattcattttccaaacgttgatggtatttgagtaatttcaaatctctacagaaaaatatttctctttccctatatatatccg

SEQ ID NO: 58191 - DNA, 294 bp, Arabidopsis thaliana landsberg
atttttttgaatgcaaaatttatatatgattgttttcttaataagagcaacaatgaaaatatagtttggttatacattggtatttgtcaaagaggaaagactaaaccaagagtaaataaatcttacaacttcccaaattgttggaattctacaattgtattatatatggtgaatgatttggtacaaaacattacaaatatcaaatgaatttcgaagttggttcaggtcacgaatggcggatttggcttgggagagactagaggtttttatttcgtggtttatttttctctttat

SEQ ID NO: 58192 - DNA, 386 bp, Arabidopsis thaliana landsberg
ggtttcccgaatatacaagtatatgtctccaaatgatctaatcctactaactaaatctcatataataagcgatagtgatggtttattaggaaatatatatatctgttatttgagctctgctgattttgctgagagtttattaagtatgttaccctcaattaatttctataaactttttttgactcttaggtgtggatcaacagagggatgattcttctacatcaaatttcatgtataaggcatattcggaaacgagagacttgactaatattctggagcaaaagagctcgcatataacccgccttcttgacctgaccacatatatgcgagaatatcaagctctcttatcactttcgtagattcctttaatattaggagcaaatatg

SEQ ID NO: 58193 - DNA, 492 bp, Arabidopsis thaliana landsberg
  unsure (1)..(492): unsure at all n locations
actcgatgtttgggagcattatttctgatacttcaagagttaacttggtttgtattaatctacaggctgtctaaatcgaaagacggatagagcaagaagcaaaggctnnnnnnnnnnnnnnnnnnnnnttgctacttggtatgtagaccttggattagaaatgtgaatggcatgccttgatgaatcttttggtaatagttttcctctaattttctgacttgtgttttgtaaaggtgctggggaatctggaaaatctacaatttttaagcaggcaagtccacaaggaaaattgattgtactctttacttaaatttacttatgaatcctgctaattgaatgatacaaatttactaatttgcagataaaacttctattccaaacgggatttgatgaaggagaactaaagagctatgttccagtcattcatgccaatgtctatcagactataaaagtatgcaatacttgaaatgactgtgtcgggtttatccttct

SEQ ID NO: 58194 - DNA, 1692 bp, Arabidopsis thaliana landsberg
gtacttctttgtcttatggtggtttaaatattcatttggtttttggtcgaagttagatgtactcacattttatcatcatctcttgttgttggagtgaacaaatcctttacggaagactaaactatatttgtgttaaattatgttcaaaatcaaattacgctccaacgattgtatcgaggttacaacaataaatttacaaacgggtttttagagggaatgtctgaaatcggtggttagagtgaattggcaaaacgaaaagagaatgcaagagaaaaagaactaggattttgaagtagacggcatttctctctctacggataatgacttgtggcccggatcttgacaagagtcgagtttacataactacatcaatctatgaggatttgtatcaatatcggctagctctccaatttcatagatccattataaaagaaaactaattgtcaaaagattacctctcactataatgatctaaccacagtaacgcaacgaatgtgcatacgtaatgataaagttcacaaaagacgtttgcaagcgtttgatagcataagccataagcggtagtgcttgaaacttgaaagtaaatgaacaaaatggatcgtatatatatataagaaaataaaaatcaaatatgcatcgttaaccataaaattacaaatgcttagtttaattattgagtttaaggttagaaaagaaaaaatcgttatgccttacgttactacatatatactattgaaaacttttgaaacattataaaaacttgttatatggttgatttcatatacctactacaatcgctattgtcgacaaatatagcatttataaactatggtggctaaatcaatcagtttgttttaataccactaacaatttgttaatcaaaatcagatgtggctacttgaaactgtctacgccattcaagaaaactacagcttctttctgttaatgtaaatttgattaactacagcttctttttgttaatgttcgaggttaaaatcaaaattttggatcttagtacaagaaatctgataatcttaacatgacagctctttccacacttggtcttagtacagacaagtgagtccatgagttagcactaatttcttgttttaaattaattgtatatttgtttgatcaatttatattagttgtagtgcaggtatttatttaatattatcgatctaataagaatatctgctactacagatctagaagatgaactaaaataacactctaatgcaatcgtaatgcttcaccccaaatggccgttcaattaatatatttctcaaccttcgttttttgttaaatttggtgaaaacaattatcaacgacactaatatcattgtataattttcaattaacacacttcctctttgtcaaaatagacgatatttagctagaacttcatcgtttcacattgatcatttcttggtgcagagagggagtcttaaacaacattatgagagatgttaattagagtcttcttttctagctcctgatttcaaatgcagaaaaccaaaagggaaaaatcagccatgtgtttgaattcaaagaggacaatgaggatgccttggacagatctggctgaatcatcagaaaatatgaagaagtcatgagtaaaacaatgatgggtaaaactttgattattcacacttggcaccctatcaaaacatctgcttcctctaaagtaac

SEQ ID NO: 58195 - DNA, 1437 bp, Arabidopsis thaliana landsberg
aaacaatgaagagaaacgtgtgctgggccataagtacactgcatgtatatcaaagtttgatcaagtttcaattaaaatgatacaaacaagacacatacataaaaattggaatttaattgcgacgtcctggttaagtgcaccttgtggaatgtgtcagtttttgattgggtctcagccttcctttggggtcgactcacctcttcctcctttctctatcttgtaccaataatctcttcagaaactaatgcatgtataggaaacggggatatatatcaaaatagttgctcctatatgatttgtcgtccacacaaaatgcgtctcatttattacaacatataaatgaaagaaacgcgtctaatacatgagagtatgattatagctaaaacaaactaagcttgtaatagtaattcttatataaaccatccctcgccatagaattttgaacctcgaaatcactaattatccagccatttctgagctgtatttcaaaattgcgggttttatatattattaagatatatacaaaattataaggtcagtaaattttttttgatcgaccaatgtagaaggggcaggtaccaaacacaagcctaggcatagtgataacgtttggtgacctgtttccatcgtactcaaaaacgacctttgctcaacttgatacgctgcgtttcatttattccttgctgtggattttagcatatttatccagcactttaatatgggtcatatgaaatgggggggcgccctcataacagtttactgtcttctattagactcaaataagtccatcaggcccaaccatttaaggtcgtcatttgacgtttgactttttaacgacacatcatgcacgatgaattaagctcattacagaacattaggatggtaataacaatctaccaaaccatactttatcatataaagaatatatactgtatgcgtttatatatttaacatttactggagtattttttggcccaaaaataaatggagtaatcatttaatctttccttggaagccttgcgtgatattagtgcttttgatttgaactgcattatcaaataaatttaaagacatacgaagaattgaatagaagaatgtattctatgctaataaatcgacgagaaatatatatataattcccactatttgatcactattggtagtcaataatataaaaaaagaattataattaaaataaaaaacttaggtgaaggtggatgtaacgatcaaaagcaggttgaatacactaactgatttcaaccacaaccacttgtagacaatatacttgtagtacaatataattgatttgcaataattataataccttatgattctaagcaaagtttgtccatctttaagcatggataatcaacggttttaactactttcatgttcaccggttgaataaattattttacctgaggttctgatcacatg

SEQ ID NO: 58196 - DNA, 1354 bp, Arabidopsis thaliana landsberg
ctcgttaagttggattgttagattcattagtaatcggttcttttcgctaaatatatattatcaaaatgttttatttttaattctctaacacacaaaaatttattactaaaattctctgtcaattaagttttatgaaaaaatttaaacaattaaataaatactatattaattaattattaaatcaaaatagcttaaaaatcctagattcttccctaattctcttgttctcccaaatctctcgagaagatgagttccatatactattttattatcttcttggttgttggtctaatctgctatgtggtttatcagatttagatctctagaattccaaatcctgagtttgagctttaacaaaaaaaaaaatcctgagtttgagctgcctcggtggaaccttaaaagtcaaatctctcaaatagatgaatcgtataatcagactttttcagccctcctgatattccgacgagcaaggactctttcccagcgaccgacgactctttttcggtgacttatgaatcttttcaggcgatcgacggtgattatccagggtaagaagatgatactattctatttagcaagtgcaacaggccaaaaatttacttttaagttcaaataagacaaagcaatcaaaatggatataacattaataaacagtgtttcaatatataggcaggaggtttaaaattatataaagaaacatacattaatactattggtgtgaattttcaatttaggacaatcttggcttagtgaattattcgctctctcctctttattgatgatatgtttaccacaggccactcctagagtttaggagaagtaacccttcttgcttgcttttactccaaccttggcctatgtaaaatattctctgtacaggtcagaaaccgagagaaggcatatggaggatgagttaaacaaggaggtagaagaatacctgaagatggttgagcatgaaaagccttctccgaagatgcctatgatgttttctccgaggctgcaactgatatattttcctaccacatctccaacatttaatcagtttctagattaaaaacttatgaagttgtttctgatatctgttttgcctttggttcctgtaatttcagaaggctaattccgccgatggtaaaaaacaccaaagctaagccacaaaagaataaagaagaggtggaggacatatgggcatcatatttaacgtttaagcggtacttgttcctgtttttggctgggtttctattttctttgttttcccatttcctacgggttctttatctttctctctttagctcaattttattattttcttggatcatatgaagaatgtacatttactactcgtttattttcctgt

SEQ ID NO: 58197 - DNA, 168 bp, Arabidopsis thaliana landsberg
ggaatctcgaagaatcctgtcaccacatccgtggaatctccagaggctggctaggggtcatcctactttctccacgggtgtatcactgatagacgaaaagacaaacccatctcaatccccacccgagttagaagactgagtcgatcaggctcggggagaaagaaaccg

SEQ ID NO: 58198 - DNA, 1075 bp, Arabidopsis thaliana landsberg
gcaacgacgcatacaaagtagttaaatattacgtcatttacttgtattggttttgtgaaagatctatgttacgtatggtttggtttggtctttgattcatttaattgttgtgagcgttttctttttctgtccatgacggacgcagcgccaccggatgggattcttttagcgcaatccacggctcttgtccttttatcataaccaataatattactctctagagttaatcattaaccaataatataactctagagttaatcattaaccaataatattaaagtagtgttgtaattcttatgattagtgttaattatttacgaattttttccttgatatataacatatgattaatattatgattggttgatgctcgttaacgtggaggaggatatagacagatcacacgctataatactaaccgttgactgtatttcactaactagtaactactaatgacaaatcttgaaaaattggacagcagaaataatactaattcaatagttttattgcttcgactcagaaccctctggttattaaaaagaaattttttattttcaagaatacaaaaactgtattcttgttagacaagaaacatctctttcttactctctagcctctattcatctagtacttgtttaacattgctatcttgtatgtgtgtaatgcagcttggagccgagttcgtgggaacattcatcttgatattcaccgcgacagccggtccaatcgtgaaccagaaatacgatggagcagaaaccctaatcggtaacgctgcatgcgcaggactcgcagtgatgatcataatactctcaacaggtcatatctcaggggctcacctaaacccatcactgaccatagcattcgctgctctaaggcacttcccttgggcacacgtccctgcttacatagcggctcaagtctcagcttccatttgcgcttcattcgcacttaaaggagtgttccatccttttatgtccggtggtgtcactattccatctgttagccttggacaagcctttgctcttgagttcatcatcactttcattctcctctttgttgtaactgccgtcgctac

SEQ ID NO: 58199 - DNA, 572 bp, Arabidopsis thaliana landsberg
ctaagcgcttcggaacggtttccggcatcatcatgctcgctcgggaatgggctctccggcccaagaacggcgtttacatcaatgccgccgctcggcctgacgacataaacattcggcccgaaatcatgccaggcatttagttgttatcaaccgcacctcctccctccatcctcctccccatgaagccgcgccaaaacccctgatcctgagccccttcgggccgttccgctggaaaaacagctcatcggcgtcaacgccaaaaccagcctctttcccggcgcgcgcagccgctcctcctggtccggcggcaagaaaacaagaaaacatgccaggcatttagtccgtgcccgccatggcggctggccgcgccgtcgaggccgctaccgcctccaccaggcgcaggccagccgccgactgactccatacgcgccccttgcgtgccgacgcctctgcacccatcccgcgaggttctggtacttgactccagctagccgggcaaactccgaccccgacagcgcgctgcgctcaaactcatcgagcagctcctcccgcttcgcgcatggcgttacgac

SEQ ID NO: 58200 - DNA, 1051 bp, Arabidopsis thaliana landsberg
tgatacaaatatgcttcgaaagtaacctcctcaaaaggataaacaataattgatctgcaaagaaaacactgtaccaggtcaatgatgaattacatcatgaaagaacaaagtaaaacagaggaactagaaattactttggcgtagaatgatgctgctcgcagatattccttgtcggtgaatgcagattctgcctacaacagaaggagcccaatcacacataatcaaaaccagagagattcttcccgtcaagtttctatgggcaggtgacagcaatatgacacggtggcacctaaatcaatgcctattaacttaaccgatggtgtcaagggatcacctgaactaaataaacttggtctctctggagagggtcacgacagtttgctaaagctgcagcatagactttcaagtccaggtaaaccttccacatatctcgtccttcgtcaatcacagaaacctaaagaatatatccaaagccgaaaatgagaagtgaaagcagaagatatcagataaatttactgaggaagttttacaaccacataaatgagtaagccaatacacacctggaatatcgaattttgatcatatgcatagaaaacgttagcagaggcatcactgcaaagtccaattatgccccttgaaactgaatctgaggtgagatcaaactggagctcttcaatgatttgttcacttatccgattgacaacctaccccacaattaaggaatgcagaaaccaaaaagtaagcatagtaatgaaacaaaacacttatatgaagccacatcaaatgatacatacacgaggaatatatcaacctcatgtgtttacacataccttaaccttattcccaataagaagcaagaaatgatactcagagagtgccatcgaaccaggcttgactgcttcagttccatcactcagttttgagtagtccaagagtgctttgttctccacaaagttctcatcgccatttggataactaccaacaagtttcaattaaattacagaacaaaataaccaaaaatatgaaagtgggaaacaaatagaaagatcca

SEQ ID NO: 58201 - DNA, 890 bp, Arabidopsis thaliana landsberg
gaaggtatacgatctttttcttctgaaattattgttcatgaattttggatctttccttattggtttttgtttagcgctgcagatgatttacaacaagtatgatgaagttggaattgttgtctttggaactgaaggtctctctatctattcttattactgattaaagtaggaagttaggaatctatcctctttagtactgcaatggttctttcttggagtattatcggcttgctgatgtactttgataataatgtttcatgtgacctctgcagaaactggaaacgagcttgctagggagataggtggatatgagaatgttacagttttaaggaatatcagagttgttgatgaattagcggcagagcatgtgaagcagcttcctcgaggaactgtagctggagactgtatcctgctagctagtttaccgcttatttttactgtttcgctaccattttcttggttctttaactggcttcagttcttgatgctttaattgttgggatggatatgcttataaagatgtatggtaatgcacacaaggggaaaaaacggatgtgtctcatcacgaacgcagcttgtcctaccaaagatccatttgaagggacgaaagatgatcaagtcagcactattgctatgaaaatggctgcggagggaattaagatggagagcattgttatgaggtctaatttaagtggtgatgctcatgagagagtaatagaggagaatgatcatctgttgactttattctccagcaacgcgattgccaaaacagtgaatgttgatagtccactctcactgcttggttccttaaagacccggagggtggctccaattactttgttcaggggtgaccttgaaattaacccaacaagtgaagatgcaggtaccct

SEQ ID NO: 58202 - DNA, 799 bp, Arabidopsis thaliana landsberg
actgttttaccttgtttgatgagagtgcttcagaggttaaatagaccaaatggtctctgcattcttgtggaacgcatgatcttattttctcatactcgtctaggcgcagagtggagacctgcggatgacattcacatgaaaatgttacgagtcatgagcataaatacatgtagataaagcttggattttatttttctcctagagatcatcaatttgatatcacaacataggagcaaaaggaaaacaaaggacctgaacgcctctctggcagagagcagaggcgatggtgtaggcaaccttagtgagattgcctgtcatcacgacgcttgtagttgctttgggtacactgttgatcacaacagctgctgctaatctactgccgtcgaccagtctcactttcatatctggatggttgtggatatacacctctccgttcctgttaagctcctccccctgtttcagttcatcaaattaaagctttaacatacactacgtagtacgtacggcatctacccaatataaaaccaaaacagtcagagatagtttctttacttggttcatgagacccagactaagcaccttcactcctttcttatctgcctccagtatcgctttctcaatcatgttattgatcgcttctttcctccattttaacaagtactgcatgcatcatatatatatcaccattaatatatatgcatcagcaagttaaccagcctatatatatgatgatgatgatgatgatgatgaggccctgtagattatatctaggtatcacccaagactgcaagttgagctt

SEQ ID NO: 58203 - DNA, 1292 bp, Arabidopsis thaliana landsberg
caaagaaaaatttagaattgataaaaaaaaaatatggattcaattcgatttttttcttgtagctctctccctcaagacataatcctgaagatcagctcttctcttcaggttttttgcttgtatttttttacttattcttcaggcttttgatacttgatgttacttcttggtaaattgtgtgttatttgatgaataggtgattgatctttgtgcattaagtagctgttctacgttttggagagagttatgtggttctgatatcttatgggaacctctgtttaggcaaagatggcctttattgtcctcatttgaatctgatggagacaatactctgtttcttcaaacccaaaccaatgaaaattctcaggtagaaaatgagacagttccatggattcttgtttctttcaaattcaagtttctgagttgttttagattttggccatttttgtaggatagtgagtttgtttgttgttgaattgaattctatttatgatgaattggttctcattagatggatgatgtttgattgacatggtagagaacaattgtttagttgagatatttaacaattgttctgtcttggagaaacaaattactgaggcatattgaaggtgatgtgattctggatattatctgcttctaattgtggatagttggattatagaaagcttgagactttttttttgaagaggtgatagttggaattggacatggtcatcataatcgtttatatatctcaacttgcagttagactttgcttgtttataatttgttgttgtggcagagactaaaattctttgttgttgcgttagcattactttgaggtctattacaggtttcatgaatagtctattttaaagcttttgtaggaatggagaagattttatgtgatgcaacacaaggaaatggcatcaagagcttccgaggtgattaaatatgtgactaagtctcctgctacgttgtctttagaggcaggtatatatctgcacgcggttgaaaccatgagctcgatgcggtttggatttcaagatgtggagttatttttcttcaaaccaaacttaagtgtgctgctcaacctcattggactcatttactgcatacaacacttgaaaccgcgggttagttactcccaaaggaacgtctacccgcctttcggaacatttctaacttctttaacattttctttctgcagcgagagcaagtcgtggatgcgctaaggcgatgtggaatctcagaggagctagtttgggtgaaatggtaacgtaggtcgatggtcaggtgggagtcgaatg

SEQ ID NO: 58204 - DNA, 259 bp, Arabidopsis thaliana landsberg
tggctttttgactaacaaaggcacttgctacacctagtgagcggggccgctggctttcctttgaggtaaatccatgcaaacaaccgcggaacactacatactcaccgcgtattcatcaaatctgtacgaatcgaaacagacagcggctaatatccatcgcaaacaagcactactactggtgtatgcaacacatgacgtgccgtaaccttcgatgagtgaaccgagaagaggaccaagcaaacgcttcttgcgtttgtgt

SEQ ID NO: 58205 - DNA, 443 bp, Arabidopsis thaliana landsberg
gtaactaattagaagacgccatataacaggacgagcaagagtgtgggatctcttaccggagggggctccagaaatggctccgactgcaccgcgacaactcctcatggtcgtggctatgttggctggctcggctgtaggggctagataggacaagatctacgcgtagtcgggggagcagggagggaaggaaaggccagaggaggaaatgatgggctcacctgcgcctcacagaggtggaggaggatcgatcggtggccgttggttggatctgcggtggcgacgtcgtgaggatgaggaccgtggatgcgtgactcaccaccatcgacctctagtcgatgtgtctggcacccatgtggtgcacctccttgatgcggtgaagccgcccacggagagagcaagagagggggcgcacaacaggtggaagtggtggaacagcgtgagga

SEQ ID NO: 58206 - DNA, 515 bp, Arabidopsis thaliana landsberg
  unsure (1)..(515): unsure at all n locations
cgtgtgctgcgctctaggtttttgtggtgtacaggttgcagttctggccaatagcatttttaggcctgatggtgggttgtatgcgttatttgggccaggattgttttgtcgatggcctgggaacttggccccttgtggcccgactcctggtcccaatttgaattttgaaagggctggaaannnnnnnnnnnnnnnnnnnnnnnnnnnnnnnnnnnnnnnnnnnnnnnnnnnnnnnnnngaattgctgaccggtgaggaagagaattctacagcgatccaaggagtttctggaggaatgagtacctttgctttagtaatagcagcacctagcgtcatcggtggtgatgatcttggttttggcaagggtccctaccatggttgaatcccttgcctgctttgacgaagagaaatttctttttgatgctgaacaaatacagcatcagttactttttctgccagcgatccaggaggggcacgccaatctcgtgtggatggtgaaatcaccacttcattct

SEQ ID NO: 58207 - DNA, 1041 bp, Arabidopsis thaliana landsberg
cagctttaacattgtcaacaaggtcatctttcaggacgactagaatagaccttgggataacaccaacacctaaaacctgagtattttcttggattttgatttcttgataatcatggcgtgttactgtatcatctacaggatcaaagtttgtgccttcacaagcttttgaccgctgtcacccagagttaaaaagatatcaaaatgctgtaagatcaaatgttaagagttttccaaattcaaatgttagggacacaattgcagagaccctagtctgagtgttatcgcaaaacagaaaacggattttatctacttcaaacaagcttagctagtcaaagaatgaaatgacacaaacctgagaaggacaaaaaggtggtttcacaatagaattgattgattccaactcagggaaaataggaaacctatagaagaaaccaactcaatcagccatattacaagaacaagagatgacaaaatgcataatatacagtttcaaccatacatgtgcttgcattttcgacatcgatacatcttttctccttcatacattttaacagccccggatcgaatcactgtgcctttcaacatcatcagaatcccacggtgctttactctaacccggccaatactcgggaaagtctctgtgtcaaaatcaaaatcaaaatcagctaatagaagcagaacaaactcgaaaacaagagagtcacacacacacacacacacaccagggcttcgttctagaggagatccactagtgtttatacgaacatgtataaatctcttctcaattccaatcttcttctcaaatttcttcatatgctccaaagcaattttctacacccaaagctaattgaaatcaccatttcgtataatcaaatttggggggaaattgagtacatacgtgagctaaaatggctgaatcgtcgaattgacgaagataatgttcgggatttgagaaacttgacgcgctagagacggattatcgtcacgagttctgcgtctcgaggaagagagggtagtgaagttggggtcggagagagagag

SEQ ID NO: 58208 - DNA, 987 bp, Arabidopsis thaliana landsberg
ctctagatatttttttggctagggaaatagcattttttggtgagtttaatttttgattgactccttgtctgctcatagactgtagagggtaacaactttaaagcagaaactatttataagcatgaaaaatactctaaatgtatttgttgctcaaactcttgttagtatattgtcaattaatgtcgtatatgatgtaaactttcacttaataattgaacttttgataggctgaagaaaacagtatatagctaatgatcttgaaatggcaggctgcaattggatgcttagcttctactctggattcgtcagttaggaaaaagattctgatatccttgctaaataagtttgatcctgccggtgaaagcgagactgaggggcaggtctttcaatcgaatgattctgtcgatgaagaaaaagaaaactgcagttccacaaagacacagttaaagaggtataggtctagtcgctctgttatatttacttctattatgaaactcatcctcgaaaaatctcttgcctgacttgttaaatttcttgaatattattggatacggtaatagcatgagatccatatgtatatctagttatttctcctcttctcctataccttgtatgacctttttgactggcatttgcttgcagaagtgctgtgctggatcttgcatcttcatttgttgaaggagccaaggaagatcttattgagttgatttataatcttgttcgccaaagttttcaggtatgtttctaaacttgagcttagagaattttcttatgtagaggctgatacatgagttgttttgggtttaggccacagacgaggctgatctttgtggggcatatgacactctgagcagagttctacaggttggttaccccatctaagcttgttgcagttgctcttatactgttcaaaaggtggacatcatgcttatgttcgtcggtgcaggaacatggttggttttgtgcatctcatttgcaaaggtgata

SEQ ID NO: 58209 - DNA, 962 bp, Arabidopsis thaliana landsberg
cgattctaatattgttgttactggggaattttgatcacttagttatgaacttaatttgcggtttctgtttccttttgtggtagctatcacattgcaggttctatgggggtattttatgcccgtgaaccttacctcaacgctgaatctactcatgtaactcgctttattggtcttgctcaagttggaaataaaaacaaacaggtgtgttctatagttcctttcaactcgagcttggtatcttattaattttttctgaagattttggtacctctctgtttgatcacttgcctcctgagtggtactcttaactgtatgtatggctcctcctaagatggatatactttggatgcagaatctatgcaaacacatgtagcacatcagactgtttttttttttttttttgcgttttctgatgatttcatgcagttttcatatattcttcaattttacttcttttttccactttttagaaatttcttcatgcgctttctcctacaccaacatctaccatgtcaccagcagagcttagtgcaaagcctccaaaaactacgctatggccttataatttacaagatggagctgctgaatcgaagaagaggccaaacgatagtgactctgattcacagtattggaggtatgatgtcccaaagcggcaaaagagtggatctcaaggggaaaagctctgtttcaaatttgtctgctcaggttcctgtcctcgtggtgaagattgccatttccaacacaacgctgaagcaagagaacagtgtcgtagaggtgtttgtcttgatcttatcatcaaaggtaagtgtgaaaaaggcccagagtgcagctacaagcatgagtttcaagatgaaagtagcatacaaaggaagcccagatctgagaatgctaacaggatatattctaatctagcttctgagaacatatatgccatttggactcggggtggagacagtaattgt

SEQ ID NO: 58210 - DNA, 600 bp, Arabidopsis thaliana landsberg
tggttttacttagtcttcattgatttttttttttgtcaaccatctattttactcttctttcttttttcaatatccttaactattgaaatgttggcgacaattttttttttaatttgttataacgatccataatctgtttttttttcttgataacattgacatatatgagttggttagatagagctgcggcgatcgcattttgtcaatcttcacaaagttttgacttgttattatgctgcatttatattttggttacaattttgtgttctttctaaaaattatatgtgaaaacatgaatgtgggtgaatacaatgcacctaaagaaagcggtatgacatttgtgacacgaccgttacacataataaagggttttctttattgttcaactaagttagttaagaaacaataatagtatttgtgatacaattaatctctatatatagagtttaccattacgtatactactcacttactctaaatccattagtaacgtatcttatcttagttaaataagtccatcccgctttttgacaatcttaagtatgtaaaaaaaagattaatgtaaaaaaaaagtatagcaaagagagataataggttttg

SEQ ID NO: 58211 - DNA, 567 bp, Arabidopsis thaliana landsberg
  unsure (1)..(567): unsure at all n locations
atttacagacgttttagtattagagggaaaactgaaattttggtgtggaactctcaaaattttcataccaccagcaaaacagtaattcataaataggttaaaattttatttagtttttcaatatccccaaatttttaatttttagattttccctcaatttttaaaaactgtccagaataaccaattttgtttttttgtagactggatctcagaaatttcagaagtggttatgaataaatcatctatatattagtgcttatgggtaagcccacaactattctcatcttttatttatttaattcttctatccattctattaaacacttttaattctatatgcaacttattgttatgaactaaacttaccaaaattaaatatctcaattttttacataagaaaattttttatataaggattttatttattttaaatgcattgtgtttttcaattcaacaatataaacatatagtacatgtattttaacaccaccaagcacgtctataagcctaacattatgaatggcgtanatgcaacttagctntatttatattatataaatctttaaa

SEQ ID NO: 58212 - DNA, 727 bp, Arabidopsis thaliana landsberg
gatatgatattgtaactaataatagatttaaaagactagttttacatatagttatttatattcttattttatgatgtgtaagaaacaaaaaatttaacgtatatgtgttgaaattaattttaaaattaaactatttcatatttttatatctttttgacccaaacaaagaactcataaactgacctataaaacctttgatcacaagattgaaagggttaaaattgacgttcctagaaatgatagaatctgctagcgaaaacttacaaaatgtaatatctcaagctaggtatagaatgtattaactggctttgtcattcttacattgttttgtctaatacattaagcaagtttcactctgttaatctgcttagataagatttatcatgaaattttttttatatatatggatcagataagacatgatgttacacgcagagatctgttttaaaagcaagtttcactgagttgcatagatcaaagacataatgttaactgcgaattaagtgttgttcggttcaaatagtaacaaaaatatatacatacatatagatgtagatatttttgttgctatcaaaactccatcgtactgtgcaggtttcatcaccattcagactcatactagaagctaaaagctatttatgtcttgtttgggactcatactaaattgattaaaattaatatgttgggtgacccatctagattggccatatcatatcacttatttaga

SEQ ID NO: 58213 - DNA, 609 bp, Arabidopsis thaliana landsberg
  unsure (1)..(609): unsure at all n locations
tatacgtcaagaccgttttatatatgatatggatnnnnnnnnnnnnnnnnnnnnnnnnnnnnnnnnnnnnnnnnnnnnnnnnnnnnnnnnnnnnnnnnnnnnnnnnnnnnnnnnnnnnnnnnnnnnnnnnnnnnnnnnnnnnnnnnnnnnnnnnnnnnnnnnnnnnnnnnnnnnnnnnnnnnnnnnnnnnnnnnnnnnnnnnnnnnnnnnnnnnnnnnnnnnnnnnnnnnnnnnnnnnnnnnnnnnnnnnnnnnnnnnnnnnnnnnnnnnnnnnnnnnnnnnnnnnnnnnnnnnnnnnnnnnnnnnnnnnnnnnnnnnnnnnnnnnnnnnnnnnnnnnnnnnnnnnnnnnnnnnnnnnnnnnnnnnnnnnnnnnnnnnnnnnnnnnnnnnnnnnnnnnnnnnnnnnnnnnnnnnnnnnnnnnnnnnnnnnnnnnnnnnnnnnnnnnnnnnntttaacaactttttttccaatttttttttgggttcaaagcctttggggaaaaaaaaaaaggggccccccggggggaaaaaaaaaaagggggaaaaattttttttttccccgggtttgggggggaaaaaaaaaaaagggtgtttttttaaaaaaaaaaa

SEQ ID NO: 58214 - DNA, 1152 bp, Arabidopsis thaliana landsberg
cttaaactcgtttaaggtaaaacaacatggaattgcaaacttagggttaagggttaagcggtgtatgtttgacgagttgggatggtctagaaggtaaagcattgctagttactgattcaaggtaaaacgatgcaatttgcaaatttctagatctagagctaggtttcaattgtgtatgattgatgatttgggatggtctagattgtggatcattgctagttattggtttcaatgaaactcaatttcagagtaattataaaaacttatgctttttgctatcttacatctctacactgcgtccaatctctgtttttgcagcactaaagcttgtctaataaaaggttatgtgtttacttcttcaataggttccgaaaggtcatgtttggattcagggagataacttgtatgcttcaactgattcacgtcattttgggcctgtaccttacagtctcattgaaggaaaagctcttctacgggtaactcttttctcaaaatttctagctgtgaagttattatgaaacaatgacaataatctcatcagtaaccatctgtttgcttgtctaggtctggccaccagaatactttgggtcattgagatgacgattatatacacatacacattcaggtaatcaggttgtctgcctactgtatacgtcaagcgatcacttcaacgattttgttgcactgtaactcatgcgagtaatgtatcattcatgtgggataagcattttcgtctactctcctttttggcagtaatagaagaaaagccatggtcctgatattgtttctgaaacccgaacttcaatatcaaatgttaagattcatattgttggtatcgaaaaagctggtgcgttatgggatgataattgtgtccttgatacaaagttttatagatgttttgattcatttgggggactcaagccaattgttcaatgttcaccaaaaaaataaatttagacgaaatcattaatgggcctcgatattatagcccaagaaaaaaaaaacggcaaggcgttcactcgccgacctgatgcattgcacgtcgtctcaaccctcaacaccagaaacttcttgaaagcacctgagaagtcttgtaacgtcgttaaaagaaagaaacgaagatccctgatttttcaagaataccatcgatca

SEQ ID NO: 58215 - DNA, 609 bp, Arabidopsis thaliana landsberg
  unsure (1)..(609): unsure at all n locations
nnnnnnnnnnnnnnnnnnnnnnnnnnnnnnnnnnnnnnnnnnnnnnnnnnnnnnnnnnnnnnnnnnnnnnnnnnnnnnnnnnnnnnnnnnnnnnnnnnnnnnnnnnnnnnnnnnnnnnnnnnnnnnnnnnnnnnnnnnnnnnnnnnnnnnnnnnnnnnnnnnnnnnnnnnnnnnnnnnnnnnnnnnnnnnnnnnnnnnnnnnnnnnnnnnnnnnnnnnnnnnnnnnnnnnnnnnnnnnnnnnnnnnnnnnnnnnnnnnnnnnnnnnnnnnnnnnnnnnnnnnnnnnnnnnnnnnnnnnnnnnnnnnnnnnnnnnnnnnnnnnnnnnnnnnnnnnnnnnnnnnnnnnnnnnnnnnnnnnnnnnnnnnnnnnnnnnnnnnnnnnnnnnnnnnnnnnnnnnnnnnnnnnnnnnnnnnnnnnnnnnnnnnnnnnnnnnnnnnnnnnnnnnnnnnnnccccccaaaaagggggggtcccccctttttctttttgggggaaacccccccctccccgcctccccccaaattttttctccacctcttttttttttttttgggggggggggggaaaaatttttttataagggggggaaaaaaaaaagggggggggggg

SEQ ID NO: 58216 - DNA, 425 bp, Arabidopsis thaliana landsberg
tttatttctcagaaatactctcacctgagggaagggggtagggcaaatatcataatcagctaagtcaatgagctcatctagccctgtcctttttttctctgcattaattaagattggtatattcttgctatgtgcctgcataaaaaccatagatgagtgagaaagagctgtaacatacgtaaacagaactaagcaaaacacaccaaacagagcattttcatttcaccttttgcgcaagaagcaattcggcttcacgggaccttccatttacatatagaactcttactccatcaagaacatctagaagtagagattcagtaaggtcatctggtagcaaaggaggatatcctggagtgtaaatacaagtacgagtattcctacacatttgttacaagaatagtttcaacacacatggaaacttaaat

SEQ ID NO: 58217 - DNA, 1337 bp, Arabidopsis thaliana landsberg
  unsure (1)..(1337): unsure at all n locations
cttattaagaagataagagagttaaaattattcatataaagcaaaataacaatgcttaccaaatgatattgaaaagataaataatcccaaactcaagagcaacttccatcacacagatttgctctctctctcacttttttttttttatatagttggagaaaatggaagagagaaatcgaaaagaccaaagtgagagaggcttttaaaaccagacgacgtacacgattagaccgcagagacggcataattaaaataaaatctttaaaaaaaaaaagagagaaaaagtttaccgactgagacacagacgttttcccctttttacatcacaagtggggaaaaaaaaaactctgacagaggcgcgtggaggtgaaaagttgaaattccataagttcgttgtttgtcattgccgatattaaacctttttttatatatatttactacattgggatctcaaaattcattttttctataacattatgagaaataaaaaaacaatctaatgtaggggatgctttaaatttaaatgaaaaagtgttgtactttagtggctgaaaagccatttacttgtcaaaatgatagaagaaaaactaaccattcaagaaaataatgctccatttataaactccttcactcaaacaatagaattttatgtccaatttgagtaacattaatttccacttacccataagaaaaataattataatagcataaaaatagttaacatttaaacttgttgatttattttccaaacacttatattttgaaacagcatattaacatggaaaagtatttgttgaaaatggaagatttcgcaatgatgatcaaatagagatgagaaaataaagtttttgcaatgagaagagatagaacatcactaatgttactccctatcaaaaaaaaatcaataatgttgcaagaaaaaaaagagaaattttatttaaaaaatgagcaaaactagaaataatcaagtaattttataaaaccttagaagatatttctatttgccatttgaaaactttaattagtaaaatagatttggctaaacaaataaaaaaaacttttaggctaaaaattggatttgacgtatgagtaattggggatgagggggacacgtgtcacaaaatgggaatggtatcttttggggaaagcatgtaagtgtgtaataatggtccccttctctctcccataaccctaccaaaaatacttttctttgttccatcacatncgactaccactactcactcacaccctccgtttttttttctgctaccatgcgcccaaatcttcatagcgtattttaagatttctccgacgtctataatcaggcagacaaaact

SEQ ID NO: 58218 - DNA, 318 bp, Arabidopsis thaliana landsberg
tgttagggttttatcagtccggacaaggaagcggtggggactgtgccaattgtacgggccatatgggcgacgattcacttcacgggcgaagtctttggagcagagccaggatggcccagacgcgccatagacaagaacataacaaggatctcactccttcatgcatgctacactagggttggtggatgttactcatgagctagagcgccattcttggactcgggtcacagacaatacagattgtgcgcttaaaagatcaggcggtattgacagtctctatgtgcctgaaccgccggctgaactattatatgtgagggc

SEQ ID NO: 58219 - DNA, 807 bp, Arabidopsis thaliana landsberg
tatagatgggccaatgaagggtgccgcttattggatctgacccattttgaggacattaatattttcattggttataagccttttaatcaaaattgtcattaaattgatgtctccctctcgggtcattttcctttctccctcacaattaatgtagactttagcaatttgcacgctgtgctttgtctttatatttagtaacacaaacattttgacttgtcttgtagagtttttctcttttatttttctatccaatatgaaaactaaaagtgttctcgtatacatatattaaaattaaagaaacctatgaaaacaccaatacaaatgcgatattgttttcagttcgacgtttcatgtttgttagaaaatttcgaatgacgtttgtataaaatagacaattaaacgccaaacactacatctgtgttttcgaacaatattgcgtctgcgtttccttcatctatctctctcagtgtcacaatgtctgaactaagagacagctgtaaaccatcattaagacataaactaccaaagtatcaagctaatgtaaaaattactctcatttccacgtaacaaattgagttagcttaagatattagtgaaactaggtttgaattttcttcttcttcttccatgcatcctccgaaaaaagggaaccaatcaaaactgtttgcatatcaaactccaacactttacagcaaatgcaatctataatctgtgatttatccaataaaaacctgtgatttatgtttggctccagcgatgaaagtctatgcatgtgatctctatccaacatgagtaattgttcagaaa

SEQ ID NO: 58220 - DNA, 481 bp, Arabidopsis thaliana landsberg
tcttggacagatcaaaccggttagggaaagtgtgacagaggcgcttcagatatggaagaagatttctggcaaaggggtcgatgtggcttcagatgacgcaaagctaacagctagtgagcagctcggatcagagaagaacggggagaaaaggtctaatctagctgatctaatgacaaaggcggcgtgcgatgggaccactctctcaccagactctgcttctaaaggaaaaggatggcttcctgaaaaagcagcaggactgtagaagaagaaagcacctggcttaagtgataaagattgtaatcctgagtttttccaaagactagaaagaaggcaatccgtggaagtagtagttcctcgtagatgtaaagacactgatgaggaagaaccaggactcgatgatctcaatgccatgggatcttcaaatcgcctcaagaacacccaagcagatgataaacaggtaaaaggtaggtttgatgggaac

SEQ ID NO: 58221 - DNA, 1485 bp, Arabidopsis thaliana landsberg
tctttaacgtatcgtatgactttgcgtgctaagacagaggttatatggatcccaagtgtcattcgaacttgtgatttctttagctttgtcctaatatatatttttcacttgaactcccaatacttagtaaccctctttaatatttacattactgtagacgatattattatctatctctaaaatatttttaatatatcataaaaaatcatcacaacaaatactattttatgttatgctctttattagagaattattacatcattttaccaatgggaatttgtatttcttgcagtagataaatacaaattactatataagtattatttttttcaaaataaagttcagtatttggaattggagcaaaaaagaaagagattacatatagtacttcgtagaaaataattgaggaggggaagacgacattttggatgacgtgttacagtgtaagaaaggaattatctggataatggtgggatcgtccgtactgtaatggggttcaattaaatattaaggatttgcacgcgttaatggtggaaaaataatcatcactaagtatatattttaataactaagttcataattattacattcttccaagaataatctccttaatggccatcttaaagctcaaacattaaccactgagatgtctctacgtggtgataaaattatagaaatgataaagttttggattgtctacttttgaacccaaagcctttcacacacttcggtcccctttttcccatatacaggtcccatagacatgtttcctaaaagcatcatgaatcggattatccattttcttcttcttattttatcatgctaaagtcattagataaaatttttaatatgttatgttttgtctgcttgtgtgacatatacagttttaattaattatagtatgaaacttggtcgtggaaccaattatggttgctttggaaaattcatttataataaatagagtgttgtttatatagcatgattccatgaagaaaatcacttttaattagtgtgtaatcgtctttcaaataaattatcctccccaaaaaaatgatttgttattaatttgattctgaatttagaaattatcagcattaatatagtatcacaatcccaaaatagcaatcaaatttactacaaaaataactatttcctaaactctccaatatgtctaaagctgctaatattttaacaaaaccttcttcttcttttttttttcaaataaaaagctttgtttataacaaattcctttcacacttttaaattcagaagctttgtattttccctttactttgtaaaatagcttcttgtctattcagaagcttccattgtcgtggacttgttgatgttgttgtaagagccagaagtcttcatcatttccaatgttccaaaaactgtccgaataatttgtgccatcccattaatattttcaaccaattaaggtcactgtgatcttgcatcttcgtaaaatctccgtttaatagt

SEQ ID NO: 58222 - DNA, 1053 bp, Arabidopsis thaliana landsberg
atacacattttctttccttttctttctctcgcctataatctatatgcactcctagatttgagtccaggtttatttattcgttaacaaactattatactacaaatccttattaacaaatacaactttttctgaaatactaattttctcaagtatctaacacaaatattttattttgtaacaaaaacatcaacaataatgaaaatgttaacatacatcacacaaaaggaaaaaagaaatatttcatatataagagaaacttcattaatcctaacgtaaattatgtatatatattgaagacaaaattggatctgtccctcttggaggacatcacgaatgattttgatttctgcatgaagctggcccaagaggaaaatctcgtctttctacctggtaatcaatatgaaactccttttcaggtaagcaatatttataaatataaaaattgagagatatgggttggtttggaatataatgcaggagaggtactaggactgaagaattgggtgagattctctatcggagtggagaggtctatgctggaagatgcattcatgaggctcaaaggcttcttcgctcgccatactaaaacacaactcacttaaaaactcagcttcattctcggaacctgagaccctatctttctatatttttgtattactctgttcattttgttttcgaaacgttgtgtgtgctatgcttttctgttggaacgtcgttttattcgaattaaacatgatgacgaagcttttaaatatatttaacaagattcgatatggggtcgagaattatattaaaacactttgactaccatttatttattatgatacactttttcaaatttacttgaccctaaaatttttggatatcaaattattcatcttacactatatacactggtcaattttggatgaaacttatatgaataatttattaaaacttattacgataaggctagtccgaatccttcttacacgtactttgaaaaaaaaaacttgtcatttgtaaggcatcatcaatattcttacgttcacaatcatcttcttctaatatatg

SEQ ID NO: 58223 - DNA, 1378 bp, Arabidopsis thaliana landsberg
agaaaatatacgactcacctggtagtgatggaaacgctcttgattcggagaatgtaaattcaccaccctaatcgacaaaaagaaagaaacttgcaaatatgtctcgaaaggaatgaaaatgcaagaaaataactaaagatcttttcatctaccaaatatgtagagataattcttccaagcaactgcttgatgagagctgcgaggaggtggactattggggcttgaaactaacttccactcctgcttctatacatcatatcggtagagatcaccatatacatatgtctgcatttacatggaaaccaatcattatcatatgactatataatcaaacactccttaacaaagaaaatcaaaactctgaagaaaaaagattgtgcaaagctaaccttctggccattataatattcaccgccatagagtatcaactcagtctctttcaaaggatttatagtgagctgcataaatgtccatcaatcagcccagatttggcaaaattcaatagctttagatcaagaaagtttcaacctttaagaaaaagaaaaaagtaagagcctaaccgaacagtttgacctaggagatggtgctgccacattttcctcaacatggacctctttcttcttagcctcctccttctgaatattcaactggtaaacaacatcaaatattagagacccctaaattctgccaccagctctatccaaatgatagaaaaatatcaactttttgttgttgttgttgttacaattattatactaaaagaaatttcttttaatcactatactccataaaactatgaacagagcagaacccaaaacactgattcctaagcttaaaccaatacagaatctgagggagagagtaattacgagaatggcatcgatgtcatcttcaggagaaagctttttgccctctcgacgagctttcttctcatccgctttggcggtttttctctcagttttctcctttcctttaccaggcttcttcgtcttcttccccatgtttgatgtgtgtttggaggctgagagcgaagattagcgtttacaatgaaactagcccttgttctgtctacagttctctaccaaaggtagaggaagaagatgaatataccaggccaggcccatttcttatattatggagggaaaattgaaggcccatttgtctcttctttttcttattcttaatctcacaatggagatttaaaagtgaagtgttaggaaaaagtttacaacggtgcttttaactcatgatagttttgcgatattttgtagttatgttaggatttcaacttcaaatcaaaattcattatagagaaagaaaaagagattcgttcaaacttataggcatttattctcaatgctagaattatgtataaaac

SEQ ID NO: 58224 - DNA, 516 bp, Arabidopsis thaliana landsberg
  unsure (1)..(516): unsure at all n locations
gtttacatcgttccctaatatatattaaaaaaaaactgtcgtatgactgatttatatttttttgtaaaaacttaaaggaagcctaagaaatatcttgtgatatttttgacaaaatgtggtatatatctttttataatatcatttataaagaaaatattgattacatggtgaaaaacattttgctagcgatcaacaaaattaaatagacacatgttaactgatctcatacgaccttgaaattttaatctttgtgtcgagagaccgatctttatgcaaaatatgaaactacacatggtttatgcacggaagatcacattgcatgtataccatattataaaccaaaaatgatcaagaagaaggcgaaaacatttgggtaaattntgaatttcgatcatgcgattttttagctcatcatcaacagacaagaaactatcttttgtactgtaaatactaaatacaaaataaaatcttcatcattttttgcatgtgtcaaataaattacgcgaactttttttt

SEQ ID NO: 58225 - DNA, 535 bp, Arabidopsis thaliana landsberg
  unsure (1)..(535): unsure at all n locations
ctctgacgttttagctcaccacgacgctgagttcgctgtttctggtccactacgcgtgatgcnnnnnnnnnnnnnnnnnnnnnnnnnnnnnnntgcttgcctctgcgtcgtcgcttcctattccgcgccgtgacatcaccttgttgctgaactcatcaacaccgtgtccgaagccacaactccttattctacaacgaacatgagatcaagaaggtgaaaaattgtgctactctctaaagtctaggcacaaattcgcgtaatctcttgtgatgatttttatttttaaatctactagcaattgttttattagtttcatacgtctgttctaaatacttcaaagttagtatttacgattgttcacgtggctttcatactagaaatgtttataattaatttagctttaatatgtgtcgaatgataattgttagtagtattctaagtgtacacttatttgcataaagaaatagaaatcctaagccacgtattttcggtcgaatgaaaatatanggtttactattcacatgaatgtatcata

SEQ ID NO: 58226 - DNA, 532 bp, Arabidopsis thaliana landsberg
  unsure (1)..(532): unsure at all n locations
ttctttataattctgaaacatttaggaaattttggggtccatttttattcggcgcgatatacgcctatgtcgtataaactataaattgaaattaacggttcaattaaaaccaaacttaataatttgtctaagcataattgttctacaaatgggtaaacattttataaagtcattaactcattatacagttagggatttaaaaataagaaatactcaacttcggatttggtaaaagtaatatatttaatcggctacgtagtgtgcaaagatacttgccgtccatattgaaatcatgaaaaaaaaactattcaacatcaaaggatcaaatcaccataataacatgaaaaataagttcagttatatttttaatttgtgtaccaagttatactaagactacattatatatgagaatttcgagaagctatcnatggatatggtctaccttctatgcgaaccaccgagttgatgtatacaatgtggctcgagtggcgaagtaaacaccacaccttagtcttcaagaccaagtcttcat

SEQ ID NO: 58227 - DNA, 561 bp, Arabidopsis thaliana landsberg
aaggccctagaacaaaatagtagaaagttcaacaagaaaacaatacaattactttataattttaaactactcctcgctcgtaattaaccacaagattttgccgcggtacgctgactctgtatcaaaagaaatatcccgcacgttggagctagtataacctatagatcataatctaatttgttttttttctttaagtaattaatggtaagaaggatgagtttggtaaaacctggagtgataagacgttggtgtaaggcttattgaggaatgggcttttgattcttcaccagaacaaaggaaatattgttacatcaatatctgagcttctttctcctctatgaccatgctttagttagctagttgcatacgtcaccaaacccctcataaatatttgtacttcactattcatattgtggtgttgtgaccaaaagttaatagtttcatctggattttcagtggacaataaccaaaagtacactacaatcacaactcttggttacacaaaaatatttccagttttaaccatagtcgtacacttttggttatatttttatcccgaga

SEQ ID NO: 58228 - DNA, 286 bp, Arabidopsis thaliana landsberg
tccaatctccccctcatccccctcacatataataaacagaatgaacagaaaattgcctagcaaagactaaccacatctagaaccacaaacaaaaggctccgactgcaaaacccaacatagaggacaaactcaacataatgaccacaatggtgcgcaggaatgctgaaaacaactcaacatccatatatatgcaaagaagatgaatcacaccaaccacttacaaagcacacatagctcaacgtaccgtagcagaagaaaccaccttcaaaatggaacaaccaactgc

SEQ ID NO: 58229 - DNA, 842 bp, Arabidopsis thaliana landsberg
ttcttaaacatactaaacacaaactaaatttagactaatacatactcaaattaacaccctacttgtttctcacgtgcaatatttggtacacgccaaataggtgaactacaatctaaaaacgcacgagaaaaaacgcatgacaaagaaataagccaaataggttgagtacaatctaaaaacgcacgagaagagtatcgattatctcgtgtctaaatttaattccggttgctcgctatcaaaacaattcaagaggagttattattctctaattcaccttatagaaatctttgggattatgtggctaacccaagttaaaatctaacgtactcattaatacaaggtaagtaatattaaagttagtggagaataaaatctgttgaagaaaggtgaggaagtgcaacggaccatgtttgacacgtgagagtcaaaaaggcgataaaaaagtcgtcaacacacacactctctctccgtctatatataaacatcttcttcacagtccccacaaagtcctcttccgttgccttttcgctttctccgtacacttggccttccttctcgcgatcaaaccctaggtcccgccattgttggtcccagatttcaatcgaagctccaatttcactaattccaggtgaatcttcttctactatttctcttccgttagtttcatgtcacgatttcgccggaaaaatgtgatctacactgtttcggagtgaaatgtgaagtagattttgttgcttcttagctagtttgtgattttctcgaagttatttctgtgtttaattcatgaaaagattttgggttgcttttgttgttgcctctagttcgttttttgcatgttaagt

SEQ ID NO: 58230 - DNA, 450 bp, Arabidopsis thaliana landsberg
  unsure (1)..(450): unsure at all n locations
atacccctattttttccacaaagaaccaccagattaccaccgaatattataggtttaggaaaatccagaatttgttgagactaaagagatcaaattttcgatacaaggttttgctcaatttgtattttcataataaaattctttatttcaccatagacttacatgattagtttttcttttaataaaaaaaaaacacgcgacatgaaaattatattatctcagtgttgtcgaatttgaatttgaattttgagttaaatactacacatttgttgacaacttattaaactttataagtctgctacaaatattgtcaaatgtttactaattattggaccaaaatcctctaacttgcaaatttgtatctacatcaacttaaaaattaggaatatgcgacccanaaaaaaaaaactaggaataataataaaaaaatggaatgatgtggaggaagct

SEQ ID NO: 58231 - DNA, 551 bp, Arabidopsis thaliana landsberg
  unsure (1)..(551): unsure at all n locations
ttttaaatcttttcacattttttctctaataaaagggaaacatgcacattataatcagttgttcaccatatataaaaaggctcgccaaattaagatctggacatacttaaaatgggattgggctggtaaatattctaaaaacattccttaaaaagcccactctgataagtccgcgacttcgaaactccgatgcagaccgaaattggttctatagtttgggagagaatgaccagaccggttcaatcaattttccttcgatggacccaaccgaataacttccatttggggacacaacttaagcttgtaacgaccagacattcaaagagttccgtcaaatagtaatagaaaaagacggcagaagaaaatgtggaaaaataaataatacataataatagaaaaaatggaaaaataaataaataatacaaaagactaaagaagaaatatagaacaataaacaataaacaataatagaaaatatcaaaaaaaaaacaatanataataattgaanaagactaaagaatagatatgaaaaaatcaaccataattaatag

SEQ ID NO: 58232 - DNA, 104 bp, Arabidopsis thaliana landsberg
ttttgcagatgaacaaaacattctggggccgggggggaattgaagacaccgtacatgaacaccgcgttctaatctagccattagcacacaggcatgtgcacccc

SEQ ID NO: 58233 - DNA, 624 bp, Arabidopsis thaliana landsberg
  unsure (1)..(624): unsure at all n locations
ctnnnnnnnnnnnnnnnnnnnnnnnnnnnnnnnnnnnnnnnnnnnnnnnnnnnnnnnnnnnnnnnnnnnnnnnnnnnnnnnnnnnnnnnnnnnnnnnnnnnnnnnnnnnnnnnnnnnnnnnnnnnnnnnnnnnnnnnnnnntttgttttttttttatttttttatttttttttttttttttttttgttgtttcttatttttttttttttttttttttttttctatttatcttttttgtttttttttttttttttcttcttttctttttttttttttttttatttttcttttctttttctttttgttttctcttttgtttttctttttttttatttttctcttctttttttttctatttttttttttttttttttttgttgttgggggggtgtctttgtttattttcttcttttctttttttttttttatctctattctttttttctattttgttttttttttatgttcttcttattctttttcttttttcttttttttttcttcttttttattactctttttttttttatagttttttcttttctctttcttatttttctttttgcttttttttttttctctttttatttcttttcttttattttttctttctatttttctttt

SEQ ID NO: 58234 - DNA, 989 bp, Arabidopsis thaliana landsberg
cacaaactctgattaaaactctccagataaagaagctgatattctgtcttaccatctcttaaagaattgtgtttcacaggactggacatggtcagtaggttgcaatcccttttccgtcacttctcaaggttggctcctttcacagtttcaatctgacacaattgcccggagctatatgattacagcgcttgaagaatcaatacaagctgtcaattctgggattcatcttttgcggctggagagaacgagtatccttgggagattttttatctctgttttatgcctacagaacagtagaggttttgaaatatgaagaaaatttattacctgctcatctttatttgctagtgttaatatccttgattcagaaacaagataaaaagacgtttaagctcttccaatcaagggaacgtgagctgatgaacaagtacaagtacgtggttagcctgtggagacgagtgagtacacacctctgttcctatagtttgatttatacggttatgaagcctatatgttactggaaggcttcaaatgatgtgtatactaaatgtttaacagctttcgaatgttgctggagaaacacgctatggggatgccatgagatttctgcataccttagaggaagctactagctcgtaagtacacacattttactcttgctacagtttttttaaaagaatgatttgctaatcaatcaggctttccattttatcagatttgtaagagaagtgaatgcaacagtgggtgttttgcacccaattcactgcacaaaagagaggaaggtgaaagtggaagtggacatgacaacaatacctgcctttatcatagtactgattttactttacgctgtcttaaggccaagagctcctaagccaaagatcaactgatgtcaaaagactcccccatacaaatttttttgtcactttctgagacagtaaagttcatcactcttctgtatctttacttgaacaagaattgttgtaatctaa

SEQ ID NO: 58235 - DNA, 1127 bp, Arabidopsis thaliana landsberg
ggcaccgaaattaaatgtatcctaattttttcctctttaaaatcaatacagaaacatgttatgatggaaagacttatcttggatcatgcaaattaaaggaatttatgaaatctagataccccaatgaaacaataaacaatgaattatttcaagacatttagattgaatctgaaaccagcttagtacaagaggctcatacctcagagacagggcttcgaggagacctacgatttagaacttttggactcttatcctttggtgttctgttagtagctgagataggagatgaagaggattcaggctctagcgctgcgatcttcagtggccgagcagctcgaggagacaccttcttaggaacatccggagatccatttctgacacaaaacacaaaagaatgacaaattgtaaaccaagaagatatcacactccaaagttgcaagcaaatgagtcagaaaaccaaaagagatcattgatggtcactacttgttgctacatagatttggtcttcttgttcgataaaagattagagaaaatttgtgataagatttgattaaataggaaaagaaataagtattcaggaccacaagaatgtaaccttcaagattcagcgttgaaaaagtgcaaaactcacacaagacaatcacaagagaggggaagaatcagctataaatgcaaagaactatacaaagccaaaaattaatatttaccttgccttttgggtctgcatactgtaatattacttctccaaaacacaggatgaatcaaaaccttgtttatacaaaaggtatttttagcctcctctttgcttattcaatgtagcctgacccaccaagaattgtagagaggtcatgaatatttaatgcagaaagatggagacataattaagaatccaatggcagagagaaaacatgataggagttattacagagaaaggataagcgtaaaaaaatatatctttacgtctataatcaaatccactaccagaaatatgatcatcccaaagaagaaacaaaatcttctattgttcttctaactagtgtcttatgtcagagtcagacattgagattcgttggattgtgcattaataccataaagccgcattaagatctgagtgcatgccatcgtgt

SEQ ID NO: 58236 - DNA, 1002 bp, Arabidopsis thaliana landsberg
ctcccaaatcattgtcgggtggaaagcaaagtggcagtacgcacgaccgggatctatggattttatttataataatggtgagatcgtgtgtattagacaaaagaaagttaaaaagaaaccacagatttctgcaaacttgttcacatgaagacagagacaaaggaatgaagcaaaagccagccaatgtttcacttactcatagactttttgatgtgataatgtccataaggaagccagtagtcttcttcccaaatcaattcaaggaaaagcaaaagtacacaattatttgacgtgaaaagcattatagaataaagttatatatctcctcttggcatacccataaatcacaatattgatatacgttggagatctgaacaaataacgatgtccatgtggtaaaccatttttttttaggcatctctacaaaagtaaagttttaaaattatgtatttttcactataaaatttgtacgcaaagattattcatgtatcatattggtctagaacaatcaatagccgagatccattattgaaaagttatggtagaaaaaaacatatatacatagcttttatttatacatagctttcgtgtacaacaagaaacctctgattcttatacggcatatggttacaacttacaaaccctgtgccacagctatacttacccagggaaaaaaatactttgatatacgcaaaggctaatccccgtaactcaatggccgggatccatttatctaaccctattcacaaatatatatacacatttatcgtgcaacgcaagaaaccgctgattttaataggtaggcaagagttcttacaagccttccctcggatttctggcagttgtgtgtctccggacttccttaaaagctgccctaaccttgaaagctgccttaaccttacaccacctggctcttggagatcccaaattaacgtttgcaaaatgaacatcgaacattccagcttcttccgtctcagacacggtaagaaacatcgtttcaac

SEQ ID NO: 58237 - DNA, 290 bp, Arabidopsis thaliana landsberg
tgtatatttagtgtaataaaaaatctcgattttcgtgattgtttttttttgaatccgtgataaaggcaattttgcttcgtcaactcgatggccatttcattattatccattatcaaagctaagatagttaccaaattttgtttaaagccttgtttcgatgtatatataaaacatgttctctctcgttagtaaccaatcagtttcaaagcataacatgtaaaattaatacttttcttttctttgtcggccacaaacacattcctttgttttggaaattttggttcgagttt

SEQ ID NO: 58238 - DNA, 152 bp, Arabidopsis thaliana landsberg
tttcgccgcacggagagacaaggggggagccgcggccgaggatataaacacgacacgaacaactactaggacacaccgggagacaactaggaccgtggacccaatgtcggcgcactaagtgaaacacaaaacgtacccgatagattcatcgg

SEQ ID NO: 58239 - DNA, 581 bp, Arabidopsis thaliana landsberg
ttgcatttcggttcaaatcaaattttacatcattggacactaaccggagattgtggttaacgattaaatgaggattaaccgaaataacacgggtccctctctggttttgaaatcaggtatgtagagtttttgaaatcaggtatatacatagaaccctctaaatcagaagaaggttttcacttttgttgattgtccttaggaccactacaacaaccagagcaacaactctttttacttgtctcctcactcttctgcaacaagcccacttctagatcctctacttcatcctcctcaagcttcaccggtgaagaagtagaagaacggtaacatgtagacacggcttcacgctcatcgcgtagaagaatcatactattgagtatcacaagcaaacaagtccccgcatctgcaagaacagctgcccaaaccagagggtaacctacaaaaccaagaaccatgattgctccttttatgctcacagacaaaaccacattctcaatcactttcttatgacttctcttcgctagtctcatccctttagaaatcttccttatgtcgaatgacataagaatgatgtcttctgt

SEQ ID NO: 58240 - DNA, 148 bp, Arabidopsis thaliana landsberg
ttttgcacaagaccacaacttcctggggacgcggggaaaatcttgacaccatacatgaacaccttgtcctactcaatctaaattcacacaggcgtgagcacccagacgaacatagcatgtacagaaaaaccattccaaacactactag

SEQ ID NO: 58241 - DNA, 217 bp, Arabidopsis thaliana landsberg
cggacctctatatctgagacggtcctaatgttggatcgatccacaggatccctttggctttggagctctggtgtctgcggtcaccgatggtatgaaatcaaataagagacaaatgccattgaatcagaatccccagccgaaagccatgatacaagctgtacggccactgacattccccgccgaggcggtccagtgacgtgggtttacattgggaatt

SEQ ID NO: 58242 - DNA, 1120 bp, Arabidopsis thaliana landsberg
ggacacactgtaggtgattctctaattttatcaagaaaccttggtgccgtcttttcaaatttaaatctctccgaagattcaagcgcttgaacttcaaaggacgatcaacaatcaaacccctatcaacttcaggagatggcatttggttcgccaattcgggatcccacgagacaagctcaagtgctcttccataggaagtatccacagtcttgaacttgtccggatagtcattgcagagccgagacctgaaattaggagggaagccaaaatccggggcaatgtggaccagtttagacaaaagcaacctgcggtgagatgacaacattagtagcttctggagcttagtagacaatttatcagagatctcggacttcagattcaattcttgcattgcaagggatgatgcagcagatgtcaaacgaacacatagttgagataacggcttagtggcattcataggcaaatgtggcgtaggtgtggtaaaaagttcaaagattgtaggataccgacggatcattgagagaatggcccgagggttttcgatgcagaggtaagatcggcatttgtagaggatttgaattggaatgtaatgcttcggtttagagaaaagtaaagtattcaacttctgcacaaggcgaactctgatctgcttcactacatgtctgtctaaagatggactccgaacaatcttgtgagctgaacatgagatgttcaaacacagactgccgagtttctcggaaccgggttccgtagctacgtgacttctaccaatctccagatgaattgaaggccggaagaagctggagaaacagaagagcttctctggagaagacggaaccagatgaataagcgccatcatcatccgcataatctgtcagaagttcatattcttgatcctaaacaaaatcaaagaaaggatcaaattctcataccgggaaaacccaaaagctaccaatagacagtacgaattcagaagcaagcagctctgtcaggcatgtatacaagcacatggtgtgcacctataagcagctgagagaagacagttacaaaacttgccaatggcatagtcgacataacaagcaaacatggcaaagagaggagagattggtaggttaaaatc

SEQ ID NO: 58243 - DNA, 1189 bp, Arabidopsis thaliana landsberg
tttgatgggtgtttatctctgcaggaccttttcccataatatcttatctaccccgtaaagaattagaatttgttcaaaagggccttaaggtatgatgatataaatttctctatatttgaaaggcgtctttaagctacatcctcctatgtcatttcccctttgatatgttattaacttattattgaagtttatcttcagttttttgctattcattgcttaattcagtaagaaaggtttgtgcagttagcgtttgaggcacatcatggtcaaaagagacgtagtggggaaccattcattatacatcccgttgcagttgctcgtatccttggggaacttgtgagttgcgtgatacgttgtgaatatggattcacatgaggattagttggaaagcttaataattacttttgtacttgtataggaattggattgggagtctattgttgctggattactacatgacacagtcgaggatacaaatttcattacttttgaaaagatagaagaagagtttggtgcaactgtgcgtcacatcgtagaaagggagaccaaggtctgcctatctgtgtttgctacaatatttttcctatcctattatagggaaagaactccacgcttcctgtgcgatgaagttcattatttataaaagtttttttccctattaggtgtcaaaactgggaaagttaaagtgtaaaacggaaagtgaaacaatacaagatgtaaaagcagatgatttgcggcagatgtttctggcgatgacagacgaggtttcagtcttttaagattttgtattagctggtgtggttatatatttatcagcatgtctaactgcttcaatccaggtccgcgtcattattgtcaaactagctgaccggttgcataatatgcgaactctctgccacatgcctccccataagcaggtgattctttcaagtagttgagatttgttgcccatagctccagctctatgtttcatttgggataactaatgaatttgtgagtttcgtccagtccagcattgcaggggagactttgcaggtctttgctcctttagcaaaattattgggaatgtattcaataaaggtataaccctttaagtattatttttgcttgctataattcttatggaaatattaactaggtggccattatttccggttacatcagtcgaaatgtatgttagtgtgcatcg

SEQ ID NO: 58244 - DNA, 323 bp, Arabidopsis thaliana landsberg
aatatggtcaattaaaaaatcttttaatatattatacagtttttaaggaaaatatttcatttttataaagctttgatatacacaaatgacatttgtgtttttctatatacaccaatgacatataaaactattgaatgtatcaattggcgtggatggtatttggctatttgccttagagtagtgtgtataagataagaaaatgcgtatttatatatatgaatgtattggcattcttacaaaattacatatctagatgattgaactcaaaaccaagtaagattatttatatacacactattatttttaggtaactttttgtattt

SEQ ID NO: 58245 - DNA, 1313 bp, Arabidopsis thaliana landsberg
ctctcgatttccgtttgtcggaaaatctctcccgtgatcggcgtattgtgaatgccgctcaccgagatattctccggtacgtccgcattgatcaatttcgtcacgtggctcactctgtttcatctgttcttttcttattttttagctatttttgttgagatttgttcgttgaaaattatggttttgtgaaaagaacccaacttgttttactgaacccatgatgaaagttataatcttttgatctggttacctctggattttgattacgcatacagtggaacatgcaattgttattagcattggttatagattggatttcggatacatgccattgaatcctttgcaatgtttagtttgtgttacggattctgtggaaagaaatcttttttgcaagttccgtttgtttcgcatcctcttgttactgttcgatcgatcaggctacaggtttcatcagtttcttctaaaagttgtaagcttctttttggtgtgccagattcttttccccagtgaggacaagtgttcagttgacttattaggaggtggggtttgaataagttacaatggcatcaattcttaatcaaacccaggagttgcaagaatacttctaaggttcttgggcatttaagatgtgaaaacttctttctattccccggagaaaatactttgtcagatggtttgaggggtgtgttatattttctcggtcttgcctactgctttattgggttgtcagccatcactgcacggttcttcaagtctatggagaatgtcgtgaaacattcccgtaaagtggttgcaattgatcccattactaaagctgaagtcatcacatacaagaaagtttggaactttactattgcagacatcagtttgttggcgtttggaactagcttccctcagatttctttggctaccatcgatgcaataagaaatatgggggagcggtatgctggaggtctggtggttgttcctttcttccttccaaaactctagtttttacttttaagttcatgaattcttatatcatgttttgtcatataggtcttggtcctggaacacttgttggctcagctgcatttgatcttttccccatccacgctgtttgtgtcgttgttccaaaagctggagaactgaaaaagatatccgacttaggtgtttggctagttgagctcgtatggtctttttgggcttacatctggctatacataatcctcgaggtaactgtgaaaagcggtttaaacagaaactgttgagtatatactctaaactgataaggtctaaaaatctgtttcttttcacgtctcgcaggaatggtc

SEQ ID NO: 58246 - DNA, 670 bp, Arabidopsis thaliana landsberg
cctcaaaactggatcttccacttgctctgttattgcagctacttgttccgtctgctcagtctccaaaccctgaacaggaacagattcagcagtcggtgtctttccttcatcactcgccccacagttctcagcagaagcagccactggattgggcttattcacagcacatgaagcatgaatatgatagttacaagcataacagttgtaagaccaaaacctaccatccatagtcatattacaaagattgcaaacaagctgattcccgaaaccaaactgagtaaaagacataggaggagtactgttgtagacaagaagaagactatgcataggatgagactcatgaaccaagacctgaggcaggtgagcgcattgaacatgaaggtcaaagtcacacaaaggacaacagtaagagaaccctttacctccagtgcagccacaggctctgcagaggaaggtaccagcgctgtaagttgtgtaagggactagagtcaagtggtggagaccagcgtgagaaggatgttgcatcccacgcactgcgttaccacattgctcatgaagattgaagtcacatgttgaacagatatacgcggtttcagattcagagatggctgattcacaacctgagcagattactgaagaatctgagcttttatgtggctgaatctgtaga

SEQ ID NO: 58247 - DNA, 1893 bp, Arabidopsis thaliana landsberg
cattcgtcaattcttccaggtaaagcctacatcaaagtgttttcttttgtcatatagtagatcatgaagtctgcacacattttgtgaagtaaacattaacaaaaaagcatcttaccagcacgagcagcagctttagctacaagacgttcaagcagaaactttgctggatcaccagaaggattactagaaacgaaggaatggacgagcccaatcgcttcctcgttgctgaagaaatcaaacaaaccatcgcttgcaactataacaaagtgatctgattccgttatcttgtgaactctcatcgatggttccactgaaacataaggcgggctcaaaaggttacgaacgcggaggatccccatgagtgcatcatttagtttctcctgcaagttaatagagaagagctacttgatactttttctttcaagtataaaactcataacttaaaagaataatactaataccttcttcaagtaaccaactccgagagcacgagtaactttaagctttcctttgattttcccaccaataacgatcttaggatcatcaagatgctcacttaagagtctagcttcttcgacttcgttatcaactgtatgatcctctgtgagctgaacagcttgcagcttcttattaccattgtaggtcgctagaacggctctgctatcaccaagattaaggacgtatagatccttcccaaccaggagagtgaccaaaacacaagatccaacggatactaaatccggtctttcttccatttcttgctcaaccatccttaggaaatcggtttccgcctgaaaaagcgcacggttcaagcaatctagtactccttgcctgaacaaatcagtggaagagtaatctacattacttatatttgataacaattccaacttttcgccatcatcatcggactttgtttgcttcatttgacgatcaagcaactgaagatgaaacacaatggactcatataaagtacatgccaagaaatcagcagcatctcttccattgaatccatcatagatagcgcaaaacaaccaaccattctcctcagagcaaacagcttgaactctatcttcccctgcagcaccacccgcaacttgaacttccatagcagagagaagaaacccttcattaacagaagaaggagaactcattgacgtcaagtaacaagattcaggctcaggaggactcggactagtagacgagctgcagcttagactcaccatacttccatggagagaaggagagagtatatcaagctttgaaagcgcaggggaagatggaactttcctgaaagatttcggagaatccagaggcggcaatatctcagaaccaatgactccattgcagatattagtattggctaaagtcgggtttccacttaaagcagctcttgataaacaagagaaactactagtcttttgaagcctaaacccaccaagaacctctcgaccatcagcaattttatcttcagggattcctatcttcttattattgcattgataaccaaaacttatctcaatctcaccatacggatcagtcccttcctgcattttttttcttcactttcttgcaatgttctgaaacaacaaaaatccacaacaaaaccataaagtttagtcctttttttaacttgaacaatcctaatgaaatcttaagactaatacaaaaacctcacacttcaaaaaagttagctgctttaatgaccttagagacaaaatacgtggtgagagtctaagcacatatcgaaagtgaagatagatggggccaaggtaacgaacagttacataagttaaacgtgagagttaagaaaagaatgatatttttcataggaggccattaaatgcagaccacagaagttgttgggaaatgtttcagatagaatgtttatgcaga

SEQ ID NO: 58248 - DNA, 1071 bp, Arabidopsis thaliana landsberg
taatatatacaaaattgtagtctctctatcacgctattggtgcaaatcttattattattatattaaaattttttatattacaatgtggaacgaatggggaacaaaagcaaggtatgaaacataaaagcgattaaacgagagaaaaacattttcaatgcagaagatgatacaagaataatacttgctgaaaatttgagaaagcaaaatatgtaaagactgaaataaattatcttttataatccacatagatgtaccatgtgaagtgaaagcaaaaactttgtcaagtctatctctttctttagttgttgcggataattttcactaaattttcacaatttcttttttctttttaccgacgccaagctaacaaaatttcttggctcatcgcaccattcgctccagctctgccacatcagctcttatatccatgtcagcagctcagtagtctgatgtgatgcgaagcatctttttgatcccaacagccaactattacagaatctacatctacaattcgttcttctagtacaccatcccgcctgaagaactaacggccaaatgagtagtgtcaaattttcacaaacccaatccaatacgaagcccattaagtgtcataagttccacaaggtaaactatgtatcccacaaagcaagggaaattggatgatgagctatcaagttcgcaccagctaattaagcacaaaagattcatatcacaaaatcaaatttcaaatatcaaggtgaaactaaaggatctatattttgatttggatatttagtgccgactatcaaagatgaaaagaatcaaactccatattgtttagttcgagtagtgtcctcttatttacgaaagctatgaccctaattctctttgacgatttgtaaaattaccacacaagattttgacatccacaacaatagcaattatctattaaagaacaaaccaaactactatattaaagaaatgtgcttattacattcaaaacacataatacgcgttatttatttaattactcaagacgaacttggtaccattgaacagaacccactttctcatcaatttctagttcacata

SEQ ID NO: 58249 - DNA, 1235 bp, Arabidopsis thaliana landsberg
gaggtttgtgctccaactctcatttagttattttcctttgtgtttgttatatggtcttctgagtcatcgacttcttgttgcaggctactgaaggtcagtggaggaaagaggatttaaagctagagatgttgtcttgtatgctggatgggaattcagacatgtctcacccgttcgtggattcaaaattgtggttccggctccaccatcccagggtactataacctctaatcttagttatgtgaataaaattttttatttactttttgcgcaagactgagggcttcttataaataataggctgctgtacgttgtgccgcgctttctagtctaaatggtgttctcaaggatgatagctctaaagcagaggtatgtgtggggtactcattccaagtattttttgtttctttactttgacttcatgtcatcttactgttcttcaatatcttttttaccctctccatccagaaccttgtcacaattcaggatgctatactgcgtcagctttgggatgatgatctggctgttgttcaggctgccctctctttcgataagttgcccaatataataacctcttctggtcttctggatgctttgcttcatgtggtgaaacgatgtgttggcattctcgtatcaggtgaataaagatgctctgttcttttcttaacttgtttcaagtgtggaattttcatatgttcagttagtttacctcgcactatccattcttgttgcaggagtatcacataatgttcaactggcagttgatgttgttgctttgtctcttaaaattgctgtctcaagcttcggtaatcaaacagactctactgagaaagttacctctgcaatgttcccatttctcttaattcagccgaaggttctttcttgttctcttcattttctacagctatggcgaaagtcttgttacttctactaattgctgtaatcatgtcttttaatagacgtggaatttaaatctacttgtgctaaagttgggaaaggatgttaactggccacttttcaagaatcttgctgctgatgatggaatggtaaatatgagtttacgattttactatccttcaatactccaagtcgcaatcacaaatcttttaatggttgttgaatattattatcatgtcatctgaaaaagaaaaattgttgcagaaaacgctccccgatctcatgtctacaaacttatcaacaattagcaaggatattattaacgatttgggagaagcact

SEQ ID NO: 58250 - DNA, 1195 bp, Arabidopsis thaliana landsberg
ttcctcactcttgctcgagaactaccaaaagaagcgaactgcttaatccaactgcgacaatattatgcttgcgaggttgttgaacccccgcgtgttccaagagaaaaaggacgacattacttccgtgagaaagtggattttgttgtttttgatcctttctattcactataggcttaggagggccacaagagcgatttctgtgtcgtccgacacccgaatgaaccttcttggtaaactcttttccttggtcttcccctaatccatcatccgctactacttttacagttgcatcatcttcagagccagattcaaccagctccccttcttcttggatgacagacgttcactgcaccttcttcactgtttctctcaagctttaccctcttctccgatgctaccaagagcctcaaaacaattagagaaaatgactccatgactttgttctttcttaccactgtcccgactgggagatgtatgcgggcttttgcgaggcacctcagtccactggctagatttgtcagaactatcatgtacctctgatgtcactgctgctatcaataccccgactgccttaactggatttttgttgacattttcaacatgaactgttgtttcattccccgactcatctgaaaaacatatacgttcaaccaaaggcttctgcaggttcacctctactagaatcctagccacatccaaccttaaacatcgttcagtattaggatgaagcttgacaaatttcccagtcgtgctagagagaaaactcaagccttcatgggagtagagatgcgctggaacttctttcaaatccacccacaatggcatcgctgaaagatccggcagtgcattagcagacgttgggttccactcattgattaccaagggaatgttcgcaatatgccagtagcagcgtttcagaacatggtctctgatcctctcactttctattctaaacaaaacagtagtcttgtttaagaattaaacatcaatctttgaagatttttcaaggacagtccagattcggtttacagtagcgtgcacagatccaacatgtggggcatcccccatgaaaaaaccaaccacaaaacacttccacaatgacactgaattcgttacgacttcgggaaggatagtaacacttgcagctccgtttttcacgcaaaaatcaggctgaaaatcagagatagacatagga

SEQ ID NO: 58251 - DNA, 1132 bp, Arabidopsis thaliana landsberg
aaacagagagtatatgtcgttgtaaaaaagggatagggtaaaagttatctatttcagtagaaaaagtaagaaatttaaggggaatggactaaaatatcaaaataacacatctacgacaaacaatgcaattccataatgctaatagattaaacaactcagattaaacatatgtagtgtccaaaacaaacattacggaaaaaaacgttggtttattatgttatatttatccatttttgttgtcaacaacatttgtcaattatattaaagaaaaaaatgttcacgaattctaaaaattacaaaaattgtcactatttgtcactgatacaaaaactcaggatgacaatcaggaaattttgttttcattcttacaagaaatatgataatagtggtttgaaacatattgatttttgtattgaatttttttttatcaggaataaaatactagcaataatattactcgtagtaaactttcaaaaaaaaattataatttttcttgagaaaaaatagtttattttccagttaatagttttttcaaaaaaaatgaaagtagagtttctattatacaatgtaacatgcattatactacttcaagtagaaacaaattgtaatggtgagtaaatgtctttattactgaaccaattatattcaaaaatattttttttgtcacagtcaataaatatattttttactggattctgaaaataataaataagtatttactaaagaatgtccttttggtcaacaactctttttcacacacacagagagacacagtccctaaagaaacaaattaaattcctaggttgcccttttatgcccacattctgaatatatcccacatagacaacaagacacaaatggaaaccccactcatcatttttttgtatttttccttcttttaccatcataattatacccaaaaaaaaagttaaaaccttaaatttataaaaaacatgtgtttacttactcatttactaacactttcacacaattatctatttttaaaagaatcatttaatgatttagtactaaatttgtgagctgctttgcttatgtcattgaaagatttaccctgttaatagtatttatattggtggggtagttcataacacgaatcatattcccaaatttg

SEQ ID NO: 58252 - DNA, 181 bp, Arabidopsis thaliana landsberg
tttaacaaaaaaccacaactcacgggggccgcggggaaaaacaagacacccaacaagaacaacccctcctaatcaatcaaaaatcacacaggcataagcacccaaacgtacacaccctccacatagaaatcatcccaatcaccactaccagtgacaaactacaaaaaaaccaaaacccaac

SEQ ID NO: 58253 - DNA, 204 bp, Arabidopsis thaliana landsberg
tatactagttctaatccaaattaattgtatctgtatattaactgtgatcgaccatcaactataatcgtcatcgcgaatgaaattaagtaatgaaccaggtgataatgttttgtaaccacatgatgatatttttaaaaaaaattgttctactgtgtggcttttattatgtcacgttcgtcggtcggtattcaaagtttcagtttt

SEQ ID NO: 58254 - DNA, 836 bp, Arabidopsis thaliana landsberg
atgattatattgttttaattaagtttagtagtagtattttagtttggtaacacaatttattttgtgtaatctttgtgaaatcaaagtaattatgagaataagttcattccctttagtagaaattttactacagtatattcatgtacatgatgcattagtaacagaaaacttcaaatgaattttaattatatacttccttttttactaaaagatgcatttgtaacagaaaacttcataatggatttgaatgcatgaatcagacaatttttatgaattcaaagtacgatacataaaattgatctgatatgtattatttcacaaatgcatgaagcaaaacaatctttttcacaaagtgcacacagttttttttctatgttttgtgaaataaaagcatgttagaaaactacgtatttttattatgtagtatgtatttatgttgcttttctcatttctgtattaattatcataagatagatgatataacgatatctagttttgaaagtttacaaattataaacaagacttatttaagcactagctagttaaaccgggtaagactggagataagactcttgcaaggttcgacgaacaaaaaaaataaaaaaaaagaggttcaacgaacaaagctaggcctacaagagtacaaggccaagtctctcttaattacaaacaaatagaaacacggtgtaacatacaaaaaacacatggcaggaacagaaagcgaagatgggaccaaacggccgacataactgaaagataccggagaagtgaccaatctcatcctcttcaacttgttttgcaattagtctcctcaataattgcatagtatagtaaca

SEQ ID NO: 58255 - DNA, 580 bp, Arabidopsis thaliana landsberg
gagtggtattcaaaatgttctagacgtattattaatttagtaagtttaacggttttgacatactataatacatacactttcatcttttatctcttaattcgtctgaccttccagataaccatctatgacattttaagggaacgaaatgagaggcaccataatcatatttacaggtcggttaccctcctcatccgtgtgattgataagtggatcccaaataggattacatgtcttcgattttctttcaaaactttgtacataaagttttttttgttggtctgtaaatatctcttgtctatatcatattatttttattgttcaagcaattttaaaacacattttattctttaattatttattcttcctattataatattgatttttttttatttttaattatttattaattcataattcttatatttttttgttttttttatatctattttcatatttatttttcttattttttatttcttactttttctatattttctatatttctaatacattataaattataattaatacattttttatattattttattattattatcatctcttttatctataattt

SEQ ID NO: 58256 - DNA, 726 bp, Arabidopsis thaliana landsberg
agatcaatcgcagctcaaagactctacagagatacacttcattgtgtgtcttgaagttgaataagaagcatctaaagattccacaacggaaagcaaggcagcctttacccaggttaccaaacatagagaacgctccagcagcagaaactgatcactgcaggttcgagccttgtcagtcccgactatttttataactgatcaattatgagccaaaatccgaagatatttttccttcaaaattataataatcattaataagaaattataaatcgaaggcttgtatagtgcaaccttaataaccattaatcccaacgagtatagtaaattagccaactacgccatcttcccatcaacatttctctttatctttataaaatatgtgactgttgatagtaaacaagtaaatagagcttgatatctttttgtacaggtctcgaacaacgttagtcacatgagactttaaaaattaatcaaaagagacttaaaaagaatgtaggcagagggagatgaaagaatttgatagaattcagttggatataattagagacctaagctacagatttgaaggaattgtttaattctaacaggtgtaatttctaaccatttaatagaatttttaagaaattgcaaaccaaaaattataagaaaatataaagagaatgtcaaaaatcaatcgtatcacccatctacccaatctatactattcatattattcatctattaaga

SEQ ID NO: 58257 - DNA, 824 bp, Arabidopsis thaliana landsberg
aggcatgtcaacatcaattttaatgcatgaacagaacaaacagaacatattcctggacaccaacatcacatctagctaaacgcctctgaaaatctttggggcccaagtcaaataacacatatacaaacagtatagcacagataatctcaccttgcttatgataacaggagagttgccaatggggtcgatatttgttactggccccatctccgctggataatactttctgactatgttttcatacttttcaggagtaatatagaaaaacggaaaagcggctgggaatcctccaacagccaaattgggaaggggattaacaaatacatgatcaggctctgccatgagcacatagctgcaccaacagtaagatgcaggagatttagcaaacagtagaatgttagttggaaggaagagagaaatgacaggacttactcttccttgatggtagctctttcaagccattgcacgaatgcccatggtctattcaagacaacatacccctaaatacaagattacaagattacaaaaaagagtgaatcagtgataaaccatcaacaaaaagtgagaccaaatggagaaacgggaataaaataaaaattcttacccgatcaagacctggaggaagaggatcaaccacaaatgtgggtatttcatccatcaagttatcagaattaccggaatgcaaaatacgggtgaagccacccatatcagaaccaggaagagctttcttctgcttataccaataatacataatacgacactgccacttattataaggtgcatctgtagctgttaaggcaacatgaaaaggtgctggagaactc

SEQ ID NO: 58258 - DNA, 344 bp, Arabidopsis thaliana landsberg
tataacaaaaatatcctaaacaacctatatataaaaatatttttgtaaaatatagccaaatttgtgttatacagccctgcacgttgagactgttttttcgaaactcttatgtgtttgctatatgttgaacaaaaaaaaaagttttgcaatatcttattattggttgattttacttttagatagtttattgatgtttaatttaaaatgttaaataaaatatctatttatttatttattaactttttcttattattatttttacttctctaatagtatttcatttatttttttatttatatcattattctttaatcttaatttttatatttattttattttttttt

SEQ ID NO: 58259 - DNA, 1198 bp, Arabidopsis thaliana landsberg
gttaaacaaaagcttgacaaagtttttaggagaaataaagcaagaacactttgaaagacataagttacgataagtctggacgttacaaataaaatgtaatagagggaactagagatcgataactcgacggtaaagatacttgaaaatatttcaagaattgacagaatcgaatgacagttgttggtacggataaaatattcaaaaaatattatgtgtttagaaattgtatgactgtcaatttagaacctagttaatcaaaaaatgtaattgagggaaaatgaaataaaatcaacagtcgcttctcacacctttatatactttagcataacgtaaagtcgaagcaatccctagacatgcatacttctcttctacctttaatgactccatccccaccctttactctattaatactatatacttttctaaattggaaccatattgaatggggttatatataatcagtttttggattttttatttagcgtaaaactctaccttactacaccacaagttacaaccactttgacttttgaaactttacaagtaacagtattattaagggaggacttttcacttgaaaaatttgacaaatcattgctctgtgaacatcagtacttaaaactttttagtttttgtgttttggctgaaaaatagaccaacggagttccagaagagacggcaagttcttcaactagctgacgttagtcgtcggttcgacagtactagcagtcgctgattgatagtatactggatatagtttcacaactaactgttattttttggggacttactgttagttttgtctttagataatttagaaaaaaaaaaaaaaactgttagctttgtcattggcagctgctagtcactcaccattagctaatatttttgcaagaacgtctgccaacttttcattggtaactactagtcgtcacgttctaacagttactttagggagaacatgtgccaatttttatctcaaattttttaaaacttgtggtagtggccaaatcagtggcaatcaaataaatagcatatagagtaataattatattgcatcgcaagccttgtagaattgaagttttggggatttgattcatggatatgcttatgaatttgatcgtgaacaaagcttatatgtagtttcatgggtactttattttgtgtttacgtcacaagttgatcagttgagttactccac

SEQ ID NO: 58260 - DNA, 246 bp, Arabidopsis thaliana landsberg
  unsure (1)..(246): unsure at all n locations
ttttgctgannnnnnnnnnnnnnnnnnnnnncggggaaaatcttgacaccttacaagaacaacttgtcctaatctatcaatcttcgcagatgcttgtggaatcatacgtacataccatgcatatagaagtgatcgcagtcaatactacctgttgcatacttgatattaagtaaaactgattagacggcggttttctttctccgcttcgatgtgctcaccttttaccattgaactgtcttcctggag

SEQ ID NO: 58261 - DNA, 793 bp, Arabidopsis thaliana landsberg
agttattggaccagctgcaaggagcatcttgataccatcagatttcgattatcgaggatgattttcgcaatactgcttttcggactaggtatggacacttcgagtttttagtaatgtcgtttgggttaaccaatgtgctagctgcttttatgaagatgatgaataatatctatcgtgagtatttggataagtgtgtgatagtattcatcgatgaattttgatctactctaaacgccatgaggaacacgaggaacacctttgagttgtattggataagctgcgagaacaacaattgtatggaaagttaagtaagtgcagtttttggcagaggaagattggattccttgggcatgttgtctaagaagctggagtataagtagatcaggaaacgatagtcttcataactagttggacaacacctaagagcgctactgaggtccgtagttttttgggattgttaggttactatcgaaagttcatagagggatttgctagcatagctaagccaatgactcgactcactaggaaggatgtgaagttcaaatggactgaagtgtgtgggaacagctttcaaaagttaaaggggcatttgacagaaatacgaatactcgtagtaccaaagacatgggtaccttatgtggtgtatatagacgcatcgggaattgaattagggtgtgtgttgatgcaaggtgagagggttatcgcttctgcgtcgagacagctgagacggcacgaggttaattatcctactaatgatttagagttagcagctgtagtctttgctttaaagatt

SEQ ID NO: 58262 - DNA, 1361 bp, Arabidopsis thaliana landsberg
ctttggttccttattttcaattcagtctttaagatttcgtaacctttttagatttgatgcaatctttctattttaatacctttcttcaattgctgttttgccatttgcatattatttaactttctttgttggatcagtctgattctttcttaccaattattgtcttaatccttgattaaagaaaaaacaaaaaaaacaaaagacatggagtttcttctctttcttggatgtataacagtgtttctctatgcaggtaagggattgttgttgccaatggggtggctaactaaaatccttaaaggttctagccataagttttctgatggacaatgtaatggaagatatagagaagatagaaacttggaaggtcctcgttattctgcggtaagtgaactttactgttttttggttcattttgaattgaagataaaagggtttcttgaatttctgattcaggaaggatctgattttgacaaagaggagattgaatgtgctattgcactttctctttctgaacaagaacatgtaattccacaagatgacaaaggaaagaaaataatcggtaatgttgtttaattctccgttggtaatgcatagagaaaaacaaagagaagaaagaaagttatgtgtggaaatgtaacttgcttaaattgttttcttaaaccttatattctgtagagtacaaatctgaaaccgaagaagatgacgatgacgatgaggatgaggatgaagaatacatgagagctcagctagaagcagcagaggaagaggaaagacgggtagctcaagctcaaatcgaggaagaagagaaaaggagagctgaagctcaactagaagaaacagagaaactgcttgcaaaagctcgattagaagaggaagaaatgaggcgttctaaagcccaactggaggaagatgagctactcgccaaggcccttcaagaaagtatgaatgtgggatctcctcctcgatatgatccaggaaatatacttcaaccatatcccttcctcattccttctagtcacaggtaaatggttcaaaaatacattaatgtccatttcttagattttcagacactatcatctctagatagtgatatgatgcatgatcacattagctccaatgagtcaattttgtttctttgtttattttcttggaggatatgtgtcggttgccaagctgagataggacatggaaggtttctgagttgcatgggtggcgtttggcatcctgaatgtttctgttgcaatgcatgtgataagcccatcatagattatgaggtccctatacattttattaagtattattattgtatcctcctgattcttttgaagcttaacctgttcaagctttgtttacacgtt

SEQ ID NO: 58263 - DNA, 530 bp, Arabidopsis thaliana landsberg
ttaccgacaggtaacaccgaataaatcatacgatatcataaatatatatggaaatgaatttagatttgcaagagtgatcaaatcacaagcaacaaataatgaaatctaacgatcttatatatacgatgatatatatgatgtacaatgatgtgattactatattattaatttctgataagaatagatttgattaaatatggtatcacttaatatatgattaccgaaattttaaaatatgaatttaatttcaacaagctacattcgaattatattcgtgacatcatgcgtagggttccacttgcactagttaatttgtatatattgttcgtatacgtatataaagttataaacaactcttatattatatgtacatgtaccgttaagcatgggatcactatatatagattgaccatttcaattttatctttctaataattgggccatattcaacaataaaaataagaacaaaaatgaaaccatgcatatgccatctgcggtgaaaagtaacaaaccttcactaaaaagaaatc

SEQ ID NO: 58264 - DNA, 135 bp, Arabidopsis thaliana landsberg
ttttactgcttacaacaactctggggggctgctaggcaaattttgatgcactaccccatcaacatctcctagtgtatcaatcatcgcatatgcttgtggcatcatgagtacatacccggatatatgataccatgc

SEQ ID NO: 58265 - DNA, 1735 bp, Arabidopsis thaliana landsberg
tgatgttaagtttagagaaacaaagttgagtcacttctctctttctatgtattcatcaatctacaacgagtaaattagcaacaacaaaaaggaacagaacaaaacaaagatcagagggtctttgtgtatcaatagctctcattgttttcattcggaaaagattcgaacatcgcacgctggtttgagaccatttatcacatcactctgcttcacactctcgcacgcaataacaattggtatatgaaccttaaatcccaaccaatcaacactcagtttccctctcaagaacacatcaaccacagcttcaagcgtcttctctttgtttgtcagcaatgtagcatcaacatcatacactttggattttctgagtcttgtgaggatcttcaaggaggtaacatttcccgggtcctgcttgaatccagaaagtgttttctttccgaggtttatgttctcagaagatatatcagctttcataggactgtaatatagcaccgtcttgtcattattattagagagctgaagcaccgtgttcaagttcgcattcatcagaagatctgtcgatgatttagagatatccaatctcgagaacttgaggtttgtaacaagcacctgaggtagtatagatttgattgaagagtttgcagacaatcctaccaacaagacgattataaggacaacagaaacaaacatgcaggtacaagcgcagcattttctgaaacatccagaggcgcatattctcttgtcctcctgaccgatatgatccacaaaggaacccgattttctactccgatcggcctcttcttcctctcgaaagccagacagtctcgacgcagaaggaggccgcttaaaagacaaagcctttttcgggttttcaacatcatcaaacctgtttcgagaaatggaagggcttgagaatcttgaactcagatcaaaagaacctttgccatagctactatcttccccttctccttcttcctctataactttttcgagaccgcattgtttggcagcaaactcagggaataccaatgcaggatctccaaatcctgaatccctcctaggaggaggaggaggaggaggaggaagcagctccgacattggagctctgttttggatttcatgaaaatcagatttggtttctctctcaaatcacaaggaagctggttggaagataagttcaagggtcataattctcttaacaatagatcaaggctggctctttccaacagttatcattcgttaatctattgttggatcctatgtcatacaaaaacctaaatttcaaatgttctaaatatagcaagttcccatttttcctgtaacaagcttatatcacattcaccgaatttgcctacactagtctaccaaacgacttctcactttgaattctatcagatcccaaaaagactagacctttatgaatctatctttactcatgaaaatccccaacataaaaattgaaaatttgactaaccgtaagccataattttcaatttcttgccgtcgcagcgcagatagtcaggtattcggtggaaatcaacggcgaacagttgtcgttgccggcgtatcacttgtttcgatttgatcgtcgccggaagagaaacagaatttgcgggcataaggaacttcaatgttgggccttaatgggcttaaattaaaatgctattgggcttagtacgtctaccgctaattatcctttttaattaaccgtttattaaccaactaaagatcatct

SEQ ID NO: 58266 - DNA, 147 bp, Arabidopsis thaliana landsberg
ttttacaaaaaaacacaattttcaggggccgctggaaaaatataaacaccatacacccacaccttctcctactctatctaatttcacaaagtcataagcacctatacgtacatatccttcacatagaaaccatcccaatttctacta

SEQ ID NO: 58267 - DNA, 1181 bp, Arabidopsis thaliana landsberg
  unsure (1)..(1181): unsure at all n locations
atcaccagctcttttgcaaatgtttctacatgctgctattatcagttatcaagacaaacaagtgtaagatcctatgaatgtgctgagttgggggcacagaaagagtcggaacttaacaatccatgtaacttacgacaaagttaatcttctcaccttcttgggctttgacccgttatctccatcctctgaaacactaggtgacactatacaatgtttgcggggaacagttttcccagataagatctgtctttctgttagtttacgggaaaaccgactcttggaagtagcactgtcatcggttttctgatccgtgtccattaataagggacctttgcctctgcgcttatcagtgactgtgctgtcaatagtgatatcatctgacctctgtattgcttcactgccagatatattactatcaggatggccttttattgatgttgtagctgagtccgacgaaacttctggaggagaaaatggattacggacatgtaatggccgtgcagcatgatcccttttggcagcaagtatttcatgtgaggaaatagccaactctcgctgcaaatataccaaaccagtaacaggtcaaacccccatgtgtttcgctcaataaatggaaaattttgggtttattctgtagtttaacatatacctttaatttctccctcttgactatccgctcgcacagaaggcgtaacctctcaagttcaacctggaggagatttagcaaaattccaagaattataaattacttgataagagatagaaaggaatacgcttaacaaagcaatggcaaaaacattttgacttcgctaagaactcctaccctataatgtttgagacttttcagctcctctgcaccatgtttctgagattcggcctgcagaaatagtcagacagatataagcaagcttataatctaagtannnnnnnnnnnnnnnnnnnnnnnngataagagataagacctttgccttctgctccatgctgtgcttctcacagtacgccttatgcggatgtttaccaccaccagtcatatgaaaacccgcgcttctggcacaggaggggtggaatgtcgtctggcagttaccataactgcactgtagaatgacaaaacataagcttcttgttcaatctttgacccaacacatgaaatagatgtattcagataaaaaaaaaaaaaagtg

SEQ ID NO: 58268 - DNA, 1519 bp, Arabidopsis thaliana landsberg
  unsure (1)..(1519): unsure at all n locations
caattcagctgtcccgtccttgttccggcttagctttctcttgttctttcttcaagtaatgaatattggcaggattggcgctgcaactagattctaccaattcaaggtatcagcaacgcaaaatgttaacttcctattcaaattagaatcaatattgaacacagttttcatctcatgcatgcctatttctttttcttttctctgtattcagatttctaaacagtggtctgttgttgtgtcactgatttttctaacaggtacaaacaataagactcaccaggctatgccaaacaaacgagattgtaacagtcaacaagaaattccctggcccggcgatatctgctcaagaagatgacagaattgtcattaaagtcatcaacatgactccctataataccacaattcattggtatgccgatgtacatatacacatatacataaaatataaatgctttttaaacgaattctagactaacaaaacttgtttctattatgcgcaggcatggtattaagcaaaaacgatcatgttggtatgatggtccatcttatatcacacaatgtccaattcagagtggacaaagtttcacatacaacttcaaagtggcacaacaaaagggcacatttttatgggcatgcacacttttcttggcttagagctacagtatatggtccgcttattgtatatcctaaagcatctgttccttacccattcaagaaacccttcaacgagcatacaattctcctaggtaatctttattcttaataaagttagtctcattcactatttggtatcactgaacttgtttgtctcctaataaatctaggagagtattggcttaagaacgtggtagagcttgaacaacatgtactggaaagtggaggacctcctcctccagcagatgcattcacaattaatggtcaaccaggacctaactacaattgctcctctaaaggtaataaatatcagatgaaaaatgatatgattaatttacaacgagaaagcagattcctgattcgtgtgtattatatctttgtttttaagatgtttatgagattcagatagtaccaaggaagatatacctgctaagactgataaatgctggtattaacatggagaccttcttcaccatagctaatcacaggttgaccatagtggaagtagatggcgaatacaccaagccttatacaacagagcgtgtgatgcttgtacctggacagacaatgaacattcttgtcacagctgatcaaaccgttgggagatactccatggccatgggtccgtacgagtctgcaaagaacgtcaagtttcaaaacacatcagcaatagctaatttccaatacattggtgcattgcctaacaatgtaacagcaccagctaagttacctatgttcaatgataatattgctgttaagactgtcatggatgggctcacaagactaaatgcccatgatgttccaagaaacatcgacgctcatctctttatgacaatncggctaaatgtaaacaaatgcgactctg

SEQ ID NO: 58269 - DNA, 467 bp, Arabidopsis thaliana landsberg
taaggtaagaagcagcttaactagtatgacaggtggacgattgcgcatgtaaaacttagagccgtatgaaagtttccaaacattgcaggatctttcgtaaatgaaacaaaacaagaaagctatgctaaaccttcgaatcggcttctgaagaatagagtgcaacgtacttgtgcactctgcgtatggagctcgatgcttgtctttccgctaccaccacatatcatacacgatctcgtggaataacatttagtgcaatggctacatttcttgtgacgcctaagaatgcgtgtctatcgactatcaatgagcgaatatccatgagattggagcgaaagatcaccgacggagttaattgattacgcggctgtatatcgcgtggccatgttcatacctgcaagtattgcattgtcaccataagcatctgatagtgtctttaatacaaatcctacacctttgcattctggaca

SEQ ID NO: 58270 - DNA, 174 bp, Arabidopsis thaliana landsberg
ttttgcacacgacaacaactcccgggagccgcggggaaaatcaagacaccctacacccacaacacgtactactcaatctaaaaccacacaggcacgagcacccatgcgtacacagccggcacaaagaaaccgatcgactcactgctaccagcggcaaaatcgaaagaaactcaa

SEQ ID NO: 58271 - DNA, 854 bp, Arabidopsis thaliana landsberg
gaacactaatcttctccaggatcgatcaatttagaatcctagcttctcttcgttccactgcatcatttagtttcaatgtcgctagtatgtaaatgtgagaatcgctatatccatgtgctaatcgagatctctggtttgatgaactattgctctaattcaattcgaaatcaagagaattatctaaaaacagatcattatcatattctgcatcaatttatcgatcatcactataacagtatttttcaatttgaaatttctgaatccaaattgttgatcgttttctggttctgtttgattataatgtttgagtaggcggagaaagaactacaagtgaacaaatcacagattttagcatcgaagcacgcaactatacaatccattgaacgcagatgtttgatgctagaacagaaaatagcagcacaaaacctgaagatcacaattctcagatctaacatcgatgatctcgactccaaataccacagctatatacaacaattgaggttaaatcattcttgactcttggtttgatgatggttatgatgtcataataatgtttttgattggtttctgttgaatggtattggagaataggacactgaagattgaggttgaggagctgaaagagttagatgaagagagggagaagtattacaaggtgaaatgttcagagatgaatgagtttatgcaaaatgttgagaggtttagatcagagaaccggttacaaatcgagaacctgcgaaaccgaatcaaggaggtaaaatcacagtcaagtgtgtggttttggattaagtagtgatttgtagcattgtatgctttagttatgtattatcaatctttgggtttctcaacttaac

SEQ ID NO: 58272 - DNA, 627 bp, Arabidopsis thaliana landsberg
agaaatttctttccattgaggctactgtcgcaagagtggttagtaaaattcgataagcaataaagatatttggataacaaccaatagtattcacaaactctaaaatctcaataggtgccatcacttcatcatgtaaagttacctgcaatatttttaacccagaaaaaactcatccaagtcaacatccgatgaaccactatgaaaaaatgtattataaaaagtagtgcaacgttctcttaattcaatagcatcaagtgactttagcttcactgaattatataagaatccaaaaacagtctcaaacgttctcatttccacaattttacttttcaaagaagcaattgccatatacacaataacctaaaataatcaaaattaaaagtatcctcaggggtttgaattacctcatcatgactgatctcatcaaactgttttccctaaaccttctacacttacttagaaattaggcatcaacatccatgtcatcagcaaaacttttagctacattcatacttgaactaaatccatcaattctataatttccaaaaaaaaaacaacactacaccttctacttgcttcattgcactatcaatacaattagatttagcttggaaatttttactaacc

SEQ ID NO: 58273 - DNA, 528 bp, Arabidopsis thaliana landsberg
  unsure (1)..(528): unsure at all n locations
ggcggacgcggagccgtccaaccccaagaagcggcgcgatttcgtcttgtagaggaggggcgtggagctcgggagcgttcacgtacgtacggctgctggcaggaatcctcgtcttcgtggtggcggagaaattaagcagacgcgtgcgttccatctctggacatgtataatgttgcacgcgacgggaggagctgagggagtgaggggggagtgaccgcgcattattaatattatgaaaaatggcaaccgggtgtcggttattcttgtctgcatgtcgttactcggatgttatagtagaacgaactgttcgtccaaaaaaaaaaaaaaaaaaaaaaaaaaaaaannnnnnnnnnnnnnnnnnnnnnnnnnnnnnnnnnnnnnnnnnnnnnnnnnnnnnnnnnnnnnnnnnnnnnnnnnnnnnnnnnnnnnnnnnnnnnnnnnnnnnnnnnnnnnnnnnnnnnnnnnnnnnnnnnnnnnnnnnnnnnnnnnnnnnnnnnnnnnnnnnnnnnnnnnnnnnnnnnnnnnnnn

SEQ ID NO: 58274 - DNA, 916 bp, Arabidopsis thaliana landsberg
ctgatcgctttgtctgcatttccacatttagtaatgagatccggctcaatgtccacaatttttattgtaacaaatagctgaagacacagtctgtgaagaagagaaagttaaagtacacttgtagaaaattttcataaagttgaccaaccttgcaattgtatcccagtcagaagtagatggtggtccaactcttttagtcatcttcttctcatcctcatattcttcaaaatactcatagtacagcttgtcctcagcttccatcttcccaaaagctactcttagctttaaagtagaaatcaacatcagatatgttaagttccaccgtgtgacaacatctaattgcaaactgcctctacacaactttcctgtctcacacctcaaggaaaaggatttaagcatactgaagtttgaccggacatacttcactgcattcctaacaacaacaacttatggctttgccttcttcaaaccatctttaacaattagattgaggatgtgtgcacaacagcgcatgtgcaagaactcaccatcttgaactaatgcgtgtactcctttcagccttaacccatccttaaaagcatccaaagccgtgttattgttccttgcattatcaactgtaactgtaaacaccctctcaattccccaatcttctaaacaatccagcaactgacctgctatggtgtctcccttatgatctgtgatcaccttaaaactcaggattctcttctgcatttctcaatcagtattaatccaatgacctgtgatcaccatgtcgctgtaggaagtagtgggacacgtccatatgtctgtagtcaatgaaaccctttgtttctcaacactaaataaagtcttcaaacctgccttctcttccagatagatcttaacaatgttttcattgcatgtcttcctacaaaat

SEQ ID NO: 58275 - DNA, 619 bp, Arabidopsis thaliana landsberg
agccaccaacagtgctcctctatcagcaggtccaccaccagcaccatcaatcccctgcggtgtcccactggtctgtggtggagggctcccagctaaccccgtcgtgttcaccgccgacccattagcaaagctagcattaccagctgtaagctccaatgtcccagcgacaattgtagattccgctcccaaagagaagtttccagaaacattgatagctatagaacaaccagggatcgggcagtgaaacctaacaccaggcaggatgataaaattccccttcccagctatatacacatcgtgcgtaaggttcaaatcggcgacaatcttacaagtagtatccaaaaacccaacgccgccgagatcctcgctacaagataccgacggtccatgcggtggtggcggtggcggagcaggcggagagtaatcctgatgaaaaagtaacgactctgaatctgagtccaaatcggaatcagaacccgatttcggttccacaatggtaaatcgatagcttgaactagggtttacggccaaaaccgcaagagcgaccaagacgaagacgcagcaaaattgaaatcgagccatccactagtatcaagagtcatcacagacgaagtctact

SEQ ID NO: 58276 - DNA, 1416 bp, Arabidopsis thaliana landsberg
  unsure (1)..(1416): unsure at all n locations
ttagtataataaatgtgaataatgatagtatgtcggtcttaaaaatacccgaaaatatataagatttgaatttaatttcatgcattctaccaaaaattagagaaacttcaataacacacgaaggttattacattttttaaagaaaaattgaagcttacgtctcttacaacgaaataaaataagaaaacattcttctaactaaaaattaacagtaatatacataaagactaaatacaaatattattgtaataaggttcaccaagtgtgtttgatactaagaccatatccaaatctttaagaacatattccaaggccatgaacacatgttgagtcaaacttattgtgtccactccatcttcgtacggtcatgcctatataacacacatagtagtcttgtgggatactcatcaacaacctcttcataaatacataaatcatataagagaaaatggtgacatgaagaatgagaacttgtgtggtagccaaggatgacttgcctgcgttttagaccatatatatcaaagactcactcgatcgatagtcttagagttggttggtcgtcaggcagtctccttggctattcaaacaattctcattctcttcattcacatttctcttttttgggaaacttaacacaacaaacagtgataatcaattttgtttggcctccaaatttggggatcatagtggactttgtcaatgtataagcattgggacaatgtgttttgaataatcgagggcgttgcttcactgggaccaagaaacttcacgtggagaatctatggatcttgtctttgatcactgatcagcatgtgtagtttctatgttaggccatcataagtgcctaagtggtctgcggaaaaaaaacttatgtattcaccaaaaaggtatttctttttttttttttggtaggatccagctgatccagctgatttatgcgtttttttttttccgtctggatatcaaatatcaactatgctagtcttgagtcatgacatccatcagcaattgtttaatagaaagaaaaatatttcaaaacaagttaagattattaatgttaaaagatattccttaaaatatcttaagacaactcttcaccgtggcccgaagacgactggagcaaattccggacacaaagatctcaaattttgacgctttatcaaatttcttacttcacccataaaaatctgagtttttagacttcaacaggacagatctttcttctctttccagatcctaaaatcttcatctcctacagatctgcagaaatggcggttacgtactgattcagatacgggagaagaaaaagaagnaagctttctgctctaacttttcccattactgnaatggcggatcctctaaacggcaagtccttctttatctggttctcccttttattctccctcactctgcttt

SEQ ID NO: 58277 - DNA, 779 bp, Arabidopsis thaliana landsberg
  unsure (1)..(779): unsure at all n locations
gcagtcaagaatcgatgacatggcctagtgttggcaagtacaaagtggacattgcatccttcgagtctatagccttgcctgagctacaggtgttctgtcagctcatcatttccttgataatttggatagatgaacactgactgactggtttagcattggttttcaaggtcaaagacgataccaatcttttcatcattgatgaagttggcaagatggagatgtttagtccatccttttttccggctgtcctcaatgttttggactccaacgttcctcttcttgcttccattcctagcccaaaatttggtcgacatcttcctgaaggtaattcattatctggaatcaaacataattattgaggaatcagagctcggtttcatctgttaactagattcgttttcagcctgtagttgtctccaatcctgatgccaatgataaccgtgcgtgctgcttaaattgaaatttatgaaagtgccttcacatctatatactgtttggaacacttttccaactcttgagtagtcaattgtgctatggtccactttgatgtactcttgtattggctttatgtgtcaccctcctctgttggcagtctagataagctgcatagagttcactaatctattttccttaacaaagtttactttcttctttgctgtctgcagtggcaaggttgaagaaccaaccgggagtgaatgtaatctccctgagtgcgactaacagagatcccatgaaagaacatatcnttgatgttntctctggntggctgcccaagcaat

SEQ ID NO: 58278 - DNA, 1344 bp, Arabidopsis thaliana landsberg
gcctatatatgtattttttttttcttgcatcaattttgatttagaatttgcatgcatgatatttttttaatatttttttatcctttaataatttttttttatattatctaaagttgtatttgtattccttacataaagtttggttactttcatctctaaggtaaactgctaatattaaagaaagtaatttaatggaagcaaaaagtgttaaaatatgtaatataatttgaatggaagagtagcccccgagggcaatcaagtggaggtcttccatggttaggatgcagaagcttaatacgtttatatagatagataaacaatagcctccataaagtaaaagatacttgcatgcgtgcgtgtaggtattgagtcgagatgttacgtgcgtgtctttttatagatactatatattattggttcttctaaatccttaaaaatgttaagattacgcacgcaattcatgaattgtatatagatttaccaaatcttgaattgattttaaatttcttacaaagcaaatacactggtagtgtgacattttgtccctgtggattctgtatgacgtaatctcgttcctcacattatgacacttaatcgagtgtttttttttccctatcattttttttgtaaatttatcctctacaaattatgtatgtttgtgaactattaaatacgatgttgatatatatatatatataaactatataataaataagtgaattattttacgagtatggatcataaataaaacatggaataacaatagaatgtttgttaaatagaactcaaattaatgatcagttatgtacagtccggccttaggcccaggcactacccacttgggccgggcctggttatgtagcatatatataaacgctagtcaccgggatagttggacttggatggctctagcctgacccgtcaaagtttaacggaaacttgacatatgcaaagaccgtctccgtttgaactttgaagcgattgaaattttttgagaggcgaattaaggcgccaaaattttgagaatgataagtagattacgacacatgtactcacctcaatctgacggttacgatgcaatgtaaatacgaagaaatctcagggttaaaatcgtccaaatgttcggcgtcgtgtatacgcaattcagctacagacagtgtttgttacacaccattttgagaaatctaaattttcattttcccccgcttctctcctagaaatttcgaatttctgcttctctctctctatcagttttctcagatcttattccagttaatattccggcgatcttccttctctctttgaacacctaattcttaccggaatcagagagtcagggctttc

SEQ ID NO: 58279 - DNA, 1041 bp, Arabidopsis thaliana landsberg
  unsure (1)..(1041): unsure at all n locations
acttttgtggtaaaatgttaaaaatgaaatgacaaagcttcacattatacgcaaagccgcagaatgagtgcgctcgtacatatctccagccctgccattgacccatgagagagttcactaacttagcctttacttttaactttgcttcctccaaccaagattaaaatgtaaaaagaattcataagagtatgcttcaaaaactgctttgggtatctaaatcatcaaacttcttagattaagagtttttttctctttgcatattcaaagcttaccgattgctgttgttcactagaacgaggtagagcgggtcgagagcagagagacggaatagctgcacgacaatgactgcgcttgtgccaacgctgaaaaggattaaacaatacatgaatggcaaaatgcccttgtctgtccatcaaagagttttaagactttgagagaagttgtacctgccaagtcctatcaatagagcaacccatagaattccaatgatccaactagattctttatagacaacccaaacctgaaataaacaagttaatgactcatgaaagggcaatatatgtaacaaacctagttattgcagagcttatatagcttaaaaggcttttactaatctagtgttcaagattagggacttactgataagactgcaacatcaatgtataagttaaccaataaaaccaccatccacctgtgggaagatttagcaaatgcgtcaaaggcaaagcaagagacagatgattcaaacacaaacaatgctgacagaaatttatactcacgggtatagaagctccatgtggaaaggcgaaccatacgtgaagcctgtgtaaaccaaagctcctagcatcacacatcctaatgcaccatacacaaatcttgctgtgacaacaagtgacttcttgtttctcagaccaactccatacctaacaagaacacattacgtcattgattaaatggtctaggattccacaaactatacagcagcttatgattctgtcatggaactttgngagcaggttatgcttatgattctctcatgga

SEQ ID NO: 58280 - DNA, 229 bp, Arabidopsis thaliana landsberg
gattttaaacatttgacaaacctgaccacttgaggggtatgaaatacacacacctttcttgattactcttgcctgtgcaaagtacggacatatgccaacatggctttgtgtcatcgatttgcttcttcactgtaagatatgtacattaaatcattcagatacacatatagatccggtactaggttcaactttatgcttaactttcgaattctggctctgaacccagctg

SEQ ID NO: 58281 - DNA, 1649 bp, Arabidopsis thaliana landsberg
agataactgccgacaaaacttgttaagtcctatttaaaacacattctgttttggcctatattcaccaccctgccacacatgggaataaattaacttgtttgatatgctttccgatcgtaagacgattctctaactctgatatttcctctcttattcgtcatgttgcgtgttctccatacagagatcaattagataaacaatagacataatcgatctgaaatcagcgattaaagatcagaaatacgatcttagttttctatacgtacatgtgcacgcactacgatctctacactacaccaaacatttacatagttatacaatcagcatttgacagtacaagaagtaaatttgaaaaacgatcgaatttcattagttaaagaataatttatatagttccatcgtttgtatcatcgaaaacaataatttcatccataattctatcaacttggattctttatttgtgtttatcaacgagattatacataacctgttttggttcagtagtaatataaaattagttctcggtaaagtgtagtatagtaatataaaaataggcctcggcaacgtttgaaaatttgactagcaaggtcaataaacaaattattatcatatagtagtagatgagatcaatgccgactaactttatgcaatgactcgttcgactcatgagtcgtgatctttgagacctacttataatatctttctcgggaattataccattcgatttgcagcatcacatgattaattaatgcataactggaccgtcgtaatactttcattaattaactccaagcaggaataactttattttccttatcattcacgatggatataaatcgaagttaatcaaatcaaagacagtaaggattaggtcagttgtggatagcaaaatctggtctgaaaaagaaaaaccgaatattcgcataaaaccaaaagagaaaaacaaatgtagaaatattaataaaccttatctagaccacgtgctccaatttttgtttattctctctcctaaaggcttttatcaggtgtggtcgaaactagacgacaaacccatgcacctaggcctggacctgacttgttacgccaagtcacattcaatgcacgcgagagagaactacgttacgtgttacttccacgtcgacacataacaatttgtatataaaacattatcctctacttcaaatcttcacgtccatttgatctgtcttctcaagtttttaacctttggatcttactcttggatcatatcgaacggctgtaaattaaagtcttatctatattcctgtcgcactcgataatttctctgaaccttgtgtgttttcttgacgatgttcattttccgcgtagaattctttcttcatcgtaaaatctggatttttcttggctttaatttgtttgtttttgttatcagatttttttattttaataatttcaaatgagaaatgtaaataatgaattattattctctagaacgtatatggaaaaaatcaagttaaaaatgacacgtggtctttttggtctagtttttacagtgttcgcacaaatagacggcctccgcggcattatcgaaaccgatggcacgacacatgacggtgctacactggaagttgacggcgttaagttggtggtgcgttgtaaggccaagccac

SEQ ID NO: 58282 - DNA, 101 bp, Arabidopsis thaliana landsberg
ttttgctatttttcacaacacgcaacaccaggggggacacgggggagaccctacatgaaaaccaccttctactccatctaatatcacatgggcacgtgcac

SEQ ID NO: 58283 - DNA, 587 bp, Arabidopsis thaliana landsberg
aattcgttgtatctctcaactattttataatttgtatttattgtaggaaatgtccttatttctttgtaatgtcagtccacatgcaagaagtgttgtttttttcacttaactcatgttaacatagcaattctcttaaaaacttgccaagctgtttttttgtttgatatcgtaagacaacctataaaggaattactttgatgcttcccaatcaattatctcaccctggcagattaaaaaaaaaaaaaatgcttgaaatggtagagccgccacaagcaaacacttttgctcatcattcatcattttcttataacttcaagtgtatagggttttccgcaggtttttaacaaatttatgttactatttttgataacacactattttacataatattatgatttttaataagctcgatggaaatactaattttcgaaaacgtcagttttcactattggtctacaaatgcattagaagccaatatgttggatgaaaatgcaatttgtggagattgtaagattaattaagttgaccaggacaattatatgtgtaaaaaattcttacgagtgacaaaagtgcaaaaaatattatct

SEQ ID NO: 58284 - DNA, 578 bp, Arabidopsis thaliana landsberg
cccttttttatgtgcaaagccccaaatcaatgatcagccgttaattaacgccgccacgtaatcgcgcgaatgagaacgacggcagttatagattaaacagagcacgtggcaccggcacacgctagacggaagctttgtgacattaactttggctgacgttaagctagttttcgacacgacacgtgttagcgcacacgtgtgggttctcatgttttttgtgataattcatatttaagcgattataagtcgtagagtttgcaaactgcaatcattgaagaatttcgttgtagtaacttactaacttataatgatagtaaaataactttgtttaaaagaggaaatttgaatgaaaagaattgtgatgttactaattacgtacacatacgcaattattataaggcaaaaagatgtgaaagtgtaaataaagacttgtgtagtttacgaatatacatccttaaagattaatttattatgagatcgaattccttgactatactcaaacaccttcacgaagatgtcatttgatgtaacaaaagaatttagttaaaacttacacgtttatatacatatatgaacct

SEQ ID NO: 58285 - DNA, 847 bp, Arabidopsis thaliana landsberg
acactgttcaaagcccaatgccaaggaaaacttaaaagaactttaaatcaatttgaatcctgataagaataatggtaagtttgatctctttgacaacatcaagtccattactagtcctagtgaacggcctataattaaaattaataaatcactaagtttcttaacggattacagtctatccatcgattgagttagatacacttcaccactagtcttttgaaatatatgtagttgcatgttatgttcatatctggagtaccaaaggccctaagtttcttaacggattccagtgtctatctatttatctagatatacttcaccattagtggtcttactcattgttgatttatatgatttagaggacttgtaacaataaattgaactaagaaattgcttgctctgaaaacttacaattggtccacgagcaaagtatcttccaaattgtagccagtagacctgtgtatgccatacgatttagaacagcgtaactagaattaaatgagagaatacaagtattgttgcagcaattcttggattttcagaagattatttcttataatgagttacctcgtcctcgtcttgtgtttctacttcaaggtcagatgtggggaaacccacacaaagaagtgcatacccctgcatgtataagccacagaacttaaatgcaaaataaagttgaaatcaagatttaagtgccaaaatcactatactttgctaatgattagcacacttattactatcctcagagttaaaacctttgcttcaatataattgatttctaagaagaggaagttgctccccctataatacataaaaacattctctaaacgctaacagttaggtaagt

SEQ ID NO: 58286 - DNA, 1229 bp, Arabidopsis thaliana landsberg
cctaatcacttcaaaatttacacgtagattgcagacattgagatcagtaaccgtcaatcaaaaaaattatgtcacatcgaatttcaatggttgaaagataattccattttaggagaacaagcagtagtacaatttctaacatttattacatccaaacaacaaacaagaccaatttttatggtgtatcagttggcagcctctattaatgtctctattttcttaaaatcacaccaacaacgaaaaaaaaaaaaaaaaaaaaacagatacacattacttattgaaccctaaacctattgtcagtgtatatatataacacacactctccatatgctctcatatcatacgtcaatttataaacgtttcttctcattcgtcatctagtcccattctctgtccataacaatgaatatcaattgttctccattagggtttctaatttcactcttcttcattgttacttttcttgcaccacaagtcaaatctagggctttctttgtctttggtgactctctcgtcgacaatggaaacaacgactacctcgtcaccactgcccgtgccgacaattacccgtatggtatcgactacccgacccgtagacccaccggacgtttctctaacggccttaacattcccgacattatcagtaagcatatttgattcaagcatggttatacgatataatggttcgttaatcaatctttaatgtttgtttaatatgtctctctctctactaggtgaggctataggcatgccgtcgactttgccgtaccttagcccgcatctcaccggagaaaatcttctagtcggtgctaattttgcctccgcaggaattggaatcctcaacgacactggaattcaattcgtaagcatatccaatcaattttaaaattcttgcattaaatacgcattcaagtgttgctgatattaatgcacgacacgacaagacgtgtttaccctctccattaactctcgtgtcgagggtaatattgcctaagaagtaagaaaacgaaaaaaaaaatacacataagatcatcctcaataactgagggtatattcgtctttttgacatgttactccgcgaaaactcaaaaacacgtgattgacaacattatccttgatttcctaatgaaaaccagtgttaacacgaaggttaatttagtcttctcactaatattttgatgacgtgactttttagttcaaccgctgtcgattcactgctttgtaatttc

SEQ ID NO: 58287 - DNA, 545 bp, Arabidopsis thaliana landsberg
tcgtcttgaccccacattctgttaatgattttgagaagctcttttgatgttgtgagagctatactacattccttcaaccgtgttttgacacccacagttgacccagtcggtgtctccacccgtgatcgagtctcaatctgcattggaaaaacacatttcaaatatttttgaacatcactctcttgcacacatattgatttatagatgatggagccaaattaactaatcataacggattgagtgtctcctagtttcttataccgttatttgcaatgtttctgtgcataacaaaacaaaccatagattatgtgtacgtatgcttccaaagtaaaaaaaccaacagcctctggagccaataatgctcaataatatactactttcatccttaatcaaataccaaatttggtttgagaaaattatgaaaactgctagaagaaagggttcctcataatgctcaaagaaacatccccaagagtgaagaaaaaaaaaaaaatcaacttacatccatgaagctgccactgctaataggatccctagcccccaca

SEQ ID NO: 58288 - DNA, 866 bp, Arabidopsis thaliana landsberg
ttcttctgttctcttcaccgtaaggccatttatagctctgggtgtctatgttcagttctatggaatgaaggtcgctttcgcctgaaccttcttcatttccattctcgacttctccatcttcgatgttatatgatccaaaactgatgtgatggtttaaataatctccagcctcttcgttatgtagctgagtttgaggtggttcacgggtcttctctttacatctttttgctttgaggtaagtttgaagctggtttcttagcttatcaacagctgcgtttttctcctcgagctggtgtttagcctccgatagtttcatctgtactctctcttcccgcaatgcatctgctaactgcaacatctctctttccttttcgacttcttctttgactttaaaagattctctcttcagttcttcaacttcggctttgtcttcgcttatgtctcttgctagttcatcacaaactttctcaaccatcactctcgctcgcttctcgttctcgatttctttaactgctttcatcagagctgattttgtttcagccaattctttgcccaatttcttgttcaagctctcaaaccgtctcctcagcttcctctccacttctagctcaccagcaacagattcgattgcagcctcaacaacttcttgctcgttgcttttccacacagctttctcttcggcaaaacgcttcatcaagtagctaatgtcgttgttttccggtttatgttcgtggattaactgattgacctgtaagcgagctctttcgagctcagaatgtaaagcagagacgagggacatgctagaagatgggcggtcgttttgtccccacaacacagtaaaagattttgagaagctcttttgatgt

SEQ ID NO: 58289 - DNA, 161 bp, Arabidopsis thaliana landsberg
ttttgccctttacaacaacacgcaacacacggggggacacgggggacacccaacaagcacaccacctacccccccagctaaaatcacaagggcacgcgcacccctgcagacacagaccccaaaaagaaaccatcagacatcactgctaccaacgagaaaac

SEQ ID NO: 58290 - DNA, 1134 bp, Arabidopsis thaliana landsberg
taacttcaaacacaacaacaatcgctctaacaaaaaaatggttaggcatttcaggaagactgatacacttgcgaggctatgtagtatcgatgttggtgtcttgatcatcccctccacagatgttagtgctaggagagtaagatcttcaacaaggcaaactaggattctcaagaatcaagccaaacttgatagtctcatggcagaattggaacaaatcaaagcgtatgagaaggtatgtgtctcaaatttaacattctttataagttactttatgttaaaactacattttattatatagagaatgtttacaaccttgaaagaatcccgatttaaaatacaattgaaccaacaaattttaaccaacccctaggactaggattggatcttgaacccaaatttatcacattatccaatttagagttttatttattgtatgacattattatttagtgcctttatatattatttttgttgtgttttatgtctaccaaacaatattttttttttgtaaattccaggttttgaggaaggggcaagaacagaacatcaaaaagtacaataggaaggagatttcagatctaaagttagaggacttggttatttttcagaaaaaactcgaaaatctccaagatgatttaaagaagaaacgtgtagagctggaggcttcgttgtctctatagtgtctctcgaagaagagggtggagttatcttccctacagaaaaacaaatgagttttggcctaaattattcggaactattcaaataaaaatatataatcccttatctattgtcgctctttttttcctttaaaaaagttatcagacaattttggtttattcaaggtgaaggaagttatgtcgttcatcttttcagtcatcttttaataataaaataagttttgtttaaataatttagaatatatgtaatcatgtacagtaaagcttggcatataaatgtcccatgagtttatggttggattatagttttactatataaatctcgaatatatcgttccattatgtattagcaaccgaatacataatggaaaagcctcttctttgcaacaaaatcaagttaaccctcctagtaaggttatgactctgtttatgtcagggccaaacgaaaatctgagac

SEQ ID NO: 58291 - DNA, 115 bp, Arabidopsis thaliana landsberg
ctatgcgcttgttaaaaattttctacacctgcgggggaaatggggacactttacaagaaaaccattttctcctctatctataatcgcaagggcttgtgtaatcatgagtacatag

SEQ ID NO: 58292 - DNA, 975 bp, Arabidopsis thaliana landsberg
tctgtcatacatccaaatctgaaccgcaaacgcgattccagacgctacgattccctgaagttaaatcaattcattaggaccaaattgattattttgaaacattagggccaaaaacgaattaattataacagatgaaagaaaaactaacggcgtagaggatggtgaaaagctcccaaccggagtgaaaaacccaagcctgagaatctctttcacagaaagcagcaatgatcaagaactgaatgattccgaagaaacaagtgtaagacgtaaccgagagcctcgctggataagacttaagaaccggagcttggaaaacaagccagcctgaccacgagagacagtgaccgattaggtagatgcaaccaagggtccagtttttaggcgcggcgtttcctagcggcgctaagacggcggagtttgtggtgagtagatgagcgtggaggtggctagccggagtgtagatggttggacctttatagagggtgatgacggaagctccggcgacacaaagagctgttcctaagattttggagatacgtctcttctgttattcttactttctcaatcctgaattattgtttttttcacatacagtacataaacagtatgttacattgttgttactactatgattatcactattttgtaagcaaatggaaacggcattaaatattgtctacgtgtattattatccgtttcttttacgttgaaaagtcaaatggacattattaaagtggttcttgtatatccaagctgtccaaaatattgttatttatttttataaatcaaaagagaatgaaaatggagagatgtgtagagtaggtgcctgagaagagcagccatgagaaaggtaatggcgggaacagagttttgcatggaggaagcaaatgttggtgaagtgttgtccagtcccaacaagtaaaatccttggttcgctgttattctgtcgtgtaataattcattaacgagttatcc

SEQ ID NO: 58293 - DNA, 1116 bp, Arabidopsis thaliana landsberg
tgctattacaattcgaactatttatgttgttcccttatataaagaaactcttcctttcataccaaaaaaaaaaaaaaatccattttcatttctcctcttaaaaaaccgccatgacctctctctccaccgccggttaccttcttctccttctccttctccctataagctacgacggtggcttcatcggagccgccgatgcagaacatgacctcagagccactgatctccataatcatcgccatcgtcgccaccgtaaccaccatcgcggagaagagtttgagtactcagccatatcatgtagagcttactcagcctcattggacgagtttggcgccgtaggagacggtgtgacttcaaatacagcggcgtttcgcgacgcggtgtcacaacttagccgtttcgcagactacggtggctcattgttatttgttcccgccggacggtggctcaccggaaactttaacctgaccagccattttacgcttttcctccaccgtgatgctgttatcctcgcctctcaagtaagttttttttctccattataatttatctttcatttacaagaactcaaaaaaaaggaaaattagtaacacccgtgacacaaaactccacaaacgtctttgatgaattttttttttctgttgcaaatcataacatacataacgtgacatttgttggccaacttctgatgatatattggttgggccattcaatttatgtttatattcggtaaataatttgtttataatataaagtagcccaacttaaaattgcgagatttagaaagcttgagggtctttgaaaaaataaaataattttgggttctacttaaaagctagatattttattagcatgcgttactctagaattgaaggaggtggttacgcaaagacaaaaaatagggaaagttagtggggaacttgggatcgaattcgatattggccggttcacgagtgtgcgacccatacttgttaggaagatctcacccgtccatttctcttccaaatctgagccacatgttacttttgggccatctgtttttaccttgcccctcaatttaaccaaaatatgagaccctttctccaagtttcccttgtaagctaattatgaatattc

SEQ ID NO: 58294 - DNA, 386 bp, Arabidopsis thaliana landsberg
ttagatttcacggctcccatgcttcgattcacgtttttgggtatacttacctaatattagttatatatgtctttacgactttgatatgttaaaatcatacatgggatatatatatatatatatagttttaaatctttagttcatactccaactaactagaaactttaccatataaataccatatttagtagtgcagtcgataacgtgatatcattagaaaatgacatcagtgtccttggatcggccgattcgaatagcaatagatagataaattaattggtttggatgggggacgtttttgtgggctttatactttataaaatccgaaataaacaaccgtaccgagaaatagatagcacaagagatgacaaaagggatgtatcgac

SEQ ID NO: 58295 - DNA, 130 bp, Arabidopsis thaliana landsberg
ctctacagtttttaaaaaggcaaaaaacacacgagagaaattgagacacattaaaagaaaaacccctactaccctataaataaccacatatatatttaacattatacatacataaccccttcatatatat

SEQ ID NO: 58296 - DNA, 492 bp, Arabidopsis thaliana landsberg
atgtgggattggaacagcagctctttgctgaagctgcctctgcgggtaatgccgcggttgttcctttgtctacgcttaaggccatctatggtgaagttaccaccacaaccaatcaatctggtgattactctcagccctctcttttgcttgtatcagcaattatctgtatagaattgttctcttagatgtttgtttattacatatctatacaaactagagtagtcatgtttgtctatatgtcacttgtagaacaaacaaatactttccctagatttaacaacagaagagggcttactggtttgagaatgtgtggttaggtatcactgtttgatacatcaatttatatctgtgcaagtacaaactaggctagattggtggggttgataaagaaaacctgacgcacgtattgaattcaaagagaaatggggttagaatcgatgtgatttagagcgtaacatgaagggaaatagatatgaacatgattagaagccg

SEQ ID NO: 58297 - DNA, 539 bp, Arabidopsis thaliana landsberg
  unsure (1)..(539): unsure at all n locations
tccactcccacatggtgagtctcattgccttattagacttgaagagtgactccttctgctctgctaaggcctcaacatacttctgctgtttatcagatctcaatcccaaaaccacaaacgatactcctagacacgtgtttatcacagcattgttgttcattgcttccgagagaaacattgcaatcttgttcgccattcctgtgtagtcaaatccatcagtcaaaggaatacatattagcaactatcaaccaaaaccatgcactgtgagcacaacaaactcaggtaaagctgaatatgaacacagagattgtagtatctaagaacattcaaacattagttaaatgatgaaatcaccaaattttgttggaatcgataacaaatggtgtcattttggctacatactctatattatgtggagatggtgatgctgattntacaattagagatccatcagatcgatcaataagctaaacatcgaatccaggaaacaaataatgaaattgaagcaagaaaaacaaggaatctgggaggctaaatcg

SEQ ID NO: 58298 - DNA, 610 bp, Arabidopsis thaliana landsberg
acattatcatgctgctggataaatagtataaggtttaaatacgagactggtatatattaaactggagaatatacaactatacaagcattccataagacattaatctttaggggtctgataacctgaatctaggacaatgaatattccaattattggttgtacaactacacaagaataaattttaacaaagaatacaagttgtctgtttacagatttttatatatagccatatggagaattagatatttcgctaaacctgaaagaagacttaaatttcttctaattttcttatttttagcaatcatgatcaggtaagttctttacattatctagaacaacctagtgtacacaattttcccatgcactttcttatattaatcaaaagtgttgtgaactttttggttaaagtcgtagtcgtgtattcgtaataacattattgtaatctcgaactgtttcgatatgattttggctcttggaaagtctcctgagttgggcttgtactatgatccaatagtaaataatcacttaaaaagcaacataaacgataaaaatatgataagtatgaaccggctctaaaagcaccaattttcattttatgatcaacatatta

SEQ ID NO: 58299 - DNA, 1187 bp, Arabidopsis thaliana landsberg
cttgctttatcaacttacatttcccttggatattccattgcaacaattattttttttattgcttctgtagcttttccgttagaataacatttcccttagagtggattttcagagatagttactgtagtcaaagatgtcttggtaaaactttcattttttcttttttgtggtgtgcttatagtgtcttaataaagacagtcgttacagtatttctctcggactagaaagaaccctttcaactggaaacttcgatattaaaaggttcagaatgcatagaaaaggcatgacacaggtcagtctcactctctatatacatctgtgtgtgagtctgtagcctccttcatgctacattactctcaaagaaatcttttcatataggtcttaacaaggttatcttttatcgggagcatggggtttatcacgaaaatttcgccacaatttgaaaagtccagaaaagtaagtgggcctagatcattgcaacccagccaggtaatgatactttcttcatcagtgctgaaatttgtaaagaaaactactgcttctgttagaagtatcatttaatctaatttttggtattgtgatttgttctagtggggcatgctatgcccatgtgataccccagaaggcgaatcttgtgggcttgtcaagaacttggctttaatgactcatgtcacaacagatgaagaggaaggcccattggttgctatggtatggtttgctattttttttgctcatatggtcgattaatgcgaatctgtgtttgaataaattttctggaaacagtgctacaaattgggtgttacagatctggaagtattgacagcagaggagctgcatactccggactcattcttggacatattgaatgggctaatacttggcaaacatagtaggccacaggtactttatataaatacatggttttgcaacaagcacaatacacttatttacacctcttcacgagtttcttttgtttcagtacttcgccaattcacttagaaggctgcgtccagctggaaaaattggagagttggtcagtgtgttcacaaacgactagcacgtgtctcattgatcagacatttgggtatctaagttttgcgttgggcacctatagcttatgttcattcctccatgatgcagaacccacctatatttgctaatatgaattgggataagctagaaatgaa

SEQ ID NO: 58300 - DNA, 1166 bp, Arabidopsis thaliana landsberg
aacacgccgttccggtctcaatcgcatcacctggtcaagatggatcatgggaattcaataataattatatcccaatcaaggataaggataaacttatcccgagtttggataaagcaaaccggtgccggaatcttaaggaagtgtacaaatctagaagtggaggttacgatgggaggtgtactgttccaatgctgtgggatttaaggaagaaagatgttgtttgtaacgaaagctatgatattatcgagttcttcaattcaggtttaaacaaattggcccgaaatgataacttggatctctcgccaccagagttgaaagagatgatacaaggttggaatcagattgtgtatcctaaagttaacaatggcgtttacaggtaaattggaaaacatcattacaatgtttatagaatgttacaatggcgtttacaagtaagcgggatatcaaaaaagctataggaatggagtgaattgttccaaatttgatgcgggtttagctcatagcttgtgttcttaatgctgcaatgtgtgtttgatgctaaagttgatgactttgttgtgtggtaatttgcttgcgatattttttgaaaggtgtgggtttgcgcagagccaagaagtgtatgatggagctgtaaaatgaactctttagtattaaaagctatagaaagcaactgaattgttcacatttgatgcggtttttgcgtagcttgtgttcttgatgctgcaatgtgtgtttgttgctaaagttgatggctttgtttgttgtgtcatgtgtggtgatttttgaaaggtgcgggtttgcgcagagccaagaagcgtatgatggagcagtgaatgaactctttagtaccttagatgagattgaggatcacttgggtagtaatagatacttgtgtggagaaaggttgacattggctgatgtatgtctgttcacaactctgattcgttttgattcggtttacaacattctattcaaatgcaccaagaagaagcttgttgaatacccgaatctctatggctatttgcgcgagatttaccaggttcctcttcttactggcttctctctgagacataaattctgcatctgggagtgtgtttcaaattatgtgtttgttgttgttgttgaaacagattcctggtgttgcggatacttaaatagtcggctat

SEQ ID NO: 58301 - DNA, 172 bp, Arabidopsis thaliana landsberg
ttatactctttatcagaactcacttcaccaggggggaaagtggggagaccgaaaaagaacaccccgttctactctatatattatcacaggggcttgtacacccatgcatacacaacctgcaaaacgataccattggaatcgatgctgcataggaaaattccgtcattaactc

SEQ ID NO: 58302 - DNA, 570 bp, Arabidopsis thaliana landsberg
ctaaccttggcattatctggacaagagccttcaccaaatatacactaactcaaaggagactgttttatgtcttcctccagaaaataacatactgatttgcatgcctataacaaatcctatactatcattttggtaaacaaatttggttttggaaacatctcactctaaaaaccatcattattattattattattattttttttctaatattatggcatcctacaatttactttatgattgtgttgattattatttggttgtatttgcatctacacattaagttaaacattgattttagaaattaacatgaacaaaatgaaacatgaatacttactgctaaaaccttataacaatcagatttttttttaaaacaaagaatggaaaaaaatgaataaatttgggaaacgaggaagctttggttacccaaaaaagaaagaaagaaaaaataaaagtattgaatgtggagatgagaggaaaaaaacacttactgtcatcttacccagttgcgtcatcatcaaacccacaacactctcttcctcttgcctcttccttctgcttatattacttttt

SEQ ID NO: 58303 - DNA, 525 bp, Arabidopsis thaliana landsberg
ctaaatatgaattgaatggatgtaattttggtttttttaacacttgatatatgaaccaacttgaaattacatatttacagaagtagatatagaccatcaattgatatagatgttacaaggaacacaatacacacaataaacattaataaataatttttcacaagtgcgtcttcaatactaattttatttcccggatttcatgtcttctaaataattaaaatttatcttccacattcagcctccaataaaattctatgtcttcgtaatctaacgaaatgaaaacttctaaaatctccatccccgtctttgtatggaacaataacttgatgtgtcaattgaaattctatgttctacttatagaaaccgatgccatgcatgatctagttttagaaggaaaatctttgattactgagggttctttcattgtctaagaatgaatatacttgaggtttaccgaagcggggatcaaacagaatgcaatcattttgtttgagatttgaatttacgtatgtaagttcttcaatt

SEQ ID NO: 58304 - DNA, 287 bp, Arabidopsis thaliana landsberg
gcccacacgtcccaaaaaaaaaaaaaaaaaaaaaaaattaaactattaccaaaaaaaaaaaaccaaacaagcaaacgcaaacatacaacaacaaaaccccccccaaccccccaccaaaaaacacaacacaaacccaaccccaaacaacaccgaaaccggaaaaacccaaaccccacccaaccaaaacgccaagcagcacaacccccccaccccaaccgacaaaaaaaccaaaaaccccgcacccacacgcccacccaacaaaagcgcaacccgaaaccccaaaaaaa

SEQ ID NO: 58305 - DNA, 307 bp, Arabidopsis thaliana landsberg
ttctactttttttggtatacggtatgtcatcagggtcatgagggaccctaacataccaaacccgtttcctctggtccgagctttgaggggcttagcctgtatttgactgatgcttctgaatactcatctatgcgttcatgagaattgcggacgttctcgccggtttttgaaggaaacctgggccgtcacgtatctttttctttcccggcgaccggagctcaacgagtggagactttatcgggtcaagagattgatgagctgggacgaaacaagagctttcgcaagagaacacaccatgaggtaacgt

SEQ ID NO: 58306 - DNA, 346 bp, Arabidopsis thaliana landsberg
ctcttttaatcttttacattgctgtgattttatggggtcaaggtagagttggacatatgagagttgcaattcatttagattaacacaagtctatttggacctatggtttatttacatattttctggaacagttcttggcttacctgaacgatatttttgatccactcctaaatgcactttctgatccttcggacgcggtgagttttctttgaaaagccttctaaactgctctgcttgtttctagaatttgaaactacatcctgttgtgggctgtgattagctgatactccctccgtttctttttatttggacgatagatattgcaaaattgcactatcctgcgaca

SEQ ID NO: 58307 - DNA, 804 bp, Arabidopsis thaliana landsberg
caaatagtttgagattatatacatggaaggaatcattgtgagaagagttataccatttgataacatttgtctcttcaatgcaatcgggtaataataagctttttttttaagtcaagaagaatgtttttgaggcttgtgtttctttatctttgaggtttctcttctacagttatgtcatggacaaggacaaaaacaaagctcctgagctcagacaggtttgttcatatcttttagcattctttgatctgttgaagttacttcagcttcattcaacgtttagcttcttttacttcgtagcttatcagcttcataaggtatttaagcttagaagttactgataccgttctatatagtccattttaatatagcgaatagaaggaatgttactacatgaattgagtatttcacgagtataatagaaacaattctgagacatttagcttggtgctatcttgataaggtgatagcagcagcagttgcaagcaacaaggagaaatataatgaagcatttctagggaagctcaatgaagaatattgtgcttggattctcaatccagacaagtggggaggtatattttcctagattgtaaaacatgattctccataattgattaagttataggtatcaggcgagatatgttggtaaatgtctcttgttcatgatttttcatggctaataatgtttgtacggttcatcattttgaattgatagtgtctttccgttatcttttgctttgtgtaggtgcgattgagctttcgatattagcagattattatggtcgagaaattgcagcttacgacatg

SEQ ID NO: 58308 - DNA, 1484 bp, Arabidopsis thaliana landsberg
cctctcagatcctctcacattaggattatctctaatcaaaaccgtagcacatatttagatcattatacatatattcttattcagctgaattcataatacagagtaaaatctatgctacataatggataatcttcaatacatctttgcatattcatatcattctagtaaccctcaatttttaatttctttttaatcaaacgatgttttagcatacatatattttattttttttgcatggaacctatataaatttgaatccgaaaatataataaaatactttttcatgtagtcaattttttttttttaatagtcaataattatatctgaacgaaatatttcttttcaattttaaatcagaaaaaatgttacgatttgattgtcggtcactattaggcagctacaatgtatcaataaatattatgtttatcaatttttcacgaaaatgaaatctaactaattcgttcgttagtttctaaaaatcgcaaaactttttgaaattctgtggaagtcatgattatgttctgtgatgagcttttcgagcaaaaaaccataaaaccaaactttaaataaaaagaccatcacttcactttgctctcttctatagaaaatcatcttctactacactacacatcgagagctcactgtgaagaaaaaaactcgaaacaaatgaagaaaacactttcgccggaacccgtcaccatctacggcaatcgccaagaaaccttcgtcggtgatatggaatactacacttacttcgacgaatcttgtatccaagacatgaactatttcgtcaaaacaatcaccggcatcaaatccaaaggaatcagaccagaccttatcggttccatcatcgctcattacgcttcaaaatggctccctgatctcttcggcaatggctccgccattatttcctccacctccttagaatccaagaacaaccacaatgacacacagccagagagcgtcactgcatctgtaatgaagaaacggtttttcgtcgaaacactaatcggaatcctcccaccggagaaagactctgttccttgcaatttcctcctccgtctcctcaggacagcgaaaatggtcggagctaatccgaattatttaacggagcttgaaaccagagtatcgtggcagctcgaccaagcttctctcaaggagcttatgataccttccttcagctacacgtctggtactttgcttgacattgagcttgtgacgcgtcttgtgaacaagttttctggattggatagtgaaggtgttaaaaccgctgcggctcttgttaaagtggccaagcttgttgactcctacctcgctgaagctgccgttgacggtggtttagcttttccggagtttatttccttaatcacagctcttcctagccatgctcgtactacacaggatggcttgttccgagccattgatacatataaaaagagaaaaaataaagcttgaaactttgaagttgagatagttaattaaga

SEQ ID NO: 58309 - DNA, 506 bp, Arabidopsis thaliana landsberg
  unsure (1)..(506): unsure at all n locations
tttgatgtttcctaactcttctgggctggacaatgctacgggtggtccttgttgcgatcaaattgaagaacattgtgtgggcctagagactccctctggggatgcctcggctccggtgcacattgaagagcaaattcaacatgatgccatttctaaacagccagagcctaaacacactgagnnnnnnnnnnnnnnnnnnnnnnnnnnnnnnnnnnntgaagaacaccgtgcgggccttgagactccctacggagatgcctcggctccggtgcacattgaagactaaattcaacatgatgccatttctaaacaggcnnnnnnnnnnnnnnnnnnnnnnnnnnnnnnnnnnnnnnnnnnnnnnnnnnnnnntgaagaacaccgtgcgggccttgagactccctacggagatgcctcggctccggtgcacactgaagagcaagcccaacatggtgttttttctgatcaggcggactgtaattttaatggcagcacgttttactagagat

SEQ ID NO: 58310 - DNA, 1235 bp, Arabidopsis thaliana landsberg
  unsure (1)..(1235): unsure at all n locations
tctacgtattatctatgatgttgcaatttcctactatgtaaagtttggaaacattttgtatctgctgagttttcctttggttcatttttacatcatgcaaatctaaattattccgatatctaacttcactgcattaccaatatcatttacggcattggatgttgtaggatatataatcttacataacttctttggattgctaaccttatttctcacctttttctgtggcatctgattggcgtggactttcatcgggtggttctaacttcagatgatctacctttgtggggtatgaactttgtatatttacttgaaacatccaaaatttattatgttctttgtttgttttatatagttttaatactgtctcattgctgttgtaggctttgtgggtgagctgcatcctgacaaaaatagtgaaaacggcaagcatgttctttacacacataagaacattgttgtcaaatacaacaaagaccaggtcggttgttaccacgccattaagcaatagtatggatatcatgtgaactacatctgtgatcttatgtatctattttaatagatcattcatgttaatctcactcaagacaacccaaggccattggaagcagggaaaaaaatggacctgacgtattctgtgcaatggattccaacaaatgtcacatttgctcgccgctttgacgtatatctggattatccgttctttgaacaccaggtaacttttagcatgctatgaattagtcttgtacccttctgctactgtctgtgattccaaatggttcactggtttataatgtatcacactgaataccccatttcatgcttgttcataagtgcaagccataattattcttccaagaatctaccaaagttctatattccatctcttcaagatttctgttcaagctttataagccttctgagagtttgttctttttgcagatccactggttctccatctttaactcgttcatgatggttattttnnnnnnnnnnnnnnnnnnnnnnnnnnnnnnnnggactctcagaaatgattatgcgaagtatgctagagaagatgatgatcttgagagcttggtgatgtttcctcaacttttatttgtcattagttgcacaattgtttttttagctgttaatactctctagcagtctgtccaacacttctttctttacttctaaatgcaaggcttcatagccatttctgacgtgagtattgatgggcacaggaacgggat

SEQ ID NO: 58311 - DNA, 595 bp, Arabidopsis thaliana landsberg
  unsure (1)..(595): unsure at all n locations
tattttattttgaggtttactttagtttgcaagtgcaggttggtgtgggagnnnnnnnnnnnnnnnnnnnnnnnnnnnnnnnnnnnnnnnnnnnnnnnnnnnnnnnnnnnnnnnnnnnnnnnnnnnnnnngctaagctggatttgtggttggttcgctacaaacaggtgtaagttgttgaccaatgcaattgttacacgtctccagcactgcagctgctcatgacttgatatgctatcagcgtgaatggggatcacatactcggtgtaaagagttcttcttctggtgcatttttgcgtattgaagcaacaaagcataaacaccaaggcagatactagagttccttcccttgtggttccggctccaacctcaggaaatgaaaattttcatgctacgccttgattgacttcttatattctccatgctaggaaattaaaattntcaaggttttaattgcacaggtgtatgaagcagcgagtcaaagacgtttacacataacctgcagaccaaaaaatatgagtttggttcaaatttagagtnttctggatacttaanacgtaatatcgaagaggcccctctctttgtagtaactaata

SEQ ID NO: 58312 - DNA, 541 bp, Arabidopsis thaliana landsberg
gcgtggccgaaaggcttatacaatttggactgggcctggtcttccgtgcgcatgcggcgctcttccatcaccacctgaatttctttcttgaattcatcgggcaacacctgcaggttgtgcatgcgatcggcttccagctccatcatgcgcttcaggtttttgggcctgaatctgctgaaagtaagccgtgtagtcgcggctggtgaaggcgttttcctgcccaccgagaccagccacaattttggaaaaatcgccaggtttgagcttcttggtgcctttgaacatcatgtgttcaagcgcgtgcgaaacacccgtggtgccgttgaattcgtcgatggcgccaattttgtaccacaccatgtgtgccacagtgggtgcgcggtggtctttcttcaccaccaaacgcaaaccgtttgcaagtttgtactgcgtgatgtcgccatcagctgcctgggcttgcgcggcacccagtgcacacacagccgccattgccaccacttgcacgccacgcacacagggcgaccacacaccgggaccagaa

SEQ ID NO: 58313 - DNA, 412 bp, Arabidopsis thaliana landsberg
ttattttatcaaagacaatgtcttttgttggagagactggtggaaactctatgcacatccactccctgactatcttcctcattggccttcttctccttctgacttcaggtcacatttgcaacatttacatttttcaatatgtgctgatttttccgcttagtgaaaatagaaaatcttaactaaatttgaaattccatcaagacattccacaaactgatttagcgcgtgtttaagatactgtactcaaaagcacaggcggttcaacatttacctcaatgaatatttttaattacatctgaaaaggattagtcatacgaaatttctggtattacacacatttgtagaatcattcttcaacccaagtcatgtattttggtcacaaattgcgcatgcaatttattatatacggcga

SEQ ID NO: 58314 - DNA, 540 bp, Arabidopsis thaliana landsberg
  unsure (1)..(540): unsure at all n locations
tctttagtcttcacgaacgtaaattgattcaaagagccattttgttaattgaaattttcattcttttgttttgctttactgtattatcatattgaaacctgctccgattgtattaatccgaggaaaatgtatgtttctcaattatcgttcatgcaaaaaggccccaatttaatggttcatttggttttcttatttttgtttgttttagaaactcttacttattacaaatgggtcctggtgggctgggttacttgtaataacactgctttcaataaaatatccattgacaaataaactatagtttcatagaaggaatttgaggcgccaatacagaacacaaactatgacaaagtctcaatgagagcaaaaatgatttgcctcacattttgggcaaaggttatgaatctcaagttcttaacatttcatattaaagtctcttaaacttaacatngtatggagttgagaacttgagattnngtatagataaataatgaattactaggaatatagcggtatatccctgaagatttttttttattt

SEQ ID NO: 58315 - DNA, 555 bp, Arabidopsis thaliana landsberg
taacccaataggtccgtgatgttaaagagtacacacctaacttcacctttctaatgatctcttacctacaggctctgagctgtttttagttcatctcattactcactgtgaccccatttcatctgcttacgaccaatttggtaagctttttgtcttagtttcaacatttgcaggaatcactttaagaaacaactaactaaaaaggagataactttgaaaaaggaggattgatgggtttgtttttgatgagatggatatttgtatatgtatgtctaatgagagatatattgcgtaggggaagtgaatgtagattagaggtctccctatatattgattgattttatccggctatttttacctaccgcgacacacggtatagattcatagtaagctacaatttaaacacaagataaatctgtaatcatatagtatagtactatgcttccatatataccccatatttacgtctcctatgcttccatacgctaattagtttttttttttttccaaccataattgcagggttatataaacatgaacttacgaaaaaaataa

SEQ ID NO: 58316 - DNA, 1325 bp, Arabidopsis thaliana landsberg
ataataggttaacttaaatatgtgagacatttttcgtatactatttatatgccaaattcactactataattggtaataggcagtgttgatggtggcgagtagcatgggatatgttctaatgggatattttacatgcttatccactaagggacgatatgtttccacgtcagcaaaatggttaattccattttctttgttaaaaaaccttattcaatggatatttaatatcatataaaaaattaccatctaaaagtacaattagtttgactatatgctattcaagtcctcatagttttattattcaattataagtcagtcataatagaaatttaaacttgtttccatgttacacattaaacaccagtttgaaaaaatcaactctgatttttataataaaataaatgtaatctcaatcatctcctgaacttcaacaagtaaaacgttaattagttttgataatttcactgatttgtttcataaaaacacctatactcctataaataattaaatattgtaggcacgaggtatatagtagagaacgaaagttggggtcaattatagaaatatttaaaacatacgggcaaaaaatagaaaataaaggcaataaaggaaaaagtatagggtcaagaaggaattataaagttgataattttcttgatttaaaaattcagtatatatatcagaaaagccccaaataaattttgggtcgttaaaaagaaaagaaaaagagaaatagaattttgcgtttcaagtactccatctgcgtatattttactccgcatctaaaaccatctgagaaatatctccgacgaaggagaagaaacgaaaatgacggagactggagtaatcggatgtggctgtcgcggagtcaccggcggcaatttcttccatcccggaggattttctttgaaatcttgtttcctcgagcagagtacaaagcgtaatcgtaactttttccgaagcgtttctatgattcctcctttcaaacgcggtcgtttcatcactaagttgcgttccgtcgccgggaacagccgaatctttaggtaattagtttcgctctcgctgttaaattcatgaaaaatggaaatcgattacatcattttcgttagtggaatcaatttggggaagaaattagttgtctgcgagtgaaattggattggaattaagtgattttttaatcgaatgttgttgttgttgatgaacatgattaatagcatggatgctcgagagaaatcacgatcgtttgtgttggtatcatcaaggcacaagagagttccagtttttgtgatgatgccgattgatacattggaattagaattgggtgt

SEQ ID NO: 58317 - DNA, 1240 bp, Arabidopsis thaliana landsberg
gctatgcttattccatgcaatcttttttgaaaaaaaaattattttctaaccgattcgtatatcttctagaggattcatagaaaaagaggatacaattacaatatgtagagtatcttataggtgacgtaaccatgaaatatagaattctttggaatctgaaactgaattattcagttgataaatgataaaacaaatactcatatctcatcctttggcatgtttaggagccatctctcagctggacggagacaacacagacacttgtgccagagagggaacacaatcttcccaagtcttcgaaagggtaatctcagaccaaaccgttgactttgttcttattaattgtttatgctaaaccacaagatatttggatcaaaagtattaccataaatcactatataaagacataaatgtgcaccccacttttcttatcaatcataaaagtcagcaaaacacaaggcatattcctcttctcttcctcagccttatttttctgatattcagattcaaggatatatccatggcgatccagaagatcctctttgcttcacttctcatatgctcactgatccaatccatccacggggcggaaaaagtaagactcttcaaagagctggacaaaggtgcacttgatgtcaccactaaacccagccgagaaggaccaggtgttggtatgtataattctcttcaaaacatcaatcatttgctacttcattagccatgccttataaatgtgcgattttgctctaataccatgttagattttaaagctttatgaatgttaagacaaatttttatgagtattggaaacattagttctctttagtcgtttattacaacatcattagatcttatcctattaattagaattacttagaattaagtgatatgaatgatagtatgatctaatatcaatttacaagaataagttggaattgatattttgaatgtttggtctttagttttggatgccggcaaggatacgttgaacattacatggacgctaagctcgattgggtctaaaagagaggctgaatttaagatcatcaaagttaagctatgctacgctccacctagccaagttgaccgaccgtggcgcaaaacccatgacgagctcttcaaagacaagacctgcccacacaagatcatagcccagcccttatgacaaaaacacttcaatcaactacttggactcttgagcgtgacattccccaccggaacctacttcgttcgtgcctac

SEQ ID NO: 58318 - DNA, 1528 bp, Arabidopsis thaliana landsberg
ttggatgaaagggtgttgtcacccaacaagtttagggtccattaataaccgataatcataataagatttgtgaaagaaatgtttcactgatttggcagaagtacagttggaggttctttgtcttttctcttctgcaccttttgttctctttacttccttcttgtttgttggtttttgttcttttcttattttttttccctaccataaatggaccattaccattcatttctctctttttcttattatttgctgtatttagttgattttgttatatccgtttaaatttgtgtacatataaacaacgacgtctataagtttttataacaaaaaaaaggattatgttaggtgaaatttcgattcgttttacgtgtaggatcaacgtgaaagaaagtcgttgtaggtatgaaaaatatggaccgactacgatacggctgcttgagaaaattagatgtataacgtaaagtgaaatagtgaatgttaaggcaattagggaaactaaaattaaatattcaattggtatgtagggaaacgactttttatttattcacatgcacatgacctctctatgtcatgtgccttaagttgccgtgttcgatctttttataatttgttcgacccgttaccctaaatttaaaaatcatttctatttttttattattatgtccaaatctgatttctttttcatgtgtcatatatataaaactcattttaattaaattgcaaatttgaaaaatatttttttttgggaaatttaagaccgacaagatgagcaagggacatggttgtaaactaattatttctttaattaatcagtcacaaaaattcctagcttgcatgtgcaatttcactctccaagattccatgttttacttcaacttttatcactagtttatactatcaaagactcaaagtagatgatctgtattctacgctaatagtaaataattttaatataaccactatttacccacttctgttttctctcaaaataaaaacagaatccatattatatacatggtttcttgttgttactagttacacaatgtactagctacaagaagtgcttctgattaaaccatgtacagatttctagttcaaatacacatggttcctcgttactagttacacaattatgtcgacattcatgggaagttcaagggatttggatacttcaattcttactatgagaaaccctatttaaatgtaactactaaaacacaagcactttttgtcgtggatataattggttaaaattatcggtgcgtttaatgtgttgagaattcgttgaacactttattacctattattaaaccaaaaagaagcattaaagttcatcgtgccgctttaagatccacaagttttgtttcttcgattcttcgtggtgaacgttgcagccatctttgggttgtactattgtcattatatttaacgggtcttttcttttgtaagttagagctagtatatatgaattaatgatatagttaaattaaataacttgtaatgctcggtctaactcttaaaaaaaacg

SEQ ID NO: 58319 - DNA, 633 bp, Arabidopsis thaliana landsberg
tattgagataacagaagagcagagaaattaggaaattgaacctttttgtggtgataaaagggatcatctttgggaagtgctacacataaatcaccagtctctgacatgatattcaaagcaccaaccttacaataaccagcaacaagattaaactcgctacgacaaaaaaacacactaaaccaagtctattacaaaagcaataagattaataagggtctaaaggaaaggaatttgaagattaccatcgaaggaagagctgagaaagcgaaaaacttggcagtatcaaaccagcaagcaagtgaggcagcctctcactagctgaagaagaagagggctcgtcaatacaggttttcccggtttgatttcggtttaaaatatacatccggtttggttcaaaataaattcgtttttgtttgttgacgaatcatctctgcttcttcccccccccccccccaaccggtaaaaaactggaagtgatgatatacgaaacgaagcatatgcaaatggaagctaacaacaaaataaaaattaaaaagttgaataaataaataaaaatgaataaataagttgaataacaaaaaaaaattgaaaaatgaatgatggtcattaatgaattcgaataatttgaaatga

SEQ ID NO: 58320 - DNA, 1340 bp, Arabidopsis thaliana landsberg
tacgactgaattttgcaatttggtgttggatagcaacttcacagttcacacacacaaaaacaattgttgttaaacattgttaggtaattaactaaatcacattaaagagtgctttaattctgtatgtacttgagctttaaatgtgtcagaactcttgtctctggttttaagtgctcaagaaaaaaccgaccaactagtttctggcgtaatggaacacaagtcacacaacattagccagaataaagaatttaaataaacagaaactctattttatgtgtgattctttgtacatatgctgactaaaacataacattagagaataaggagtcctaagaaaaatgtgatttcatattagacctaaggaggagaaagaagagcagacccaacagttggggtaagagcttagaaatatctgaactgcgcggtttgactgcattatgagagacggtggcgcagcgtacaaccatgttgcaaggttgttcaattcataactcacaacatgtaaacagagaacaaaacacttaagttgatgccttagcaaagctaaatccgtttggtacttagttttcatagcaatacaactggaagtagacagcgacaaaaaaacaataacatgtgataaaaattaagagtattaggagtagcaaaagactcatggagagggcttcgggtactagaactaccagaagaatcagacgacagcgattttgagtagaagtcatattagatacgattgaatattgcttttggtgctagacaaagacttcacacacacacaaaaaaaaaaagccattggtgttaaatattgttaggtagagcaaattacatcaaaagagtgctttaattaaatacgtaagtacttagtttggttacaccagacaagaatctaataatatcgttcaatggatttggtcccgtgagtagtgtctcttgtttcaagtgcttaagaaaaagccgaccaaactagtttctggctcaatggaacacaagtcacacaacattagccagagtaaagaattagataaaacaaaaaactctatttttgtgtttctttgtacattagagaactaggagtcctacaaagactctgaaagagtaagagaggtatagtaattgtaaacagccaaaagaactgtaatttacatgaaactcaaggaggagggaagaagagcagagcacactcttgatgtacgagctgtagaaatatctgaactgcgaggttaaactgcattatgagagagagatgaagagattaaatatcacgtctacacatcgggcaagaaccgtgtctaaggagccaattgtctatgcacggtaagtgaaacatgtgatgacaatga

SEQ ID NO: 58321 - DNA, 1726 bp, Arabidopsis thaliana landsberg
cccctgtacactcttgatactttaaagtttctatcccgttcatgatacatatacatacacagatgaataatgcaagatctttctatgtttcttttttcaggatggtggtgttggaactagttctggattaaaccctgcggttggcaattctgagaagcgtccaggtatatttttgaatgcttattatccttctttatgaaaatgcagccgcatagttgtccattgatttatatactaagggcgtgtttgtctgccatagatgtcccaaatcagaggacaaatccggattttaccctgaagcagaaagacaagaatggaaatgattctgcaattgcaaaggacaagctggtaagtttcttgtcatgctgtttttttttcttctcgggtaccttcttttgaatcgggatgttcattgtgatccattgatttctcagctacctggatctttgaacttgggccgatcagagggatcatcgtcaagacgagttgtggacacgagcagtcgtgaaccatttagtggcgggagtgacaatgcaaactatgaaaccgcactcaaaggcattgatggtttacggatcaataacaatgcaggcgatgagacagcagcaacgccacaatcaaatggagacgatgtagaaccccaaagcaaagctctctgactgattcatacaaagcagctataaaacaaaacctgtactcactcagtgacgttgtctatgattcttctgaagaaaggctattttcacagctagagaactgatgatatataagagagagataatatagatttattataccaaacgagagtgcttaaactatgattcttcaaatattcatttgtctcctccatttgtatagagaaactcttcgaattttaagatccttcctctctgataatatttgcggaatgatataaaatccagtgggggataagagtaagttaatatcttgttttatgtttcatatcttgaaaatttatatgaacttttatttgtctaattggtcaaatttgtttgacaaaaattacttactcaatttgtactttctagaaacatgaagacgaacactatgtcggtagggagagacttttacgtattcaaaacctataattacaacgtaatctcttactatatatgcagggcttcattttcaaaagttcggctttaagattttggcatagccaaacataacatgtaataaattggaatcaacaaacaaacaacaaagtcacgtaatatacaattaaaaaaaaaaaatcagaaggaaagagagactcgtctgacttcattttatcgcataagcaaaccaaaattcagtaatcaacaagaaatatatcatttatcgtataagcgtaggaacatagcataattcaaaacaactttataatttagttaagaattccttcgtacacctatgttaaaaaaaagttgtaatatatttcaaatacaaacacttgtaggtttatttcttgactatccttaatccatcatgtagaattgtgggagttttgtttgcgtatatatgtcattttttcgtgattttgcagagttgtgtatggaaaagccccaaaattctaaaagtgttttgttgttatcatgtataataatattaagagaaatgctaatatttgaattctaaaatatgtgatcctgtatgttgttttggtcataaaaattcaagaagtatgattaagatatattaattttatttgtataatgatgtgagt

SEQ ID NO: 58322 - DNA, 1767 bp, Arabidopsis thaliana landsberg
  unsure (1)..(1767): unsure at all n locations
atgaatcatgtgtcgtccagttccattgccttgaaagttagactctctaatggacgagtctacaaaacttgggggatggattgaaattcagaactcaagagaaaagcaagtgaaatggtcagtgtctattacagacaacccagaggatgaagtgggctggggcatgagcgttgggggagttgttgatggttcaagaaatcatgatcagtttcaggtggaatcatatctgaaattcaacataggcgataggtttagattaagtccatgtcttgtttatcacacaaacagtgacggaagaaccataggtcttatgctaaagtctcactggtcgctgtgatctcaagtttactcattacttgtacattgatggttcgaattaccactgactgcagttttgagatttttgtgtctaatgcaatttatttgtctgaaaatatttaatgtagctgccatttttgtgccttgaagataaaagtttattgtctatcatcgcttagaaaaatctttgttgtcttgttagtaattgtttccatctgtgttggaatagtacactaatttgcttttttttttattgtaatggtaacaaatgtcgtaatgcttatttatgcttagggagaagtagaataactgaagattgatctatgattagtatgtcttgattgcaacgtaacataggttgtggcatttttaagattatttgaaagaattcttcttaaacaagatgtgactgtacaacagtttgattgatgttgtcatgttgagagctacgttgtgaccctcagtctcatgaacatacaaattctctagacttttcatctgtcgaagtcaatgacctttttctcaggtctcatttgatacaacaaagtcctatgcagaacgcaatggcaatatgaaaaaaaaaaaaaaaaagggtaattttgttttccatttcccttttatttttgctcaaagatttggcgttttgagtcaattagactttctaataatactggtttcggcttctgtcgttttagatttcaatcactcatcattgtgatttgtgaattatgtggctttcataggtaagtaaaaaattagaacgtccatacaaaaaaaaacatgttaccaatataaaaaaaattaggcttcacatagcaattgtatgaagggcaagatcgccggaaaataaagttacattattgctacttacttaatatctctattcaatttttttgtcacccacggtccgcacctaataattctttaaaaattgcaaattttggcctcgtggcacattgtctagtgtttgcatgcaaagtcaaaagtatgtgttgttcgattgagaccacatgcttttttaatacaagatgaatttgtttggtaaaaacctttcccatagttttttaaaaaccttttttttcggttcaacttgaacagaaattcgaatcttttgtacacttcgttaaggcatttcttgtgatacattgtgtgcttgcctcaacaaattccaaattagctacccacaaaaagatttgcgacctaatccaatctagacgggcatgacataancaaattcaactcaaattcctcaaactttaacgacggcaaaacaccaagtgggctgtgaaacacgcgttcgtttgtatcaccaagaatgagaacagaaaaaagtaatatttgttttcaaatgctattgtctgctnttgnnncttgtgttctcgtcgtgtctnngcggtggccccattgcggtcgcncttaaaaaagtcctcctctcgctttcggtcgttt

SEQ ID NO: 58323 - DNA, 1241 bp, Arabidopsis thaliana landsberg
atattgtagggggtatatgttgaaaggtgagcaactggcaagtgggcacatattacatgaatgggcctttttctaaagtgtttggattgcttgtccaacaataactatccaacattcacttgtccaattgctttctagcttttgcttttctgcttgccctttcaattaatacacaaatttatgtatatatacattatccacctacatataaagtatatacatgaactttcgttttcttataaaatgaaaactattagcatattcctaaagctctcatttattttcgtatgatcaacttggtttcttagtttttttgttaatgggcttgattttttaataactcaagagatatcttgaattatataaacccaatgaaacaaaacgtgacaataaaatatctcagaccaaaataaacaattttagtcaatatgggctagattataggcccataaaggtcaacaaaattacaaaacctctgttttcttcagacagctttcgagcttcgtttgtcagacagagaacacgtggcacttccttcagcacctctgtgtcaaagcaccgtgagagacaatggtgacgcgtgtgaccagacggcgtttaaacccttttaccaaaatctcatctttcttcttctccgtcgtcgtcatcgtaatatctttaatctgatcgttttgtcgaagcacaagaggctgaatcaacatggaaggcacaaagagaagttctttgggtgcgcgaaagaaactaaagagaaagaagtgcagaagacttgtcaaaagcattgtcacctacctcaaatctgatacatacttgtttgctcctctgttttccaattttccaccgctcacgacggagatagatacgcctccgccgtcgaattccaaaccatccactgtggacgatatctccatggaaggtaatgctatgactcgagttcgttacgctcatctgttattgggttttgggtaagtggttgatcaaagggtgtgagttttgctaattttggacatttagggttcgagccattggggatcgagaagcttataaagaagagaagaatgtctgagaaagagaaggaatatcccaaatctgactgcaatatgtactcaccgatgatctactcgcctgcaaaacttgggtcttcggcccaaggtgagagctttgtaccctatacgcaactcctatatgtgattagcctgtgtagcaggtaggtagaacctgcattgggactgagatgctttttg

SEQ ID NO: 58324 - DNA, 520 bp, Arabidopsis thaliana landsberg
  unsure (1)..(520): unsure at all n locations
tatatcactgcatgaagtgttggttgggtaatgcattggaaaaatttcatatctctccttttgtatcatggtagcggatctttctttctagtatatagcctaagagtgatctattatagtgattctagctatacgcttaattagaccatctatatatattatttctagttacgtcacctaatcataaaagactctacaacaacagcaagggaaacacagtagcaaagacagttgtctcttactgattttcaaaggtttgaaacacatgtgtttgtttggactcactatagtgtcttctggcgtggaatcaattatttatgtctccacctaatcagaatatgacanatgaatactcgcaacataaacataaaaataaaactctaatgataattctttttttttattgtttgatgtcggaaaaagaagagtccaccgagaaaaaagagtcctcacacaaatttgaacatggcaattatggagcggcagaatttaattattagtcctatagtcgatatattat

SEQ ID NO: 58325 - DNA, 189 bp, Arabidopsis thaliana landsberg
tatatcctaaaagacaaaaatataaaaaggggtagggttacatttaaaaatcataagggtaaaccaccttcattcttaatataccagacaaaaacatctatcaaacaactgatttatctatacaacaactttaatatcattacgataactttctaaaataatacaaaactttttaactctacttgtcaa

SEQ ID NO: 58326 - DNA, 270 bp, Arabidopsis thaliana landsberg
tttattatattcacaaaaaccaaacaatataatgggttatgataaaatttaaaaatcataatggctaattaccttttaaatacatataccttaaacattcatccattaacaaacaaattcatctctaatctaacatttatttcctttcaatctctttataacaaattatattattatactataccaattactcaaactaatcccctaagatctcaaactcatcagatactactcttccaaattaaatatacatactaacatcatcctacc

SEQ ID NO: 58327 - DNA, 434 bp, Arabidopsis thaliana landsberg
cttcccggagatttacgaactactcagaaaggacaataggtaaatggcaagtgggttcccgccgcaaaagcaagagacacagcctgggatacaacatgtcatggaacctactccacagttctctagttctagccttaagcctctccaaccatctccgtgtatataggcgcagattgcacattctatcccgctttgcttctaacttacgaatagagcagatgtcaacacacccatatgaagcactaaccagcctgtgaaggaaatcatagcataatagcccttttatgcacacctgcctatacttctattacacggcctcgatctagacctccgcacgggaaagtggcactggcgacaggacgggactcatgcattggtaaagcctcttgtaactgatatgcactggacagagcgagcgtggatttactcacgta

SEQ ID NO: 58328 - DNA, 542 bp, Arabidopsis thaliana landsberg
  unsure (1)..(542): unsure at all n locations
ggggaaattgtatcagagccatgcgtgttgcggctgcgacgagaagcgatctctcagatgcatagcatgaacggaccagcaatgcctgaatagtttccagagaagccattgctggccttgctaaggcgcagtttagcattctcttgacatggaaatccagcatgtgccattgttgggtgtcggttccagtcacaacgcggcagccaattgtgcaaatggcgctgaaaagcagactgcttcttgcacggatgctttgaaacgagtcatatcggggatcaaagactggaacagaatggtcgcatccctgaaagaagatggaaaagtactgctcggcttgctcaatgctcagcagcccggcgtcgacacaatcgggtaatgtgacagacccaatctcgaaattggatttgatttgtttactggatagcacggtatctgtcggtgattctgtgtgtgatggacgaatgagggctaattcancagagttgaactgagctgctggaacaaagggaccatgctccaagtctgatgatacctgtgaactg

SEQ ID NO: 58329 - DNA, 316 bp, Arabidopsis thaliana landsberg
ggagatcccatctagtcgacgatgacgtccccggccccggtctggcgttccttcaattccgatgaccaaaccgggactagctaactattctgaggctctgtctctggattttgacacgttctagttctagctcatcatttgatctggtcgtctgagatgtacgcttggtgttatgagtgaacccggaatatggaagcacgatcgcttgctatatgtattatacaggtacattctggacaaaaaaaaaaaaaaaaaaaaaaaaaaaaaataataaaaaaaaaaaaaataataaacattaaaaaaaacatcaaaaata

SEQ ID NO: 58330 - DNA, 504 bp, Arabidopsis thaliana landsberg
gccttctgggttcttcaaattgacgttcgagaccttgagaagcgcgaaatagcgttcgccgtctttgggagagcggatctggccctcaaccgtatcccccgtacgcagcgcaaatcggcggatctgcgagggagagacgtaaatatcgtcaggaccgggaaggtagttggcctccggcgacctcaaaaacccgaagccatcctggagaacctcgacgacgccggtcgccgtaatttcggtttcttgcgtcgccagctgcttcagcgtcgcgaacatcaattcctgcttacgcaaggtcgaggcattctcgacacccgtctcctcggcgaaggtgacgagctcggcgggcgatttccgcttcaggtcctcgagcttcatttgtttcattgaaaaagaactccgcggagcgccactcgaacgtggcttacgtgggtgtggtgagatgaatgagatggcccgacggcgacagagcgggcgccctgtcattaaatgctgcggacgttc

SEQ ID NO: 58331 - DNA, 167 bp, Arabidopsis thaliana landsberg
ttattttattaaaatgacctaacattatattgggggttggttaaaatttaaaatcataaaggcacaaaacctattacattcaaataccttatacatacaaccaataacaagtccatacatctctactctaccttttatatcctttcaacctaaatataaaaaattaa

SEQ ID NO: 58332 - DNA, 1087 bp, Arabidopsis thaliana landsberg
tgcactaagtttgctagctaaagcagtctcccaataaattctctttatgatgttggcttatgcagcatttttgaatcacgcacttgtgaattattagtgaatattacaaacaggattgcaactgcttcgattcaaccccgaacttctgtgaagtgtagactcaccaaaaggattcagcaagacagttacactttccttacttcctagggaattactaaatttggaatcaaattagtaattgctacataaaacgggctacagtatttgctttgcaatcgaactcataagccttgttgatatcagagggaagactcttcctccgacagaaggttttatcaagagaacaagtacaagagaatttttatggggttctaaacggattaggcacggaacatgagtctgtggcaactgtgatagagcactatctaaatctctatcctggtccttgttttgatgatgtggtgcataaactcacagcctttgattataagttaatagcctatgctaattctccctctgaagtcactcctcacatggcatatcacattgagaaagcatactatactcgtggaggctataatgattcccgtggtagaggtttccagcaacagtttggatcaggttcaagcacaggttctggatctggacaaaaacctacaagtcagatatgtggtagatatgggcactctgcattcaagtgtcacaacaggtttaaaacatgactaccagcctgaaaatctacataatgctctggctgctatgagggtgtcagatcaaagtcagtcttccagacacaggagctactgcccacatcaccaattcagcttctcatcaaaaaaatgtctgttggaggaagagtcttctctctgatagttgatgactatctcatagtccaagcagttaatcataaacgaaaatcaatattctccttccatttagctcccttaacatcatttgcctccacgaaatggagttctttcaaaaccctcgagcagtttcagacttccagtatacagaaaacaatctagtttctgctgaaaacttgatctattgttctgctaatcaaggtctaactgttactaataca

SEQ ID NO: 58333 - DNA, 341 bp, Arabidopsis thaliana landsberg
tgcgtactcacagatcactgcccgagcacaggcgtcccatgtcttggctatgtctttgagcgacatcggctgtgacaaacttcttagcaatatgttgaaccttgccatagctttggacgacaggtcctcgttttctttgctgttcaagaaaccagaccgtgttacggtaagaagataacgcaatttctaataaagggtttctagtagatgattcttgtgatgattttaactgtatcgtagaagtttgctcgacttggtacggaaaatttatggttctatttacttgagactgaaggattagcttgtacctggtttcgaccgggagtttatttagaagagat

SEQ ID NO: 58334 - DNA, 879 bp, Arabidopsis thaliana landsberg
gcaattagggttaaggagaagaattagagatgattgtttttgttttaatcatcttttgattttatagagaaacaaacaagagagagctaaatacaaggattaaaaggcttcaacaacattacaatatcaggttattaagcgaggcccaatgacccaataataagtacttatcaggcccaagtctcttctgcaaataaaaagttttttggagtttttttaagttttctatttcacacagtaaaggctaaaaatcgagtaaagagacttgtagaaaaaccagtgaaatctccggctatttgtgtgaccaaaatgttaattatagtcacgtaaataaatctcgttcatgtactaatttgtatagacaattacacaccacactgatcactccttgtatcttctaacttgatgactttatgatgataaatcatcaataattacaataaaaaagttagccatttggtatatacaaaaaaaaaaaaatgtttcaaacagccattttattgtgacaactgaacagagtaaagaagttgaaactcttctgaacgatctcaaaatgcgtattacaacaaatctcaaaatacaacattcagcaagaccccaaaaaaggggtaattgcacttcagaattagaagaaaatgacgaatatactaacaagattcacaaaatacatacaataaagttaaaataatattatttaaatatattcaataatatagcataagcttttgcaaacagataacaaaaaatcccaatcacgtgtgtgggaaaacaacttatactatacaacaaaaagtgaggaaaaaactttttggctttttttctttagttttgacatgaacctgcaagtgaatcacagagctgctattgaagacgagagag

SEQ ID NO: 58335 - DNA, 1133 bp, Arabidopsis thaliana landsberg
gaaaacagagtgtactctctcctaaatagaatctttttatttttgaaccttttccagaatattttaatgttacactcaacttttttttttatctgattatattcgtttatctttaaccaaatattatattccatttttaatttttggaaccatattcacattcggttaaattttcgtaatagtagattccataatagtttcagaaaatagattttaacaaaaaaaaaaaaaaggatgtacctgttttatattttcaatagtttgatatggcaaaatattctttttatcagtggaaaactaaataagaaagtttttttttcttaggaaaatagaaaaaaaatattcctttcctattatagaatcattattctaatatttatgatattttttttgcagaaaacggttctaaaggcaaactagggaaggctgctcacttggaggattggatcacaacaatcacgtcgttaaccgcaggcgaatccgctttcaaggtcacgttcgattacgaaaccgatttcggttaccctggagcattcttgatcagaaacagccatttcagtgagtttcttctcaaaagtctcacacttgaagacgttccaggccatggcagagtccattacatctgtaattcttggatttaccctgctaaacactacactacagaccgagtcttcttctccaacaaggtaactactggcttctctatttcttttcttgactaatattagtcgaaagatgttttcttgataacgtttgacacaatatatgtttacttgtgtttcagacttatcttccacatgaaacaccagcgacgctgctcaagtatagagaagaagagctagtgagtttgagaggaaccggcgaaggagagcttaaggaatgggacagagtatatgactatgcttactacaatgatttaggcgtcccaccaaagaacccacggcctgtacttggagggacacaggagtatccttacccaagaagaggaagaaccgggcggaaaccaactaaagaagatcctcagaccgagagcaggctaccgatcacatcgagcctagacatatatgttccacgagatgagagatttggacacttgaagatgtctgattttcctgcttatgctctaaaagcga

SEQ ID NO: 58336 - DNA, 131 bp, Arabidopsis thaliana landsberg
acgttaaacctttttagtatatacttttcttatatatcaatctaacattttagtatccaaaattaggatgattttttattggcccttgctaacaaactacatcgggtcgggggaaatgtctgtctcccttt

SEQ ID NO: 58337 - DNA, 790 bp, Arabidopsis thaliana landsberg
tagccggtctcacagggtttggttcgcttgtagggcaacaagatctaaaggtattgaatgagtttgagagttccatcatttatggaccgacaacattataccatctctcttttttttttactcatttcatcataactactcataagtcttagacttcaattaatcttaatgagttaactactctctagctttacttaaaggcattagtcttatattaatgacgcccataatcacgtttaaatatcatacactaacacatgtccagtcgtcgtcgattgatttcctgctttagtaattgtgtgtcaacatttacagttcatttgttcaaaagaaataaaaaaaagtttatagaattataatagttaaaacattcagtttttgcaactttgcaaaaataaaagaataaaaaacaaagtaacaatattgaagacatcacataagtgtgatcatctaattcaaagttgcattatacgtttcaaaaatgatttacttgtcatcgtgaagagattgtgttgcggatctcacaatcaatgaacttgaaagtggtgaggtgaggtagagtcgtagagacatttagttttgaaggatattgttcattcgcgatctaaatgtgataaagtgtagcttgagctaccaacttccttaatagagacgtcgttaaaaaagttagtttgcttccaaaactcaaaactgtccttccatttgctttcatctcttggttggcaatcaaggatagactctcaatggaaactagaacgcgtcaatagggttgtgttcagtcaagcagaaa

SEQ ID NO: 58338 - DNA, 1361 bp, Arabidopsis thaliana landsberg
ccagtataatgttaacggtttgatgagtagaccaagctattttctagtgttcaatgaatttaagctctaaatgacattccatgacggagaagcaaggaaccacttatttacctttcccatgaatggatcggggagatcaaaacgtttgcacaaaagaggtgaaggacgccattggaactcttcccttttaggatacgtcttactcgatttcatgtctaccactccagtgtctttaatttgctgtaaacaaaagttttacgtatgagtatagaaccccaaaaatgaactgataactgcaaagaagattctgtagacatacctctgttcccccagaagtaaactgaagacctccagcaaggaaatcgagaggctgttcggtagcccgtctgacctccttgtaagctttccctttctcaattgcctcggctgcagcctcaaagtccagcctctcttgtgcccgagctgattccgacatgctattaactctgttggagtctgttgtacgtaaccctcctttgtatttctccttgagaaactgctcaaatctttcttgtttagctggatcatctttgaagggcttcacagcatctgctgcctcttgctatttcagggagagaaagataagtcaagaatgtcagtgcaaggaaaacaaaggcatatcacttgaaactcatctatcaagtgtaatcaagctaaagtcttgtaaggtgtgaagttgtttacttacagatgaagctgatttggtgaatgtgtcagagagattggtcgggaactggaaggagcctccagaagaagcagaagtatcggtttctttcaaacttctctgcaatggcttttcccctaataagctgccacgtgtttctgcagtcattttctgtacggttggagacaccttaacatctaatgtcagcttactttgatctttacgcttttgctgctcctcccacagccttcttgcgtagtagtcatgaccgttaccttcccgaagaaaatcaaacagctgatttgattggttcttctctctagaaagatcctcgtatagtttcccgcaacgggaaacaaaagttgcaaacccctcgatcagaagtttcagattattatctgcaggaggaggaacttccggaggagcagaaacagttggcttagtttcagcctcaagaggaccagaaaatttatgccgggccacaaaatccttcgggattatcggaggattaaatctgatataatatacaaaacacacaatgatatgaattagactatctgaatgtaagtagccataatcagaaaattctgagaataagagctctattagacatgcaattgtgtgatgacattgatttaacaatgtcctcatgtgtgtc

SEQ ID NO: 58339 - DNA, 660 bp, Arabidopsis thaliana landsberg
ctatttaaattttctagatgtgtttaggtattcagccttataatgaagccaagcattatgcgatttctgcaaagattcttgagtttagcaacaaaaaccggtctcttgttgtccagtactcagtcaagattgaacaagacattgaatgtggtggtgcttacattaagctcctgtctggctttgttaaccagaagcagtttggtggtgatactccagacaggtaatcatacattaatgctttttcaatgaacatcagttgatagaatgttatattgcaatctaagtcaagttgcgttgatttagttaatccagtgaactttgataaatgattacatgtccatgttttttacaacaaagtcgtcacatggtgttgttgtgtttggggattctcattagtttttctatgcagtctaatgtttggaccagatatatgcggaacacagacgaagaaggttcatgttatagtttcatatcagggacagaattatccaatcaaaaaggatttgcaatgtgaaacagacaaattaaatcatttttacacatttattgtgcgtcctgacgcttcttacagcgttctggtggataataaagagagagaatttggcagtatgtacacagactgggacatcctttcttcaggaagatcaaggtcaagaatgc

SEQ ID NO: 58340 - DNA, 438 bp, Arabidopsis thaliana landsberg
tagtacacttgacgatccataattgtatcacagaacaaaagagctcaagatctacacacaaacctgctgctgaaacaaacatatctaagaactaaaatagaaatcctaattataaccaattaaagatttaattttcttcaagataacttcaaatatcgaaaggcagtacacttgcgaactccatgtcttagtccacataacaaaagagctgaagatctacacacaagtggcagctaacaagaacatatcaaagaactaaaacactgcaacataacaaagatcacagggagaatggtgatatagattctcgtattctgaaaatcaagtgagacccttaacgccaaaaagacggagttctgcagtgtgcttaaaggtgggcgaaaggaagtacctttattgtcaggatcgccgggccattaccggcagtgtgcttaaagg

SEQ ID NO: 58341 - DNA, 1502 bp, Arabidopsis thaliana landsberg
  unsure (1)..(1502): unsure at all n locations
agaagtttcttgagaacctccgtctccagaacccgtggattaacctttcacagaggactcaccgttagaatggtggaactccttctccaacaactcattcttctccatagattcaccctcagattttattccctccgaggaatccgattcatgacctgaagacgaaccagtactcttctcatcactactgctttccccattatctgttgtgttaggcaaaacactcttgataacagaatcttccacttcttcagtctttatacccgacttgtcttccactttctcactgttctccgactcactagtcttctcctcagactcatgaactacctcactagaagcatcatctcccttgtaattattctctcttgcctcttcaatattcgctttctcatctatatctttctctttactctcctcgctctcgtctatacctctgttttctttcttctcttcaacctcactctcttcgctactaccattgtctttcttctcttcaacctcactctcttcggtaccactcttctccctactctcttcagtaccgccattgtctttcttctcttcaacctcactctcttcactaccactcttctcgttctcttcggtaccgccattttctttcctctcctcaacctcactctcttcggtaccactcttctcattctcttcagtaccaccattgtctttcctctcctcaacctcactttcctctgtcccactcttctcattctcttcagtaccgccattgtctttcctctcctcaacctcactttcctctgtcccactcttctcattctcttccgtaccaccgccattatccctcttctcttcaacctcactctcctctacaccgccactgtctttcttctcctcaatctcactattcgaatcctcattagacacaatcccttcactttccttctccttattctcttcacctccttcaacaatctcattctccttatcatcaccattacccgaattaaaactctcaacaacattcttactttcttcatcctcaccttcatctacctcaacaacacgagggataagatctttcctaccaagcttgacaactttatcaacaccaccaacaacaatctttgcactttcctcaaactgagctttcttctcatgagaatgcttaacttgataaagcaaccatatcccaacactaagcaacaaagtcaattgaatacaatgcttcaccttgaaaccctttgatctctgtcctcttctcggtgatgatctaaacatatttcctcaatacctattccaacaaattaatcaatacccaattctcagatctcaataccaaattccatcagatcaagaacattacattaaatgcacaatgattgggaaacagatctaagcaaataatacataaaaataggaactttaccaggaaaggcaaatcaagagagcttttttatttctgggaaaacagaaagatgaacaatttttgcanaaaggaaacgatttgagttttgggatct

SEQ ID NO: 58342 - DNA, 556 bp, Arabidopsis thaliana landsberg
ctccctacaatttttgcgagagctggaaaagcgtctacgggtaaagcaccgtatccatataactgcttgccttctacgcatctccatccattcaaagtttaggaacctaggtgatagtatcccgatcaaacagctgacgaaggggatgagcaaaacagggagtctacaggacggggttcaactagcggagactcttggaacagctggagtcagaagtccccaagttagcgtattatgggggaccgtcaagcacatccggcaaggatcaagggggatctcgttcttgcatagctcaggtcggagcaacgcgtcatcggacgttcaacaggtagtctcacgatcgggcactcatgcccgtaagttgtcattgtatactcccccgggtcggaaggcggcgggggagagaagaggacactgggcggtatctatcagcagcgaattccccataaagatagaggcacctataaaaaagatactccgaaggcttcgggatcgaggtatcattagccgaagaagaccctggccaatccacgtggcctgtttgacgaacgtaagc

SEQ ID NO: 58343 - DNA, 333 bp, Arabidopsis thaliana landsberg
tttgatttcttggggtaaattcaatatttgcatagggtaggtgcggaccctgcctgcgacggtcatcacacactgagtgtgaaccattattgacaagctcctaccgatgttcgaaatcttgggtgcacgcgagcgcatctgctcgatgtagcccgtgagcccccgagtaactcatgtaaatcgcttgggggtggattcggtattttcttatcttaggggcggatcctgccaacgatggtcatcacacactaagtgtgaattcattatgcctcggagcccggcgcaatcttgggtggtgatcttctgggtcggtcgtgctctgatcgcttgatc

SEQ ID NO: 58344 - DNA, 446 bp, Arabidopsis thaliana landsberg
tttattttctaactactaggtgatggcgttctaagcctggggccaatagatagttatgataagataaatgtccttactgcttgtctcttttttcttactcatatttctcgccagtaagaatcgttggtatgaatatttgggaaataaagcattataaatacaaatttcaaatattataaatagcatagaaagtctatgatgaaggtgttgcaagcgcgacctccccattcgtgggcatgtgcttgcacagaaaaaatggtgagcggtgttttcgctagcctcgtgtatccatggaggcgcgtgggctatggagtgaagtgcgcccgcgtgcttgcagcggcggtggcatgaccatgcacccacacatagaagaagacggtgactaaggccgttgtattgttgcctcccccattgggggcatgtcccccacaaatacctttcttttt

SEQ ID NO: 58345 - DNA, 673 bp, Arabidopsis thaliana landsberg
aactgttgtatgatactaaccctatctagctatagcttcaaaaatcttcggaccccctcatagtttattttccattacaaaaggtggtgattttacaaaacctatttaaacttgacttgatcgttcacatgaaatcgcttgacttttactgatttcctgtctctacgtagctactttgaggtctcaagagtttattcttgttcctattaactgttgttcgattaaattaaattgaagaattattttgccacacctgaaaaaaaggttcaattcattgctgttaattttaggatgtcaagcttttttcacaacggtatgaacaagagaacaagttaccagtcaccaaatttataccgctatatattaattgtatagtttgttctgccaaaaacagtcatataatatgttctttagttctcattgcaaatcagggtttgttatgatattcaattaaagtcgagattgatatagagagatgcttagggttttcttgaggttccaaattttggccatcagcgtgagacaggtatatatagagagatcatatatagtgatatttatatacacacaatgataattgattagttagcttagggttgatttcgggactgttagggaatattgttaacattaaatgtatgaagaaaaattcacaaaagctaaggttttaaaa

SEQ ID NO: 58346 - DNA, 358 bp, Arabidopsis thaliana landsberg
tttggagaggggagcgaaccacatcgctgggggggggagattggaaacgcatgccacttgtcacatggagagacactacgtaagacagagagggaagagatatgccgggcgtgatagaagggtttcatatagatcgcggaggtgggatataacccccacacgggacatggaactgcccatggggagcaacaggaaagggaagcgagtaaggactatcatagggaggaacatgcctggtcataagcgctacagaacactcatattgactgaactatacacattataaagtacatacgcgtgtgagatgatagcatgacgactataaagtgggcaagacatgtggcgtgctgagaaagca

SEQ ID NO: 58347 - DNA, 654 bp, Arabidopsis thaliana landsberg
cttggatactgaattcaagatggttggacttgaaacactggtatatagtctctttttatgtgatgtcttgtgaatcactggcctttaagcaagtctaagattgaattctcatcttttgtttaggtaggttacagagtagttacaccaggagggagaaacattggaaaggtgtgttaataaagatcttcttcggtaatgatatctgtctctttgcttatatcttgctattagctgaatgcacatggttggttttaggttcgaggttactcattcaacattaactcgggaatagttgaatcgcttgagctcgattccttcggggtaactattataccatcaagcctggtgggtaacttaattcccttttttctaataaagttgaaatggtttatgtgagatacaagcacaagcattcaatcttggaatagcacaatgttatgattacctacctggtatgtgataatgcaggtgagtacatacagattagatgtcgaggatataatcgaggtcttacaagatatagttgtggttcaagaagatgcagcttctagaaaacagagcttgactaaggtatatataagtcttgaaatggcatgccttggattttccatcgcttcctatcgttcttgatgatgtggagaatctagatcagct

SEQ ID NO: 58348 - DNA, 362 bp, Arabidopsis thaliana landsberg
tttatttctcaaattcacaatcattgtgattatggggtcggtagtagtacacatagtaatttaattaaacattttaaaaatactctaggcccggcacaatgttcgagactatgttactttacataaagcaatcgctttccacacacttcttttccttttcttctccaacggtcggaagtaaattattaattcgtcgactagtcaaaaagttagtcctttgtgagttttctggcactgtaatatttttttttacatttctaactgctgactgagtagtactcctgtagcaaggcatttgagaataaattaggtcaaacatgctatctttataaggagtttcagaatataatactaatagttag

SEQ ID NO: 58349 - DNA, 304 bp, Arabidopsis thaliana landsberg
tttcacttgatatgcacaaccgccctccaaaatggagcagtggtgaaggaacctctataagtcgacacacaccaaatactgtaagacttcagccatccagaggctgtcactatcagtaagacactctgacatcgcgagcagacacctgttaaggaccactgtatgtacaaccagccttacaggtattgcatatatcccgtgacacctgtcggcatggactcccttacaggctcacactatactcaagagcaaatttaaccattctactgcgactgccagctttattcaacatggccaccagtgg

SEQ ID NO: 58350 - DNA, 804 bp, Arabidopsis thaliana landsberg
aaacttctatgctcctgctgattgtcttcagaaagacaaccggggaaaccagaagctggcttcatctgacaagccagcgaaccagaagacatcttcaggtgatcagtcaggtacagacgacgggtaaaagctgagaacacacattttggctcattgctcctaccttaattagatactggctattggtggacattgtcttctgcgccctaaccaggattcaccaactggcttaaagcaaaagaacagatggtattgcgctacaaaagagctgtggctgcaactgagaatcagctaaaaaagctattgtgaagcttttgggtactcgatacaaactgtgcctattggtaatgtttgagatttgagggtaacatctctataggaaaaaggcttcagattggattcagggaagtgagaaaaaagctccctattaccatataaagaaggatcggtcacgtgtaattctgtttgtataaagaagcggaaaaaaaagaaaagggttgcataagtgtatatattcatcaattgtgtctaaaatctgaccaagggaataatagttgtctgaaaattctttagttatgcattttttagctcatttgcccttttgtccaagattatactaacatgatctaactcaagtagaagaaacaacaaagccaatcacacaacaacaactaagcaaatatattctcaagtatatgatttgtatacctttggttcttctttacaaaatttgccttctcctctcttgctctctctttccctttcttgtagcagtctatcaaagttatgtttagtattggaacc

SEQ ID NO: 58351 - DNA, 1315 bp, Arabidopsis thaliana landsberg
ttgtttctaagcttattggggtagaaaaatccaaaagcattaattaattggggtaaactttggcatgtgatcaatggatggatatagtccacattgctacttatgttttcaagaaactctagtacgcaagaatagacacgagttcgaatattttgataaattggaataaacttgttgaatttgtcgatagttatccattttatatattaggtgtcatacattgacacccaaattcaaaagtttatgtgtactttgtaattgtatgatgcatgtatttaatatagagtagattatagtgtcatttgagtcatcgttttcaaaaaagaagaaggtaaattgttaatgtcttcaatatatagctctattggtaagtgtaaagaaattggtgataaaaacgtagactaaaacattaagagcaattagcaacttaaaacctaaaacaatagcaaatttcatgatatgtaagaaatcgtttgaaaatagattataaaacaacgacaaatattaatatcgtagcttcggtggtttacatttgaagtaactttagatgacgacctaagtatcattaataaacaataagattacctgctaatcttggttaacggatagcttgatgctacaactggaaccggtttgctatataaccggttattggttaagaaccggtcaggttaggttagattagacctgatgttagtgtcaataccctacactttgtttgtgttcaagagttcaccataaagagattcgacgaatccaacggctcgtgaatgaagggtgcatagagatgggagagtagagaatcgaagcagacgtaggatatttgttttgttgacgtcaaccatagaaagatatacacgtggagatattgagaagagcgtcttaagaataaatgcttttcttgtttttcatattaaaacagtaaaaatgcttttcttgttaaagaaaaaaaataaaaattccttgactaatccttcacgccgcgtctagcccattaaaaattttcggacaacaacaacaacaacttcgctttcctatctctttcagctttgctacactaaacttggcttatcattgctaatatggctcgactcggcttaattttgactaaccacaaatgttttgtcaaaatttcagtaaaaataaaacaaaaattaagcgaaataaatatctagggaaactatattacgcaatgtctaattaggaaactaatcattatatttatcccaaagatattccaaaagatgattatccactagatattatctgattcgttgtaggtgaaaaaagaagaatgagaaagaacgtgaagact

SEQ ID NO: 58352 - DNA, 1134 bp, Arabidopsis thaliana landsberg
tgatccctaagctatcggcaacccaaatcactcctgcgtatttattaatgaaaactatcattacgaaaaataaagcaattgagaaatatccaaagataatgttcagtgagtttcatttatggtagagaatgtctttggggcgaatagggtaaggaaggatagcgtgaggtttctcaaggactcgggacttggcttagaaggtatatgcagcaaatgcggcgtgtgggaagcatatagggccagcggtatggtggaatagatgataggttgggtggttccacaagcaggctcgtttaaaccttatacatatggtgcatcatatggaaatccgggctggctaccgctggtggtgtacgtgttgagaactggtgaaagggattgatgtggagggcttgggttaaatgtagggcgatgcttgacaccgttagcggagctttgtggagtttacaatggcctatacattgctttggaacagagaattacgtgtttggagttttaggtgaattcagagttggttatttacaaaaaccgtctcaatatctagttgagcttttggcaaaaccaacaaaaatctcaaaatcttttaatgaattttggttttaaaaaataataataggccttttacccttttgcaaaatcaacaaccgttgtttttcctgacacggttgtactatgatttttttgtaaattaaaattaaattgtccatatttcacatgtatataaacaatctaattaccttgcagacatattagctaactttaagttctctttacatttaggattttatgcttttattttagttttggtggaggttgctccgattaatatatatgagggaagatgttgttagaccctgtttccaagacgaattcctatgtaattgtttcgtttctatttttaataaaatctgggagaattatttcccggtttttcacaaagaaaaaatatgatagagaatatctatgaaaattaaggaagcaatgcagtattttagatcgtgattcatagatacagtaaacagtatgtaattagtctaaactgtgttattctagatatctcaattcatgagaagttaatgcaatcctttgacctttggttttagacttttagtgaaagtaaatctaaatggaatt

SEQ ID NO: 58353 - DNA, 1349 bp, Arabidopsis thaliana landsberg
atagccctctgatctccttacgactttacgtgtctttgtctttttctttctctgatctctttccttgctttttactttttaggtcctactactatcctttcgtaaatcgtaacgacataaagaaaacaacatgacttttatggaaggaataaaaaaatggatttgttgtattagaattagcagctttcaatgaaaaaagactatgaataccgaaagtaagtgattatattatatgtagggcctgaagtgggaaaggatcaggagaaaaaacgagaattgtgtttaaactaaaagttacaataattagtcaaataaatcaaatattacaaataaacgattactatttatttaaaatatacttttaataacaaatataataatttatgataaattacaccgaaaatgtaatcatagatcactaaatgttataataatttataaaataaatttaaaattacttttttggaataaattaaatgttatatagttcaactaaatggttacaaacgtttaaaataaaaattacagctattcgtaaaataaatattgcaatagttcactatttatgaagaatttagtgaaaagactgaatcgtagaaaatatttatccagactgcatttttattaaacacctatcatcgtaatataaatttaatttaaataaaaaattaatgaaaaattactaaaaaaacatttattattgttattgttgtttttttcccctacacgcacaaactagatctgcattaagaaaatacatatataattttactacaaatttcggtggtttcgtcatcttctctcttcatttgtcctcgactggaagaccatgataggaaaacaagaatataacataattacaatgtgacgtacgaagaatatgacgtaagggaagcaaattaagcatgtctttttttttctttagtcaacattgaacatgtgtgtaaatctcatacttttattgaaggaacaaaaaaacaagaagaagatttctttaatgttgttgacgttttctacctttgctagctgccttatcttggtcgtttctgaaatctcccatatagacaaaaaaagagaagaagacaagtctactttttatagtttgatttatttattgtgacactaaatcctctcatagtctcatctccctacttgtctttgtctttttctttctcttatctctgtcccttgatcatggcccatgttctttcgtcatgacataaagaaacaacataagacatttatggaaggactaaaaaatggatttgcattagactgagaaaactatgaataccgaaagtgattatattttatgtagggccgaagtgggaaaggatctggagaaaaaa

SEQ ID NO: 58354 - DNA, 516 bp, Arabidopsis thaliana landsberg
tcccatccgatctcagtattgatgtggaaaaagccaaaagagttgtccatgatctcgctcagagtagattatcgaattcgctggtccaagccgtggcattactcaggcagagaaactctaaaggagtggtatgcaaatcatcttttccctctcttatcttgacagaaaacatggatatttcagcttctgggtctaaattgtgtatgtatgtatgctttttttttttgttttacaggtcttgtcgctgaatgatttgcttgcatgtgacaaagctgtgccggctgagccaatgtcatgggaggtctcagaggaattatctgatctatatgctatttattcaaagagtgatcccaaacccgcaccggaaaaagttttgaggctacaatatctgctgggaatagatgattcaactgcaactgccctccgtgaaatggaagatggagcattatcttctgctgcagaagagggcaatttcgtcttttaaatctttggagaaatacttgaagtattatgaat

SEQ ID NO: 58355 - DNA, 975 bp, Arabidopsis thaliana landsberg
aagaccgaaaaccatctctctctatctcacaataaagacatcttttttcttttaatgtctctctgtccctctctcttcttcttcatcttctaacaccaattcaagaaagaaggaagcttaagaagagtctatcatcaatcaatggagtttcatcttgaacatcctctctcacattcttcactccacaataacttcaacgacgacacagacgatgaaactttaccacactctctcttcctcgtcgagtttcaacacatgccttcttctcattacttccatagcctcaagtcctctgcttttcttctctctaatcgaaaccaagccatttcttcaatcactcaggtctttttaaccaaaattattttctgggtttagctctgaatactgaatcgttatcgaaagacttaactttattttaatttgtaactgaacaatcgcagtattcaagaaaattcgacgacccatctctgacgtatcttgctgtgaattatctagacaggttcttgtctagcgaagatatgccggtaaaaacagaatcttccgacagaatctgtcctttgtttcatctgagttttgactaaattgttttgtcaacagcagtcaaagccctggattcttaagctcatatctctctcttgtgtctctttgtctgcaaaaatgaggaaaccagacatgtctgtttctgatcttccggtaacttaaaactcatgaaaaagaatgaatctttataatgtgaatgtgttttaaagtgttgataagtgtctgaacattggatttttttcaggtggaaggtgagttttttgatgctcagatgatagagagaatggagaatgtgattctaggagctcttaaatggaggatgcgctctgttactcctttctcctttttggcctatttcattagtctctgtgagctcaaagaagaagatcctttactactaaaacattcccctaaatctcaaaccagggatcttac

SEQ ID NO: 58356 - DNA, 1142 bp, Arabidopsis thaliana landsberg
gtctaattaacgtttatctgtatctagatatagaagatccgatcaacaaaatacgagtgtgcatttcttcatggatcatgatcagaaactttcttatgaaaaacaatgagcaacacttttatgggtcactaagggttcgtgagttaaccccatacctcttttgtgtgtgtgccataggtagtggaaaagggaatctactgatgttagagggtggtgctgtttcggcgacccacaaatctggacgatgtaggcccaaattttacctcaccccaccattttcgtagacttttcattccggtcccataattttacatttcgttggtctaacccatcattcattgattctttacctttttgccaagaggctacttaacctttttgctctttatggattggtgataataacttagtctcaccataaaattcaatgtttttctagtcaacaccatctaaattctaattcaacctttttttcaacgctaattaaaacgaaattcacatatttttagatttatgactactagataaacaagttttatcgaaacttttttcaacaaacatttcatgcgaaacaacaaaccacggatcaatacttactaatcacggatcggaatcttctatttttttttctttctattttgtaactatcatatttaatgttttcaactaatcacgtagaagggagctttttcaactattagtgaattgacttgtaaacaaaaggagaagtcaaataagaacaacgataatagtagaagaagctcttagactaattaattaatatcttagaggtacaaaaacaatttgattattattactttatgcgtcatctcttagatcatcttccacgggcctcatggacatggacattgacatcatgactcatgagtttggttggtgtaaagttcaaaaatattaacacataacaccaaacgatcaatgtcttatacatatttctatgtttaaaattcactaaaatatgttgcaaactgaataaaaaatattagctgcttataccaattgtagaagaataatatatagcaacaaaaataatatagaatgagtacaaaatggaaaataatctggtgtgtatataagttgattttcataaaattctgatagtaatatttgacacaaatcat

SEQ ID NO: 58357 - DNA, 556 bp, Arabidopsis thaliana landsberg
tacgcatatattcgtgggatcaatacgctttgtgagaactttacgacagattccctgcccggccgcatcatgacattctcttgaaaatgtccgggagcgcatccattaatccaaacccccgctcatattcaaacattcccggagtatcgtagtgaccgattttctgttgcagtatggtcttttcctggccaagaccatcaccctcgccgcggcggtcatcatcgtgctgtccgggctattcgcggcggtgcgtgaagcccgcgaacactcccacgaccagctccagatcaagaacatcaatgaacgtttcgagctgatggccgatacgctcaaccacgaattgctcgacgaaggcgagcgcaagcagttgcagaaggccaggaaagccgaggagaaagcacgccagaaggcacggaaaaagggccagcaagcgccgcgcccgcgcctgtttaccctgtcgtttgacggcgatatcaacgccagcccggttgactcgctgcgcgaggaaatcagcgccgtcctgcaggtcgcgcgcaaggaagacgaaatcgtgctg

SEQ ID NO: 58358 - DNA, 1286 bp, Arabidopsis thaliana landsberg
  unsure (1)..(1286): unsure at all n locations
agctctcacgataacttgtaccctcatgaaaagacaagcctctccacaagatgaaagcacggcaagaacacaatggactgagccaaatgcactggtaattctgcacaaatctaatgcattccactcctcagaatctatgcattgcaaatttccaacgtctccaattgcatcaaacacaaaaactcctttacgatgcgcagcttcttgtttatccactccatttgttttgattcttttttgtacttgaacatccaagtctttttactctttctttgcttctgcatttgttgtagatgaatatgcagcatatttcttttagtattaatccaaagatttatcctgaaacaatgcatttcaggactagatacagaagctgtcttccaatcaaacgtcgtatgtaaatgaacgcagtctcttggatcgccatttgtgcttcatgtagagagcagtccgcttaaatcatatctcatcctcatgttgcacatcagtcttgaaaagaaagattgtctcctccgtctcataggtttacatctccatagcattgttaagcaatctccatactcccgaagatccattccatgtttgagttgtaacattatgtacttgtagaatctgatctaacccaacctttatcacatgacctgcatccaactctctcccttgtatatctccttgtaacgttgctgaaatcactgtaactttgggcaacagaatttcagacaacacacaaataactcccagccaactcgcagtcttggactcccaaagagaaccaagtaaacattttatcttgtatatggcggggcttatacgcttcaagatctcaaaatgaccaaaccatctaaaaatgaccatactatattagatttagagagagaagtaaaagtttgttatttctcattaactgtaactacactttctgtttataaactatataagattacatgtataaaactatatacaagtattagtatacactatatcgtaatatactattaagtatcaaaccagatttgaacttaaaccaccaatttttggtaactgatcgctttatgtatttcagcaactgtcttatcttcaaatacttgtcaacaagctctcgacattcactcgctctcaagaagacataaatatgtgtctaaaagctcaagaatggcatgcttgtctgcagtagaatctccaaattgagcaagtggtcgacgcttccttttgcacttaaacatctagaccttagaccatctncaatgtataacttaatattttactctaaaatagagggacactat

SEQ ID NO: 58359 - DNA, 255 bp, Arabidopsis thaliana landsberg
agctcctgagtgtgcatagcttatggcccaaaagttcattggaaaactgaaagattggttcaaaatatcggatgagcaggctgataatgaaagccaacatctcacagacttctcttaggtgggtacaagctcgctacaacgggaacacaaccagacgtttggtggctatgcaaatcacacgaactcatctgaagcccgcacgcgaatagcgcgccttgttttctagagcgagttatactgtgagaaactttcaat

SEQ ID NO: 58360 - DNA, 1454 bp, Arabidopsis thaliana landsberg
taaactatacgaatcctccaatataaagctccaccctttctctttctatctctctctctccattgttgactgtctctcttccctcgtaaacatcgctgtctctaaagatggcctctctctcaggcctatactcttcttctccatctctcaaacctgccaaaaaccattcttttaaagcattgccggcgcaatctcgagattccttctctttcccacatacctccaaacccaccaatctaccgttgactctctcctcggctcgttctgtggcacgcgacatttctcatgcggattcgaagaaagagcttcttaaggatccggatgcgttgtggaagcgatacctcgattggttttatcagcagaaagagcttgggttgtatctggatattagtcgggtcggatttaccgatgagtttgtggctgaaatggagccaaggtttcaagctgcgtttaaggctatggaggatcttgaaaaagggtctatagcgaatcctgatgaaggaagaatggttggacattactggcttaggaactctaagctcgcacctaagcctactttaaagaccttgatcgagaacacacttgattctatttgcgctttttccgacgacataatctctggaaaggtctgtttttgatcccaccggccttgtttggcattatgatcgtaatggaaaagatagttttatgcagagtgtcttacttagatcaccttttgagtgttgtttggaaatttctgatgctggaaagatagttgtatgcagagtcttacttagctcacctttttgaatcttgtttgtttgttactcccactcaattttgtttgtatgttgcagataaagccaccatcttctcctgagggtcgttttactcagatactttctgttggcattggaggctcggctcttggacctcaatttgtcgctgaggccttggctcctgataatcctccattgaaggtatcgcatactgttctaattgcagtcaacattacattcccttgctcttaacactcttagccatccccactaacaaatgggtgttctttatctttgcctcgtaaaaggatgtcctctcttaggtttttctgattaaaagagtctactttgttgtctactgttttctgactttatgttcttcctttggttgttgacagataagattcattgacaacaccgaccctgctggaattgatcatcagattgcacaacttgggccagagctggcctcgactttagtagttgtcatctcaaaggtgtgtcctatattcagttgtgtttatatgatggttggtcctgatattggcgagcatgattaagtttcttacgtatttcccagagtggaggtactcctgaaactagaaatggactactggaagtgcagaaagcattccgtgaagctggtctgaatttcgcaaaacaggtgttaatctcaagtttttgtttccgcttttt

SEQ ID NO: 58361 - DNA, 1770 bp, Arabidopsis thaliana landsberg
actaattgtctgatgtagcaatcggatttgaggaactctcttatcacaaagtctcatgagactcaaaagcaatgagagagttattgtctattaccttattatctcttgaatgtgaaccagcgacttcagacaaaagcctttcatttcctctctgactgattgaactgccaaagagataaagacaagaagaccatcatcagtatatgcaacattgtcaatgattttatgaagaaatcacacaattcagtaatatcaagtgttgggtcagagactatgtccccaaaatgaaaatccctacaagtgattcattcgtctctggcagcaataaagatcaatgctttattcgaaaaacagttctatagaattcgaaaggccttagaagaagaactcacgacatcgtgacgactgaagaatatgcctgtgatcgtttccaaatcagagaccttaacatgttaaaccctaaagctgagtagctcaagtatcgcgactagagactttttctcccggaatgaagatgaattgaacttaggcaagcgattataaatctgaaactgcagaattcttaaaaactttgtggaatcatgagtcgtgaagtcgagatcttcgggaaaaaaaagagagacctttcacaatcacaactgtggagacgattgtggcgttctagcttccacgtagactatccacgtgtcatcatgaataaaaaactaaaacattgaatagaataagaattggagacactcaagaaactgagaacaacaaacaacgctgcagcgattcagtgtttcttagatgttactcacattcaattttacttattagaccgttttgacatataataaagaatcatagtgtatacttgttagtgcaattggtatactgactcgattcagaaatttttatttaagataagataaaacagaaaatgtttgcttaccttttggttaaattataacgacaaaccaaaatgaatccacatgggtgaagaagctcatatgtttgttttaactctcaaattcatatactaaacttgttcgtaacagttggaaagtgcataataacttgatactgtataatcaaaaatatgaattgttgaaaaaatcataagtactagttaagcaaattatgaccaagacataggctagtgaattgtaatatttacggcattgtgttatcatttagatttatacaacacaatgcatgttattttttaaaataattatattgtgacaattgcatagttaacaacctagctaaacactaattacatgtgttacagaattaaatatcacttaaacgtccaaattgccgacaaaaaaacgtacagattagcggaatagtcatcacattgtgaatttattgtttgattgatcactttaaaattttcagttagctattttgcaataataataactcataatttagatgtgacacctactctttttgttctaacatagaagaaaaattcacaaaatttcatgatttgaaataattcacaacttataaacaaatcgagtcccaattactctggtataatctttgtatgctttctctctcaaaatctctccttctttctctgtctctctctatctttccttcaatggagcttgttcattctgcaacatttccatgtaaacaaaagctactcatcgcagtgaccattgctacatctcttttaaccatcatccctcttctctaccctttgcttgaagaccctaacttcttcctcaagcaacaacctccaagccatagcagcatcatcaacctcgaaaa

SEQ ID NO: 58362 - DNA, 1306 bp, Arabidopsis thaliana landsberg
tgtacatccctatgcacatactccatttctcctttctccctctcctagaggaaatagagaagctcttcaagtatccgatgtttttgtttaatcaacaagaggcggagatacgggagaaattgcatgtgtaatcataaaatgtagatgttagcttcgtcgattatactatagtttagttctctacttcttcttttttcgtcattacaatctctttcttaatttacttcttcttgatagtataattaagttgtttgtaataatctgtacaaagatgttgtgttctcataaaaaattcaattttgtaaagaagctctacatgttccttgctctgtaaacatggtccccttttggactacagtttctcgaaatggctcatcagactcagagacgactctccaatctgcttcaaaagccacaaaacaggtaaaacagatatagagacacaaagtgatggtctttatttagataaggttagcaagaaaatcaaagatataagtatagccttcgcttggtgataggatcttatccactatataatccacacccatcaatcccttctacatctccaccacttgtttttttttttggtttttttttgccttttttggtttaatccgagaaaatttcaactttcgatcaatattttccctacgtttggaccaattttgataatagctttagcggctatacagaacattagtgtgatacactcaaacgaaaaaatgataagaccgaaatagtttccttttaacttgttgatatgataccatttgagtcataataattataatctagaggtactttcttgtacaaatatgtgaaatgttttgcatatattaatgtttgaaatattagacttagtaaatccgttttgttaatatcagaagttagtatgaggattaactggatgttactaagcaaccccgacaatttgattccttgttctgactcaaaaaccttatacacctttaaaattttattttaccaaattgccaagtttactgttttacgtaaatattaatgatcgagataaaagttttaagagaagttctttattccaccacaagaaaagaaagacacttttctatatatgcacctcacctttcgttttcattatcttctttcaaagggtatttaattttacaatattactagctattactcttgtttgtagtataaatatccttctcttcgtccctctcatcgcctgtctctcctcttcctcttcccgttccatttatccgcaaacggagcttgttttcggtgcacctgcttcagccacttcaaacttggtatagtatataaa

SEQ ID NO: 58363 - DNA, 834 bp, Arabidopsis thaliana landsberg
ctatatgtcttccactctctctctcttttctggttgcttcgctgtctgagactctcgagtgattaacctacttataatatgatttttgataacttaatcattagagttagttgatttgtctatgcttttgagaaccaaggagacctccatctgtatttcatgttaatgagctgtgtacaagcattgtgtactccactatttctattattttgttattcatttcggaattttatacgtttgacttttggtatatagcattattcctttcctcttggcttttgatttttgttttcttgatcaaaacttttgattctacttataaaaccatatatgcagttcatttttatgctaagagttacgtacttacgttatcccaagtcgaatagatttggaatactttaataggggtttttttttttttttttctatactttacgttcttgaggggatgacaaaagaaaaaaggatgaagaaaatgtatgatgggctttttagtccgtttgcttttataattgaattcacacggcacaaatattatggcccatagttcataaatttgactcattttttatggaaaaaaaataaaaattgtgcaaccttgaccatacaaaattaatctacaattatgttactctgtactgtataccctgtagagtagttaatgacacgaccttatcatgtgcgagtgctacacctacatgatgtatgacccaatcatgaatcatctatatcgactacttcaacatttttgttaactatttcaaaaagttatcctagagagtatatatagttatgataagacatatcagtaatatgggttttccatatcaatgg

SEQ ID NO: 58364 - DNA, 494 bp, Arabidopsis thaliana landsberg
ctgagaaacctacagcgcgttcaagcgagttctgacctttgcatcagccggcacacacgccacgtgttatgcttgaaactcagcaacatgacaagtgcttgcgatcctgcagcagccgcagcatgcggggtgtgacgttgaagatgtggaaacgggcgcgccagcggagcccctacccgtgcattgtctggcagcgcgctgctcggctcgcaggggggcaggcccagcgcgtccacatggaagatgccgtcgtgccccagcgcgccctgcgcaaccaccacgcagttctctgcatgcgagcagagcaccacacggttagggggtcaggttaggcttttgagttagggcacaagggcatggttagggcacaagggcggggttagggcaaaaaacagtacaccatcattactagcgacatcaggccagtttgagccaacggacattagcgcgagcaccgataccattagatgaacggtagcagcccatgcagaaca

SEQ ID NO: 58365 - DNA, 421 bp, Arabidopsis thaliana landsberg
tgtacttaaattcaagaggttctcagattccctacggtatgtgcacagtaatcaccaacaaaaacgttcaataaacatgagaagcttgagttcgaaatggaaaagtaagagcataagataagtcataagagtgataaggaaacagatcaaaagataatactattagaaaactaatgtaagttataagcaacaattgaagctgaagagtcattgaaactccattgacccataatcaaacaaatggtcaatggataacaaatattcgacctgactggttaatgcagttaacctcaatgccgtgatgcttgggagtcaaagattctgtatcaccaagaaacaacaaagagcttcacaaatgttgatatagatagattcttatttaaattgaactgaagaatcaaaacataatcaccattttttt

SEQ ID NO: 58366 - DNA, 862 bp, Arabidopsis thaliana landsberg
ggtcttatagattaagcagcaggagataaattgtgagacttttagctgtgtatgtgtgtatgtggaggttagggttcaatttttttctacattctctctttccctctatgttgttgtatcatgtccatgaaagtggaagctttcttctagttatcagactttagatgttttagatttaatttcctcttccaagtttctttcgaagctttaaggttttactattttgggtatgtcttcacttcttaaaatggaaagttagttactcatgtttcttattagttgatgttttggaaatgtttacacaaagatataaacacattatttgtgaacattaatacatttatctttatccttttgtcgtttttgatacaaacaaaagcctaaatagtcttcagtattgagtattgaccatacaaatcatttatttaaaacaaataaaagatttagaaagatagagatgtgacagaagaagagagcatattgattatacaaagagcaatctgaccaaactcaaacaatttgtgattctcaccaccaattggagacgtccacgtcatcacaccaccaccatcaccgtcaccgtcgtctctttccctgaatccattctcacaagtcacggcggattccatggcagcgcttaccatcacattaaccgtacctaactctttccttgtaataaaaactctcactgcctcttccaatctatccgtcgcgtcctcgtaaagctcgaggcagtcacgaaggcaagcacccgcggaaaccaccgtcgtcgtcgcttataagaagctgttgaatggtggaagcggttgcgtgggcgttgtcgagagcttggagcattggaactagggcatgtgaagaaaga

SEQ ID NO: 58367 - DNA, 390 bp, Arabidopsis thaliana landsberg
actacatcaaggatatagaatttctagtattacgaggggttaatttgggctacgcctggtctcctataaactattaatattataaaatttatttcatgatacacactggccttagctattttatatatatatagaatttgctatgcataaatataagaatagtgagcgatgcttgtatatccacacactacctatctattaacgagctttgaaatcaaatgaacttcaccttttaaacaaattacactccggcaattttcgtacgacatggcagctgatgcattcttgcgcggtcaatggagtcactactacctctaatacaacaccaggggacagacgagaccctatgataactgacgattgtttcattttataagctgaataccagat

SEQ ID NO: 58368 - DNA, 448 bp, Arabidopsis thaliana landsberg
catcatcccccaccttctctttcttcgattatccaacatgttgatgtaatgatgttactatactacccaattacttttcctaaacatttgtaaaatcagtcacaatgtataaacttaccatatggaacgacgactctcttcgatcaaagattttggttaacttcaactatcttgaaaaatctttgcaaaagattgaaaatagttcgttcaaacttaataccgtagattgtagccggaaaatttagcattttgcttattctcatagggcatgaaaacttctagtcttctaaattctaatattaagtaatcaagactatagaaaatagttcttagtattaaaaacatatgagcaaaacatatgattatgttggatataacatctttgaaattttcatacttagactcggtttttcccaaacatgtgtgtaggaatatatgatgtatcacc

SEQ ID NO: 58369 - DNA, 131 bp, Arabidopsis thaliana landsberg
tttttcttttctcttccccacatcgaaaaaaaaagggaaatggaaggttttcttatacaaaaccccaattaccaaatcatcccacttcaacaccttttaacacaacctttcttatttagagaaatgccctt

SEQ ID NO: 58370 - DNA, 551 bp, Arabidopsis thaliana landsberg
aattatataaaattttacaaataaatgtatagagtttttagtatcatatgtatcatacatatgaaattagagctataccaaactaaccaagctagatttaaattcagtttgattatcttaccctatttttttaaccgaatatgaacttttaacactctaggctataacattgggtggtgacttatatttcttctttctttttactagcctacactctttttcacatgtcactttcaacttctctcttctattacctcacaagaatttctatgtttttttaattattttatatctattaaaaaaagtataaacaattaattaaaaatctggaatatcccaattttagggctttattgagataagatatcagtggaagtcaaaaaagaatttaatgttaaagagtttcttctctctaatttcatttcatttctctttttttttttctttttcttctttctctctctcaccatcacatagaacacagaagaatccatggctgcttcttcatcctccgctgcttccttctttggagtccgacaagatgaccaatc

SEQ ID NO: 58371 - DNA, 323 bp, Arabidopsis thaliana landsberg
ggtggtgtcatatggtgagtgagtctctgccagtctagaggttcctaaagaagaggatcggggatctggactgtgttcgtaaagggatccactattttaatctcttgattggccactctctaatccaacacttaaacataccacacatgaaaaataagactaaatttaaagcttattaatatggcttacttattaggcttaagaggcctaaactcatgtgatgcatcctagaaaaactatggatatacaaaattatgtatatcacctacgtctagctgaaatcttacccaccaatgccaatcaacagcttgccggagagaata

SEQ ID NO: 58372 - DNA, 445 bp, Arabidopsis thaliana landsberg
  unsure (1)..(445): unsure at all n locations
ccccccccccccccccccccccccccccccccccccccccccccncccctcccctcnnntcccccctccccccccctctccccccccccccccccgctcccccccccctcccctccccccccccccccctttttccccctgtcctcccccccccccggggccgcccccacccaccccccccccccctccccccccccccccctcccccccccccccccccccccccccctcctccccccccccccccccccccccccccccccccccccccccccccccccccccccccccccccccctcccccccccccccctccctctcccccccccctcccccgcgctttccccttttccccccccctctctcccccctttctctccccctctttttcctggtggctcccccccccccccccctcccccccccccccccccccccccccccc

SEQ ID NO: 58373 - DNA, 894 bp, Arabidopsis thaliana landsberg
ctagaattctccacctactcgaagagagttggttaccaaacatatatcatagcatcagaatgcaaaaagaaaaaaagaaaaaagctttgaatgtggttcataccttaatgctgtccataattatcctcttcccaagaagtcgagcaagaatcaaaccctatcacgacagacacaaacaaagttgaaacaaattaaagtttgtattaattatattctcgtcaacaaaaaaatttgcttgaaaaatgaaaatatatgggaatatcaacgcatagtctttttaatcgcagtgagttggtaaaaacagaacaaattggaggatttgcctaccaatagcatcaggaaatcagattcaagaaaaaagagttgttcacatgaccaccagacaaatcataactgccttttctactttactcaaattagatgaagaaagcaatctgccatctggactgaagataacctctcacctacatcaacaaaggtatgcatgcactctaactctcgcaagagacactacatatatatgttcatacctttctagcaacatccatgccaccgaggtcgtcacgtggatctgtgaagaaaacaaaagaacatgtcaatcaaacatcatattaagaatattcaaagatgatctttcttttcatctattacatgtagtttttcccaaggctaaaccaactatgatgcactatcagtcaaagcaagttggagtatattgtcgagctacaaaacagctaatggagtgtagaaaagcagacaaagcaatatctatttgaagatagtgttgctaaaatagtagtagataaagcagatgtgagatgactatcaatcagaaaacaagatatgtgctatgatgactaaaataaaactggacggacctggttcagtgtaccc

SEQ ID NO: 58374 - DNA, 919 bp, Arabidopsis thaliana landsberg
tacagttatgcaattcaattaacaatattaacacaatgacatgatttgcattgtaatgaaatttaaaattttgacaaaaaaaaaatggaaattcaaattggttattaacttttatttttggggatgatttggaaatttggtgaattattggttacaataaataaaaggaaatattgaaggacttatatgtaattagtgtcgcctaatcgagtaattcgatccatcttcgtctgtcttgttaacaaagaaaactgagaaaggttttcttataagatcccattcttgtagcaaaaacccagaagaacaaactttcgaagaagacgactaatcaattcatctgattatggagagactacagagaatcttcggagctggtggcggtttaggtcacgcatcgcctgattctccgactctcgatacatcggagcaggtttacatctcttctctcgctctcctcaagatgcttaagcacggtaatcaatccaaacccaagctctaatttagtcttctcttgcttagggttttatgattttgtctcgttctctgtgattttactctcgtcctcttttgctctggaactctagggttttattcgatctgtttctgagattcaaaatgcggatttgagtagagatttaatgaaaattgatcggaatattgcaggaagagctggtgttcctatggaagtcatgggattgatgcttggagagtttgtggatgagtacactgttagggttgtggatgtttttgcgatgcctcagagtggtactggtgttagtgttgaagctgttgatcatgttttccagactaatatgctcgacatgcttaaacagaccggaaggtaactagttcttctctaaaacctatttactacgcttaagtgaggtttcctatttaggttttggatctgattcttctt

SEQ ID NO: 58375 - DNA, 561 bp, Arabidopsis thaliana landsberg
gcaattttattgtattgtcaccggatcttacaagatttcgtcgcattgtcaccggatctgcatcagtatttttttaaattaaccaatggaacttaggaagttgcatcataatattaacactaaattgtgttgaatttttagtattgattgactctattccaaacatgttttcactgattacaaataaccgcttgtcatagatttttcatattcttacaaaataaatatatattctattgaatattcaatctaattgacgaaagagacaatatgaaaaatatattcatatatctacaaaggttttcggagatctacaacaaacatcaatttatttgtctcacgtggaccgattataaatccaaatatcttagttgcattggattaaattgagaaaaatatggacaatatttgcattgttatggaccttttgttggtttactggaaaactaatttactccaaatccatctgcccccaattatctcgccaacaaaaatgacacgtaaatagcacttatctggagtaggcatataagttttgttcccagttaacatcttacttag

SEQ ID NO: 58376 - DNA, 259 bp, Arabidopsis thaliana landsberg
atcatacattaacttcaaatttttatttctaactcattcttctttgttataaaactcaatccaaaactacatttaataccttctatgtgaacacacatattcactccactttatcccttatcttccatcctatcattcatatgataaatctgataaaatcaaagaatattctctatattttataattaaatttatcaatattaaaaaattttacatattaaaacttaaaccttttgaacgaaacaaaattaataatatt

SEQ ID NO: 58377 - DNA, 641 bp, Arabidopsis thaliana landsberg
tcgttgaacctcaacgttctccaaggcattattcttgcctatgggacaacatatgtaaaattaggattgctatgagggcaagagaaaattatgactaagcattataaaccagtactgaccctgtgacacatgatagacatccgatgcagactcggttgcctgttaaaaagaacaacatctccttcttgcaaatggcggtcaactatgcagccaatggccagttcatcagcaatacgcttgcgataatcaccaaccaaagtcctgaaatgaaatgtgttaatgtccccatatgatggtcaaacagccaaacacatgccaatgaccctatgaggactacgcagtccttcagtggtattagcctattaggtatctacttcagttcagcaatagtgtttacctatattcttgaaacaaatcgcagtggtttgatttgttacttgcacgttttcatttctacctatgtaaattacctgtttgtgtgtgtctataccatgaaccaaacctatatacgagtcaacataaatttgcaagtgcacataattttactgaaactcaagatcattttgactgcgaaaactagctacgtaggtatattaagttttcttcagtttaatagaacaacattactgacattaccttaa

SEQ ID NO: 58378 - DNA, 516 bp, Arabidopsis thaliana landsberg
cattacttaaagttgttttttttagcctaacaatgtggcgactaatcatttattttactgatccattcaaaggagtccatgatgcgagatatgaccgaaaccccgggggatacccccgccttgctgcaaacgctcaacagccgttgggatgaagccttcaatagccagcagccgaccgtgctggcggcgctgtacgatgacgaggctacggtgatgccagcgggtgctgcgcccgcgaacggcggtcgggcgatccttgagttctggcgcaacctcattgcgcagggtgtcgtcgaccataagatcgagatcgtcgaaaccatcgtcgacggcaacctgggcgtgcagcgcggtgcctggagcgctgctgcggtcgatgccgcaagccagcgccagacgttccgcggcaacttgcagctggtgttccgtcgacagatcgacggtagctggaaaacctacacacacatctggaactaagcgacacttgcaaaaacgggaagccaccatgttcaatac

SEQ ID NO: 58379 - DNA, 1759 bp, Arabidopsis thaliana landsberg
gagactgactctatatatgtgtggttatattcagttttaaatattttattaatgatgtttatacttatttgaaatggaggatcaaaaccaacctctagatgatgagtaatcgtgttttccagtacgtgtattgtaagtaagaacgaggtaatccgcatcccgaggactaaaaggtatactaatacacatacgtatatgcgtatacaaatttcctgcgtaaattaagctttaaacctcaggatgcagattacccggtcctcaccaatactcatcatcgtcaccccccataatgcgcgcaagttcttgcgtgagcatagtttatgtatcgttcttcttctagttttttttgtttggtgagaagtcagtagggaaatgtgagaatttataaccctcgtgaggctaaatagtattgagaagatgcttattcgaaaggtttaatgctatgagaacatatgctctagtggaaaacaaaattttgttgttcatgttctatcatgtccattcgtatgtcttagccttctttgtttgatatgattgtactggatagatctttagagctataactatgcgaatgattgatgggatgtcgaatctgtactgataaatttatggtattctttaagaatatagacattcatgaatttctaagattaaaacgtaatgcatttacaacgtgaatatgtttatgttagctaacattcgttatgtgttattttaagtttcttcttgttgagacatgaaattcctaacaaaactcttcaagaaatctaagcaattgaattccgcaaagctgtgattgaatttcatggacttgaacccatactagttatcgatcgacttgcaactgttttggatctattgttacaaatcgttttatgtcgatcgatcaaactaatgaaaccacaaattacaaccacttcattcgcagtgtatttttgcgcaagcaaatggcatataaaatgtgaaaagtaaaagtagtgactagtgagtgtgagacatcaaatcattgagaaagattatatgttctctatgagccaatgatgggaacttaggattatgctttctaacagacaaataatattcgacttcttttgactgcctttccttgcttattcttattgtgccttgtatgccaatgagatcttccctcggatcattatttattctcctcgcaattattgatttatttagttcgttagtacatatatagggaaaaacatttgttttccttttgtaaaatttattcagcttctcttatttacttgaaacccaatagaaaatttccgttattttttttgttaggtaacaaaattttgattggttagaaaaagaggaaatggataaaagtattcacaagaagactatttttagagttactattgaaattttgttttacttttatatgtaaactaatgtttggatatatatttttgttaagatttttcagatttatctataaactctgtctagtcgtgagtttttttttttgtgtaaataaaataaagttacctgtcggcatcaaagaaaaatagtagactaatcatgagaaagggttatgagaataaattctgtaactaatgatctatttctttaattctctataacgacaagaggaaagagggttgtctttgtcgaaataaaggaaaatacaggttatgatttgctaggttttgctcttatcgggctcttcaaaaaggcgagagcttttacatttggggccaatacctttttaaattcaaaccccaaattttaaccctac

SEQ ID NO: 58380 - DNA, 145 bp, Arabidopsis thaliana landsberg
tatgggggtaagaccaacaacccaaaccttttttatcatagcttataagtagctaacccacaggaccaagtgtttcctacatatttatgataaagacagcagaaactttttattacttacaactgaagtttttactggcacttta

SEQ ID NO: 58381 - DNA, 224 bp, Arabidopsis thaliana landsberg
cactaaaacaccattattgaccattctctactacgacaggaaaaaaaacctatcctgacacttaagctacaccatcacagtctatccgatatatatggagctttcctggtcttgtattaaacttcacatctcctaatttccactaagtggttcaatcacataagcatagcttaagtacatctattcaatcctatttgaaactactattcaacatattgtaaatg

SEQ ID NO: 58382 - DNA, 472 bp, Arabidopsis thaliana landsberg
  unsure (1)..(472): unsure at all n locations
tttgtttactaacaccatctacgcaaccgtgggctgtgcaaaaaacgtggacaattcgaaactgatacatttgtagnnnnnnnnnnnnnnnnnnnnnnnnnnnnnnnnnnnnnnnnnnnnnnnnnnnnnnnnnnnnnnnnnnnnnnnnnnaccatgatgcggaaatagaggttatacctagggtggcggtggagtcaggctagtggggctgtggcgggtcggtgcagtggcgacgcgacgcggtgcaggcagacccgcagcggctaggaagacctttgcaaaaaatacatgtttgtcaacaaaaaattcacatcaccggcactcgatcaagcggttaatacaatacaaaatcaagcgctcgctctagttcattcgagcaaggtcactatacaatcaagcggttaatacaatacanaatcctaataaaacactacaagcactcgctctagttcaatggcatatacgattagga

SEQ ID NO: 58383 - DNA, 1439 bp, Arabidopsis thaliana landsberg
gaatggaatttcgtcgaacacttggagggcattgactcggttgattctggaagggttaaaatctaattgggaagtcgtgggcttatggatttgtgtgtgatggcctctaagcttgcgtatgaaaatgctaaggttgttgaaaacgtcgttgatcttcattggaaggcaagtttttgttaagtatagaaactttaaacacacttttatgacaaaaaaagtttcttacttttataaagttttcatcttttaatgtctgcagatgaatctggtggagttcttggattgttggaatggtgagaattgaggattcgatagcaaggtttagccttatttagcattgcttgatcagagagttttagtttagttatggatgtgttgtttttgtctttctttgcagattatcagaagcagatgtctacacaagtttttgtgtttacggataagcagaaagatgcaaacttgatagtaatcagcttcagaggtactgagccgtttgatgctgatgattggggaacagatttcgactattcgtggtatgaagtccccaatgtgggaaagcttcacatgggtttccttgaagctatgggtttaggcaacagagacgacactaccactttccattacaatctctttgaacaaacctcctctgaggaagagaatcgtaaaaagaatcttctggatatggtagagagaagcgcttattatgcagtccgagtcattctgaaacgtttgctttcggaacacgaaaacgctcggttcgtagtcactggtcacagcttaagaggtgctttagcgatactgtttgccacattgttggtgttgaatgaggaaacagagataatgaagaggctgcttggagtttacacgttgggacaaccaagaatcgggaacagagaggtcgggttattcatgaaagctcaactgaatcaacctgtggatcgatacttgcgagtcgtttactgcaacgatatcgtcccgagattgccctacgacgacaaaacgttcctctataaacatttcggactctgtcttttctatgacagcttctacaacgaaacagtaatgttatcatcatttgaacaaaatttaaagacttcacatttaaaaatgtgaactcgatttgtaactaataatggatttcttgaatatttgacagaaagcagaggatgagccggacccgaacccttacggtatgcgttacaagattcttgggcatgtgatcgcagtttgggagttggttagaggcttgacgatggggtacactcatggaccagattacaaagagggatggtttaggatcttgtttaggcttatggggctggtgattcatggtctgtaggatcattgcatgactgattaagtgaagggggttagggttggatccgataataaacttcccatgtcccctttttgaaaagtgctgtgtttaaaaaatcaaa

SEQ ID NO: 58384 - DNA, 226 bp, Arabidopsis thaliana landsberg
ccacaggtgggacttaaacatcgaaacagcttatttaccattcttgaacactaaaccgaaagcatccccatcaagggctagaaccttgccgcattctggatggtcgccattaattgacatcaacaagggtgcggtccctacatcattcaagaagaggatattgtaggcagcgccatccagatggagtatgatctacactgagccaggacgtgccgaaatctgaata

SEQ ID NO: 58385 - DNA, 848 bp, Arabidopsis thaliana landsberg
tcattactctcactaaaatcgaaacccaagcaaagaaaattcaggttctgactacttttatggatattttttttgttaggcccataaacttaatgccaaggcccatgaaacctgtttgagatgtgcattcgagtacatttctccgagtaaagaaaacaagtagagaacagagttttatgattgattgatcttaagttcttaacattctacatgatatatacacaaagaggctgttgaaatgctctgttttcatcatcatcatcgtattgatcttcatcttctatgcttgtttcttgccaattagggttggagtcacagagagcacaccaatgagacacagagtcgccatggagctgaagtcatagagatctcccaatgattttagctctccaagagcaagcccagcctggtcacaaagtcaaacacattttcgttagataatattcaaactcattgaaaccataagacaaaaaccaggaagatgcatgaaaattctcatacccggacagtgacaaatgcagcaggaatcagaccgatgaatgtagctaggaagaagatatgataaggaacatcaacaattggagaagcaacattaatgaaagtgttaggcaatgttggtgttagcctcaagaacagcatataattcatcaaccgatcttttcttctcgcaacctaaagaaacaaaacccgcaaaaactctttcaaaatttcctcggaaacttatatcgaagaaagcgcaataagattgatttgattagtttttcaaacctgatcttggaagaatacgagcttgtcaggccaaagcgagaagagtaaaggtctaccaatgagcttagagaggaaataac

SEQ ID NO: 58386 - DNA, 394 bp, Arabidopsis thaliana landsberg
aacgtcttctaatgatctgtataatcagtagttcaatacgaacaaaagaatttaaatacaaagatgccaaaaatttcaagaatcaaaatttcaaatacatcttatacgaatccaaaacctttgatgtcagtgaccaagccctaatatccaccgtacgttgacacttaagacaaaattttcaaattactaagactatccacataattggccgttgcagtagtcagtgaaactcgaatttagatatatgtattattttacatattttttaagataaccgattgttgccgacaaacaaaaaatatgaccagtcgaactgccattaccagttaagttatagtttattacattaatagtaatggactaaaggtgcgtgctattaaagtatggagatgga

SEQ ID NO: 58387 - DNA, 574 bp, Arabidopsis thaliana landsberg
ccgccaaagatttgtgtgatttcacaaatctttttccatgtgatttttttgttttcttagtcaatgttgggaatttgcagtcctattagttactagaattaaatgtcaactaccacatactcctactttaatttaatagttcttttcatctatattttgacctctcacattttatatattcgataaccaaaatgtttctctgttttctaagttctttataaaacatttcttctccaaccaatatgataaaatatcgtctatcaaccttttcgtgattcatgctagaaattttcttaaaaaataaactgaaacaaattagatcaaatgtatctttctgttggtcgttattaaatttgtggcggttgaaacataaatatcagcatgacaaaatgcattgtgatagtttatattccgaatctttttacataaaaaaactgtggtttttaatatgtagttctcttcaatactactaaactaatgtatgttgaaaactaattaattgtacattctccgcaagttattgttgcatctcatcagaaaatttatgcttggcatcactgcatattgttgactt

SEQ ID NO: 58388 - DNA, 578 bp, Arabidopsis thaliana landsberg
gcgcgacggtgtcggattcgcgcgcaaacgctgcagtcgttcggcgatcgccttgagcagcaaatcgccggcggcgtgaccgtggcgatcgttgaccggcttgaagtgatcgacatcgagatagaccagtgccagcttgctgctgtcgcggcgcgcgcgtgacaggccgttgccgagccggtcggtgaacagcaggcggttcggcagatcggtcagcgcatcgtgcgttgcgcggtggcgggctgcggcttcggccgttttcagcgctgcgcggctacggtacagatcgaggaagaccttgaccttcgacagcaggatgaactcgttgatcggtttggcgatgtagtcgacagcaccgacttcgtagccattgagccggttcaggtcgtccttgtacgcggcggtgacgaagatgatcggcgcgttcttgcagtccggggtttcggccagcagcgaggcgacctcgaagccatccatctcgggcatctgcacatcgagcaggatcagcgcgaactcgcgatcgaggcaggccgccagcgcgtcgttgccgttgtcggcttcgacgatgtcacagtcca

SEQ ID NO: 58389 - DNA, 1151 bp, Arabidopsis thaliana landsberg
atacacttcacataataatgatatatgatatatcccatgttttaatcactttttctacaactatttctaaagatcaattaaggatcgtcccagtgattagagttatttatttccatatttttgggatatatgcatgcatgaccagctcttagagagaaaaaaaaacatgttccatttatagataagagtcaactttctcatagttttaacatggaatgatctataactattcattacatgtttaattaatccttactttttttatggtttcatatgtagaggtgtcatttacactcgttgtcgccgaataatgggtctataacggcgcaaatgagaacgtcggccacagagaaatcaggctttacattcttgggatgcaagttaactggatcaggttccacatttttgggaagaccatggggagcttattctagggttgtctttgcttattccttcttctccaatgtcgtcgcacctcaaggatggaaccaatggggagattcaaccaaagaaaagtactttttaaccttttggtttgtggttaatgttcttatgaatatttttgactgatgtatactaattttgacaaaatttgttcagtactgtatattatggtgaatacaaatgttatggtcccggagcagacagggaacaaagagtagaatggtcaaaacagttatcggatgaagaagctaccgtcttcttgagcaaggactttatcggcggcaaagactggctccgacctgccccttctcacttcaagaatgctcccaaacaaacccaaaataaagaaattaattaataattccatcaattgattactatattttcttccttttttcttgtatataaaatcctttttatacaaatcgcttcttattagttgtgtgtaatattttcattgctgtatgtataattattgaaaacatgtggatattataataaatactctttgtaaaagaatttccatgaccaccaaacgaatcttttcgcctcatgaaaaggaagttttaatccgtaggataattattgttcaataaacagaagaatttattgaactcgatgaatctattagctcattgtagttaaaacgaaactatcaactagaatgagacatatgacatgtcttaaaaggaaaacaaaatgaatga

SEQ ID NO: 58390 - DNA, 1678 bp, Arabidopsis thaliana landsberg
cgcgcggccatgaatcttaggagtgagctcgagaactataaaagtgagtatgaaaggttaatggtagagctacaagctttggatttggtgaaagacgagcacagaagaaatgtaaatacgtagaaacttcctctgcacttaaaaaaacactcttttttggctggtcgtatccatcttctaggtatgaaaactagagatccttagtttatgggctgtctcggaaagacgaaacaaaatgtgtaaaaacaggattcatgtttatgaatctttttgtctagaagattcagcaaagttatggaaaatatataactttctaaaatttttagttttactcacaaaaactctttaaactgtgtcaccgaccatccgagagtaataacgagttttggtaattagtttccagcggttacaatatagtgacaatcatcactaataaaaaacgttattatttctgtaactggtttgcaaatttgtaatccgaccattgactattcataactattctacaattgtatagcaatcccagcaattattgtttaatcataataactccacctacgtattctgatcataaagtctttgatttggttagaccatattaccaaaatactaaatgaggaaataatctctgccaattaaaaacataaaaccaagaaaaataacaataatccagccaaaagtaagtgtaagtgatacgtcacagctgatgataccaacaaccataatacgcgcatggaaagcccatgagccaacggctagtcacgtgagagcgcacaaacatccatgacattttaccgttgaacaacgttaaaggcctaaatcagatgcttcaaccacattccacaatacgttctcttgccacgtgacgataaatgattcgtttacatagatttcataaaaatgaatgagaatgtagctgattcgcgccactttgtcggcatgctcaagtgactttaagccgttggatctcaatcgcgccaaaaaaggaaaggggtagtttcgtaattacccgaatttagattaaattaaacgaattagtgacaaattatgcgctggaaaaaatagtcgactctgattgtctgtctgaagaaagaaaccgaatcgattcaatttcaacgtctcgtccttcaattttcgttttcccgagaaaatttaggaaagaaagagaaagagagggcagagacaaaaatttcttcgccgtctgagtgggaaagatggcggaggatttcgctagagcggtagacgatgggcttaaactcgcgaaacggatttatttcggcaaagaccgagccgtcgcggcgccgagaccacctgctccgatggacagatcttccactacgcagccttaccttcctacagcacctatggtttacgccgttatacccgacccgggaattgtggataacccggatttgcctagctatcagcctcacgtgcacggcaggtgcgacccaccggctttgattcctctgcagatgaattcgattgagctggatgttgattgttatctcgacacggctcttgttaccgtcaccggatcgtggcgggttcattgtgttatgggaagcaagagatgtgattgccgaattgctattcccatgggagaacaggtctgtcgtgtttttttttaaaggaaaattgagatttctcgtaatgaaatcagttcactgttagggtt

SEQ ID NO: 58391 - DNA, 1118 bp, Arabidopsis thaliana landsberg
tagattttttttctaagacataatttaaaaattcttctgtcacgaatcatatccaatttatattatattctctaaaacacgcctgcataagagacatcaagagagaaggtttactgtatataccttttcggcctcatactccgttctccaagaatagctcttaacaattcctttttaccatatactgttttgaatttcaaaacagaagacgatgagcttcacaaatccgaaaaatgcagcccttgcaaaattttggatgcaaaatatattcaacggaaaatatgtttttatgttatagatagactcaaacatgagtactggatgttaaagccctctaagaacatggataaagtgtaagaattaaaaggcaggtaaaagtataaacatacaataccatcggcgaacagtggcggagatggaataagattatgggagaagtaccatcaacacgatgatggcgtgaccggaggtacctttagccacgaagggaagtttcgtggtagggtaaatagacttttttttgccgtttcgtttattgaaaatcatcaatgagtaagtaaagagggtttggcaaataaatttgccgtttttgtttaagaaaaattaatgagtaattaaaaagttttttaaggaagaaaatgtaagataataaatgaggaataatatgtggacacatgtagaatgtataaaatgtcaaatgtccaaattttagagcaagttaagaagaaaccttgtcatattatgtaagataagatgtatctttaaaattatataaccttagtgacaagaaaatcaataagatcctatcgacagccatcaaatcaaactagatcatttaaatctgactcagtctgttctcacttcttacaaaaaacagagcactctgttcttacttctcacaaaagaccctttcagtggtgaggttgctcttcttttgggttttttcccacctaaatctggagtttgacttagctggagtagcgtaaacagaactagaggtcaagtttctcaaatgttgattcattattagaaaatagattcccttaggtgtagagttaacattgaataagagtattttaatgctactttgtaacatgcttcacgattctttctaaaca

SEQ ID NO: 58392 - DNA, 345 bp, Arabidopsis thaliana landsberg
catctataaacaacgcctacatgttttgcttgatggtcgcgatgtaagctaaaaatccgccgaaatatatgcggagcggttgcgtgagcaaatcgagttggcgcggcaggctggcggtgacgtgcgggtggcgttgggcggtggtcgtatgtatgtcacgatggatcgctatgaagccgattggtctattgtggaacgtggttggcaggcgcacgttttatgtgaagcgaaaaattatttttcgtctttagagcaagcgttacaaacgttccgcgaagacccaaagatgacggatcagtggcttccgccggttgagatcactgtaaatggtcttcctgttggtac

SEQ ID NO: 58393 - DNA, 546 bp, Arabidopsis thaliana landsberg
tgccatcatgacttgacggtactgatatcagaaccgttttgaaggcaaggggacagaagaaatgaagtgagagaataatgtgagagattgcgccggagccaaggccggaacctggtgaccggctcctctcaccgtgacaaaatttagtccaccggcataagtctcaacccatccagctacttgactcttgtggaaccatgacctccacggtgactcgaccttaagtcccatcttttttatgctataacgtgtagatgttaccggaactctcccatccgtatctccactatagccaacattgaaccagtgaacattaaactaattgacaatatataagaatttttcacgtaatttttaaaacagttaaagaaagatatagatacctatagatccagatacggaggccacccgtcaaaagcttttgtatgatgggaatcatggtggatggagcatcactccatctctttattactccgctgaatcacacccacaagatcatatatatatacttttgttcattagaaacatgacattaaacttaacata

SEQ ID NO: 58394 - DNA, 365 bp, Arabidopsis thaliana landsberg
cactcatgatatctaacccggactttttatatatatattatcacattgttagtttatcctataaatctatatatgatgctcgattttggaatgatgattatgcctagtatatcggttgtcatagtttggtcacaagtgcgttgttgaacttaatgatttacaagtaaagttaaaagaataaattgatgaccttgaaaacatgtgtatgactgatcatgtatacacaaacatagttttttttttgcagattcctaaactaaagttggcaggcaaatttatgtaccacttggttttgaatcaatgtgaaaatagtatcttggctttttcaaaagccaaacagtgagattttatttctccattttgtt

SEQ ID NO: 58395 - DNA, 477 bp, Arabidopsis thaliana landsberg
aacacggagttctatgacctccaacgacaaaactgtattagttgatccaattaaataattaatcatgtggaattaaaaaagtgattagtgtctaatcattcaattaaaaattattttttatgtataatcagcgaatgatattgctgacgtcttataggcacgcctttgtgtctgtagtctctgagccgttgaggtacacaaatttgagaattgctttgtgaacaaaatctgattaaaatacttagaaaataaaaatctgttgaaccatttgaattttcaccatagttctatttgtgtttttcgactcttccgatcagtcatgtgatttatattttataggcatcaaatgtctttggaaagacacgggaactatattctagagattaggtcttaacgtatttcgtttcacttcttagaaattgtcctaatcttcgaagtgcccaatagttccaccctgacagcttgagagattcaaaa

SEQ ID NO: 58396 - DNA, 1437 bp, Arabidopsis thaliana landsberg
  unsure (1)..(1437): unsure at all n locations
tcacaagcatataatatgctgcatatttgcgtacgtcacgcattttgcgtcacatgtcactcatttaaatagttaaggacactacattacaccgattatgtatgatgttaatgcattttagaataactccttcaacctaaaccatcatataaaagtatatatgctccagataaattgacgccataattgttcacatatctggttggtttgtacatacgtactagactcttttttttcttttcttaatgtagtactaaacttaattaataccatcaaaaatatcaatttaacaaaacaaaccagtaaaacttttaaaacaatggagtaaatcaaataaaacaagtaaattaacaaatagacacaaggtaacagaagtataataacgacagaaaaatgaacaattggccaaaaaattcgttttcaaacgtgatttcaaaattgtctccaaatcttaaatgttgataaagtaattttttttaaattcattatacctttcaaaaacaagtgtattacctaaaagctcaaccgtgtattcttacactccaaacaaatttagttccccaagtttggaagacaaaaatttctaagaaatttctgacaaaacacatgagaaataaaccgataaagacttctaaaaactattgcagaccagtttcatttgctgaccacaaaaagtcatgagaatacaattagctcagtgattcttgatatttctggtacctaacaaaaagaaaagtgtgtgaggttagatggctatgatttttgctctccaatttattgtccatttccccaatttgtaatatgaaatgcgcaaattactcttcttccgatatgaataagcaaacgaaaacatacgtgggacgttatgttgagaacatttgattaaagtttatatgcgattttcatttatttattatgaattttttgtttggcagcatgtacgatttttcatttaacacacaaatattatagaactttcattggttcaaaggggtagacaaaaaataatttaatattattacaccatttgcagaaaattagaaaatatatttttacccataattaattgatctatggacgtatgcttggcataaaaattcatatttaattagcagaagccaatcgctgcgtttgtatatacgcgtttatgaccgagaaaaaaacccttacgcgtcatgtaaaaaaaaaagaagcgtaaattacgaaaaacagagagataaatccgggcattgagattttggagatagagagagagagaaaaatcgaaatctattgtctatctcctcaatttggattggattntctgcatatcatcgctctagatttcgcgggttttggattcgattccttacccttctccaatcggtaagaacaagctccaaagtttgttcctttttttcaattttcgccaattctgaatctcatcattggtcttgg

SEQ ID NO: 58397 - DNA, 1529 bp, Arabidopsis thaliana landsberg
gggacttcagatttttaaaatttgagtatttgcttgaagaaatgagtatttttttataaaactttccttatgttttaagatgaatttttcatcttgtaactagacatataatgtaattccaatttcttttacttttattttttattatatatgtaattccaatttcatttggtttttgcggttagtttacgaatgaattctacatattacaaaaatatcataaaatacatataatgatctatattttaatggggttttcctcccttggttgctcgcatgatctatcttgccatcacgtctttttgtctcccgatccctataatataggtatgtgacaatgtgtgtctatctttttctttctcttttaagtttttaaccaatccaatttttgtcaacaacacaatccaatgaattctaactaatatactatgaaagtggcatattaatataagtttatatgaatgaacgagaaaatgcacttagacataaaagagggaaagagagatacatacgcaatgtcaacgttgctcagcttcacaaacccatgttatgaatctttttcttaggtacatcaagtcgtatgattctttttaaacaaaccatcaagtatgattcattatatggttatatcccaaataagaaaatatatagataaatacatttaaatattgcatgatgtcatgcaccaaaaagcagcaatatataatcaacatgatatagaacttcgaccccaactcctccttcttacttgaacttgtttttggaattgatattatttttgggtaaaattaatggttaattcatttgagtcaggtttattttcttttgaattcaggtcggactttgaatttctttttcttttcttagtcaatatcatcatggttagatgcgaaccatgaccgggacaatatcggctatgtattttctgttttggtacatgtcactatgtcaccttgtttaattttagttgttctgtttgtgtaactacgagtctacgaatacattgtctaatgaaatgtgttgttatgttatatcacatgtcatatatagtgtaactcacaaaagatgtatcatgtcattttctttatttaaatcgtgttacgtaatgtgaagaacttaacaatatattagcaattttaatacatctgaaaatcattcaaaaaatcgaaaaacagaacaaaattttgttatcgtaaacaaccaagttaaatgatagatgaacacaatagatcaaggataaaaaaaagttgagatttgagatgaatttgtttttttttgtttttgtcactgaaatctttattgaaagcccattaacttacagataataggcccaataaacaaaatttacacgccgtctaaacccgattcccgacgacctacagaaaaacttcggtcggtcagtgaccctttaaaggaaagctattagcgattgattcgagagaggtgcaaagcttgttgatttgaggctctctctctactagggtttgttgatttgagttttctattcctcctatacgtgttcttcgatt

SEQ ID NO: 58398 - DNA, 295 bp, Arabidopsis thaliana landsberg
acgcatgtgataataacaatgagaataaaagacagagtgataggatcaacggctattgtgcgtaggagaacacagctgctatataagccgcgtaacaggtgattactctgactacgacaccaacaagaaaaattctctcaaatgtgggcagttaagttagacacgtgtaaggtcgcgattcatggaggagacgtgctctttccgctttttgttatttatttattactgatgccataattaaaacactaattataaatttaatttagggataatacaaaacttcgttttatggatc

SEQ ID NO: 58399 - DNA, 1155 bp, Arabidopsis thaliana landsberg
gtctgataacttttttttgtgatcatatagctttagtgtttgtgataaacatatcgccctttcttataatcttaagatatatcacttcgtggtccggtctgccttataaatatgttatgtaacgagttcagaagcaagcattttcacattattattgcatgcttttgagttttggctactacaagtttttcgaccgcatatattagcgtagtttttaaagacccgagctatttcatgaaataaattaggaccgctgggtaactgaaatatcccttgcaattttttttttaccttttttttttttttttacccttgctgccttatatgcaattctgtctttcaaaaattactagggccatgtcatataagcataaaatctttcataaatgtttaaagatacgattcgtaagaaatgttcttaattttgacccaataaaaataactgtgaccaatgtaaacctagaggggaagtctcatttgcctgctagcagaaatgaaatttcttgcgcaatttcatgtatttcagaaaaacaaatattttacgcaagtctatattattaaaatatcttttgtcaaagtcaaaggcaatttgagtatatataaaaggtacatatggcatatgtttacatcagtattcagaacatttaaaaacaaaagcttagaatttttttataggtgcatatacatttattgttgacctttatcagaaggattgcattgcatttgctctacaatcacgatgtgtcgaattttatgttgttgcttttgccgcaagaagaaaaagccgctagatgtgaaaaagggtaaaaagggaaagaaagatggaggccttgttgttttgaagcagactaagcctaagaagaagcgtcgtgatgatgtaggagctgtatcaatagactcatgttgctgttgtggcggtggtgatggtggtgtagatggtggcggagacggtggtggtggaggctgtggtggtggtgggggatgtggtggtggtggtggaggcggttaaaatatgaggtttctgtagttcaacatataatgatcatttcttgtgtgtcatatgtttatttgtttaaacaatttatttactttatgtaatgtaagaataaatttaaggtgagatccctttgttggactggaaaatgaatgaatcat

SEQ ID NO: 58400 - DNA, 591 bp, Arabidopsis thaliana landsberg
  unsure (1)..(591): unsure at all n locations
ntttttattatttctactaattatatgttaaaaattattggatagacggaaattacatgttaatagacacaaattatatgataatagtcttaatattaagtacatattttttgtttgaaatatatatatagaatgagtggtctagttttgttcgcaaaaatgttaagaacacagatataaaatcggttcgtgattaaatcttttaattagaagggacatcatgagcttctatgagggagagaaaaggaaagctataatatttttacaaacaacaaattgtcgtgttgctattacaactgacttgtggacagctgataataaaaaaggaggatatatggccgtcactggacatcttattaatgattcatgaacacttagaagctgcattttgaggtgattgcctatttttttatcttgttcttcaattattggcttgctgttaattaattgatggttcatgaacattttgttgcttgttgttcaattattacttatacactctattggtgtccaattatgacttacaaacactatttctgtccaattattgttttatgtcaagtttgatgattaagggcatttatggttatt

SEQ ID NO: 58401 - DNA, 1139 bp, Arabidopsis thaliana landsberg
tctactatatgatgaatactcacttcaccaggtacgtgaaatatcggtttcgcaactcctgcactactatctcctcatctagggaatatctgcattgcacaacaaaattttatatcctcctaaatagatcagcagatacctcttctatgtattcagcggcaatgtagaatgatcccttttccaacaaagtgatattcgtatccaagaaaatgaacatgaaagaacacacagatgcctcatctcgcacaaatgggtgcttccgagtggcaacttttttccatgtacattgatatttcctttacttttaccaaccctaaaacgaggtagtacagctaacatacctccacggaaaatcatcttcacaaaagcgagatattccattcatcgcaccaaaagtgtctatgtgaacccactcttccccagctacatttgcaggatggcctgagaaccatggaaggcaccaagtcaattaatcatattgtaggcaaattatcaaccagaggtagatagacaccacaaaacaaacgctgaccagcagatgtttcttgtttgatagccaagtcaatgctgctgcattaataacaaaccccaataacagaataagtcactcaccaatctgatgcaagcgctttaaagcatagccgctaggataattgtagtaagatgccatgaatgttacaaccgtgcaccctgcactatagaaccaggtttagtagactagcaaatctctttccttctcttacatagcaaagataattgtttactatttctacctgattgcaaaaaacgctagcataaccatattcaccagtttccaaatcgttttcttcctattattgtagctgtacaacaaaatcggattatattaagaggtcggcccgcattggtagtaatttaaagtggcatacagaaattatgtgtatccaaactccaaagagctcttaagatacagaatcaaagaacgtcctagctatgattgaaagcttagctagcaaacatctgatagaactcatacattctgctagcagcaactgcagcagacaagttgaacattggcactgaactaatgataaatcggagttccttcataaatcaagaaagataggtaagccgatgtcagaaaatggttaagaagcgtc

SEQ ID NO: 58402 - DNA, 564 bp, Arabidopsis thaliana landsberg
tgaagctctgcacttgggacattgatgatgatcaaagtggtgatagattgtcctcttgtattatggtattcttttcgaaattggtggaaaacagagacaatttataggtcggtgacttgcaagtcgtcgtttaaaatgttaagaaaaatcttgtaccattgttgtgttatgtttcctctttgagtgtctgtcttttatctaagtcttgagctataagttgtggtcaatgattctcgaaccaatacaaattattgtaataaaataggtcatatacacattggtgtcaaataataaagagttctcaagttgaaattcaatttgagtggtttttgtttttctttataaccaagtgttatgtaggtatcaaaatctagcaaatatatatgcatatagtagtcaaataaattgtccacagaaacaaaactgagaaataataatgttaaaatgttgtttgtcaattaagagctttaagtaattcttctatttattgttaacatttacatgaacacaaatgttttatacataatataagatctatgtcaaaaacaaacttattacagtagt

SEQ ID NO: 58403 - DNA, 446 bp, Arabidopsis thaliana landsberg
cattttgttcacgcacggataggcagagggctggaggtgctgacctgagacattcatacgacattttgttattgcttcgcgcaagttttacatagcacgctgctgagccgattgcgccctggcaccctgaacttcccgatcttttcaagaactttagaagccgcatgagccatcatgtggcgagatgccgcgctactgttactctatatacttatgcattgtcatcattaacgcgtatgtaagtctctatccctgttgactgagatgtgacccacggttcaccggggtcggatagagtatttggggaatatactaaactgtagaaatggaaatgataacaaatacttgtacccattaaagactagatcaggcttctgcatataactttcggaacaactgctggttgatcccaagcgttaccacgcccgagaggagttcgatggaat

SEQ ID NO: 58404 - DNA, 1707 bp, Arabidopsis thaliana landsberg
cgaattatttttgtctttgccctttcccccttccttcgatgtgatacctaatcaaccactctcaacaccatccaaccaccaccttcagagcaaagaaacagagcagacaacgaaacagagcagagaacgaaacagagagagagaaggagagaacgaaacagagagggaattctgttggttttgcaatggtttggaggttcgttaatggcgtcatagactttggagattaagggagaacaagtactctgcattttctggatttctcactatttcttcttctctagaggaataggcgagaaattgagattaataaaaaggggtgttttttggttcttcttcgtttgtataaagcctgccgcttcttaaggtacgttcctccttctccaatttggttggttgatcttttgttgaattaattaaagaaaagggtcttctccaatttcctagcttttgctgtctttttaccaacttcaagagtttaatttagaaagtataaagctaagacctttgagattctccctctattgtctcttgttctgtgctctcttcttagttgaaattgccaaattgttttttttagcaagaaattcctatgctttgctctttatgatttgtttctcagcttctgtgactctcaacttctatgataagtaagaaacaaatgacgctgttgcaggttctttggaaattctcaagtgatggaggaaaatctggtttacttcgcatgagctattaacgaaatttcatcatgattgtctcactgtcacacttgtgggagtatgcgtgaatgattgtcaagagaccgatcttgtttctcacttcgtttgaactctgtcctgtttcccatttatacttcagattctagctcctttagggcaaatcttctttggcaaaagtaacaattaatcagcactagcagaagtgaagtttctcccgttaggtggctttgatacaagtcttggagctttcgaatttctttgaggtttgaagctccaccctcattctagggcatatctcctttggcaattggaactccaatcacatcttgggttcccctttgaagtttatccaactggaaacttcagtccattcgttgggcaaatctcctttggcatttcggagtcctcagttggctcaccttatctcttgttcgagcaaatctcctttggcattatccgagttcgtagttgactcacgttatctttcgtagagcaaatctcctttggcattatctgagtcttacagttgactcctattatcttagtcgagcagttatcatcacggtctgcagtttcagctgaccgttgctgtcagtccatatcagtcatctaacgtgagaatccacactcctatcaaaataactggatcttttaacaaacagggaagctacaccgtttctcatcaaggtcagaagttttcatatcttcctggctctcagcatttcttgtatcatttgtttctgtttggtatttgagcacttgacgaatattcagttccatggcaggcgtctaaactatggaaatgtcccttactgactctgattgggatacgctccagcgacagtggtagcagtgaacacgaagaagtcgagttttcttatggtggacgggcacagaacattttctcaagccttgaaggaaccaatgaaccctcctatgagttcctgtcgttcgagaggggaaaaaagtatggtgacattgtgcgggc

SEQ ID NO: 58405 - DNA, 307 bp, Arabidopsis thaliana landsberg
tttatcctttgataaaatcctatctctcacaaaagggcaaaggggaacttttatcctttaggggattgtatcgatccagatgaacataaatggcacccaacccaaattacttcagcagttgaggtaaagggagttgacagagaattcttttttagacatgaaccacaatagcatgatctctgagaaatcctaaggcgcatggcctatatgaggatatcatatgcttgagattgattgcaccaactaccactaccctacttttgaagattaaagataaagaattcgtacttcaacacctttactacac

SEQ ID NO: 58406 - DNA, 1454 bp, Arabidopsis thaliana landsberg
ttaaaccgttccaaaccgcatgcacacagtatcagcaatcgcacaaacaagaggctgcaccagtgatatggaacatattttatcagaatagcaaatgaataaaccctaaaagatgcccaatataagtttcctcagcaggtgataattagcggatatgcacacttacaactctaattcctttcgtgctgaagtactttgaaacaattatttctgcaacagcctaaaatagaaaatatagcattacttggaaggcaacatggtgagaacaattttggttattgttctacgggaaatatctgtcaaactgcaagctcaattaaaagacacacagtaccttaagttcccctcgagaaaggtaaggcctcttttcaccatcttgtgaaaaacgaacctttcccctttcttctttagattttgtccactctttacatatttcagactgattccacatatcttccatatcttcgggggaagctcgagagtcccagtatgtgaaatcggtgtctgttcaaccggagggtatatttcagttcatatcagaacttataagagaatgatacaggttctccaaatatgagcatagagctaaagcattgtcacactgcacgatgctcctagagatctttatatgtttgacataggtgcatgtttatacacgtggagacattgttatatgatacagaacgatacaaaaagagggagagattacttgagcctggggaagcgggattcgtaggacgaaagcttgaagggccagcatcgccatgttttctgcaacaacaattaccaaagagactgaagttttagcttcgcttccctcaacttcttggtgcaactaccttattagtagtatgaacaaaattaacaatatgaaagcccacggcaacacaaaaccttatccgtgcaaccatgcataaaatatgacagcagaaactaggtacatagagcaagcagagataagaagcaacaaccttgaagggagactttctttcactgcaaggtatcgtttccaatatggcaatgtcgacttgtgagtcgccttttttgtcccaccattgtatgctctgacaacaaactcttcacttctctggctgcacatggaaagtaaaatatatttaaagtaattccaagaggaacttagacttgttgtcactgaaattgtaaagctagcaatgtaagcttagggacaatatatatcatacttattctgatagtctgttaaccatttcaggtaagctgccccaaagtacacatttataaagggcttgtgaagaagatcaggattgtcatctacattatatgcctgatagccttggcccctgcaataaagattgaccaaaaccggaacataagatttttttataaacttaagatcttcttgaaaaggagagaaactagaaatcgttttgtacccagccaaccatgctggtgtcttttcgaaaacttgtaaaatt

SEQ ID NO: 58407 - DNA, 233 bp, Arabidopsis thaliana landsberg
tttatttttaaagagccttgtgatattggggggggtacaataacatggccatcacctacgtccatgtggacaacaaccttggacctaacaccaatagtccagccttttgagttccaataaacgacataaactcttttgtgtctcaaaaacttaaaaacgtcactccctgttgttattatactctttacatgataagccctttttaatcataaattaacattagcccgctattt

SEQ ID NO: 58408 - DNA, 567 bp, Arabidopsis thaliana landsberg
ggtttctttattatctgttcatatcatgtgcgcatctattattattagtttattgctttcttgcttattatcttgtttgtctattagcaaaaaaccataaaaatatatcgccttagcttattatgtttagtaattaatggcctggttctttgtggaatttgaactcgctatacatatcactgcaagaacaactaaaccatacacttgtgattatcggttcgggttaaaacttgattcaaatctttaatagcaagttatttgggcatataaagggatttgaatggtgtgcaacaagagtaacatgatgaacataaaaaaaaaaaaaaaagtaagagataattatagggaaaactagttttatgtctataaactagttggggttttttttcttgatattaatatataatatgtgttaggttaatatcctcttactttttatttatttattttggttttcgatgttcttttacattaccataggtgattgcaatttcttctggagtggcacttgtagttcacatatttgtgtgctggctttttgtgtacgttcttgaacttggagtcata

SEQ ID NO: 58409 - DNA, 521 bp, Arabidopsis thaliana landsberg
aaacatgactgacttattagtaagacagagggaataatattatgataatacttttttttcttgaactttttgatacaggtccactggacaccaatctaaatgtgtgcggtgttcaaggcaataatcatgcatgggttgccatatatacacacctacatcttaactttccaccattatttactcatctagtcttcaataaacaaattccattactaattaaaaacgtacaaatagagatgtttaatcgtaatactgtatatctatccaagaacaaattaaacacacaagtgaactgaattttaaactgattaattcttttgtttccaaagaacttaaaaggaagtacttttatttaaataaaaaataaatcttaaaccgcaccaaataagttttggttactagtgtatacattcagtgaacatttttatgaacccatattttagtaaaagtattctcttgattgtagagacaaacactaaacacaaataaattgatttttttagttgagcttatgctgagaa

SEQ ID NO: 58410 - DNA, 332 bp, Arabidopsis thaliana landsberg
tcttttacacaacaccagaaccagccaaggggcggggtataattaaaaacatacgaccacccacccctcaaaaaggactgtgccaaacaacaccagagccaaaccaattatagacatccgcattaacagaaacagaaccgaaagaatagtctatgaaaacagcaacccactggctcctctttaatatccaaccacatataaatgcatcggacaataaagcaaacacccatggggccaggacgaacaaggaactaaaacctaacgaccatacgaccctaacaccaaacaagagtattacaatccatccctcctaagacactgccaaggcaaat

SEQ ID NO: 58411 - DNA, 222 bp, Arabidopsis thaliana landsberg
aagaagaaaaaccaatctgctactgacaataccaggctgaaaccgaactctaacaacaacaacaaatcaacataaacattcaagaacaaccatgaccaacacagctagatcacaacaattgcatctgaagaagccactgcacctgaccagcagaaaccaaaccttacatttgcatgtccaacatgcccaacaccatcaccaaaacttctactacaacatcta

SEQ ID NO: 58412 - DNA, 750 bp, Arabidopsis thaliana landsberg
aaaaattaggtcatgagaatggcaaagaactagagtgagtaaacatgatcacactatgtatttggagattacggagagcaatactaaaattattacacaacacttcaaaatcatgtcaaatataacaataaaccagatttggtttcagccaaaatattcctcactgactcaaccttgaagacacgtagcttatacaacaatgttgattgatgcctagtagattgtgtttagaacagaggacatataaccattaaaatatcttatctaagttaattaagactaaaaaatagtaaattttggatcaatctatattgagactatacgtctcatgtaaaaaatggcaactcgatacgtacgccacaatcattttaaagaaacatcacacaaactcacgaatttgatgttatgattaataagcttggtcattgcaatatatctgatgtttatagtttcttgtatctttagcagtagttaattattacgtttagaactcttcacatgaaacaataccaaaatcttttgatataattaaaaaattagtggtgaagtcaagtcactataatcatatttcactaaattgtcttaattatatttttttaaacatatgtttataaaaagtttatcgtatctacaactcttcatgatattttttgggatccagttttaagaaaaaaacaaaccaccataattgaatatcataagttccacctaaaatttgtcctaaaattaatggtaataaataatttgggc

SEQ ID NO: 58413 - DNA, 551 bp, Arabidopsis thaliana landsberg
  unsure (1)..(551): unsure at all n locations
tttgaaacttagagatcataaacatttcaagatttgacgtgaatgggtcaaacagaaccatgactagatctcaaatctgtcgtgagcagagcaaagacactcatgaaactgaaaaaactccatggtctgattatcaactgttaatttgaccctcanagaacaaaatttcagtatttagaatgacccaagaaggagaaaaaggtaaagtaaacgaagatcaaacaaaaagagttggatcagaggaaaaagttggagaaagcttatacctttgactaggaagagaagaataagaagaagattcagtgttcgttgacataatagctttagctccttagatcttctttcttattcctcgatgtagtgcctcactattgacacagacaagctcaggaatcatgcaaacacctctcaatcggagtttgcgttgtttctcggctatttggtgtcggtctctatacggctatcaaaaagcaagtcctgcttcgtcattggcgttttatgggccttaaattgtaagcccaataaaagactaacggatttgactataagca

SEQ ID NO: 58414 - DNA, 983 bp, Arabidopsis thaliana landsberg
agaaggataacggaaacagagaatccgatcatagaccaatggcatttcacgaaccatcaaagggtctaaaagctctagaaccaattctccctgttaagacttaagaccaataactaaaccgttacgctaatcagttcacacattcatcatcttgcctccaattgtagaatcacaattctctgcaaatcgcaactctacacggtttctggacttacatacacttgatttctcgttcactaacaataactagaccgaaatacatcggaatcgtgaattgtaaatgaacattctttctcttatcaagatttaactcaccatccctgtgtgtgtctcaaaatgtaggcagaggctggtttcttcattcattgagttcttcatcatcattcattacaaaaatgtacctaaaaacaaagcaaaccccatcaattctcaccaattctccaactccattaaacaaaaaaacaacaacaaaaagcaagaaactctcactcacttgcttccatgttctcctagcacacaaaactctataaatcaagaatctttttgtacagtaacaaggcgagaggtcttcaatggcggagaagaatcacaacatacctccaatgtatctctaaaaccagcttcattagtcttcaacatcaccggcaatggaaacctcacacctttcgcagcacaagcttcatgtctcggtttaatccgattctccaaactaaacgagaaatactgaggaaactcaagaacctctctaacatctctccccatctccaccatcaaatacttcaacttcggctcataattctcagcaatactgtaattaaacagctgcgggaatctcttaaacatcgcggtggcgctccgccgcgagaatcctaacttctcgaagtaatcaatccgtggtacgagtttatgctcaacgctacaagagagaagatacgtatgtttatgcggatctaagattccgattctctggagaaagtaaagcg

SEQ ID NO: 58415 - DNA, 1218 bp, Arabidopsis thaliana landsberg
tgttcattagattatatataagaacagtaacaacagtgttgttttaaaacccattaggaaagatattgggctttgaatcaatatctgagcccaatttatttccgcgttaagttttccgttattaataatacgtttctcgagaaacatgtattttgaatttttgattttgggtttatgtgaattgtcaaatttcgttagctctgagaagataccaagcggtggcatggctgagacagatggaccaaggcgcgacggagacactcccggaaaaaccgtcggaagacgagttctccctcgccctccgcaacggcctcattctctgcaacgtccttaacaaagtcaatcccggttctgttctcaaggtccaatttctaatccttctatattcttctagtctaatgcaatgaactagggtttaatttctactttccgatgagattaagagttttttttgttgttgttgtgattgattcaactttgttttttgttgttgttgtgattaatcttctacaatttcgagtaatttctgaattacttgtgattttgattgttgaataaggtggtggagaatccgattacgccagctattcagtacgcggatggagcggcacaatcggcaattcaatattttgagaatatgaggaactttcttaaagctgtagaggatatgcagcttttaacatttggagcttctgatctcgagaaggttctatttcaatatcacattatgtagttgtttactttatcttttggcatatgcatatgttatgttcgatgaaattccccagagaatgataatatgatgaatgatgcatttcgtaagttgtttaggatatgaaagatttgttttttttggcttttgtttttgcagggaggatcgtcgaacaaagtagtagattgtattttgtgtttgaaaggcttttacgagtggaaacaagcggatggagttggagtatggaggtatggagggactgtgaggatagtatcattcaatccaaaaggcacttctccgccgcagtatgggattggtagtgaaagtactaccgatgagtctgtttctttggatgaatctgagtcttctcagtatgaccagcttttggattttcttcatctttctaatgagatctcagctgaggaatctgaaactgcaatctccttggcttttctttttgatcatttcgcgcttcagcttctacatggttaccttaaggagagtga

SEQ ID NO: 58416 - DNA, 1262 bp, Arabidopsis thaliana landsberg
aacgtaaaagtaatttagtttagattaaagaccaagaaaagaaaaggttgaatgggctggtcaatccaatttttagcaccattgttgaatgagttctgggaattgcttcaatacaccaaatggagaatttctatttcgaagactaagaaaaaaggtatatatgatttaatttcaagaattaagatgtgccttcgctaattttatgagcacaaaccgaataatataattcaaattgcttagagagagagagtcatgttagagagaagtggcattaaatatatagattttcatgataagacttaccccatcatcatagcgcaaagactgcaccaactgcggcatgaaaaaagtaactcgttcaggagggtaggactctaaaactcgtaggacatatgccatgacacgtggatgtcccttataagcaggcgtgaggaactcaagagcctgtgtaattgaacaagcagcccagtgcggtagctgctgcaacagcactgagttctcttcaacatttttcggtgtaacaaaatacggcaatgcctcaggaattgtacgaagatctactatatttgtctgcaagaaagaatatcagtgagaacgctcattttacatcatttacatattaagagatatagtcatggtatcaaattatattttttataccaagaggtccagagaatgtactatcctagcaatctgattctcaacataagttttagttcttacaataaatatttaaccaaaagtaccatgagccaaaagttcttcaacataattttttcccagttgcattatgcctcactggttttgtgtggtattgcaacaccagctcttttaaaacttaataccagagatacagtatatccatctcaaactacaaaatgtcaaaaatctgtctttctacagtcttagaagaagtagtatctgtaaattcatacctgaaccagctgagtgacttcagatttcacagaagcatttgccggaaatcttgaggcaactgataaagcaatgcgaggatccactgaaaaggccgttttagcatattcggtccatttctcagagcttattttcagccgcgaatacggactgtccctgtacatacgttgccacttggaagaatgaatatcaaaatgtaagtcaaagaaaacgactgagaagtgaaaatgtgatacaaagatagcgacttttactttgaactaataggttgtgcccaaacgtcaagcctgtcagcttcatgctggcagagcattaaaagcaactgcttc

SEQ ID NO: 58417 - DNA, 516 bp, Arabidopsis thaliana landsberg
aattggcagatataactatatatatagaaaaacataacaaaaaacaaattaatacttgagaagataaagtaattcactggcagaaaacataacaaaaaacaaattaatacttgagaagataaagtaacactggcagtggagaacttgtgttgcagagtacggcaacgtgttcgtacaaacacgtttgaaatattcttgcatgtcataacgcgttttgcaatattatactgtactactattgttttgggttctcattgaattcaagaattaagaaattaaaaatgccaatatataaatgcaaagtttgaaatacgtatttggtaactcgtttattggtatacgattaaatattatttagtatggtgattgatctgtatacacacacacgcacacggaaaactaatgattgtatactaaagtttgttctccattttgatatcaatatgaagagaaataaacttagagcagcaaatagtggtttgtgttcgtgttcttgatgtgtcattgctttggtac

SEQ ID NO: 58418 - DNA, 547 bp, Arabidopsis thaliana landsberg
  unsure (1)..(547): unsure at all n locations
cattaattatacaagacacacacaatccataggatatggggcaaaccatctaattccaaaattttaaaagatcagtaaaccttttttaaccatacaagatgggagtatcaagttgctaatcttttttataattagattttgaagacttcaaaaatatattagaaaaaatttggatcatgcatatatctatttgcaactaaatacaaaccaactaattcaaaaaaatagacctttgttaccatataagatgagaggatcaacttgcaaaccttttttacaattggataaatgaaatattcaatacaatatcttggggaaaaattgatagatcctcccctaaaaatcacaataaagcaaccttaacaaagcttcagtttatccataaatctaaaagaactagagcattaatactggttgttaactttaatctatactaatattctatgtttaatattagntgaccactaatcgatagtaatttctctagcaaaaattaacattagttaatagttctgtcgagtaccatagttagtggtacctagagcac

SEQ ID NO: 58419 - DNA, 136 bp, Arabidopsis thaliana landsberg
cttacatttaccttcttcatcacgtacgaataacagttggaatgcatatacctatccaccacgctaggttcttactcacggactgactggctatgccgtcttaaggctacgaaatatgatgtcttcacaccacaga

SEQ ID NO: 58420 - DNA, 495 bp, Arabidopsis thaliana landsberg
atatatttttttttgtcgtgcggggaatatatatatatatataatataatataatttttcttttttgtttgtttttaattttttaattgacagcgattttttggataatttttggggaccatgaactaaaaaaacacgtttacaaatttcacagaattataaatacagtgaaatctatttttattggatttaaatgattacatgaaaaagagtcgcattgagtaataataagtatggcgtagacattgagctaaagttttatagaaatggaagatgttttgtcctaatcgaaaatcaaataaccaagaaagacccattccattcattaatctaccacatggacatggtgcagatgctgtatattacaaagaaacaacacaacattaaaaagaaaaaaatccgataattaattttaatacagatatgtcgtaaattgtacagtatagtcttgttatatgtagagagcctatgtatggactgtttgttgaccattgc

SEQ ID NO: 58421 - DNA, 599 bp, Arabidopsis thaliana landsberg
cgcgaggttgttaaaaccactacgttattcacccagccggacgatcgtgcccaggttgagagaacaactgtttttccacccacggcgatacccacatctcaccgtaagcgaaagaccttgttcgatgatcggcggttcccaagggacaaacgatctgtccgatggacatacggcgctagtcaacaaagactgtacagagaccgttcggagagggctttgacaagcctttgattaacggacggtttatcagtctattgctttacacgccgaaaactctctatcggtcgaggtgcaggctatgccctgtgggcggtttgtggatgaagcgaggacgggtcgataatccccgaaaaccccgctgctaagagtcataaaaaaaactttcacgaaattctgaatttctaagtgaagggagtgacgtgttgcgtgatctgactggcgacgtttccgaacgccgcttcctgttgccgtttacaggcaaggcccttttaccaccaccgatttggctgatgcgccaggctgggcgctatctttccgagtaccggaaagtccatgccgaagcaggaaattttttgaagctctgctacacgcctgaactg

SEQ ID NO: 58422 - DNA, 1455 bp, Arabidopsis thaliana landsberg
aggacgctataggacggagatccaataagtaggaatatcttattgacaaaactattatcaataaattaatagtttaaatacacgaagttgaacactacaaactcatattaagacttaagatctgaaaataaatttagaattcattataagaaaactttatacactcgcttatatacaagagcttctttttttttttgttgaccaaatagtagcagggatatatagtaatttctgtgtgcaatgctaacggtttccacatgatcgggctacatatctaaactacaagggttgataatgtttccatgtcaatattttgcgtcacatatatgtatgtcgagaaagaatccatctaaatgaaagatttctctctgttgacaggtttaggttcatgccactttccatctacaaggtaaaaaatctctccaaaactaattgatatgttataaaagttgataaatacacgtgtatttgaatttatgagatgacaaggttttgatcgagtgtgacaattgcagcacgagtgaatcgatattgaacgtaacaagtgaagatggattagggcttttcgggagaataccatctcatccaactcccaagcctgaagcttcaacctcctcctcaagaactttgatctcatttctctacttcctttgcttttgtgttttatatccacttggtataaccttaacatagtcatgtaatatataataggcaactttttctaggctaattcaagacgatagttttttcagttccgaaagtacctcaccgttgataatacagtaagttactattagtaaccttgtatccatgaagtgtaaagtattcatcctaaacgaacaccaagttcgaattcaaaccaatgcagaaccaaaccgccatttattgtattgaactatattcatttgatttatatttaacaacaatatacgaatcatatactaatagctatgtatatgttttgacaatgttaagatcttatttatatacaaaaaaataattaataacagtatgttcctttataaaatagttttaaaatagttttagactttcataatattattggcgaaagagtaatgagtagattgacaaattctccctcaatttggagaaaaggatgaatatggtggaagaggcgttgaaagagtcaggaagataagaatttgtggtaggcttttatgaatcttgaacttcagttttttttgttttgtttacgaattttgtttcgttaaacttttatagctccttaatcatccttataggtcataccgtgttttaaaaaaacatatcttaaatttgaaaacaccctcgtttggggatctaaagtgtctccaattctccatagagactcactaaactaatctcccctattcacatatttaaagacacccccgtttcttttcctttattattttaatatttaaaaacactctcatgggatgaccaatgaggatg

SEQ ID NO: 58423 - DNA, 1463 bp, Arabidopsis thaliana landsberg
  unsure (1)..(1463): unsure at all n locations
atttgtaggcagaatctcaaactcaagtgaagcaatttctttcctcaaatcttctgaagactgttaaaaacacacaacattagaactaacagtacatttgttaccaaaagaatctatgaacagtcaaagctataataaagatcaaacctttggcgtaacgttgcaattagaatcctggtaagtaagtaatctcttctcaattgataaactctgccatgaaaaatatgactttagaaccacaaatgttttgctttttaaaagagaaatgaaattggttgctcagaagaaactaaccggtttagtgtaggtagagaatcttgaaggtgatgcaacaatcacattctgcttcttctccgagttcctgtgaccaaacccatttcacattatttgccccaaattgatttcaacgaaactaaattgcagaaagagataatgtaatcatcggtttaccttggagaagatgaagaacaatcgtgagaagaaggagaaggagaacagagacccatcattttctcgcactttcttgtctgtttgtagagattcatcagagaataatattatgagtatgagtgaataattataataaaattaagaagacatcccatcaaagtatcttcctttgagacgtctcaagagcatatctcgaaaagctccagtctttttggcttgtcgtttataagactccaaaaattgttaaaaagaagatgtttttttcttcataactttccgggaaaatgagcgagaaaatcaggaaagtgaaaccgacatttttcccgggacttcagaccagatacagtagtatcccgagtattaatcattctatacaaatcaagatttaatactagtctttatttatgtcagaccacagaaaacttaatattgtttcctctttaatgacgtttattagctcctaataaaaattcataatacactgatacttgttcagtgctcacaaactcaagtacttttgaaataatgcaatgaatcataagaaatgtataataatatgaattgcatagattatggaaaacataaggatatatttttatagtatggtatatattgcattatggagaaatataataaaacaagcagttaatgcagtcgatctcataacaactaggtaagtggggacaatttaacaccatccataaaagagttgacaatgagacataaaatagtagtaactaatattttctggtcacgaatgacaaattttaaggacacttttttaccatttcattcacaataatatgcttggaaaaaacatttccaaaacaaacaaaaaaaattataagactccgaatataattttttaatagagattttaaataccattgatactgattgagcattatatgtatntagatttaaacaaaaaaaaaagggacacagaacaagtaacagtcttaaagagagaagtatgaaaattaacaaaattctacgttgagacatttgataga

SEQ ID NO: 58424 - DNA, 1167 bp, Arabidopsis thaliana landsberg
atgttgttgttttacggagattgacacgaaacctgaaatcaaaacgatctagagggttgagtcttattacccctaaatcttcccctttgttagtacaatgtacaatcaacgttgcacgtgtgaccaatttgttgatgatgataacatgtttacgtgcgaatggtaaaagcccatcgggggacgagtgatttgttaatgatgctgacgttttgaggataaagaaaaataagaataatacaaaaataaaattttgattggttgagaaagccatgagtgtgttttacttttaagaatttgtgagataataatatttgttctgtttcagaagcaagaatttatagatgaaaatacattaaatgtgttattatttttaatgcaaattatcttctgggatatacgtataaatctttagtttgtaacgtaaaatacaattacaagcatactaaataaaatatatatttaatggtttctatatcattattctttggcaacaaaaatggtcaaatttatggaataatgcaatgttagtatgaaatggtttctatatcattatatttaattattaacaactatgcaatattagtttgaaattgtaacgtatgtgatactaaataagtgcatgaatcacgcgaataaatcaaattattttgaaaaactgttagagcaagatctaccttaaaccacaatttattgatttcttttctagcaacaaaacgtcttttatcactctaaaccagcttcaaacacatcgtgcacaacaatgtgtttgtatctcacgatcacgcatgtgagaagctaaattaccaacgttgtaaatttttctcctattagataaataatatagagtaagagtaaaaataaatggtccaacatggtaaacatagcactttaccaagattttaaccaccgcaatcttgatatcatctcgaggagaatgatgattgttgtctcgtcgctagggatgacaaggagaaaatagttatcgatattttagttatttgtatagaaatcagttcttataatcgatgtcttggttattcatattgtaatatctgattatgcttaccctaacaacaatttttttagtaggcaatatcttggttattcgtatagaaaccaaaatattttggactcattcacaaaaccacattggaacatccgtaatat

SEQ ID NO: 58425 - DNA, 140 bp, Arabidopsis thaliana landsberg
tatatctaccacgaatgccccctaaacaaactggagaacatctttaactatcacatccacaatcaccaccgagatatccttatggactacattggctgacaacaacctggaccgatccgacgtactttaaccattaccaa

SEQ ID NO: 58426 - DNA, 1249 bp, Arabidopsis thaliana landsberg
gagagtacccttaatatggggtcgtttcgtttgtcgtaattatggatatgatgttttaagataagaacagaaactgaagtggggtagtctcgtaaattattactaattattgggtagttgaagtgtcataatcggaaaagagttgctgagtaggttccggttagaaagatcattaatagtcaaatcgggattgaaagcgaaggtacacgacacgacttactatttggagtcatggagtgtctaaaatttctttagttttagctgaccaaaaaaaacgagcatctacgttgaatgtgctatatgcgaatgcgaaattggtgacttttataacaatcagagatttgagtttatcgattatcaaaaaagcccaaataattattaacattttaacggcccattttagtctaacacgccactgttcagggtttatgattaggattctagtttttttgcctgatgcatctccatcatctagattttaatcatatatgaggtactaattacaaactgtttttgaaataaatttctaggaattgtaaaatagacatgcatatatatactcgtcagtcataacacgcctttgaagtatactaattcatcttgaagattcttgaaagtgagctcatagaagaaataagatatttaagcccttgaaatgaccccttcttgagatatagatttgggccagtaagctctcagtatatttaaatttgaacctatagtggattcatgtgttgcttacattagtttctaataaataactagtactatcttgtttaaaaaaaaaaaattaataacctaaaaagtttacaagaggagaaaaagttagtgtgtttttatcgcttttttaaagataaaaagtgaattatgttgagatcaaagtttaggtctataatgactaaatgcccatcacaagactcttaaaagcttaaaaaccccccaaaagcagagagatagaatttagcttttttaccctctctttttctcttctgctttaaaagggtcacccactttctgcaattcttgtaaataaattaattatttacttttctaaaatcatgcttaactttatcttccttcctgcttttgaggataaactttagattccatgcatgaattgatggacatctatacgcattcatattatatgcattcatcttattttgcaaatatattaatgtggatatcgttgtgtttcccatgggtgttttctttaagtggtatgattcattaatcataaatggtatca

SEQ ID NO: 58427 - DNA, 1123 bp, Arabidopsis thaliana landsberg
aaaatttgtcctagatgacaaagttgatatgattgagatagagtatcaaaatggaaaaataaaaaaagtcattttacaggtaatgataattaaacaattagtttatagaaaattaggttacatgcatgatcatcaaatcaccaataattatttcactggtcatatgacttcttcgattaagttaatgactatttgaccgtatatatatatatatatttattttattttttaatctataaattttctgaaaagaaacaagttacacggtccaaagcccgaaaaagacacgcaggtctaagcgtttaaggtaaaacactgccatgaaggcacacatgtctaaaagagaaaaaaaaatacaagtacaaggcccaaacaattccagaccagaaacgacacgcatgcctaaaggaagaactgcagaagcacgaccaaagagaaggggaagactactccaaatacctgaaccaagttgagaggagagagaagcctggaggagcattagtctgattcctaaacagagggtcgagacgtgatcgaagaagtttgcacatctccttgatgaggattgcagacggtctgctgagttgagtatgaaggcgggcgttacgctctttccatagaagataaattgacgcctggaagataagcttaatgatcaaagcaaggttagggtcccttgttgctgatttcacccaccagagacaatccatgaactggaccggaggagagaaatttagcctagaggtgaaatagaaccaaacagcatggctgaaggtgcactcaaagaacagatgctccctagactcatcatgctgattgcaaaggaggcacgtcgacagaatggaaaatccccatctccttagtttatcccgggtgtgcaacatgttccaagcaaccacccaacagataaaagcatgttttggaatacgatctttgaaccaaattgaattgtgccaagacactgagtagacagcaggaaaatagaagttccagaaattgattgttgagtaaataacagatttcagaagttgaagcctaccagcgaaggacaagtgtctaacagtccaagaagcaaacttgggggtaattctaagtatttaactgcaaacttgtggttaattct

SEQ ID NO: 58428 - DNA, 489 bp, Arabidopsis thaliana landsberg
agctgaaaaaccagaagcagcttccttgtaactgtaaatcaaagcatcttttgcagcttcctcactgtataataatcagtaacataagaacaaacacatccacacacagaatcaatgttggagcaatccaaactataaacataaagtgagacaatccgtaatcagacaacaatatctcttctttaaaacaatttcagctactaaattgaaaaatcccccattttacagaaacaaaaccctaaaatcaaagcgatcaaacccaaaaaaaatctcattcaatacaaattgcatctataacccatgaaatccaaagtagcaatttgattacagacctgcctagagcacaggaaagggttctgatatgataggttttaggttcttcatccgtacgtctcctccgtgtacatgatgtgaacctttgcttccgaagatcccgttgcttctccggtatattcatcatccatgaccaatgaagctaacaactattat

SEQ ID NO: 58429 - DNA, 253 bp, Arabidopsis thaliana landsberg
agatatcaagtacgtttttttttccattagatttctcgtttgatcctgcacttgtaacttggagagcatagaacccgttgaatgcataagactctagtagcttctttgtttgatttagtttaattggtttaagtgcttatctggttttgaacttgtgatcatcgattccaccgaaacaatgaaagatccaattgtcaccaaggttgaagtaaattccatttttagtccaagttcataaactgccccatgattt

SEQ ID NO: 58430 - DNA, 1679 bp, Arabidopsis thaliana landsberg
  unsure (1)..(1679): unsure at all n locations
gagcaaaacaatcaacaatcttaaaaatgattttagaccaaaacaaaaccaaaatgtcatgaaatgatttaggccttatgggctgaatttgttaaatgggccggttttagtcttacgtattgaggatttgtatcattttgcttttaattagtaattgatgatttgatccaatatggaacaaaaaagaagctcataacgctgattcattttcgatcgcttttagtaagagactgataatttttggcattagcaaaaatgataaaattctaaggtatttatgcaagtttgtttataaacatgtgctataatgtacttgaaacaatatgaacattaatttgttatacaagataagattcacgatgagacattataatagtaaggtgcctagagagacaagagctgtcactgagcaaatgttgtctcctactcaatgcacaaaaccttctgaaaacatcaaaacgtataaatacttttacccttagtatacatatgctatttctcttacgcacttcattgaataataaatatttttacgtgtaaactattaaaagatctattgtcagataagtcagaggtcaggacaactatatagagaagaattgttattgaatttctcatgtgttgttgttcgttcaattacgttccgaccaaagagcgagttccaacgtatatctcatcgttttgataccccacgtgatcgttttcacgttacacagtcaacgcctccagagccaagccatcttttctagtacattacatttacatacttaaattcaagcgccgatcaccgatacgttttgaggagctcataattaatcaaacgcaaggaaaaagaagaaaaataatttctatttcataaaaactttggacagtttggttgaaaagtttgatcactcgttaagatattcacacatgttagatatgcacaatttgtctataacgcaaaacttatcatcagcaactatcttactacacaatcaattgtctagactagtgctttcatttgaaatgtttctttctccacgcaaattctttgtatcactccaaaaatagtccgagtgatatcttattggtgacagataagtatatactaaaataaaggaaaattaaattctattataagtttgattgttctttactcatcgaattaaaatgcgactaccttcaagcttcaaccgaatattacgttcataattttttaacaaaaaaaataacgttcataattaactttacatacaaacaaaaacataaatatataagacaaaagaaatgaaataaaaaggttatatgtggaagtattagtgcatttgatccaaaacaaaataaagaattgtatggagatttagaaaagcacaagatctaatctaaacagactgcgcgatctagtaatacttgactagtatatgatgaaatattagtgtaatttaataacatgcttcacgaccatcgataaatagaaaaaactaatcaatagtaaataattgtacttgcacatcccaaaaatttaataaatgtaacaaaaactacaaagtcacgtacatgcatgtgcatataattaattatacaaagttatctaaatnttcgactatcatatgctataatttaattaatgcgacattgcatggtcccatacacctaagcctgacctgggaatagtctttttttcgtcttggaattat

SEQ ID NO: 58431 - DNA, 1100 bp, Arabidopsis thaliana landsberg
  unsure (1)..(1100): unsure at all n locations
gttctcgtctagagacatcaggtagggagaagcgccggacaactctaatagcctccccaacaatgtaaaccttgaaaagaacaccttctgcgaaagccaagcatttagataggtaatcaaattatctaagttctagtacaggcaatgataaccactaaaatctcataccatggttaacaaactcctgaagaacaagaggaggctcgagcttcagaagggagtgttgatcgtaagccagcgaaagctcatgtgactttgcacttccatcagcaaccaatggctttgcaactacgattttaaacatcaaattaaataatttacttatagatccattaataatgcacaactaaaacttcagccacccaccaattgaacaaacacaggccatggtggcttttgtgatagacaacaagatgccacatgaagctaaacgaaagtcattaacagaacataaggagggaatcataccaagaggtagtctcagaccagcattattgacagcctccggaattgaagatgcatcctttttaattaccaattgcttgggcacaccaacgcgtcctgcacaatcagagcaacttctactactcagatacacagaactctactaataaaatctttaaccttagcgtccctaacagcaaatagcaagtgattacacatgaatatttaccattactatcagacagattcatgtccgcaacacactgaagcattgactgacgattacggagatgtagtattgcatctggaggatcaagaactgtgacatctggatgtgctagcctaaattcctgaaattattagaaacagttatgctcacacatagtctacttttcaacacccaaaagtgcatccctgctaatggtcataaacagaaaacttctatctctgtattgctgagatctcctgagatattgatctacattgatattattattaacacagcgacagtgtcagtctaaaaactgtatccccaacgttgaactcttcactatcctgcaactaagattaagacttaaactaatctactgatgaaacttgcactttgcaactaaagtntcattgtagacacttntctatatcatcagtatatacta

SEQ ID NO: 58432 - DNA, 1114 bp, Arabidopsis thaliana landsberg
gtatgtagatcttgatttttgtttgctcaattgttcaatctaacttgaagttcttctatgagaccacaaaatcagagaattatccgaaccaaaaaaccttctagattggataataaaccggtcaagatggtctccaacagagatgattacaggatgaataacaacatcaaagctctaaacaaatttgcttacagatgttccaaaatgaatactctacagtacttcactggtcttccaagatcaatacttgtcaaaaggttaaatgtttaactaggccagaaaaatcgacgttttgatcactctgcttttttcctccagctaccatgaaactttctctttccctctagaatgaacaagcgagacttgattagccagattttccatggcaactgagttacttctcttcatttttcttgaaaaatctttgcttgagtttcctctcaatgagaggcttttccttatccggttccggtttatcatcatcatggtgtttttagggggcacattgaaagcactttcaacacagtcaccggcctgagcacagccccatggtcttgaagatggcccatcttcataaagcggtttaagcctcgggacaatgttgtttgatttgaagtgttctccttcctgtttggtgcatattggacacagtgggtcattgcgttgaatctttggagttgattggtcaagacattccacgtgaaagacatgttgacatgaaagcactcctgtgacaggcatgtctcggtttcttacaatggaccgagatccccacggagatttctgcgagaggtatctgttacacagtccgcatttaaatgtacttgaagctgctacttgttgtgctttggtagagttattattccaatcaagaactggctcaggaacatccacagaatcaatgctgcttggggtcccgctgctccaactgcaggcatccgcagaatcagatgctgtatccctaacattatcagaaggatgcagtataggatgaaccggcttagacaagaaaaagcgccggcttgaggagttacgaccaggttcagagtcaccaataccgacatttcttgatgtacctggtagttgcttaacaatctgatctgcatagagaaat

SEQ ID NO: 58433 - DNA, 900 bp, Arabidopsis thaliana landsberg
tctgaatctctggatactgcttttctctctgcctttcattttttctttcttttcatggctccgtctcagagtctcttcggatgttactttctcacagcttgcaactagtttttccctttgagatgaagcttcttctttcgcatttcgtctggtgtgcttactctctgatccttttgatgagataggcacaacatctccatcagttttcctcagttttctatcagaagatgtctctgctctctgttctttgcggcgtgaatgctgtttttcaggcttaggaaaattctttggaagattctcagaatggttttgttccatcacattctcaccaaacatgtagttgtacggtcgcttaactggtatgatgacttctctttcttttgcatctttcacaagagcaccccagttatggtctctttgcaaggttcgtgtgttacccaaaacccaaagggagagtttggctctagtgagagcaacattcatgcgtctaacatctgcaacaaaaccaatccgactttgattgaccccatcaggagccgaatgtgtagctcttacagtggataatactaatatgtcaacttctttgccttgaaagccatccacagtattcatttccatatctgctgttacttgagccccaaatgcaccagtgaaacgcgaacgcaaaacggcaagctgacgcttgtaaggggttataatgccaatccttccagcaacaaattctgaggggtacctgtaagcatcaagatagcaagtgagtaaaataatatcatataactctctaaaacatgtgtgaatagatagcttaagaatgattaatgacctcttcttgaaaaatctaagcagttgaacagcagcttcagcttcttgttcattgcatcggagctaggatcgcacttc

SEQ ID NO: 58434 - DNA, 220 bp, Arabidopsis thaliana landsberg
ctttacgcacaaggttacggaaactttgcagatgttttttaagcaatatcattaagttaatgtaacaccagacatctaattgactaatcggatgtcctaaacagcaaagtgtttaaccaattttaaggtgtttagaatagtactcactgtttcattataatgaattggattttttataattattgtttcattatataaaatgtttttacaactttgggat

SEQ ID NO: 58435 - DNA, 309 bp, Arabidopsis thaliana landsberg
gctaggctgccacgagtgattgctaaacaagcggggggacatatataaaagccctcaccgatgccaccaccgtaatatcaaggtatccaacaaataacatgaacaatcagaaccagactgagatactcaatacgtggccactgaaagagtgcgtgcgaaaagaacaccagacggggagatgtcatcagtagtaactgactgaaatgaaagacgtgtgtgatctagacgtagttaacatctgccaaatgtcccaagaatattagatgcataaactgggatacgcacacacatattctaccgatggctgta

SEQ ID NO: 58436 - DNA, 518 bp, Arabidopsis thaliana landsberg
  unsure (1)..(518): unsure at all n locations
tttggcttataaaattatattttgatggctttggaatcaatttagcgttgaaaaaatgtcaaaaattagcgaatgttgaaagaccaattttttacactttattaagacacgtcagcaaaatgaagcgcaagttaggaaattggcttttacttcttccttgagaagtttccgactcggccgctttaaaaccaacgcccgacgctcatttcttctctccattttttttgctcatcttcttcaacaatggcggaaccaaagacaaaagttgcagaaatcagggaatggatcatcgaacataannnnnnnnnnnnnnnnnnnnncactcttcctcctcttattccctctttgttcatcctcgaactaattttctcataggttgttttggcgtaacaataatacacgaatcgagtttcgtattggttcatcgttattatagatcttgcttataccgtatttttctgaataattcctcagatccgaagtttttttcgatctgaataatctcaattttgataatt

SEQ ID NO: 58437 - DNA, 147 bp, Arabidopsis thaliana landsberg
tataggaggtgcctaggacacccacacacacggggggaggcccagctgggtcacctacactctgaacacaatgacgccgcgctgcccgactttcgaggagctcacactggtctgatccgacatactcagaccgtggccggtcatacc

SEQ ID NO: 58438 - DNA, 1178 bp, Arabidopsis thaliana landsberg
aaagagagggtgtctgacaagaatcaggacatgaatgcttacctccaataagttaaaaaaaagagtgcaatttaaacttccctgaagcttcatgggtggcaatgctaaatattctaattgggatagtgcttccttcgcgtgaaactgtgggcatatcagctgatataccgataaccattgaattatcccttagtacagaggctgttatgcaaggtatgaaaaaaaaggatcattgtgtggattcagattcaagtaatgtgtctgttaaggattgcaacatcgagagagaaagtggtggttctgtaaaagaaaaagagcctgtgttttctgaagaacacccccaagagaggcggagtactcgtcttgaacggcttcggaaccagaaacctgagaaggaagggttagaatttgataacagtaaggatcctagcagtgacatccttcaatatcttgagaaatttgtccttaaaaggggttttgacagagagtctgctggttctttctgcaatgaagaatctgatccaatttctgaacacgccgtcgtttctaattttgtgaaggaaaatttagaaaattatggtgcgtatcatatgggtcacttgcttctagaatatattgctaataaatctgaacatgtattgagtcgtgagactgccttgaaaattttggagttagaaaagcttacaagacattggggccgagatcggaaacctgaatgcagtctttttctcgccgagctgtaccatgactttgactctaaacgatcagatatccctgatgccccatcatgcatggtagaagtaacataccatctctctaagataattgaatctgtttcccttgattatgctatcgactctacacctagttctcgagggaaaatgttttctgactcctcatttaagagttttcaaggtgatgaggctgctaaggaggtgttagattatgatacaagatctttctgggctcgatatttctggctgagtgcacggttatcaattttggaggataataaagctaaagcacttgaagaatatctcaggtgtttgtcattgttgggcagggaaggtatcggagaagctcctgacttaattcagcgacctcattgcagaagagttcgagagctgaccatcaatagaatcactcatgaaattaatctgctgaagagcgattccctg

SEQ ID NO: 58439 - DNA, 690 bp, Arabidopsis thaliana landsberg
catactctttcttaatgcctaaacagatgttttctccacaccaagaaatagacttgacagtatcaggaactccatagtctctgacctctacaaatcctcctcctcctaaaaaatcaacagaaacaacatttcatcaaaatccaatcctcatgattcaaagttgagtttcagagatttttaccatcgtgcttgaaaacacagactctcttttgcctagagaaacacaagaacccacgccgatcatcccaagaataagcattagcacctttagctttagtaatcacagcaacagtctccaaattaggaagtccatgaaacgcaattgactcagagagagacaaaagcaactctctcgaagccaaaacctccatcgccacaatcggtttcttagagaatccagctaccgtcttctctagcacgtaagtctcttgatgcagctccgacggatcggaggcagaagattccggtggagagtaaatgcggagagaaccgtcataacatccagcgaagagcttggagccgtaggattcaacagcatcgatcctagcgggacaatctttgagaagctgaaacgaatcataagcgttgtgaaccatatcttcgatcgatttctgggttcttcttctgggaatcaccaaagattcatcatgtgcaaaatccaattacaacagagatgatggattttttttt

SEQ ID NO: 58440 - DNA, 463 bp, Arabidopsis thaliana landsberg
  unsure (1)..(463): unsure at all n locations
cccccccccccttctnnccctcttcctcccccccccncnncccccccccccccttcctttcttctcccttctttccccccccccccccctctccccccncccccctttcccccccccctccccttccncccccccccccccccttcctcccccccttgtattgccccccccccccggggcgccctcaaattactcaccccccctctccccccccccccccccccccccccccctcttcccccccccccccccttgcccccccccctccctcccccccccccctccccccccccccccccccctctccccccccccccccccccctcccccccctctccccccttcctcccccccctcctcttcttcctngtccttttctcctccccccccccccccccttccccgggtctccttttgccccctccccccccccgccgtccccccccccccccccccccccccc

SEQ ID NO: 58441 - DNA, 1168 bp, Arabidopsis thaliana landsberg
gtgttgacattagtttctttaattttttgtgttgaagtcttgacgatagcatgcataggtatcctgttttggtaacacgctatgtacgtcggtgcatgtcttcaatacttcgtggtgttgacttttcgtggtagggatctatctaacctcataggatttttaactgatttgaattatgttatatcatttatatgtatttgtaaattttgtttgtctcatgtgtaatcaatgacaataaccaaagcggtagtaatatattcacaagtaggaagaataaaaatcgagacagtccaaaacaaatgccagaaaaagaaaacacattgaagaaagagggtatggatcgacgtgatattttaaaattgaaatattcgttacgtgtacgcgtaaacgacaacgattcttttttgatgacgatgttatccatttccatgattcgattaccttattaatattcactcatgttatgtgactatctctgtatctcagtatgtctccgtcgatacgtagattttaggttttgatgcgtataactgaggaaccaattgatataagcaaatcaacgtacgtatgttttgacgtgatgaataatgatgatctgagttgtagtttttacattaattatataaatatattattcatatattcttagcaagaaaaaaagattaattggaaaaaccagcataatacgaaatgaattatgatacgacaaaacttatcatatacatataatacaattatacatttcacgatctatatataggtaccggcctaacgagggagaaacctaaatatgtagtgtagaaaaagagttaagatggcataagagagtaaaaccaaaaaagtgtagaagaaacctaaattacgaggaaaacaatgaccgggagaagagaaagtcaacgaagaaatggaaagttggtagaaagaagaaacctgacaacagagagacgcaattttcaaagcataaaaatggacgatgctgaagggtaaaaaggtcaaccatgctcttaaacaagttttaagtttatgcatccaattcacatttctctatgccttcatcaatttcatttactcttttgtctgaactgtcatttattgtttgacttttgcttctactattcatttatacgtcgacatatttgcttctttatttatcatatatagatatcac

SEQ ID NO: 58442 - DNA, 739 bp, Arabidopsis thaliana landsberg
cacccacatgcttgcccaagagccattgatccagctttagaaactaaatggaagaggcttgagagggaaagagacagaagagacgtgataagcacgataatgtcatcgacaccaggtgctgttgtgttgggagattatgtgatagagccgcataaccgaggtgtttatgatgaagaagacgaagaagaagattacagctcagatgactctctaagcaacgggatactggatttagaatcatcatggcaaggacaaagccatcatattcggtttcttgatatggaatcaagtgacttcgcatcctcttccagctcccctgcttctccaagccgttcgcttcaccgtttgctctttccaaggaaccagagaggcggcaatagaggtcggtaactttaatttaaccgaagcaaattcatgatcaatgtcctctgcatatttctcaacctctttccacgattatagttgacttaaaaattgcaggagcagtataaaaaggctaacatgactagccaattagccatacacagggaattggaaaaaaaaaactcgcagtcgtccctttcttttatttattttcatgtaaattattgtattctgtgtaattgtattattgattctgcattgttgtactttaatgaggaatgatctcttatgcctcatttcataattcctcttttatttccactttttttcctctgtattgatatgatcttcatcttcctcaagttctggaagaaca

SEQ ID NO: 58443 - DNA, 671 bp, Arabidopsis thaliana landsberg
cctccaccatatgttttagcttattcttcattcagaaaaacatagaacaatctttattattaaaagtataaattagaaaaacagaaagaaaaagatgaagtacccaaatatctgagttgtgtttagctttgctccttgcatctccttcttcttcatctggatcaaaatgtctgtatctccacgttctatttttccggcgaaatggccgaagaaacggtaaccggaacttactcatcattcttcttatccaccttcttttcttcttctgccatttttatcaacacagacaaagttcaaattaattaagacattcgaattttgctggtttaaaagaataatatactttttttttttttataacaataatatacttattattacaaagaaaaatactctgtttattagaaaagataagctttagtcgtaaagctactcttagccgatatcatagtcaacgactcaacatcactaatcagattattcagacgcaactgcttacttgctctttaatttttgcgtaaactaaaaacgcaagtcaagatgaacgataagtcatggcccatatctggcccaattaacttgcaatatctgattaagagaaccagagaaacgttaccttcggactcggactcagacgttcaggcttgttgtcactctatacgacgtcgcat

SEQ ID NO: 58444 - DNA, 163 bp, Arabidopsis thaliana landsberg
gctcatttagcacgtcggacagccacacaaacggggggaagcttatatgggccacatacactcgcaccacaacgacgtcctggtgctagacctataaggagttcaagagggactgatccgcgatactcactaccttgccggtcaaagcttttcctcacctaca

SEQ ID NO: 58445 - DNA, 610 bp, Arabidopsis thaliana landsberg
ccctgattttattattctatattctggttcggtacaaattcggtattttattattttggtttcggttcggtacattcagttcggtttatttaccataagaacaaggcccatacttatcgcacatgggcttttaactgtttattatatataaaaagcccatcatgtggttcgttacaattttctgttaaaatgtttggcccattgtcgccgtagattgtcttctccgttcgaaatcgcatccatcgccgtcgtcgtcggtgacgaaaaccaccgcgtaaaaccgtttcctaaatcagatgttcaatcttagaagtatctcttagaagctctcttgtatgaaaaaatgggactgttaagcataatccggaagatcaagaagaaagagaaggagatgcgtattcttatggtgtatgtcatattcttaaatcgttaatcttctccgatctaatcatacattatcatgttgtgctgattttggaatgtttttttggcagtggacttgataattctgggaagacgacgattgttctgaaaataaacggagaagacacaagtgtgattagtccaactcttggattcaacatcaaaaccattatctaccaaaagtaaa

SEQ ID NO: 58446 - DNA, 114 bp, Arabidopsis thaliana landsberg
gcataatagccaaccggtctacgcaacatagaccgtgggggttctttgtgagatccacactgatgccacaatgaaagcatccaacgctgcatcaaataacattgtgatttgcat

SEQ ID NO: 58447 - DNA, 104 bp, Arabidopsis thaliana landsberg
cagatcatgcgcaagagagacccacacaaacaccgggggggggatttgtatcacagacactaggaccaccacgacgtcaccgtactagacatccaaggagcaca

SEQ ID NO: 58448 - DNA, 124 bp, Arabidopsis thaliana landsberg
gagtgcttccacgacggcgtgcaacacaaactcgggggggccatctttgaccacacccacaaggaacacacgacaacacagggagacctaaagaaggtagcaaccacaactaggccagacagcg

SEQ ID NO: 58449 - DNA, 116 bp, Arabidopsis thaliana landsberg
caatagtataaattgagattgacaaacctactcgggggggatctattgtatcacagacactttgtgcaccacgatatcgtgccacttgtcgttcagagagctctatatgaacaaaa

SEQ ID NO: 58450 - DNA, 1240 bp, Arabidopsis thaliana landsberg
gttccatgtagacagagatggcttagggttaactaaatctatttaagtaagaaaatttgacactgaaagatgtaaggataaatgttgcagtggatgttgcttgggttacattacctatcaaccacactctacaactatgaaactactctcttttttggcagcatgaaatcggtcatagagagatacagcgatgccaaaggggaaaccagttcagaaaatgatcccgcttcagaaattcaggtactccttttttttgttactcctccctatggatttcaacgagtagacaaaacaagtaacatactacaacagagagactgttactcgattcttgtactaatatgttagcctattacaactcattagcatttctcaacttttaattcctctcaagctgatcctgatatctaatcagagttgcagaccataaataccaccacacatcatatgttgaagtagggtttgcagtttgctataaaacacaagtcatgccacctgaacatcagattgcatacatagtgttgcattttattttgtcaagaatccgttgtagactagataacatatttatccgaaaacaaaatacttgtttacagtttcaaacacctgaaaatcatttctactatattctagttctggcaaaaggaggctgcgattctaaagcgtcagctacataacttgcaagaaaaccaccggtatgttttgcatcctctgagtttgtcaaacactctcgatagtagtaacaactagagcagggaaatatgtactaaaatgcaaaatgataacatacgtgtagtccaaggttagaagattttgcagaacccaaaactatcctaccatttgcatttgcttagtaaggatagtcgatataaagaatagtaagccaaatggattaagagttgtatacataaacacatctaaaccatccataagaaggaaataaccaaacactttcacactccccatcgttttcttgttttgctttggtgaattaggaaatgtatatagtaactctggaaaagtatgcatattcagaagagcttgtacttgacaggcaaatgatgggggaggagctctctggactaagtgtagaagctttacagaatttggaaaatcagcttgaattgagccttcgtggcgttcgaatgaaaaaggttttgatgctgtgacaaataagtcaaattttggaaccatttagaagaagtaatggatgtactctatctacgctcttttttgcctt

SEQ ID NO: 58451 - DNA, 114 bp, Arabidopsis thaliana landsberg
taaatcattcacaccagatacctaaacaaacaccgggaggattatttataacacaaacactatgaccaccactacatcctccaactagacatacaataagttcaatatgaacaa

SEQ ID NO: 58452 - DNA, 102 bp, Arabidopsis thaliana landsberg
catatttatcatacgggattgccacacatacaccggggggatctattgtaccactgacacttggtgcaccacgatggcgtgccacctgtcgttcattaacct

SEQ ID NO: 58453 - DNA, 641 bp, Arabidopsis thaliana landsberg
taccataggaacacacacatctttattattttttcttcacaccatatgtatttttaaaatattaaggttttaaaaaacaacatgggcgtgaccaggaagcttctgaatgagtagtttctcactcgagaagccaaacctatggggaatatcaaatgctgcaaaggatcgaaaattgtcgaattggtcaaaatattgaccttcaaaagaccaaactgtttgtgttactctctttagtcttttttgttgattatttatagcgtgaggataatattttagttttttttttctatagggaggagatattttattccaaattctatttgcaaattagtgggggaggaaatgtattaactatagaaaggaaaatagagtgaagacagggaataagatcaacgagacaaggtcgtgaggaaatttcaaatctattggaagactcacctgtatagagatagataatccaattcttttaatcatgccattttgttttttaatttttctttttggaggggccgaatcatgtcatttaccccatctatagataaccagcactattaagaggggtgttaagaattaagatggccgattttattttattttattaaagagaagcaaaaagtttggttctttaatttaagattttt

SEQ ID NO: 58454 - DNA, 399 bp, Arabidopsis thaliana landsberg
  unsure (1)..(399): unsure at all n locations
cccccccccccccccccnnctccccccccccccctcccccccccccctctctccccccccccccccccccccccttttttccngttgtctcccccccccccccccccgcccccacacaaaacacccccncccccccccccccccnccccccncccnnncnccncccccccccccccccccccccccccccgcccgcccccgccccccccccncccgcccccccccccccccccccccccccccccccccccccccctcccccccccccccccccccccccccccccngnccccccccggcgccgggcccgccgngccccgcccgcccggccccccggngccgccncncccccccctcccccccccccccccccccccctcctccccccccccctccccc

SEQ ID NO: 58455 - DNA, 581 bp, Arabidopsis thaliana landsberg
tttatttttttggggattatttttttaactgtctggggctgggacatgcatattatcatatttgaatgaagataacgatacaatgccgatactgatacaaatcattatgttagatgctcaatttgtttctataggtcctataatatatacatcaagtcatcaactatactttttgaaaagaaaattacacagagctttcaaataagttgcgtgtagtttagtggttatatgtactagtagttatgttaccatctaagtgtattgtcgatgagaaaaaaagagttcaaataaactgacatagtatgctggtaaataatcacactttttcggttttttccatttcgttttcaataatatataactgtgtttctcgccatgtttcattgatattaaaaatctcatgatcatgcacattctatcataacacagccttggacctttcttagatatatatgttaggaaggcctcatcttgacctatgaagcctgaagctgcattgagccttatagcatatgtccctcttcagaattatgattttatttttcttctccgttaactttcatatctttttttcttccaaa

SEQ ID NO: 58456 - DNA, 907 bp, Arabidopsis thaliana landsberg
tacgtggaggtcgactctagaggatcccctcttttattctcttgcctgtggtatctgctttagtagtcactgagatggttttcttgtactcattcatcatgagccactagttgttgtaattgtaaaagtacagttattggcacatgtaagcatctctaagtagtctatcaatacaccaagatgataagtttctggtcaaaaatggtcttgatcagaatattagtcttcttttttaggtcttgatcagaatattagtcttcttttttagtggaattagcatggaaaacgcattcctgtggatttgttgtgggaaactgatttgaggtaacaggtctgttgtaagggttaaaagtatggttggctagaggctaatctccaacatcgttttgctaggattattgttgtggtgatacttcttgtggattagtatttctacaagtatgcagctgtagtttgactttgtgttgtgtgattctaaggacttgaaatgaagtaaatttgtgaatcttgctaccgtcttctgtttgcttgtaaatgttctgagtttgccacttctaggacatgctatatgagagataggaatgtaatacatctgcttatttcttaactctaatgtaacatctgattcttactaatatatcttgttcctggctcaatatgcattttaataacattattggtcttctttgcgtacttgtagattatggtggggagagatactgggcgtccacgtggttttgggtttattacattcactgatcgcagaggagctgatgatgcaattaagcacatgcatggaagggagttgggcaataaggtcatctccgtgaacaaagctgagcccaaagttggtggagaagatgtagaccaattaaagaaaggtggaggctattcatctcgagggaag

SEQ ID NO: 58457 - DNA, 1578 bp, Arabidopsis thaliana landsberg
ataatttttaattgggcttttaatggggcctgaatggtttgggcatattatccatttatgtttcgaaggtgcatcaacctttttttgaaaatatacatgcagtcagtattcatcgcattcttgttttttattttctccctgttgtgtgttgtctattgttaatttttttcagcttcactggtttttattatgaactacattgagaatttagaagaaagagtgattgagaaaaacctcactaaccaaaaccttaactaaataaacaaatccgcttgaaaccaaccaatattacatatgtgttaaaacattcgtcatcaatctttttcggtcggtatattgaagaaagggattaaaatgttaaagattcttcatggactaaggagtgttaattcatgaaacgtaaatgctgcttcattaattaatcttctgcaaagatgtcacaaattcatatgacacctaaagagtatcgttcatacaaaagtaaaagatcgatttacaaagattgcagaaactaaaccatacaagaacaggcaaaatcatgtacaatcttcaatattcttcatggttgtatgtagctactcttatcaaactaactcttcttcattgtttcttctctaaagatcgatttacaagattccagaaactaaacaatccatgaacaactaaatcaaatcctcaaaagaaatccaaatttcaacacagaaactatccaaagcaacgcaaatctgaaatgagccaagaaacgacttttttacaacgatctttaagtcaaatcagcacctgaatttgatatcgagtccatgcttgccatgaacacacccaggtttcaactgcgaatacgaatacttcttcttcttcaacgtaacgtttttccagaatgctctctttcctgttttcctaatcctctgtatctttaccagctcatcatcatcatcgagatcatcatagtagtcaaagtcatcttcttcatgaccagtatcataaccatcgcgattgataccatctttaacagaataacgtgaaccttcacaaagagataccatcctcgagcaaatacaacctccgtcgacgcgatcaccagaagtaaccggagatgaaacagagtacgacgaatctttcgtggacgtgacggtatcggagagagtctcgaagttgaaggtgagggaagtgagtaacttgaaagtctcgaggtcgagaatcgccattttttttttgttttctggctcttttgtgatttttggtttttcactcacagaggaagaataagaagtttgttacaatttatagtttcgatttcaacaacatgcaaaaatggacaaggaagagaatattggccggtttgtatcttcttgttagacatgcgtgctgtttgtactacatgaacgaaaacgtcatgtagttcgtttgtagaatcgcataatggaatgtagtttaaagaaagcaaaaccttcttctcatgtagtgtttggtcttcatatgctttggagaatcggatttatgggtttaacacaagaaaatcaaataatttcgactttagtttacaacttttgtgtattattacactgacattgacatata

SEQ ID NO: 58458 - DNA, 330 bp, Arabidopsis thaliana landsberg
aaaaagtgaatgaactgtccattctgtgcgatatgcgcgctagtgtggtcgttttcaatcgagaagtataacaattgacggcggggccatctcccgaggcagctaattcactcatcgacaacttttattctctaaccgaccatgaaaggaccatgaaggccgttgatccggagtcatacgtccagaccgttatcgaaaagattgagaagaaacgagccgatactcggaaggctatcacggagtctgagatggaccagctcatgtgccaaggccaaaatggacgggaacttggagacctttacgcaaccgaggctggtcaactaccaccat

SEQ ID NO: 58459 - DNA, 218 bp, Arabidopsis thaliana landsberg
ttctgattagctgccaggtccacctgtttatccaagctaccattcactgcacgtgtcctgtagttgatttttgtgggcggcccacattcaatcaagcagggggctctacttactttttcagcggagatcctgttttctgacccaccatcagagaggatacatcttactctctccggtatatgcctgacttatccattctcataaacctctatactcct

SEQ ID NO: 58460 - DNA, 211 bp, Arabidopsis thaliana landsberg
ggggaccactaatcattagctgcacaaattgtccagaaatacattacggggcactcatacgggggggaatatatacaatatatgcctaacttgacattcatacgactggctcttcactatacactgactatagacccagtctactgaccaatagctgtgacgaggccacgaatctcgagagactgaacttattaccctcccggaggggaag

SEQ ID NO: 58461 - DNA, 497 bp, Arabidopsis thaliana landsberg
  unsure (1)..(497): unsure at all n locations
ctggtaccacacatgccccccatcttgccatcaacggcgcnnnnnnnnnnnnnnnnnnnnnnnnnnttcacaaaggtataaaactctaaaacttcatcgtgtcgagggaaatcctaactcatttatttcttcccctgtcacgggttctccccgcagctctcacctcttcttctcctgttccacataaggataagagcggcccacaggacgtctccgacctctccctttggatgagtgcgacgtcgtcaaagggtcctatagtagttccatgggtcttctgcatcctcgaactggaggacacctcctcgcagccgactacgaaaacggaaggtaagttggtcgccccttccccttctaatccttcctcttggtcaatgcgttctttttcgaggttagggttagaattcttctccctcgaccagcccttcctttctcgacttcacatctttttattattttataggctacgatagggcaaaggttagaaatcatttact

SEQ ID NO: 58462 - DNA, 503 bp, Arabidopsis thaliana landsberg
aatattttttaaattataaaacttttttttataccaattataaaagaagcaaagattaaaagaagatagaagagtgaaaaccaacatttttggtttacttttgtagtattataaattatcggactcaaaatgttcatcaatacaaagcaacatctcatcaatgcaaatctgcactttgcataattttcaacatgcaaatctcatcttctccactcggaaaccttccttaattgggttcacaacttcataagttcacatcatagatctgtgttattgggctgttttatggcttgtaaaagttggactagacccactaatcattatagcctggactaggcatgtattttcttttctttctcctacaatattatctctcatcaatacatcaaaaccacaacaagtttatgaacaaaactctgaaccgggaagttgttttctgataaaccaaactacacgccgtcttgagttgattgatgacgtgttaaaagattaatggctgattg

SEQ ID NO: 58463 - DNA, 464 bp, Arabidopsis thaliana landsberg
ggcgtcattgaaggaagcactaccttgcctctcgggacactaggcgaggtcgtagcattatgtctacagtcatacacaggacctaccgtaataattcagtgggaaacggtatccgagagccttcttgcgtctctgcggatcggaccctacttggtcctaagcactaatgctaagccctgcaccctctatacgaaaacctaataattcaaccgcctgaccctaacccctgtaccctaccatctaataccagataccggacaccctgagccatacactcttggccctaaacccttaaacactctaccgctcaccatatatgtcaaagtttataacccagatgcgaccataggctatcggaacccgcctgcggctgtagatctgatgctcaaggatccccacagcatcgagccatgtgcggctacacatgcagtcgcaccggttgctgattatggccaaagctctga

SEQ ID NO: 58464 - DNA, 1005 bp, Arabidopsis thaliana landsberg
aaatcactatcttggtgtcccatctccaccggtaaatgtgagcatcgacctaataagtaataacaacgaaaaagtaattagaaactaaagttagaagagttttcctcggtgtgctttcaaattttcaactaatgtaaccatcaacaaacctgttgtgttccaagaactcttgttgagaaactaaatgttatcatattctgaccatctttcagattcagagatgcgatctgttcattggtagggacattagttctcacaagttgtctacgcggagactcatggcgactctctgtggttgattgtgtttccggtgagttctgtaagccaggttcggaatcaacaaacagatcttcttcgcttgaggagttacttcccgtatgctcaacagttttaacccttctaaaaggaatcggccagagtctccatcttgttccagatgaagaaggagttattgtagtttcatcatccttgggcttaggcgattcattttcctccacagaaatcacatcatctggctggatatctaagtctagatcaaacacagctttcccaagcacaattcgagcagctttcgtccatggcatatacgtttctctaatcctaacaaccagattttcactttcaagaattgatgtggccgaatttatatattcttccttggagatcatatgcgcatcaaagacttcagcagctgcgctaagtcccataccctgacgaagctcatccttgcaaagtgataactcatatcctgtaaagttaaaccactgttaaaaactacgcagctactaatcatagttcagaccaacaaaaaatgaagttccttactctgatctgtatcgggttctccttcgtcgacactagaagtcacacccactgaaactacagtcttcctgtcctcgttatccttatcagttggtttagatggagtcagttgttcaacttcctccctcgttgaatctatagagactctctcagaatcctggtcttccgattctataatcccac

SEQ ID NO: 58465 - DNA, 879 bp, Arabidopsis thaliana landsberg
tagttgaaaatgatccatgtgtcgtatttaattatgagaggttttttttttttgcataaaattttgtaagttgcgtggaatatgagaggactttagaccagaggattcttatctagaagtaacttggccaaattgtagctgacctggaattgtgatacaaacgactagtagatgagtggcgggcgggtcagcaaaagctggatgattgcgagattgttacaattctagatggtagaccttacagaataggatcgttgacttacgctctaatatagaagataactagcattatggcccctgccaatgcaggcacttagttttagtattatttttttagaaaaatcacaaatatcaaatttagttatcaacatacaaatatctgaacgaatattgataatataggaattagctgaaccagagccggccctaagcagaggctggtgaagcatattacttgctttatctctaattattaaaaaaacaaaaatatatgtaccaccctaaattcaggagttacttgctctatcttcttgtctacgtggaagtttttcaccacgttgaaatattttataggtgagaaaaaaaattatataaaatatttgcaaattaaatttggatataatagaaacaattattaaattatttgttttatacaaacagatcttggatcccatctaataatgttacctataatggctttatctgaatagtttcatcccgcgtgcatgcggatcgttgtctagtatttatgggtaatcaatagccattcaatggccattcaagtgtttgtttccagtgaaattcaattgccgacgaaaaacaaattaaactaaattgattgaaaaatgttttaaaaatcttcccaaattaggaccactt

SEQ ID NO: 58466 - DNA, 1192 bp, Arabidopsis thaliana landsberg
gtatttcacccaccggtacaacaacaaaatacacacctaaggaattaataaaatcaacttaccagattgttacggaccggacatctctttagtccttcgtcaaccaacgttccccacgtgcttctccggttggtactcacgtgaccggcagcttctcgttcttattatctgttttcttcaataacgattcataatctctagtgtcttatttataatgtcttcacatcacaaagatttgtaccgaacatacatagttgaatctttcccaaagcacaatctatcatataaccacaaaaatggttagtcagaaagagaccgtgtgtgtaaccggcgcttcgggtttcatcggttcatggctagtgatgcgattactagaacgtggttactttgttcgtgccaccgtccgagatcccggtacgtatctatatgttcttacaaactcatttctcctaagattatgtatattaatataacgtttatttacgggtttttttggattgtcaaggtaatttgaagaaagtacaacatcttcttgatttgccaaacgccaagacgcagctcactttatggaaggctgatttatccgaggaaggaagctacgacgatgccataaacggatgtgacggtgttttccacgtggcaacacccatggattttgaatcaaaagatcctgaggtgagtttttctatattatgaacttcttttggtttttgcatcaacctagcttaacttgacttttgtatttgcgaatcagaacgaagtgataaagccgacagtgaatggaatgttggggataatgaaagcatgtgttaaggcaaagaccgtacgaagattcgtatttacttcatctgccggaaccgttaatgtagaagaacatcagaagaatgtctatgatgaaaatgattggagtgatcttgagtttatcatgtccaaaaagatgacaggatgggtaagaatatacatattaattaaactcaagttacgtgtaattttttttttgaagcaatttaaagttcatatatatttgtgtggcagatgtatttcgtgtcgaaatcgttagcggagaaagcagcgtgggatttcgccgaagagaaaggattagatttcattagtattattccaacttgtgggtcggtccattcatcacaacgtctatgccgcctagccttatcaccgcgctctctactatcac

SEQ ID NO: 58467 - DNA, 1293 bp, Arabidopsis thaliana landsberg
cacaataagtatatgttattgttaaaacaagtaacgagcaacataaaattagatatttgtaactttttgtacaacataaaatttggattatcctttactcgttttactttttttgtatgcttatccgtttatcgtttttttctaaattacttgtatagttatttttactatcttaccaatgtaacaagaaaaaagttatactacatgcagagactaaacaaaagaaatttaaaaattaggtatatataccacgagtgagagtaccccttccttatctcataccacgagtcccattcgatatatgatctcacgtaatgaaacgggacaaataacatgcaagtagacaatttgttaacgtgtatataaaatctcgaaatagccgttttgaacaagttaaatacggatagacaaaatttattactcaactaagttaagtaacaaacccaaaatcacgggcaaagtaaaccacactcttatattatgcttaaaataaagaagatcccatatttgtttggcaaatagatcatcaatgtagtcgaagggctccacgcgcagcgacaaaaacggaacaagaaagaagaaaaaatcaaaagattcaaaaacctttcttcatctttattaacatcaactattcagatttgtgtaagacaaaagaaagaagcgaagattacggggaccaacagtgacgtggacctctccccgtcggtgcccataccaccaactttactactccagtactggtcacttgcttgttcgaattaaccaaatccaattattcgtaactatgtttcagattgttggctaactgatgatcaatcctacaataacgcttaaaacgtttattagtatattgtttggaagatagtataacaattcattgcttactgatgcttgttgccaaaaaaaaaaaaggaaaaagaaatgattaaacgcttgcatctgtttgatttggactcctagattcctttacatagtcaactataatcaatacacgtgaatcatttcgtcatttgattactgttgagacaagagtcaattaccaccaaacatattattttaaaacattaaagttccgataacttcgggtgatggccgcaaacttgagttttggtttgatatttgtatatggtattatggtttgagttaacattattattattggatcatcaatttattatccgaatttagacctacataataaatgcaagatgttatatacagaaatttcaactggcccatttttgaaaaagagcagcaaaatttattttttttctcaatggctttcataaatgt

SEQ ID NO: 58468 - DNA, 1638 bp, Arabidopsis thaliana landsberg
ttatcttccttgtcttctattaatgctttttaagttcccagctaatattgttagtagtttgatagttttataccacatgtaattatatatatttttttgaaatatatgagagattgagagttcttgaagatacttcatgagatgatgcaatggataattaatcaagatcctaatttattttcttaggtaacatgcttttgtagttaaattcttaacaacaatagcttaccatcacaattttaatcaatcaaccctttagtttttactttaagtgaaaattccaacccttttgactatatcaacttgtctatgagttaattcgtctatatatatgatgagaacttagccaatatgactgaataacctcattcttcttttctttttggtttcttggaaaactagtagctcattaataaaagagcaaccaaaaaaaatggaggatcattaatttgtcatatgattagttttctgaactttctttcagtcttggattttgttaagaagactgtatcggctccttgtgtgttggcacgtggttcaaaaaaattggacatgatgacgaacctgattttggatgttcatgggaaggccacatgacacgagagccgtttaagccgccgttaaatatggatggaagacaggttttcctccgtcagtgcctgagaagttgacgtcaattgacagagtcaagtgggacgttagccgcaaccggaaataagcagaagactctccacactcacatgcccacactcttaaccttcttaatggattaatgcacacttgcatcttcttatcatatagtatacgataaatgatatttatctataagaatttgtcattgaatgatataatatatgatccataaattgtgtctgctttgttataagtggtgtaagtcgggtcatgggcccgtgagatagtaaaagaagtgttgcatgtaagagaagggtgatgagagacagtggcacgacggtagcttaagcgctctgtttctctaatttctgccgtctccttttcaaaaagaccccacccacgttcctcttcttctctcatttacccttcttgtctctatactcactgtcatgagattattttatatgcattaagaaatattgggcaaatatagtttatattttttgtgtttttgaccaagagtaacagagtattatggtcacctgtaaagaataaactttttctaaagtagacgaaaatgtataatactattttggcgatcatagtaattgagtaggttttccaaaattttgtatgttctgtattaactcacaaaattacctaagttcggcttcgttgcgagaagccgtgaataatgaaaagaagtatatttgacttttgaaaaaaaaatagttaccacaattataatctaataaaattgaaagccctctaagattcaattattccacgattctaaatcaaaacaaggctaaatttttaaataacgatatacaggatctattttaagcatatattagggagatgccgacaaagaaaaaaaacatatagcggaactgtagagtatattatatcaagccgacaaagaaaaacatgtattattttagttatactgttttgagtttaactcaagctaaaagacgaaagagctaattagcaaagcctttc

SEQ ID NO: 58469 - DNA, 735 bp, Arabidopsis thaliana landsberg
ctcgcagtttatgttgtcgacatggttttgttgcccggtgagatgttcggagagcacaagctttcgccgattgctcctgcccctaaatctaaatccggtggggttaccgatgactccggctccactaagaaggcagcgtcaccgtcggataagtcaggctccggtgagaagaaagtcggactagggtttggtcttggacttattgtcttatgtttgaaatttctcttttgaaaatttaatagcaaagatttgttttgctttctattgattttatcctgcgatgtgaggtataaatatgaaatttgttgattaagttccgtgaaataaaatgtgagatttttaataacatacgtcgtctatagttgtcaattgtgcctgtcgaagtggataactcttttcttggcgaacccaaaacaacaaatttgtgatgtgaacaaaatattttgttaacttaattactaaagtacgtatacaattgatgagatgcttatttgttttctgttttaattgcaagttccattcacgacattttaactctagctacgtgaaaaatggatcgaaggatcggtagccgatccgaaaaactagccatcacatgcgattactagacatagattagtagtattatttaattctgaccagcagtatagatagtattcataataataaagtgttcagataatcgttttactgtaacacgctttaaaataaacatgataataactacccagttgc

SEQ ID NO: 58470 - DNA, 1464 bp, Arabidopsis thaliana landsberg
tgttttcattatctactctcgtttttttatacgtatgggatgattataaaacataggggatgtttaagaaacgaatcaataataaagggtctattttacaatttccaaagtttcccccgaccaaaagaaaacatcagaccaaataccgatctacggctacgaatcaatgtgaaaaaagcatatatagatgctttcgctaaacatatatttttttaaaaattaatctctttttttgcacggttttgggttctctaaaaggctgaacctataaaagaatatatagaaatagaacagagaatatttaaaaggatctgaaaatttaccaactttttcttacttcgtttcaaaatacaaatttgtgttcctcaaaagctgctataaagttatctttttcatctctttttaaaattttcttcacttcgttaaaaggaaaaaccaaaagagaaaaataaaataaaagaatatacgaaagtaaaatatctctgtcctcacgattccttcaaactaaacatcaatcactaaaattcgtgccgccttgggcagacacaaacccaatggtttcacacacacatttatacttcaatatcatatgttaaataatatttcaaatgtttatttgtgaatatcaccagaccgaatccaaccggaccataggcctcatattatatttttataatgggcttagcccaagaaatgagtaaaaaagcccaataaggtaactttcaaatactgtttacaagcctttagaaccgggaagatcaatccattggagttcaatctcaacttcaccacgctcgacgttacggagtcggagacaaatgtgctgaacgattcgatcgttgatccaacggatgtagctttcctcggctaagcagttgccacggcttggaccgatggtcgatatgatggttccgtctggtaaaccggagagttccattcgtaaggcttcgatgtacggtttcaaatcgatctctgcgtctcccattttgtcgtctttgctgaagaagtcgtgatcgtacacaatctgttttgatttaagcaaattcgatgtgttaatttgtagaccggtccacggtttagaaagtagtggtttgatttggaatttaccagagtaagcgggagattagggtcggttactgtgaatgacaaatcttcttgccattgtgggtttacgttttgcttcaccactttggttttgagtttctgcaaaagaaatatgaattatgagtttttgaaaaaattaatcgttgaagtttgaggaaaacgagagagaaagtgagagagagagaacctgacgacctagcttgaggacgacgtaaggatcgctgctggaaacatcacgtacggcgaggttgacaccgcgttggacacgaacgcggaggatacctaacagattatccataagcgacattcttctcaaaaaagacgagatgcgcgattactgattcaaacgaacgaatcaga

SEQ ID NO: 58471 - DNA, 846 bp, Arabidopsis thaliana landsberg
atatcttcgatatgctcgacaagatccactcgatcttaccgatgcagcatcaccttttgagcacattactattagtctccctttgcgtgcgtgaagttgctgaatcacagattgttgtttactgaaacaagcatcacgagtggcaatcacagctatggggagattctcatcaaccaaagctaaaggtccatgtttcatttctcctgcaagtattccttcactgtgcataagtgctacttcttttacttttaatgctccttctaaagctgttgcgtagttgtatcctctgccaaacactagcagtgactgctcgtctatcaagagttgcgcgagatctttcatttcatcgtctagctttagtacttccttaaccttatctgcagtcaaataagattgcttaaaaacagtcttcagaggaagtaacttttctctaatttactcgacttacacggcaaatcaagtagtccatcgattatagcttcccgtctcttttggctggagattgtgtcacttcctattgctaaagctagcattaccattaccacaatctgacttgtatatgcctgataatgtttgtgaacgcaaaggtttttaacctccaaatccaggaagatgtatgaatatacattcagggatttacaaaaagtacctttgtacttgcgacaccaatctcagctcctgcgtttatatggacaccacagtgtgtttttctagctatggagctcccaacggtgttagttatgccgacacataatgcaccgttttctcgagcatagtcaaaagcaagtagtgtatctgcagtttcaccagactgactcacaaacaccgcggtatcttctctgtata

SEQ ID NO: 58472 - DNA, 461 bp, Arabidopsis thaliana landsberg
  unsure (1)..(461): unsure at all n locations
cctattttcttagccatgcttttaatcgacaagatagnnnnnnnnnnnnnnnnnnnnnnnagggaacacccatcaaccacagtattactcaaagaatccgagaaattcaagatcctgcacgcaacaccacagaacctattcctctctacattccaacttccctctgcaaccaaactggttctcggatcaaacggaaacaaactactataaccgctcatgttactaaatgacaaaagcattcgcatcttctccccatcacacagaaacgattacatcgacataaaacccggtgtgtactctacatgactttcaaaaggactacaactatggtcaaccccacaatcctttctattcatcaaaccaaacacatgacttctaccttcaaatactttacacattccttccaaaacattctttaacgacaaactctctccaccatttaccccacaatccaacttcga

SEQ ID NO: 58473 - DNA, 716 bp, Arabidopsis thaliana landsberg
cggagatggcctaagagtttagtcattattgagttttctagtaatctccgcctatcgatcaattcatagtttaagaacatagctgtaacaatataaaatatttgatttaacagcaataaaataaattaattagtaagatactcttatttatagaacatgtttgataatgcgattttaattaagaagaaataaacttatagttttcttctgcgtaagattgtacaacaggattagtttactattattgtaattgtaagggcatactttttaaataaaagaataaaaaattgttttaaacatgttttgtcataataaagaaatttaccaatctgctaattatctcaggtgcccatatttttgatgcacatatcagttttcatcactggccttgtgttttcggcatacttttcatggagattaaccgtggtggccatcccaacacttgttcttcttctaatcccagggttgatctatggcaaataccttgttcacttatcaaagaaatcttttaaagaatacaccaaagcaaactccatcgtggaacaggctctaagctccatcaagacaattctttcattcacagccgaaactcaaataatcaagaaatactcggaagtcttggaaagacacaaaaagcttgggttaaagcaaggtcttgccaaaggtttagccgtgggaagctcagggatttcattcaccatttgggcttttcttgt

SEQ ID NO: 58474 - DNA, 1169 bp, Arabidopsis thaliana landsberg
tgaattgctggcgccacatcattggagcttgacttgggaaaagactaatgcccatttgtttctgctgggtggtctgaggtctcatgaatggctgctcttgctcgtacatcattgggtgctcttgctcgtacatcattggctgctcttgctcgtacatcattggctgctcttggtggttggtctcaggtctcatgattagctgctcttgctggtacatcattggttgatattcctgcaaacaaaaaattcggctggaattgtcttgtgccccacggtttggttcatagtgatatgaagtccttcccaaaacttccattgggccgcactcaccttcttcttcttcaaccaagtcatacactcatatccagttggataatgaaatcttttgtacagatcctcttccgtaatatgttgtgtaaattcctctatgaacgagagacccataccttcagggatttgcatctctgaatcctccactttcacaatatagtcaggattcgttacagatccaaagaagtacccatccacacgacctaatgggacttttgtttcagtgatcaatagcatagtacctacattcaaaggtttgtgatctcccttgttcgtaactaccaaatattgtacctgtaatgacaaattaggtttaaactcaagcatgctgagacaataatagtataagttcttcagagaatattaccatattcacaactccagcaggaacagtgggtggcttgatgcgcttcatctagttacgctttttattgagcaagtagctgcatatatatatatatatctctcaggtacgaatattatttgtttttgtttagtatctctagtacttatcctcctagatattcttagattattctattgaatcctgtaactaacaatgactgttccgtttagtttggttcagtccgggtttggtatggtttattggacctccgttgattagtaagtagaagggttatagacaaataaatatgttacaggcacaaatacacttagtcacacacatactaaaagaatacaacacagagcaagttctatgagcttttaaagttttaataaaacaagttcaaagaatcgagtaacacaccattttacagtagaggtcttcaccaatacatattactaacacagatgattcaagattcacaaaaagaaac

SEQ ID NO: 58475 - DNA, 113 bp, Arabidopsis thaliana landsberg
ccgtagaatcactttcaccattacacaatcaagatcacttatcctgaagacttgtgaggaagctcccagcggggagatctatccagggactaccggataccaccactcacctg

SEQ ID NO: 58476 - DNA, 544 bp, Arabidopsis thaliana landsberg
aattagtataaagtataattataaacactgggtaaatgagccatgaagaatgaaatttggatatttcgatacgatgaaatacacagaaaaatagttatcaggagtaattaaattaggtagggacaacaaaggaagccaataccgaattctccctatagtgtggctcacatgcatgatgaaacgtaaactgtaagtgtcatctgctgatttgtagcagacacaaggtttctgttgcacagagagtgacttcttcttggattctatatttagcaagattctcttactataattagtaaattactcctttgtctgtcgaatttattactcttgcttcggtttatttcatttctatcgctttatgaggagtattttgcttttttctttctcgttttcttttaatattggaaatgtgacattgcacctactcattcaaaattcgacgacagatgaattctgctttgataacgactttgtggaagaaaaaaaagactgcttctttagtttatcgagtcattagtagacacgttaaacttaggtgaaaatt

SEQ ID NO: 58477 - DNA, 474 bp, Arabidopsis thaliana landsberg
agtcgaggccgtgggcttgagccttgatgggctactgcgctagtacagcatcaatcttttcatttttacctgccatgatcgaatgtcacaggtgccaaaagaactactaccattacaacgtgagcagcttgcaccgggacgcctgtgttttacgcattttataccacgcacagttacaccaaatgtgacccagcgtgctttcgcagcgacgtgctcagccttatgacgatgggggctcctagctgccggcgccatgtgcagaaagctcttagcgcagcaggtctgctgacatgcctcgacacaggcgctttcaaagtcctgcagcgcttcatagaagcagagccacagaatcagctccggttaccggagcttttgcagcggcttaaatcacgtaagccggtccccgcagacccttgggcagtcgtatgacgccagccccccgtggtgcccatgtgcaataacgcaatacctgtg

SEQ ID NO: 58478 - DNA, 201 bp, Arabidopsis thaliana landsberg
ctttgcttcttttctgacagccccgtctctggacttactgtcatcactttgctccctccgaagtgtatctcttttcactctgctctgtttcttttcttgcagctctatatttcctcttactctaccaaatacccaccttgtatcactctcgggtgcgatctctatccacaatcctacggaccatacttatccatcgctcta

SEQ ID NO: 58479 - DNA, 538 bp, Arabidopsis thaliana landsberg
tgtgctctcagatgacaaaatgatatacattggaatgtagagaaagtatatacaaatactaataaatagaaaagggcatggaattgacgaggatcgagggaaagtgtggtgtggcagaaatgttattaagtgtgaaaacaactgatgaatgagcctttgcttaatcacttacatgcacaagtccctttcctcttgctctctctcccacttcatcgaactttgcgtcctttaaagaaaagaaaagaaaaaatatttttcatccaattgaattcaaaccgtaaccacattagatttaacttcgtttattttacattatcttcttcttcttattttgcggagaagacttgtacgatgacctcaatacgctgaagagttggattcactgcgagtgtatatgtgcatgtagaaacaaaatatctagctatatgaccacttttaactctaaatatgggtgtaatatgccaaggactttctggagatccaccacaacaacattcaagttcaagttctgctgctattacgtctatgaaaacaacac

SEQ ID NO: 58480 - DNA, 1062 bp, Arabidopsis thaliana landsberg
ttgatcgagtaggcgttctgaatcgaagctcaagctgttttgggaggagctccttgtgcatatttggctttctttcttaaatacttctcttttttcctctgttttatcattttcgcctcttccatcatgcgtatgtgtttcacctgcctctgtgccttagtgagtttcctttgaggggttatgttttccttcttcttctctcgagtgaactctctctgagggcttttagttttcttcatcttcaaagggtttactttcagagagcttttcagcttcttcgatttctctcgactctgaggggtttcatccttcttccaagccttttgcctttgagggctattcatcttcttcggagtgatttgactcggaggagggcttatccattgtatcccattatctttaaatgtagggatctttttcggcactcgttcgttctggaaaacagtatttggacacaacgctggttccgagttgatgttcgtataatcaggttgggcatttattgtttgcaacacaagtctatgagatgccttcccaagcctacccccagaaatagatccttctggattatacctgcatacaaagagaagaaattgagaatatttaacaccatccgtaaataaaggccttccaagactcttgaatatcacaacatttcgtaatattcacctcttgatttttataacctttggaggagctcttcttttgtccccatcttcatgccatagaagacctccagatttcaaatccactagagatatagtctgtgaagaatatatatgaagaacactgtaaactaaccactaaaaacaagtgactttggttctactactaaaacccatcaaagcagtttctttgttcttcaccacaacttgaaaccaaaattggaagccaatcaatagtaaactcaacaatacctttttagggattgccaatcttggaatctgatgagtaatctcactgcctctgatatcttctggaagtttgtatatggcacaactgaaaataaaagaatgttaatttgatgaatatcagattccaatatgcatcttcataaagctc

SEQ ID NO: 58481 - DNA, 180 bp, Arabidopsis thaliana landsberg
tttgcatttatatggaggagcggcatttattacaactgaaacagggtacgaaattttcccatcaattctactcatgactgagaaccacataaacttgtacatttacgataaaagctttacctaagataagattaaacctatgacacgttcagagagtatgagaagctgaactaaaatgga

SEQ ID NO: 58482 - DNA, 136 bp, Arabidopsis thaliana landsberg
gactctcggccctaataccttcgtttaaaagaatatttttagaacctatggccggacatgggatatcttaccattcacggctttcgagagtcccaacgaatgctgcaatgcctcacaggacacgtcttatatctga

SEQ ID NO: 58483 - DNA, 996 bp, Arabidopsis thaliana landsberg
aatctaccaggaagtgctcaagtcaaaaccaagatcatcgtcaaaagaaggttgcctggtcaagtgttagaagaatcttggtcagagttgtaattgtgaaaatctgtagaacttcaataactagaagaagtgtcactttgttggttgtgttcaaagttggaagatttaataagattgtagtgcgaccatttgtggttttgaatgtatatgtaaacacattcactatcagcattcagcaatcggataactaaacaaaaacaatttgatgatttggaaatttggaaatttacagagctaaaagtgaaaaatgccagtgattaataaaagaaaagataattaaggtcggttagtaaaaagtcgtaaatataaataaaaggcttgtttttttatttttcactttgttctctctctctctcgtaacacgcctgagagttctcgtcgtccttatctcgatcttggttgattcgctctccgatcggaaattagggcttttgttttctgaagatgacgactgcagcacgaccaacctgggctccagctaagggaggtaacgagcaaggtggtgctcggatctttggtccatctcagaagtattcgtcccgtgatgtcgccgctcacacaactttaaagccaaggtaagatttcgaaactggttctcttcctttaatccgacgcgaattagactacctgtgaattcgatcgaaactttagctgagattgatgatattgtccagaatctagggttaattgcaatagcgtgctagggattttgacatacggtgattcagaaaaggcctgtgtacgttgtctttaggttgctgaaatcggtagtattgtggcctgtttatttcttaccggttttcttgttgtagtttttgaggatcaatagtttctagggacttatttgtgcttgatatttgaaagatactggtttctatttagcacatatgtctggatggttattggatctctatactcacgtacgtcttctactta

SEQ ID NO: 58484 - DNA, 1426 bp, Arabidopsis thaliana landsberg
tctcgtctaataataagaaaatatacaccaaatagacaaaataaaacttgatgaattcagaataaatactagaaataactaatattaccaaaaaatattaacgaataaatagaatttgcaacatttttctctacgtcaaattaaaccgtgtacaattggagaaagatctaccgcgtctgatttctcatttctcacaattcccatttttcgatttcactaagaaaattgttttcccagtacttagaatggaaacgtaaaattcgaagacccttatatgtgaaacgtctaaaaaaaaataggggctcagggcacaagcacaatcatgggtttggcaaaaacgtcgttgcgtttctattttctattcgttctttatttgcatctcaactttatttccgtcgtagactaacgatccttacgtctagcttccgttgacaccaaccatgcttccaccatatccaagccagaaggtgttattggctatggtggaaagacgccaaaattagcagtctttatccaaaagggcagtggcggtaggggaggaggcggacgtggtggcggtaagggaagaggaggacgcggtggcagatacgaccgtctaaagcaatctcgcggtggtctaggcgggtttccatatttttatggtatgtcgcacaccacgctaatcggtcaagcagtagccggaatcttggaaggtcagggtgtggtttcggttggttaggtttattaccggctttggtagtgttgattttggtttcatagagttaattagtctttattagaactttaatttgaaagagtttcttagattttgatttttaatggattttgtaaagcatataatcttgtaggagtatcattaactagtatgtcacggctctttaaagagatcggagggatcaattaggtacggctctgtaaataagtatgtcgaaaatattagattgaccttgaaggatctgaaagagccgacaataagatccaatcaactaacgctagggagaacaaaagagcaacgaatgccatttggaaatgttgtatacaaaatgatgggatcatattagcaaaattgtttgtcagctacctgaaagaaacgtcagcgcttggtcatacatgcagctaatttaatatataccttgttatctatactaactagtggcatcgcataaacatgcctgaaaaaacataggttatgtgcacgacaccataactatagattccgctactattccattgaacagctcgacggaatttggtaccgtataattagttccgtttagacccaaaaggccatccattccgcagaagttcagatagttcttttacatgatatttttggggtggtatgttctactttactaggcttatgtatttattggtgtattaaccatcagccaaaaaaaaaaaaaaaaaagaggcaaattctaaa

SEQ ID NO: 58485 - DNA, 531 bp, Arabidopsis thaliana landsberg
gggcgccgacggcattcccggacccggcactggtggccgccaagcccgacggctacacccttttcatcatatggggcaaccacgccatcaaccccagcctgtacaagaccattccgtacgattccgtgcgcgacatctcgcacatttctatcatcggcaccacaccgctggtcgtcgtcgtctccaactcgacgccctacacctttatcggcgcactgctcaaggccgccaaagcccagcccggcaagatcaactacgggtcgtccggcaccggcagcgtgctgcacctggcgggcgagctgctgaaagccagggccggcatcgacatgatgcacatcccctatcgcggcggcaacgcgctgatcaccgacgtcatgtccggccaggtgcaaaccgccttcctggccgtgccctcggtgctggcgcagatccaggcgggcaagctgcgcgccctggccgtcagcacttccaagcggctggccgtgctgcccgacgtgcccaccctggacgaagtcggcgtcaaaggctacg

SEQ ID NO: 58486 - DNA, 1039 bp, Arabidopsis thaliana landsberg
gatgttatagttggtccaatggatggacaaaccgagtgaattccaagttaactaattgtgtgctttaataactttgatgattatagctctacatacaagctttcgtaccaacaaatgattaatttattaaaaatatatattagatatataagaacagataatcgctagtcgagacaacaacaaaaataatcccatctgtttctaagggagtgatgttttctttgacaaaagagaaaagaaaagggactgatgttttagtagaatgcatgttattgaggtaatcaataaattgactaagcttttgcttagaaatttaataagattacttgattacttttgaacaaaaagacttatgaaattttactgttatggacaattttcaaattaacatcattttagatcaaatttttattcaaacaattaaaaatctcaaatttaatttagttacttgaaaattttcggatatcaaaacttcgaaagataagtaaactttttatcaaatattattttatataaatatgtggcgataccaaagtaaaacaagtaaataatgagtacagtgatatattatagtaagcagggatgatgtagaggattgggacgtgtacgttggttgtttgaaaacatatgttccaacaaaagagagtcttgagtgaatctaagctttaaggatcttcacagtctcttggaagactctctctttgacactttacccaattattccattcctttcaagcaacataagacaacgatcgttggattcagcttcacttggcaaatctactgttaatctgtctcatctcctttttctctagatatttggtaactttagaattaagatggtgcattcaatgtttaaatttggtgagattactcacttcatttccttttatctcatctgactataagaaaacatccaacttaattaggaatgtttgaaatgtaagttaagattggtgtcttgctcatagtacgaaaagaatgtaaaaagtaaaaaaacaatatgatttggaaaaatatctaatttataggtggcaag

SEQ ID NO: 58487 - DNA, 645 bp, Arabidopsis thaliana landsberg
ggccagaagcctttttttttgggtgtgagtgtaataccatatccaaatggtttttaatctaaataataatatgctctaatgtttcgtggcttcacatgtacctttgagcatgcatggcagccaaaagaatatcatgtccatgaaacataccagctaaaataataaaaagaaaacgtccttcgaaaacttttgatcctatccagagagatctcttttatcccttgaaccatctttcttagctcaaaaaaatagattgagccagaaataatttttgaccaacccaagaggccaagactcgacttcccccttcatcatttctcgatactgcataggcagttgcgtaataatattcggatttgagcagccgttgacaatgttattatttcaggcccacatatttgcacttgcgagccaccatgcagatcctgaaccttgaccatacgagaagtgactttaaatttttctcctgatattagaaccatctacatgtgttcaccaaaatcgagcgaaaacgttcttcagtgaacaaccctctccgattaactattccatatatcctaaattgtgtcctaaacaacatgccaacatagtagagtttgataacaaaagaaacctatgttacctattttttgctttaaatgtttt

SEQ ID NO: 58488 - DNA, 259 bp, Arabidopsis thaliana landsberg
  unsure (1)..(259): unsure at all n locations
tagattttttagcatgctcttcaataccattctccataaacaacttcatgggctctctctcgatcttaaccttctcctgaggattgatcccttttcgaaacttctccttgagaataaaaaaccnnnnnnnnnnnnnnnnnnnnnnnnnnnnnnnatctgcgtcaacagaggcggtggattcggccggagctgtggtctgagcggcggcgacaaggacggaggatcttttgggtttggaggaggaggaagggaggagagg

SEQ ID NO: 58489 - DNA, 547 bp, Arabidopsis thaliana landsberg
gctccgacttgatggaacttaacggtttgagattatgaatctttcacgtagaaaaccatactgatcaatattcttttgctaaactattccacaaagttacgaaaatgtgcttaatattactatataaaataatatgatagtcgcctacctacgatgctagggatcaaactatataccaatctcataagagttgaaattattccatatgatctaagaaaacacaggatagaacaaaactatttcttagcatataaaaaataagaaatgttattaaacacaaactatgttatctaactttaaaatactatatcaattatcaaaattacccgggcgtagcccaaatattttctctagtagttaataaatacatcttgattacttgatatgattacttgttgctctggtttgcaggctcttcttggggttgtcaggattgttcggaatcttctttttgtaggatttttgcatgggtcttgattgagtgaagcttctgatttggccaatgaaatacttaccgggggttgaggtttgccatttaatatcccgg

SEQ ID NO: 58490 - DNA, 499 bp, Arabidopsis thaliana landsberg
  unsure (1)..(499): unsure at all n locations
aggaaaatcctaatggaaaaaaccctaattttaaacctaaaaacaccaaccaagaaaatccaaaaaagaaagaacaaaactagtaacgaaaatttaatagaaaaaacaaaaacctaggatagatcgatcgatgtactaacttcaaactaagtacataagatcataccacacccaataagaaactaataaaagcataattaatcatcatcacatatattgatcacttagagagatgattgattatatattgctagtagaagaagaactgaaattattagagacgtcactccaggaacttgttgcggctgcggtagatgctgcagcagcgccatgaatattccagagctgttgttcgtttccaaaaagttgtctagacaagttgagctgattgttactatcttccattttcactgaagctaattgcgacgcggtggctgtnaccatagctgatgaagcagaagaagaagaggagataacgttatggaaaatgttcttaggt

SEQ ID NO: 58491 - DNA, 456 bp, Arabidopsis thaliana landsberg
ctagcttgatgtcgactacaacacacagacattgcaaatttcatctttttgctgcagagtgaagaaggtgatggttgagttgacagtgagaaggataaagaagataatcgttcaaagggtgtgaaggtatggacaaattaataatacatttgtggagctacatcaaatttacctttgcagtgttcttacaaaagtggtttcgacatgtgaagggaaataaagaggatgacgacaaaacgagaacgacagctgcaaatggtgctgctcgtgctgctgacggaggagatgattccctcttaaaatggcaatcaatggctgaagctcgacataaatctgtatctgaagctggcaaagatggctatcagaaaactacttcaggtggcggaaagaactccaaagacagacaaaaagtgggactaccgttttctggtactgggtgagtccatcctttttaac

SEQ ID NO: 58492 - DNA, 1165 bp, Arabidopsis thaliana landsberg
taccgggtagaccgatcaatcttggcactcatgtatatgagaatgttttcttttttagttaaaatattgttattttaactgtgaagggctggttgttactttggttttggaagccaataccctatactacagcggtaaaaacttgaaagtgtcagaatgtaatcgaaatttacatgaattcaactccaagaaaccggtggaagaactactacaagcaaattaaccaacaacaaatctaacatgtaccttgaataatcattacacaacaacattgccttgcctgaattaaccttaatcctggagaaatcaaaatcccagaggaactacgccaagaaaaagctcctgaatcagagtaaagccagcctaccagttatggaatcaaccaactcctttggtcctgcacaagaaaagtaatgaacatgttgaggaacaacatcttagctaaaaccgaatttcaaaaaattattgtctctaccaggtccaactgcaagaactgttcttgatccagccgcaacctgttaaaggaagagttttagtttccagagaaacttgttagcgtactactaccacagaaaattcacaaataattttcattcaagagcagtcttttcgtgtttcaataggtcggatggtgtttatgtcttctatagttctaactatttgattagtagaaacttttagattttcttttgaataggaggagctctgattatactttcagcctcaataattgatcaagcacgacaaacctcagttcttccagcatcagctacaacaaaagtcgggaggccaacgctctcagcagcctctgtgatcttattcctgagagcagaaaagataaatgtagctttcaaatttattgaagacaacttattaacatttgtagtaaagtaataatatgtcttgaagtgcgttttgtttgtatcccccaagattttcacctgcttacatttcttgctggtttttgcaagtgacgactatctttggctgcccattttcctcccatcgccgcagaagggtatcggtcactgaaagaattaagatgaaaacaaaaaaaaacataaaccccggactgatgcatcatacaaagcaaacaactcatttcagacgaaattacctctgcatcaactctgcatacatgccggtggcagcatctgcgaatata

SEQ ID NO: 58493 - DNA, 343 bp, Arabidopsis thaliana landsberg
  unsure (1)..(343): unsure at all n locations
ccccccccttcaattcccccccccccccctttttttccccaaatccccccccccccccccccccccactttctctttctatgttctccccccnnncacctgggnccccccccaacccaatcccccattcccccccccccccttccccccccccccccccccccccctcccctcncnncttttttcctcttcccccccccccccccccccctctctccccccccccccccccctcccctccccctccttctcccccccccattttccccccccccccccttccccccccacttcccctccttccccccccccccccccctccctcccttccctccccccccccc

SEQ ID NO: 58494 - DNA, 1048 bp, Arabidopsis thaliana landsberg
ggcataagacctcatcatcacttgttggagacataaccggatagtaatttattccagctctctagttaatatcataaatcttaatcggcaaaacacagagacggaacaagatataaaagtcttctcattaggcgtaaaccgaaaaaatcaaaaaaatctaccaagggaccaattaactgtagcgatatattaaaatctagctatggtagagaaacaatggctaagcagatacgtaaaacacacatcatcactgaatggaatgtatattaaaattaaaaactgtatatgataattgggggtttacttttcaaaggacaagaactttttccaggccacccactgggtttcttcctgcaaaaaaacataagacggtgtaaagtagcagagtaagcagatgatactcaatatgtatttcctatcttaataacatgatctcatgacgtgaattatgctcataatgtattttaggcaatttaagagtcaatatatccaatcttatcgaactcaaaaagataagaaaataattgtacattcagcactcagcagttccaaaaagaagcaatggatgataaattctttacctgggaagttcctgttggtgggacagcaagcatgttccaatcaatttcttcaatgtacttcttgcgctccctatatacagccctggcactgttaaattttggttgatactcatttacaagtccttttgcctgctcacatgattagattagattatccatcaacaaagccaagagaatgaagtttgtacctgcttcttttcatgaaaataagaagccacacaattttaaatttcttagaagtttaccaattgacggttaacagtattttcgaagttctcataatctttccaaagttgttcaacgtggtgggtcggagttaatatagctctatgatacacttttcgaagagcagtcttccgatgcaaatcttcgttgaggttaagagcctgcatgggaatctattagtttctctgcaataacaaattactagtacaaggacaaagttagagtgatataacgacccggaa

SEQ ID NO: 58495 - DNA, 1065 bp, Arabidopsis thaliana landsberg
ctctcagggggttcttgacgctgcttgggcgctaccaactccgtcgttcaatggaacctagtaaaggaatacagcaccgagaattctatccttacggcagtcgtggtccagtcggtgcccattatctagccgcaaaacacaaggtccaatggggagacctaagtcttgatcagtgaaagagtggaagaacattttttgttcatagattcacgtcttagaattttcattatttgtgtggtttatggaaactttctttcgctttcagagataggagtgagttttgttcgattttgtatctggaataataagtaagaactaccctattcttgccaccctttttgctttcaataaaggaaacacaaatttaagtgtagcctctgcaaagacttgaacaacatgatcctctatacatcacataccaaaaagagagaaaaaatactggttagagcctgtgttcttgatcttggaaatcgcctgaagccccttctggccattccaggaacttatgatgcagaagagacggaggtagatatgtctgacctgcagcagaagaaggatcactgggaggatatatatactcttttccatagccaagttccttcattaacttggttggagcgttcctcaggtgtagaggcaccccttcattctgtccaaccgagtctttcacaaccttctgtgcagctccgattgctcggtaaactgcaatggatttaggagccagtgccaagtaagcagtgcattgggcgagaatgacattgcattcaggcatacccaagaaatgtgaagcttgatagcacgcaactgcctgagtaagagctgaagggtcagcaagtccaatgtcctcgcttgcaaaccttataagtctccttgcaatgtaaagcggctcttcaccaccctcgagcattctagccaaccagtagattgcagcattagcatctccgcctcgcatagacttgtgaagtgcgcttatgaagttgtaatgttgttcccctgccttgtcatatgccaaatgtttgcactgaagagcctccctctaatcatcaatagacacaacagctttca

SEQ ID NO: 58496 - DNA, 767 bp, Arabidopsis thaliana landsberg
ctttatcctgatgataataatgggtctgaaagttactgtgaaaattctacctgtggcgtgatccgttgctgggtgctgcagtgcaactctgagaagtcgaaatgcctcgtccacgtcatgcttttcaacctttatcacaaaaaccatttcagttgatttagaacgatgaaaggaaaatgtataatatgagcgtttaactaacccattcggagaagcgcatccgagccaaggcctcactaagtctgatcaaactttcaatctgcctaggagttgctgttatgacctgtgccaaattcagagcgtttcatagcgttagactagtcatagcctttttatgagccttggttacgacatagaaaagatattgaagtttcgagggcacacctttttgctactgccagcaaacttccctgcttttctcagctcaacatatcctcgggtcaactcctctgcagcttcatctgacagtttaggatgaatgttcttgcgggcatagctaacataagttgtcagtgtagtaatatctatagcttcctcctgagcactctgtatattgacacaaatgataccaattaagtaagataaaggcaaaaaataattgtctgtcaacatatcatacacactgggaaaatatataatataagacctcagcgttctcaaagtgaagggccacaatatgctttgccagccttcggtcagtctgctcatcgggcttagaaaagaatcaagtagatcaaatcgaatctaagaagcaaaatgagggtatt

SEQ ID NO: 58497 - DNA, 301 bp, Arabidopsis thaliana landsberg
tagctctgacattcttcatctcacaacagggtgtcccattagactctcatccacctaagctcgctggcagtctggactcaaagaatcgttactttgattatgacaaattagcagaggtcagatacaagcactcgccttatttgacctgaaatctgaatctcaaggaattatctgtggagaaatttccgtgtctgtgatgtgatgtttgactttttaatttttctgtgtggccaggtgactgctactgttactgttaatctcaataagataatagatgtgaattactatcctgtggagactg

SEQ ID NO: 58498 - DNA, 432 bp, Arabidopsis thaliana landsberg
tcaaagcaaagaagatgaaaaaaaaacacaaaaaatctctctcgagccctaataaaactgtgagcccctctattttctcagaccctcgtgtttcactctcgcttaacgagtcgtttcctttcctctgatcaattctctcagagagacctatttgacatttatttaccatctcaatcttctttttcctcagattttcttcttcatctctctcacacaaaccccaaaaacgacagcgttttcaaaacccaaacaccagtcgacgcttttggaccttcctttcttcctccttgtctctctctgattaaccgatttcgatttccccacaatgccaaaagggttttgattctctcttcctaaaaatctcaaatttacacccagaaaaaaaccctaatttcgatctttaatctctacgctctctaatgggttcctcct

SEQ ID NO: 58499 - DNA, 522 bp, Arabidopsis thaliana landsberg
ttcgtctttcccatttgttaaactatgttcatgtgaacgaacaggccttgggcgtttcctgcttggattgcgctggtgcatgcctttttgttttaagattgtggttttgtggagcacctgtattgctttgaggggatcagggaatgtgctacttgcatctcaccgctttccagttgccaccaccggtgatggtcgatgatgtgagctagacaaattggatctgttaggatcgcaggtggaaaaaaaaaagagacacagactttaacagactttatcgtggaaaaaactcccctaatgtggaggagaaaaaaaccacggggaaaacagatctattatatattgttcgagtacagggtacatggggatctatttatataggccaaggagataaagatagggtcacatgatcttatccaacacgatagagatagggtcacatgatcttatccaactaatctgcacttgacgctaaatctataaaacctggttctccaaacattactaggatgctaaatttgaata

SEQ ID NO: 58500 - DNA, 215 bp, Arabidopsis thaliana landsberg
  unsure (1)..(215): unsure at all n locations
cttccccccccccccctttttctcctctcctccccttttcccctccccccctccccccccggccccccccccccccccccctcttttttccnccccccccctcccccttttctcccctttttttttccccccccccccttccctcctttttttttgctcttctctttttccccccccccccctcccccctttttcccccccccccctttcttttt

SEQ ID NO: 58501 - DNA, 1154 bp, Arabidopsis thaliana landsberg
ctattaaagttttctcgcaaaactatcattcagtcctacactgaaacattcaaacatctatatattttcatactttatgatattttaaaatatatgtcttagttaattaattgataaatgttaaaagtaaacactgtacaatttattgtggtaggagacttaacaaggatataaattaggcaatcatagtccgaataagattattaatatttggatactattaagtatcagttgtaaaagtatttttaattagtaagagacaatagagagccaaaaaaaagtaagaggcaacaataattcattcattttttgaagggaattgcaagattcgtttcgaggatgcaatagcacataaatggtccctaaattgaatagtttccggagaaagtctcgtatttttttggttgtccaaaagtaaagtacttgagaagattaatttcataagtaataataacttgttaagtttatttttttttggaattaatccaaagtaacaataatttgagttttaattaattatatatagttcaatatgtatacctatttataatagtgtcctaagctagatgtggggtctcacctaagttagctagtaaataatataaggaagtccatgcgcgatgtgtggaagtgaacgtggtaccacgtgggtatggagtggttcttgcgttaatatgggactatgtgagtgtgctttgaagcctacaagagatgatatattcttcttgaagaatcttcaactccaaagataaagattaagaaaaaggataaacaaagacaggtcagtgctcgtatccaaacaaacttcttcataagtgaaatcagagccatcaaagacatatatcactatatcattctagtcaaaattctgaaaactgtcaatacatacgctgattaaaaacaggacacgaacaatatcccacgagtgactagtctcttctaagctttccatttttatctggtaaaatataccatctacaaatatcaagccatagaagttagaactattttcagaccaatcactcgtatatgtacataataatctattttggtattcgtccctagtgcttttactccccaatcgctaaatttaaaccaaaacaatggaaaatgaatagattcataatgagaaaaactttcttcctcttctttat

SEQ ID NO: 58502 - DNA, 625 bp, Arabidopsis thaliana landsberg
tcagaggatcccccaatgtcttgtgttcattcattagtccatccaaagatcctagagaatccatggagcatccgagaccatatagcgaaagtgattctagtgatagcttatcctcatctaggagctatagactaggagggctaacttgggacttgccagaaggaagcaaaatcgaggactatttacttttctggataggttctgacagttcagcttttgccaatgtagtactgaccttcaatggttgtgacataggtatatggctctatccatggaaatttcttgatccatttttcttaaacaaatatccaatgggttgactaaggcatgagtagcttatcttcttgtttatgttcgtttgttgatgttagtcagatatgatgctgaagaagattctttggtgacggaattttatcaacaaagaaggatacttaagcgacggtataatcacttttttcaagcagacattatacatcacaatatgaaactttgtcaatcatttcgatcttctttattatctctgttgaattacatttcaagtcctcattcagagttatgtgttgcagatattacttggtggaaaaagctaaggatgcgaatattataggtattttggtggggactc

SEQ ID NO: 58503 - DNA, 641 bp, Arabidopsis thaliana landsberg
  unsure (1)..(641): unsure at all n locations
agccataatcctacttttatttgaaaatgcaaactcatcattttgttctcctgatatttagctcaactttattacaatatactatatagaatacataagatacattcaagcactacggaattgaaaattagagattgaagagtagagaaaaaagtgtataaattaatgggaaatgggaatctaaagagtagagtcaatgattggtaaagcatcttcccactcatcaaatctttaattcatctttcttggaaacaatgaaattgtgtctcatctcaaaattcttaaccaaaatcccactttctcttcatacaaagcaatcagaaaatcctctaaagtgcatctcttaaacatagccacattgttgataacaaaagaaaagaaaaaacaactatatttctttattaaagaaaaagaaaacaaaaaacaaactgataatttccacaaaagtaagctataggtaactttatttcaaaaaaaaaaaaaaaaaaacaatgtctcacttaaactttattacagagaatgatcaagaaaggngtgagggctagtactattaatacattggcctcattttctatggaaatggcataaattgnggtagtcttcaacatcatagagctnctaaagcatatacctcacataaa

SEQ ID NO: 58504 - DNA, 1027 bp, Arabidopsis thaliana landsberg
tacgaatgattctgcgagtatgaccatctcggtcactagaagtaacagtgttttgggtcaccaggaaatcgaggctagtagaagaaaagatacatggtgcattacgactctacgtagacttaaagaaagctcaccgttatctttgaaggtggcattgagatctgtaagttcacaatcaactttgcttgtaaaaatcttcaaaaaattcaaatttccttttcatgactcatgcagcttctttaaaacgaatccaacagatccgggaaggaagattacaaacacttgaccaatgcttaatccgagagtacagaatgtcgctacaaggattaatcgggccaatgtccggcaatttttgtgaggtatgtgaatttccagtattaaaaagcttgccattgcaaacagagtaatgagtcactaatgcgtaatgtttcaatactgaaaagggagtacgagctcgattgatagacaaggatgaagcaccaaaggtataatgttaaatcatatttccaataaccccattactgtgtacataaggaaggcattactgataagaattggtgggtgtgcagtgggatccaccgagcttggagaaagtatcagaggacatggttgatgattacttctgtgccttgactcccacggaacctgatcttgaccttcctgtcaaactcagagaaagcatttagtttcttgatgaaaaaaaaaatcaacttggctaacatcagtccgacactccccttggtattcgtaaagaacttgtttgttgggagactgatttcattcttcctgaagcagaatgtgttgcagaatttttgtattgacaaaaatagtacttcaaaatttaataaaataactattaatataagtaatttactaattacgcttttgatgccttctccatacattgtcgcgcttagtgtatacatgaatattatatatgtgaacacttttgcatgtaaacataattcaatttggtgcgatgaattaggtttaagctcaatagtctcaccaaaatgaagtgtagagt

SEQ ID NO: 58505 - DNA, 1231 bp, Arabidopsis thaliana landsberg
ggcatccatccagtgaacaaggtgctggacaattctaatgaagtcagtgatacaattaaaacttattcacgctaggagctggagactacacatcccagatagtttgaccaagtataccagattctgagaatgctcacctttccagaagtcctgtggaagggcctcttccatttccatattgtttaaataggtactttacgatgtcacctaaattcaaagagagaaaagaaccgatgaaaagatatccagagaaaaacgacaatcaggtattgatgatggaacttacgactcaccactctcatacattaaagtttcagtattcgggtcgacgagaaatggaaacctgcagattttcattctcagaagtttaaagactgacgacagaaggaaaacaaaaactgctatggaatgatgaaaacgaaaccaattgacagaacaagaacgtaaaattacatctcttttccgccagatcttctaaccagttctctgtgtcttatagatcctttaggacaaggataaacctgaacaacaagtcaccaacaaatgtcaggataaactttgtatattgcttaatgagccatctctctggaaaatatgattcggttcttacttctactgaaaggtctagctcagtcatggcttcccgcactctccgacaaaagggacatgcctctgttatccaaaaaccaagaaaactcttacaaatgtaaaattagctttccactaatgctctttgtttacatggcactaacaaaacataccaaattcaaaaagctgcaatcgcaaaggcggattagaagagacatcctggttatctatactcccagttgatactcgagatccccatggaagtcttgcaacagatgccaatgaagaagttgcaacctgtattcatgccaaccataagataaatcaaaagaaattaagagctcttagtcacgtaaccaattgtgacaaatcagtaaaacaatattctataaacggctctaggaaagttcagaaaacgtcatcctccctcacaacccttctgctaagtctaagggaccatgaaacggcttacaatgctaatatccaaacaagctttatagaaccagtaaactaaaacctaaacacttccacaacagtcaaactccattacgctcatgtcaaatcttaatcaatgttctttttttctctgagttacctaattgacttgttgatacacatttggctgcagagccttgttttagag

SEQ ID NO: 58506 - DNA, 188 bp, Arabidopsis thaliana landsberg
acacaacgaatagaatcatctatattagctcagagtgaaggaagggaacaatataacagtcctacattattgggtgaaacagatcatcatatccctgtccacgttctggggtaggtattacgcattggctaagtagggaactgaccactatgtctagtcctgttaaaacaataggaaacatctgtgag

SEQ ID NO: 58507 - DNA, 173 bp, Arabidopsis thaliana landsberg
  unsure (1)..(173): unsure at all n locations
aaagccccaccaangcaaatatgggaaggggggaataaaccaaactggtgcggttaacacacggaacacaattattgcaaaaccctgcctatcttatgctaaaaatcacctgatcatcattgcctacacacccatgctctctatcatcatgagaccatttaacaccgaagact

SEQ ID NO: 58508 - DNA, 142 bp, Arabidopsis thaliana landsberg
ttccttacacatgagggtaaccatcacattttctgtaatctctctacattccgtatcaacttgtttgatatagatttgcttcatttcgcttaggtagcatcttgccaggggatattccaagaaatacttaaaatgatgatgg

SEQ ID NO: 58509 - DNA, 1720 bp, Arabidopsis thaliana landsberg
gaagattgcggttaagacatacgttggatgctcttacagttaaataatattagacaggtcaaagattttataccaagatatatgtctgggaattcgagacctagtttggacagaggttctgcaacttcaacctgcataatgatagtgaatgtttaatcagctcaaagcaagccacccatctatcaagaattatataactcttggttcaaacaatgatgtttgcatgaaaactggcaaattgtttgtttaatcagctcaaagcaagccatggcgaaagaaaaggcgagatggaaagcaaaacatacatctgttaaagatgtcatcaagcgcctcgacgaatattctatgagtgaacctccacccaatttagtaagttccgtcagacattcccactctttctcgagctcctcagtgtttgtagcagcaagaacaatcacattgcggcacttaatctacaccaaatgaccaacgatcagatgggtatggaaataatgctgaaacgttatttactttgaatggagttctgagagcacataccaatggcacagaaagcttttcatgatgcagtagttctgtaattccttccggtaactgagccatctgaaatgagaaaagcaaccaacttggtgaggaaccttctggatattacgcaaatcataagcatgaagttggccccacatatatacagaaattatatagttttagcttatcttgtctgaagatctataaaaactattatgctcaagaccgaactcacctcattcctgtcacctgtgcactggtcgctgataagatgcctaaggtattcctcaaactcttcatcaggtgcctgaataaatggcagtatcagcttctcacattacaattgagtggtgattgctttttcacttgttgacacccacattcattgagatgttaaggcacatatcttaaccatgagtttgcactaatataaaagagatacgtaccaggcgaactccaaatgccttagcaacaccggccaaagtaacatctgaatgcaaaggaccaactcctccatatatgaataccttccaaagaatcaatcagacgaaatctgtcaagcacattttccacaacaaaacctctctttgattttgattttatgatcatatgctagagtacttaccatatcactcgtagacctttggcggtcaacttcctcggatacagaatctatctaataaaaaaaaacacagtgaagcaataatagagattaatgtaaattctctgattaacatgaatccataagtgaaaactgatgcaacaaaaacaatgagtaaatctcactcacatcattccgaaggacagtggtttgttgcaccgaccaaccgacagaagtcaacttcttacacaaagacagtcctaattgatcctcaacagtgccagacgtgagctatggaacagataaatgggtcggaagaacttcatcacacttagtatataagtaaccaagcagggcccttttcaacatgtggttggcctaagtctactgtcattgcttgatatatatctagcatgccataatgttctttcaacataaatactttcaagtacagagcctgatagtaagaattaatgacttacagaatctcatcgccgacagcaattactgaggccaaaagcacctcgtgtttctgtgattcggtatgtacgtcttttttcagtgaagcaattttcttgactctccctgccctttcta

SEQ ID NO: 58510 - DNA, 986 bp, Arabidopsis thaliana landsberg
ttcccctggcattaccttcctttaaatataggcttcctcttttggagcatatatttcctaattaatatttataagaaaatctagaagagaggaaaaaaattaaaggaaaaaatctattagaaaaaaaacatccaatggaacacattttcaggtaacgtacaatgtgaacgtgtgtacgaaaagccacatacatgatacatggtaaccgtcgcaacccatagtacattagaagtttttgtattacactgtttcgacattgtaaaatacgacgaagagaaaaaaaagaaagaaaaacacattattgggataaagagaatgaaggcaaaaatcaactcagtgttggagaagaaacttgaagaactcgagtctcttcttgaagtaatcacttttgactataatgatcccaatgttcgaaaaatgcaactcggaatcacattcgccaagacccttctaacggctgagacatcgtcccggccaaaggatgtggaaggagaagaagacattgaagagttgtataaactgcgttgcatggcagagaggttattcgaaatggaggcttttatcaccaaccaattgcccggtcatggtaatggtttattgatcaaaccggaaatggaaagtttggaaactaatgcttgtattatcaacggtaaaaccggtgaggattactctttggtcgaatcttgtctaatcgagtgtaaagcagaagaagaagaagagaaggaggaagaagtagaggctgagcagtggccattgttccaagaagcgtcatcatcatcggagaagggagaggttacgattccggcggtggcgacggttaaggaagatgtgatggttagtgaagtgaaagagaagggttgtgttggttttagggcattggtttgtttcggtttaattggtttagttgggtgtgtgatgagtttagttggttatattggtgatatcatggaggaggataaatatttccttacccctacttaaatgat

SEQ ID NO: 58511 - DNA, 508 bp, Arabidopsis thaliana landsberg
cattttgatctccaaatcatggaatcttgtatatgttttataatactcttcacaaaaagttagatgatttttttgtcatttaaagttaaaaagtaaattactgctttcaatcatttgttgcataaaataaatgctaatattaaaaatatatgattcaaatagtgtaaaagtatatatacataagttgtacaaaaacaaaatcaaaccagtgaaccctactccacctttattgacataagattagactcaaatgttctttgattcaatcacagattgaattgaatgtaagcttctcaacttcgtgaattcaattaaatataattcaactaaagtatgctacaaaaaatactggtaagacttgtgtgacatttttcatatataagttgaaaaatcaataaaaacaattattcagaataagtcctaactagatctaaaccgattctaatcttcgggataaaacatggattcttttttagtacataacaaatacggatttggaaataacaaa

SEQ ID NO: 58512 - DNA, 612 bp, Arabidopsis thaliana landsberg
tttatggtctgcgtggtgtaactttcaaatacacaacactttaagctacataaaccagatgtctctcacagaataaaagagacagcaggactcatttttctacgattcaaacagaaagcatgactttttttccagaaccactgataaaaaaaagtgacgcaccgacactgtgataccgcacaagaacatgaatagaagaatttgaagaaggcctcccagaacagcaactgatcgaacaactttaagctacatagtaagaggaaaggagctcaagagtttgttatgttaacaatttaattcaacactatacaaatcaaagcggttgatctcaccttagcagtggagaactctagacccaaagcaaagagcagaaataccacaccaaactgggcaactgtttcaacctaaatgtagaatcatgttaaaattaaagcgcaaaagcaacgtgtaagatgacatatatgtaaaaccacatgagcattatacattctcatctccgtggcagtctaagctctagatttcctattcgaagacgaactaaggtctctcttatgcatgataaaaactcaatttgttttgacccacagaagaaaagagtttctagtcaaagac

SEQ ID NO: 58513 - DNA, 294 bp, Arabidopsis thaliana landsberg
  unsure (1)..(294): unsure at all n locations
aagacctccgatattgggccccatcatctttctttctttgggtggggttgttgtctaattcgggtggggcctnnnnnnnnnnnnnnnnnnnnnnnnnnnnnnnnnnnnnnnnnnnnnnnnnnnnnnnnnnnnnnnnnnnnnnnnnnnnnnnnnnnnnnnnnnnnnnnnnnnnnnnnnnnnnnnnnnnnnnnnnnnnnnnnnnnnnnnnnnnnnnnnnnnnnnnnnnnnnnnnnnnnnnnnnnnnnnnnnnnnnnnnnnnnnnnnnnntgaatacccctttactgtcaaaaaaaa

SEQ ID NO: 58514 - DNA, 702 bp, Arabidopsis thaliana landsberg
caggagatgcaaccaaagatgacgaatggtcaacaagactctcaaggtctagcacttttacactttactatattcactcgatggggacaattctactctactctattcactcgctggcgatatttatctgtggatacctttctacgctgaggtatcactggctgagaaaaccatgttatggctaatactgatagacgtttcttctgcaaatatgaacagataagggggagaagaaagaagtgaatgatgagggagagaagaaggagaacacaaccggagaatcaaaggcctcaaagaagaagaaaaagaaggacaaacagaaggagctaaaagaatcccagagtgaagtgaagagcaactcggatgctgcaagtgagtccgctgagcaggaggagtcttcttcttccatcgacgtcaaagaacggctaaagaagattgcatcaatgaagaagaagaaatcaagcaaggaggttgatggtgcttcaacagctgctgcaaaggaagcagctgcgaggaaggcaaagttggccgcagcgaagaaaaaagaaaagaaaaactacaatcagcaacctgtgaggtgaagaaatcaatccacccaccgttgtgatatgaacataggttttgttcatatgagacttacttgccttgaacaaatcttttgatggggaatgtggttgggtcgtgttttagagttactgatac

SEQ ID NO: 58515 - DNA, 428 bp, Arabidopsis thaliana landsberg
gattcttgaatttcattgagatcaagaatatcttccttaaccctgtcaactatatcatggaataacccagaatctagggaactggtcacagccgaacaattcttattctttaaaaagaaatctacattgtctgtgacatacgaggagaccccagacactaccgtatccacaaatttatttactacatcattagtagctagcttatcaaagatttttagcagcagctgcaacaatcgctttacttccaccggcaaatctacagcagccagggggagagatactatgtctagagaggatagacattcctctattgttctgttaactgagtgcaataccaatggcaagtcctcaagattaccctcagtggaactcacaatatcagttacagaacgaccttcaagaatgatattgtactgccccaaatcttt

SEQ ID NO: 58516 - DNA, 874 bp, Arabidopsis thaliana landsberg
tttaattctctaactcctttcattctcaacccaaattaaaccccttaccacctacattaggttatttaatccttctattatgtcataacccctattatccgaagacagatatgacccagcaatttacatataaactaatatacacatctctaggggagtatgtacagctgtaagccatatttccagctaacagctccttgttcccaaaggaatctgaattatggtagccaattactctggtctaaggacaggaaatgtacataagaaccattcccaaatgttgttaccagcatcagttgcagaataccaaactaatcaataccaagaaccaaaaagaaaagaaacaaaaatcagtctgaagataaatcaagtttagtagttacctccacttccaaagggtagggcgctgaaggagtgtaaagaaaaggattacaaagtcgcttaaactttgattctccttcacatcgaacgaacacttccaacgcaaatgaaggaggtgaagttgccctaacgaaaatattgtcaacgttgagataacgaaccatagacatcacccacgctcaagaaatgttgtcagacattaagtcactcacaaagaatataaagctggcattttagctgaaaatctaactacaagtggttcagctaacaatattgcttcactatttttgtttctagaagacgaattgactcaaaatctagatttctctgaaagtgactaaagtttattaatgataaagaagctgaactttagagtctggactctggacatttcatcgaaaccactggatcgaaatatcatgtctgcaaagttcaattttttgttacagtttcaagtttgggttattcagattttctacacaaatttaggttt

SEQ ID NO: 58517 - DNA, 803 bp, Arabidopsis thaliana landsberg
ctctttgatttgtgaatttgtgttagtttagtttatgtttatagagagactaattttgatttctgtatgagctcttggattcctctgttgttgtggtttggatctaaatctatgttttttaccacaaagtattcagattgaggaaaattttggttacccttcgtttttgatttggaattgaattatgaagaacttattgtatgttgtctatttcctttaaaaattgaatcttttttctcaatttctcgtgttagagcccattgaagtttttattgagttgtatgtagaaagatgggatgcaatgaagtttacatgttgatataagttttgggttatgtaacccttcttttgcgtgacttttgtttcatgaaatttctgccgctattgtgtaagtttttaacactgtacttatattttctacagcgttctggtgttttctggctttaagatctactgaacattgggtgtgagcaatgggggaagaagatacaaaagtcattgtggagccaacggcaaatgggactagctctcttcaaaagacatcagatgcaatcagtggaaaggaagtgcaggagaatgctagtggcaaggaagtgcaggagagtaagaaagaagaggatactggactcgagaaaatggagatagatgatgagggtaagcaacatgaaggagaaagtgagacaggagataaagaggtggtggtttcagaagaagaaaagaaagatgtcggttgagacaaggaacaaccagaagcttgttaaatggatgaagacacagatgacaagaacttgaaagctgatgat

SEQ ID NO: 58518 - DNA, 418 bp, Arabidopsis thaliana landsberg
cgatcttcattctcgtccttactctccgtttttttgtcttccacttctggctcagcgaccttagtgtctgcctccacatcatcttctttgtttgcttccttcacttcctctcctttatttgtttcctcctcttcagccagttcggcctcattcttctccttcagtgcctcttctttgtcatcttcatccacattctctaccttttcagcctcatcgacatcgtcccctttgtctccaccgaccaacttctcttccgtatccccttcttcgtttccatttgctttccctccttccagtttctcctcctttgattctttctcttgctctccttctggattttcggcatctttattgtcagcagactccacactttccttcattacagcatcttcctcagtagcaacgccagaaacaccat

SEQ ID NO: 58519 - DNA, 193 bp, Arabidopsis thaliana landsberg
aaaacaaaaaaatacccacaaaccataaaagacaacaaaaaaaaacacactaaaaaaatagccacaaggctaacacaagctaaaccacatccagacacgacaaccctacacaatacaaccataaaacaacatgaaagctaaacgttgacatacacaaccacaccaacatcaaaacctaccaacaactcaaact

SEQ ID NO: 58520 - DNA, 745 bp, Arabidopsis thaliana landsberg
  unsure (1)..(745): unsure at all n locations
tcgtgaactcttctaaagacttcatgcaccgcatttgcttttctctttaccagaaggcgtcaattgacaatctgcctctacctaatccagaaaccaatcattttgagcatacatatagttgactttttaaacaataagccttatttgaatgatttcatatacatttacgttaactaaacaacttctataatcatatatattatctttttcccctaaaacaagagaggaagagaatagattaccttgacgctaaaagtgaagagagacatgtctttggaagttgtgaggttgagatgaagagtacttaaacctaaagagtaaaactcattgataatcttgaagagcaatcttggctgtgtcttcgttaacactttaatgttggcatgtctttctaccattgtaacctccacgtcagcaaccacctctagtcgcttgtgatggtgttggctcgaggaggatgagaaggcggtggcggtggcagtggcagtggagtattgagggaacatgaagaagtcggaaaatatatttggtgattgattgagtttagtagcttttaattgggcttcgagagattgaagacgttgttctagcttcttcagatagctaatggtaccttctatgattgatgcttggtcattctattataggaaaaacccaaaaatttatcaattcgcaattttatttagtaattgattcanaaacanatatactaaattactattatttaattaaggcttacttttaa

SEQ ID NO: 58521 - DNA, 527 bp, Arabidopsis thaliana landsberg
aattctgcacgaacatatggatacgaatcaaataaattcaccttttgctccatctcagggaccttcaaaactttcagattcacctccctttttctgtaattgaaaacgaatcgagatcaatcgaaaaaatatataaaaccaaagatctacggatttggatcgatagagaaaacggaaaacccacatctctcgaacagtttgatcgaagaccttcatgaaatccatttggaatccgcgaaaatgttatgaacaaaggaacgaaaactggcaaaattttggtgcgaggagaagtgtagatctaatcagagatggctcgtctttgtattatgagtttttttttttcaatgaaaggcaacaacaaataaaaagttagcagctagaaccgattttctcgcgtaattagtttttaaaggcgtcaaatgactgtaaattcgacctgaccggagcctgatccgcagtctccgatagtcacggctattggtggggttgttcaataacctacatgtatacaaaaaaaaaaaaattga

SEQ ID NO: 58522 - DNA, 592 bp, Arabidopsis thaliana landsberg
  unsure (1)..(592): unsure at all n locations
gagcacataacatgaacgaacaattagcatagctgcgagtaatctagtttgcaacaacatttattcaccaccacacataatagcacatttaaggtgaaaagactcgggcgaacaaaggatttattaaaacaccaaacatattttagcaaaataggtaagagagaaaagcaaatcaagcagcagcaacaactgtcttgtgcttctcgagattggcaatgatttcttctttcgcagcaccaaccacagtctccttgatctctccttctttcatgaagataaacgttggcattgcctgaactttaaactcctcagcaacagtctgcacaacaacataacaagtaagttaaaggctcagagaggttaaatatcactaagtttggatatcggtatagtgtaagattgatgattggaaactcacgttcaattcgtcaacatcgaccttgaagaacactacgtcaaggtgcttcttggctaagtcagcaaagacgggtgcaatgaaacggcaaggtgggcaccatgttgcagtgaagtctatcacaatctgtgtcatttccacacaaccaaatttaagacaacangctagaccgatcga

SEQ ID NO: 58523 - DNA, 1851 bp, Arabidopsis thaliana landsberg
aatctttattcttgatcacatctcaaacctcaaatgatacggctgagtccagctctattcggttaagtcgaactgtcccaaggatatactcgggcaaatcgctttcctcctttccctgcatttgcatttggtagttgaacatttaactgatgatcgcattcacaaagatgttttaactaaagatatgataagtctagcagtgagaccccaaacaaacctcaatcaagatggcgagatcaacaatgaggcttgtgacataaccaaggaccagaccaataacgctcctcgcaacagccgatgatccaatatctacatcaatctgcaacaccacgatttcataagaactcagcaaccatgtgtgtgtatgttggacatgtactgtttattttatggtttacgagaaatattgatacttcatgtaaatcataagtgaaaaacaattctcatatctatcatgtaaacttagtttattgcaatgaaagaatcgagggaagtagaaactatttatacctccagagagttatcctgcctcaggtacttacaggtcacagctttaccgagcaagcaggcttttgttccaacagcccgcttgaccatccaatatccctgtgattcaccatgacggttacaatgtgactaagtttactatatttcagtggaaacgagaagagcagagtttctttacctgaacaatacttggaattagcttaaatcttgcgtcgcggtaactgtcactcccatccacgaattttcccagggatgaagtcttgtttacaggtcgatccgcagcatagtagagtaccagacaatagttaggctttgctggtacctgaaaaagaagaataaaaacattttgacttcttccagagactaacttaacccatgattactaataaatattacagttagatagactttaagtagagggaaaaatgattggtgatggtagtatgtactatcataaatccaaaatattataaactactagtgatatacgagtgacagattgttagttacgaataaacaaagacgaacaagaggtttagcgacactatcttcaaaaaaactcatatattagtattgatatgtatgggttgaggtactttctaattggactcacttattcaaacaaacttttgtaagaagagtgatatatgtatagagtttatgttgcagattgcattcatacctgtagattgatgactaggatgaatgggagctttttcccaggttccgactacaattgagaaaacttccaaatcaggctctttcaatcataggagactaaatacataatgtttgtatgttttcttcttacttttccaacacactgtaactcatcaataacttacaaagtatcaccagacttagccacaaggcgaagagggtaaatacaatgcctcatggtaaatcgagttacggtgacaagtcgcacttaatacttgcttttaataggaaagaaggccctgatggttagttaaatacaggtcaagggagtacctggacaagacattttggatgcagggcgatgttgtctacagcactatcaactttgaaccaatccactgatataagtgttagaaggggctgcccacccatcaccttagattgcacaataggttttattaatttgcacacaaattaacatgagagaaccatgcactttgtcagataatccaattcaagagctaagtagttcagaatcagaaatcaatctagaaaattaatagatgcggtagtatccaaagatgataaattaaagaaaccaaaatcagtatatcagaagaagttaatggttcagtcatggaggacctgagtgcagtggcgtctacgaaacagacccttcattgt

SEQ ID NO: 58524 - DNA, 1279 bp, Arabidopsis thaliana landsberg
atatatcttttagtatatgtagctctgatgtatgtttctttgttcgttagaagactcgatgatctgcttcggctatttataggaaggcaagcagtccgaaagtctttggactggtcgtttttctttgaacaggaagtaattaaagaaatattcagattccctccgaagaattaaagcggctttgcgagaaaaagaccatttgttaatgttctgttttggctgaacaagttgtaataaagtaatcaatttttttttgcagctataaaatcgaagaatggtacgataacagtaaatcaagcatatgattcgagagattatacattgcaacgacttcgaatctctgtgtcactcagataaatgaacagtttcagaatctcatgacaagcgagtgaagctacgcgtgtgttttcatgaatactttgcagtttgcacataagctgtgtatataatgaatttgcacgcagaaaagaaattaggtaagtttgttttgatgttgtcgattagaggattttgaaggaagcaacgaaaagcatatggcgaatgcatgtttgtgtcccttacactaaatacaagcttacgtcgacatgaacgtcaaatggcagacacgagatatatgaatgattttcattttattcgctggatatataattggtacgcactacaaaactaatacaatgttaagagtactttcactttaaactaacaacatcagtcagactctttttaaatctgctttgattagctagatataccaacaaatagtagacatgattttaaagccaaattagcaatatgggttatggtatgggctagtcaaattatcaaagcccgattttccttatagctcacttattgaatccctaggctaaaaagaagaatgaataaatatggattcgagctttcggcgatcatatatttatcaactatatgtaatatgaagtgagtattcccttattaattgtttgcccggtgccccctaccaccaacttgcttaaagacaaatattcgttgtctatctcacacttacactcatgtttgattctgttcttgccttctctctaccggagcttatctacatacgtgtagaatggtaggccgatcgctagtatgaatcatatccagaaaatttcatatctgcaaaatgtgtttacttgaccatattctaggtatcgcaaacactaaactaaatgcaaaattttgttttgtatttggaatataatatatgcactcaccatcataatgattttagaggttgaaacatatttacggccgattttta

SEQ ID NO: 58525 - DNA, 542 bp, Arabidopsis thaliana landsberg
ttgagaaggaagagaaagaacggtggggaggaaggtgtggtttagagagagagagagagagatatctatttatgtaaatatgaagagacactgtacctaaacaaattggcgacatgtgatgaagaggccattgtagagataagctgcatacctgcattctcatttactaccttttgaaccggtttatcttctttattattcctatccatcctttttctttcttctatatatcaaaccggaactagtctttgtttctatataatcagataaaaattctactttgggactaattatcattatcaagtaccattgaattagtagccgatcggtgaggaataatagatataaagatttcaaagttttataacgacaagatttgtgcagcatcaaacatgtacatacgacaaacatgctaactttatttattttttatcaactatttaaaccgcttatatatttgcggaaaaaacaaaacttcaatttggctaataagtgtcgtgacacatgtatagaagtttaactatatcaacagggtttaggag

SEQ ID NO: 58526 - DNA, 460 bp, Arabidopsis thaliana landsberg
tttgatgtgcatcgcgtgagcctggctccacaggggcgcggattttggtcgcatctccagagcctggcccgagctccttttttgcatcgcgagacacaggcgctgatgcatatgcggcaaaccaaacaagcggcaaagtagcacgcgcctggttacgtggatgcaacctacaaccaaacacactacggccgcataccgtgagcctggttggcctatatgcgggcaaccaatcaggcccaagctttccttagcaaccaagttagggccattctcgtcgtgtggattcgaacagccggacaggaccgccataccggccgcagagtcagcgacacagcgtcgtttcaaagctaccttctgagttctgaatcatctgccttctcccgcctccccatccaaaatatccactgctgccggagccatgcctccgtcacaccggaacttccacttcttcatcacctcc

SEQ ID NO: 58527 - DNA, 487 bp, Arabidopsis thaliana landsberg
  unsure (1)..(487): unsure at all n locations
tttgatgtttttattaataaaagaatctttatgggggtttgatttgtaatttgactacaacaaaaaaagaacccagagtgttttcatcttctagttttgagagtttcttgcttatttgtttcatttaatattccttgtgttttgctggaatcactccatgtgatttgcttgaacatgtggtgggctcgactaaaaatagtttgtatatccaatatattgcttaaaaataagtttgtggtacagatttcacatgggcaggttggattcattcacattgatcattgactaaatattagaatatttcttaaggaaaaattctacagaaagatatttacatcaaatattaatattctactttttttttaataaatagatagatcanccgggtaattatatttatttattttgcacgatccatttcgaaatctgataaaacttactagaaacagagacccaagacatatcgtagaaagtttagaagatcatc

SEQ ID NO: 58528 - DNA, 294 bp, Arabidopsis thaliana landsberg
gcgccagcacaagggggccgggggggacaaaggacaccgccaggaacgagccgccgaagagagcgcggggaccaaaaacaggggaaggaccccggcaccgaaccacggagaaagaaaaagaacgaaaaaaggagcgggggtaaaagggcgccgaagcacccactaatcctacacctcacaagggagaacacaaagacggacgagagacaagctcaacagggggcaaacggcgaagggaaaacagcaagaaacgggaaggggggaagaggaagggccggagagaggacagggaca

SEQ ID NO: 58529 - DNA, 626 bp, Arabidopsis thaliana landsberg
cttcatttggtaggcttaaggtattgataacccctggatttgtgctttatggggttagacaatctacgcttattcagtggccttcgtttcaaaggaggttacttgtgggtgaagggagacttatgggttgtgaggtttattcttcttgtgatggtataagaaggaaaaatcggagctttaagcttaggtgtttggaagaatctgatgaatattgtggtggtagaagttgttcagatgatgtagaagctatgatttcgtttttaagtgaggaattgatagatgaggagaggaagtggaatttagttagtagagttaaagagaagaagaaagtggggaatgtgagaaaggttagtgttgaaggaagtaatagttatggtaatgggagagtttctcaaagagtaaagaaacctgaggggtttggtaggcgaaaggagattaaggaagatgtgaagttaaatgaaagatatgattgtgaacattgtgggaggagaaagaaaagttctgagttggagagtgaatctcggcgtggttctaaattggttactggtgagtatattggaaaaagttataggggggatgaagaaagagaagttcggccaagaaggaaaaagagttcgagttgttca

SEQ ID NO: 58530 - DNA, 464 bp, Arabidopsis thaliana landsberg
tttgatttgcctgggctggattgatcgcttggcgggactgggacaccttataccgcgcggcccaactgttgtttgggcgttctgtcgcgaggggcccactgcgcagcctacaccgccacacgcgtcactgggatgtgggacccaggcgtcaggcgtcttcaactaaccgcgaaaccaccggagctgctcctcacgatggctgtggcagctccgatcactccgggctcgccctccccataaaacctagaacgtggggtgcccccttggtccgctacctcgtgaaccgtcgatagccacctgggttcagggttttccactccggtcaggcaaggggcggggcaggttttcggccgccgccgcaaagccgcgttggtagtcgaaatctagtgcaattgtgactgctcggtggtagtctaggtcataaccaaaccttcgggggagttaattggacagcgaaccaccgc

SEQ ID NO: 58531 - DNA, 1458 bp, Arabidopsis thaliana landsberg
gcctttctttagctgttccttgttctctgtcatttttgagtaatattctttggtttccgcattgtcctgtatcatggttgtattatttgggagggagagctatcagttgaatgatgattaaacctgtatcatatttgttgcagaaggagaaaggagaaagcttcttctcatttgccagggacatgactattacatcaacaaaagcaatgatacagccagctttggtaactgaaggtcgtgatacttggaggtcaaagcttctatgggtttcacgggtttttcctatgcctcttgtgggtcttttcctaatcggggctttttgtgctgactttggagatcagacctcagactatccagaattagaagcactttcacggcttgactttggagctgctatgaaggttttccttgctaagagattgacatccgagtaagtccggtcttattcatgattctgaagttgtttttcttttgctgatctaaacttgggatatgtgctctacttgacacatttcttaccatttgaattgtgtatgtgcttcaaagatagggcaaggcagagtagttttttcttattttcttagaacatgcaaatatatgtaaggctagtaggaagttaactattctattattttttgttgttgttgtgaaggctaacactagagacatcagatatagaggaaaaatctgtcatcattggtgagagaaaccgagcagctacggaagctttaagaagagcaatagagcaaggacacaagagaattggaattctatatggcggaggccacatgcccgacctgggaagacgactgagagaagagtttgatcttgttccttcagaggtaagatgggtaacagcttggtccatcagaaatccaacggacttggagactagttcatatccgattctgaggaaaatggcagaggctttgcgttggccactaaaccggtaccaaacattggcattgctaatattttcatctgtacttgcactggatctctgcttttgggagctcttctttggttcgacaattgactgggctacccagataggtgcagagttataccagtttatagataatacaaaaattgtatgacgcagcacagaatcatgtacaaacagtgtcaaatacattttacagtgtcccaagtctctctattgtaaagcaaacatggctctgatgtcaaagaaatctattgaataggtaactctagttgtttttggtttgatgataatgtttttatgaagaaaaaaaaattacttaaaaaatggaaattagaattcagacaaagaaaaacgacaaaaaaaaaaaagaagtcagacaaagaaaaaaggaattggaatatttctcgtataaaaaaaaaaatgtaaataaaatttctcgacttgttgggcaagttcaagcatcgcccacagttgccaaatcgcaatataggcgcccacagttaaaagttgat

SEQ ID NO: 58532 - DNA, 557 bp, Arabidopsis thaliana landsberg
ggaagtgcattggagttaggttgtgatttgaacatgtctttaaatttaagaatactttgtcaatgcagacttcaattttcatttgagttttttgaatttttgttttcttctttttcaaacccaattattgttcagaaatacaacaacaaaaactagtggattgcatttggatgtgattttttttgaacatgggggaggaccacacatgacatgacacaccctcttccttaggaggtgcaacatctgttacaacttacaatatcctttttatgttccaaacaaaatgtcatcctccattttattatgaccaaacataaagtgacacacatacgtaccagtaataacctcattggtgtttctcttctcctaaaatagttaaatctaatcttaacaaaaaacactcgatttaatactatccatttgatgttggtggagtcactttctgactgtgacacaacccttgtcctaaaatcccatgttagccactgattgatcctttttttagattattggtcggatattaattatggtgaaagctccatttctttcttaatgga

SEQ ID NO: 58533 - DNA, 768 bp, Arabidopsis thaliana landsberg
actctgttgatagaagatagctagtgttcttttattatagtgtttgaagcaaatgcttcagtttttcagcagttttgccgaacttcacttttacttctggaaagtgcaaaaggcacacactacatttttctctgaatgcataacaagtttgtgtgtttttggtatagaagaaacaattctttgtgaatttggggacctacctaatctacttgcatttctaaaatagttccataagaaaaacaagaatccagtagaagaaacaattgagtgagaaatctttcagaaattgggatacaaaattacaagctgtgtctgagaacaagttctacaatatcttctggatttaaaaacacaaaaggttaaaatcttgagaacagaccatgaggtgagaacaagcataatcatcattatcatctcgtgcctcgtctgcgccaatccctgtctctctctttgcttctatcattatcgtctcgatcgtggcttgaactcttttcacgtcgatctcgatccctgttcaaatcatgttgcctatctctgtctctgtgtctctctctatccctgtctctccccaagtcatgatctctctccctcgttgatgatttccgtggcggactttggctcttgttttccccacggtgccgctttttagaggactcttgtgaatcttcacgcttctccttccgctctattattgatttctctgcagttaaaatcaatgtgtgaatgcctaagttaatagtgtgttgagacgcattaatagtgtttcac

SEQ ID NO: 58534 - DNA, 507 bp, Arabidopsis thaliana landsberg
ggtgctggagtgtcatgatgttgaagggggagaggggcgattgctggtcccatgatggcatggcaacaacctgatgagggaagcctggtggtggcgtagaccacagttgaggttgaggcaacgtccatggctgctgttgtgtccctggccaggggccctggatgcccgtgagtatggactggggcagctgaggagctggcgcagccggcgcaggagtgaccgggcgggtagataatgtcatccgtggtccgggccacatttgaatggacccagaccaaggattgtagaagctgggccaggtagacgtgggggcctgcccagcttgtttgagagcacgcccgcctttcttcccgacgcgtttgccgcgcttgccgttgctgctgttgctgccggaggactgctgcaggatcgcctgttcttgcttgggcggaggcctggcggtgctggaggcgagtagagcggtggccgacagggaggaatgatgtgtgaaggtgagtttctcaagca

SEQ ID NO: 58535 - DNA, 559 bp, Arabidopsis thaliana landsberg
ttagtttgatatcacaatactcatttggaagggtggctaggctttctcttacgacatctctatttatcatctatataacttaatatagaaacatgcttatacacgtacactttcgtattatggatgctacatcttgaatttagttgaacttgaacggcgtaattaattttttctatatgagaatgtggacgacatagaataacggtgtaaaagcatgctactaatacaaaagaattcatttcttctaagaaagatgtctaaattatattctttgggatttgcaggatccgaaaatggggaattggtggatgggtttaggggatagcacactagtcgggtattggccagccgagctattcacgcacttggccgaccacgcgactaccgtggaatggggcggtgaagtcgtcaacacacgtgcttcaggcaggcacacaacgacccacatgggctctggtcattttccagacgaagggtttgggaaagcaagttattttcggaatttggaagttggtggattcggacaacagtctcgtaccggtgcatgatgtcaagatac

SEQ ID NO: 58536 - DNA, 941 bp, Arabidopsis thaliana landsberg
aaaattataagcaaaagatatcaaagatgcttcttactgagacaagagtaaacaagaaaagagaagaaaaaaacgaagaagctacaaaaaggtggagttacctattgcatcacagaagtcacttgggtcatatccactgggatcaaatacatctttactgaaacacgaaccaatctggtcaatgtcttggtaagatacagcatgcaataggaagtcaggattcctgtattccttcctattcctcacttctgaattgaaactcttccccatctttttcaagctcagaaacttatctattttcctctacaaacacaacaaaaaaaaatacatatcagaccaacttgtaactgaatcacaaactaatcagcttagaagactgctatttccaaccatacgtaccaagagaccccacacaacacaccaatgagttcttgcctacctaatgtttcaaaataacattgaagcatcatcaggaaacttacttgcagctcctcagagcaatgagtaatcagcttagaatcacaaactaatcagcttagaatcacaaactaatcagtttagaagactgctatttccaaacaacacaccaatgagttcttgcctacctaaacttttaaaattagaacattgaagcatcatcaggaaacttacttgcagctcctcagagcacctctctctcggtcttggcggaagaaactgatccaataacgtatcactactttcccctgaagcatcatcacctctctcaccatccgcaactccagactcaccagtcattcgattactccaatcaggtctcgatgattcatcgttatcaagtgaacgaggagtcccatgagcactagaagaagctccaacaccatctaatagcctcggcgttctagaatcttctcctcctcttccttctcttcttcatccatataattcgcttttttacctga

SEQ ID NO: 58537 - DNA, 1219 bp, Arabidopsis thaliana landsberg
aactgcatggcgaacaatccatgtttagctccatggattttgatgctgatttccgtttaagaagctatgattcaacacatctgggagaagggagtatcatcaattacttaaccgataggaactttcagtttttggaaaattctgaaaaagatgataccactgcttgatgacaaacacctacttgcccataataggtacactgtatgatctaccacaacaattgcctcaaattcccgtccaatgactggaacatgcatgcatagaacttagatgcattgaacctgaagctgagcagagtagtggacaaccagcagcatgcgaaagccatgactcattagacgacatcgttgataagatagctatctctgaggttctctcacctagaaaggaagaaactttaccaggtctggaacacgaacaaagctataacccttctacaggtattgagaaagccgagaatgaagacatggagattagcatacctgcagcaaaggaagaaactttaccagctctagaatacgaacaaagctataactcttatacaggtaatgagagagccgagaatgaagtcatggagattagcacacctagaaaggacgaaccattatcagctctggaatacgaacaaagctataactcttctacaagtaatgagaaagccgagaatgaagatatggagattagcacacctgcagaaaaggaaaatgttgacttatctttaaaaacaatagatgtgaatgctaagcctgagacctatgagctaactctaaagaactcggatttggagataggcccatcagttgaagctcaagaatcacaggaatctgtgaatgaagaggaacaaatgaagaatgaagagaggaaaatgagtccttccacaaagcaagctgagcaatgcttaaataaagaagaaaatgctcagtcagaacagcaatcaacggaagactgtgaattgaattcactccctattaataaccaatcagaagcaacagtcgaagtggagttaacacccaacgatgctaagttagatgaggatgcgacatctggagataagtgggagagcaaacagcaacaagaggctgataaagattgtaacgaatcatctgtctgcaaaaatattgggacagatgataatgacaacgacacctaccccgctttgaaagaaaaagttaggaaatgcaaaagaaaattgaataccttatgagcatgcaccagcaga

SEQ ID NO: 58538 - DNA, 1297 bp, Arabidopsis thaliana landsberg
caatgtttgtaggtatttgatatcatttaaggcgggagggccgtcattggacgtattgctaggaaggagagatggccggacagcgatccgtgcggacgcagtggctgcacttccactaggacctgattctctcgagattcttacttccaaattctccgtacataatcttgacactaccgatctcgtcgctttatctggtattgtacttacgcatcttaatatttgtttagtttaattttgtcataggtcatcttagaaatatcttaaggtactatgaatcataatacatataatgtacgtatttaggtgctcataccttcgggagggttcagtgtggagtgataaacaatcgtctacacaactttagtggtaacagcggacagtccgacccaagtatcgaaccggagttcttgcaaacgttacgacgacaatgcccgcaaggcggagatctcaccgcaagggcgaatcttgatcctacgagccccgactcatttgataacgactatttcaagaaccttcaaaacaaccgcggagtgattgaatcagatcaaatcttgttctcttcgacaggagcgcctactgtgtctttggtgaatcgttttgctgagaaccaaaatgagttctttacaaattttgcgagatcaatgatcaagatgggaaatgtgaggattctcacaggacgtgagggagagatacgtagagactgcagacgcgtcaattaataagttttgcatggttaaatgatcaaacgtaacttattgttattcatgaaataagtgttctttagtttgtgcttctccacaattaattgtttttcttcttttgattttatttactgttaagcatgccattgttacttgtaattgtaaatcttatataatatttttctttttgaaaaaatccactatcatgtctgaaattattattagtccaccaatgaggattcaactcccacctatggttcattagactgattcaacggcattactgttcttatatacggaagaaaagaagaatatatcaatattatgaggcatgtcgcttgaccgattcaaaaaggtaaattttattacctccctcgatgagttagttcgtaattcctatctaaattttttgaagatgtctcgactcaatattctataacttccacttcattaacgtatgttttttttccccggccaatgtaccacacaagtgattagatccaagtttaaataaaatgggaaaccaaatgtgagtcaaatagtggaaaaaagtcactgaaattttcattacaatttgttttaatttgcatatg

SEQ ID NO: 58539 - DNA, 489 bp, Arabidopsis thaliana landsberg
  unsure (1)..(489): unsure at all n locations
agccgagtgacctatctggcagcggtacacgggagttggcgtctccaagcgcaaccccgctgacccgtatgacccccaggtgggatgggacatcgcgtgcgcccgcgcactgcgtgaactcgccgagatcaccgaagggagcgcgaccctggacgaagaggaatccctgcgtcgccagttcacctatgtaccgatcgacgtaaaggtgtatcagtgatcacaagcaagtaccgggcctatccgccggacggcggcaagcacaagatcgtggagcttaccaacgacgccaagagacgctatgaggcgaagggttggaagttcgaacgggcgactacatctgatagggaatcctgggcatgaccctgtacgagaaggaagagacgcgggccgttgcggtgcaggctgccgctcaaatgctgggcgatgctgcctactggcgccgagaccttcccgggggtgggtgttgagtaccttncctcacccgcgtac

SEQ ID NO: 58540 - DNA, 410 bp, Arabidopsis thaliana landsberg
atttgaaagtcctcaccgacgcgcaatgaggggtggggggacatggccgtgctgaagaaccccaacctcgtgctggcggcgctgatcatgctgctcatggcgtcgtcgatggtgctcggctcggtcgcggcgcggcccctgctagtaggcgaggaactggccggagaggccgccgtcggtggcggcggcgactccatcgtcaggttcatacggcagctatactggcagcggcttagcgggccaggcccctcgtgcaagggctcgacctgagacctacacaatggatgcccaccgacgtcgtgatgaattgcagtctcgcagaggctagcgcgcgcatgggaacccagccatcggcgagctgttgcagtagcctgttttaacgtgcagatatatgtgcgatgttcttttat

SEQ ID NO: 58541 - DNA, 923 bp, Arabidopsis thaliana landsberg
taattcacttaaccagagaactggagaaaaataaaatatatattttggttacaatagagtgtataacatcaaaattctgcggttaacttcacgtgagaataattgggcgaatctcagtatacggatacatccggcaccaactttcttttcaacattaagataaaaatttattatatgaacaagatctatgaatgcaagtagcaaaaacgttaaaaatatagttgactccatattgatcaattgatttcaccaaaacagactgattaaccaacgaagaacactcattggatattttttttttcttgtcgacattaaataagtatatacaaaaactcaattagcgaattttataaataataatatgcatgtgcgtgttcggtatggtaatggcttcatgatgttcacttactcaaactcaagattatatggctcacgtttctgcagaaacttttatctcatctcatctctccttttctctataaatacgcctctatttcataacttcctcttcatctttattgatatttctcaatataattgatctctgtctcatagttataaaaagaattgtatcataagtagtcatataaaagaatggttaagttcacagctttcttctgcatcatcgctcttcttctttgctccacgctaacacacgcatcagctcggctaaatccaacatccgtttatccagaagaaaactccttcaaggtattaacctcatgctcatggtgtatatcatcagtatatgtgtacacatatcatttgttctattacgtgaattagctaggaaacatgatcgaaaaggctttaagcctttaaataacaaggatgtacaattttcctgaaattaaagactagaatatatggcttcagctaaagattaattgtctgattaccataaaagaaaaagatcattatcg

SEQ ID NO: 58542 - DNA, 1084 bp, Arabidopsis thaliana landsberg
ttgtctcattgatgcattaagagtctaaagactatataaatctttttacgggtccatctatggtccctgagctggagatggtatcagcaacatacccaaataaaccaaaacataaacactctcttgtattttttattccattcaataactatatcagacggtaataatgagcttcaactttgctcaaaattaacataactgataagcctagaatgctttaaattatgattagatcattatcatttagaatagcttggatttacctttccttggaactcaataagcgctgcctcggcctgtttcttggttttgaaagagacaaacccgtaaccactcgacctccttggattttcatggaatataacttcagtggagacaacattaccagtgtctgcatcaaagaactccttaagatgcttggcccttgcttcaaatgccaagtttgcaacaaacaaattgaatgtaggcactggtgaaggcgtctcacgcggcgcatatgtcttcttctttttggtctttgcatagtctaccttcaaacgacgaccctcatattcctaaacaacaatacacaattaaatggcagatgaaaatcaaagaaagaccaggtacaaaaaaaacacaaatcaatcaaattgggatgctgcaacatgaaaaggtctattaacacaatgtacagcagctgctaatctaaaagacagataaaaatgagacaagcacagcaaaatctcaacaattatatgccaatttagacataaaagaagcgatgaatgcaatattcttacataggattcaagagatatgaaagctgtagaagcttcttcaggggaagccatttcaatgaaaaccaaacctaatagaactacaacttctactaacgtatgatacgattggtgtactaccactacaacatcttttaacataaaggcaaatagaatgagacaaacacaaccaaatgagagcatcgaccgaaaaacaacaaagtcaatcagactaagtaagagaaaattttgctccatgaagttttaggccagaaaaatctattgattacacgggatactgcaacctgaagagtctaataacataa

SEQ ID NO: 58543 - DNA, 861 bp, Arabidopsis thaliana landsberg
gaattattttgaatactaacagcaatgatgtttgattagaattcatctttcaatcataaaacgcggcttcctttcaaaagcattatgaacacagttaattaccacttgattgtgtttcttttttggattacagatcaacaaattctggagtaattattaagataaaacggtccctactagagactcctctaataattcatggtgtgtcttagattacggatttcaaaaacactatggtgtttttaaaaaatttaggttttttggataagaaatttttcttcattcaaaatactacattcttaggagacttttaattaaataaaaaataaccagttttcataattttgagtaatattttagaggataaagtaatttaaagcttgaatcattcaaaaatcagtattaaatatttatgattatatatagtgccagcgctttggtgggctccaagcttagaaaaattgttgtccttagatttatgaggagtataatatttgtgaccaacaaaaaatattactagtaactcatgaaagtgtaaaaacccaaactattttaccaggctccaattccaaaattcttctgttcgaattcaacacaggtagatcatttgtcgtcggtcaaactaagaaattaatgctttcaccaacattgtttcgaccttttcatacaaacaaaaaaaattattgaatggatcataaacataaatgtatatatgtaattcgtatgtgaagaaatgctagtctgatataaaaacaacattttttcgctaaaatggatgtaataatatatttcgtagtaagactttcagttaagtttaaaaactatagtacgtagaacacgggagatttatcacataagtag

SEQ ID NO: 58544 - DNA, 521 bp, Arabidopsis thaliana landsberg
tgttttgtcaaaactctcggtatcttgtaatccaggggttatgattgtaagttataccacgtaagttagttcttacctagataatataataaaatatgatgttgaataaaaaaatgtttaatgtctaatgaagttactacattgttcattagtttactactatgcaagtatatgccttaaagttggtaacagtaattaaacaaatatctaactatatggcaccgatatagttatactcatctcgataagtaattagactcatctcgataagtagttagaatcatctcgataagtgagtttctgtatgtaattacttattaagagaaattgtttgtttcccctaattctaggtatccgataattaatttattacgaatgtaatatattaagagaaattgtttgtttgctttccctaattctaggtatccgataattaatatattaacaatgtaagtattctccagaagaaagaaagtttagttggaaaatatattttactttctggtatactatctacctta

SEQ ID NO: 58545 - DNA, 502 bp, Arabidopsis thaliana landsberg
ctaagattttgttgtctgacgataactggatccggttcgcttgagtttggttatagaagtcaaagatggattaggttaataggtcggaaggtctaaccttgtgttctcaagttggtatatgccttcggaaaagatcaaccactgattgttacagccactacttatccatattcatttcaactcgatggaaaattggaccaatctatgaaccaaccaacttgccacttcaacaaccaacgtaaccccataagaaatctgaaatacccactgatatgaataaatttattttcaaacgggaaataacgcattttcagccttataactctggcaagatattccacataatattagtttgtttgaaatttaagtaactattttatatataaaaaacactaaattgtaataatgctagtttaacaaagcaaattagtccactttttgatcccatctataaacgagaccattacgaagtttcatagaacaacacgtgatcaacactcgt

SEQ ID NO: 58546 - DNA, 711 bp, Arabidopsis thaliana landsberg
cacactccaaattaagccaagtgcaaactgcttaatgacatcaacttttaacatttagtcgattcttgcgagcccgacggacccgatcaggcccaagtagttgttttctttcaattgtttagtttgatattaatgtgacctctgtttttttatccttttcgaccatcaattatttttcctgcttagacaaagtaagtttgtaatggttttgaatcgtttttgtatgaaatattttttctcacgaagaacaaaattcttaatgctcaacagaaaaatcaaattcaaatgttacaaagtatcgtacataatttccttatatataccatattacacacacaaagagagcaagaatttgctattttatgatgactgagaatataaggtacaagaagtttacaagaaaaagtagtgaaatcataaatttactcagtcacagcagagctaatcactttaaacctcttcatatgccattttaatcccaaaaaaaacttataggtttgatagttcatgttttgatatgaaattggccatttgtcccctttcaaataactatgcttctttttagtcctttttgtgcaaaagctctttcgtcttcttaagatctttgctttctagtggtatatgaatgccgaaatagtttgcctgggttttagatcatgatctcatgtatcaacatttattttactgcagtttctgtttgctttttgatgg

SEQ ID NO: 58547 - DNA, 1297 bp, Arabidopsis thaliana landsberg
cttttcgcatagcgtcttcgagctgttgagccaacgcatcagccactttattcaccttaccaattatagcctgtcttcgatatgggaagtttgctatagccacatacctgtcacatagattatgttatgcatacaaccagtatttcttaaaagtcataaatatgcctctagttgcaagaaaaaaatacactaggcgtgatctaagaaggtggagtaatgagacattgggaagaggggaaatttagagaagtgttattaccctccagcggagcaaaggccaagagcaagaagatcttccagtgtggtcggtagcactgaggttagaagtgatgcagacagtcctgcagctccaagcccaccaactgtcacaaagaactagaaaaggcaagcaaaactcaactatgtcaaaagtgtcacttagattgattcttgaatagcgagacgaagtatctgggaaaatacggtactgaattaacatctccgtcagatcataggttcggattgaacagatgacacaattaaacaatgatgaagatcaagacactttaatcgactgaattctagttagaacttagactaaaagtatttaatacttgaagctcaccacttctcgaatatcttgttccaatcgttttgatgtggttccggcactcaagttctgtattgttttcaagctgactttatcggttttctgaagtaagtcatatgtgtctatgcccaattgcgtttttgaattgacatatgttggccatttgttttcgaatgatttcagagacagactcccgccacgggcagtatttgattgtagccattcagcatattttccaagcaattcctgcaaacagtgaaatgtaaagtcaatcaggtcacaacaagacattgttagacaatatttactttctgcatgaatagtgactatatctcagacctcatatatatgaccaacatgtccccagttaggccaatactcaaagaataaagcatcacacttactttcgcatttgtgagtgctggagcgagtatttcaccttgaactttggatgtagctgctactgaggccgatttttcccctttgaacacgtacgagatcgcaagatcaaggcttgatagtcgcagggtagttcctatcagatcaacaacttgtaatctggcattattaatctgcgataaaagccagagtacaaaacacaaaaaagccaagttagcccaatccaatttcctccttcgtgattcaacaagataatatctaatagaatttataccaacgagagagcctgccttctccaggaaatgctct

SEQ ID NO: 58548 - DNA, 1082 bp, Arabidopsis thaliana landsberg
actctatatcataaccctgaactaccctttaaaaaatgttgtcctagaagaaattccagagatgataaagcatattttccaaaaccaatagttggctgaaaaaaggatcatattacgttttcattgtgtattactaactcaataaaagttgaatgatcaaataaagctattttcttcttctcttgacacctcacctgtatgagagactccagacacatgaattatggcccatgagaggagtgatgcagcgagcagttgagaggtcccacatcattatagtgccatcttcatcaccggaagccatatatctcccatctggagacatcgccaatgataaaaccatactcctgtgcccaatgaatatccggacacattctccagtttgcacatcccagagtctaaccgtcttatcactactaccggtagcaatgtagttacaattgggatgccactgtacacactgaaatcaaatgcatttgacaagtacaacgaaagtcgcatcaataggtatccaaagaaaaattgaagttactgatctgacttaatgtcaatccaaatagttaagtaatccatcgtaaccttatgactttaagcgtattggctaacaatctttggatcaactataaactggacgattcttaaattatgaatgtcagggtcacgttaaaataacaagtgggtactaatctaagtcaataaacaatgtaaaatgttagataaaccattgtaaacattgatacggtgaattaatgacttcaattgcataataaaacgttttaagaaatttatccatgcatttaattaacaactcaattggtcccttcgatttaacctttgcaaattaaacccaaacaatgaagatgagggagacactcacatcaacatcagatagatgccctgccattatccgaagaggttgtattcggtccattgaccaaatccgtgcagtacgatcatgagaacagcttgcaaagtaatgaccgaaagggctaaactgcaccataaaatgagtatataatatatatacatgtccagccaccataaattgcaggttatgtaagaaacatgggttaaattgaatt

SEQ ID NO: 58549 - DNA, 522 bp, Arabidopsis thaliana landsberg
ccaacaagcgttaatttggccatcaaacccgtacttggactgcatatcagtttctgatattccataaacatattgctgcatttgcatctctcaagaattagttcccttaaatcgatcactagctatatggttatatgtcaagaccacataaaaaccagtaaacccacctgatataatattgcccgtcttgtgttagttcctacatatttttctattgtgatgctgcatatataaacagcgtgagacataatcactgacaagtttaatctagacagttatacatcactcttagttgttgttaccaaataactctactaccataattcttcaagaccagtcgttagatctctgacgtctcaaccaatactaaataacataggtcctcatgaccaatgacttgatctctctaccaactcactcatcggatcgcttgctgcaaccgaactgagaatacagcacccaactttgcgatataaaacggaagtcgcaactgacacacagatttaacagacgcatgccata

SEQ ID NO: 58550 - DNA, 967 bp, Arabidopsis thaliana landsberg
aatctcgagatcgaagtaatccgttcggctgggtttcttgtctcagtcattcatggaaggtatgcaacacctacgcaattagaatcaaagtcaccttgtgcactcagtcttgagtttgttgatcttgtaaaacatctttacctttacacagtagttaatttgacgatgtgttgggttatatgcagacatgatgtgattgctcagatatgttacgcaagaagactggcacagaggctatatcccgttgctagaatggtggatcttcatggaggtcatcttgtaagccacgagagaacagaagaggtacttctgtcgaatataacttctctgtctctcttgcgtctgatgtatataagacttaatatctaaagtctttgtctttccttaatccctcccatctgcagtaaatgttaatgaatgtcatactcagattaccgtaacttaacaggaaaaatataagacagaaatagaatcagactgttctgaaagtaagaataagttgactatgaatttgattaactgatttaatcatatatggagaaagattttaaaggcaacctttttggacaaaacacttgagtgcagtagaaactgatcaaacattgtaagggatcatacggtatgattcataccattacttaaacctcattgttagttgtgatagcaaactataaagactttcaggctctgaggtcttttaggaatagcattgctactttgtggaagaaggaacacattttccttacttttgttggtatctctgtattttcaaaacctggaaaatagattaacataccttcttgtcaatttcaggttaataaagctcttctcgagttaatcaaggcgtcagaaatgaagaaaattccaacagattggactaacctcaccatggaaacacctggtatagaaatacacaattggagacttacattgattggaattgtgttatccacttcacaatacttct

SEQ ID NO: 58551 - DNA, 464 bp, Arabidopsis thaliana landsberg
ttcctacaaaaaaaggcaaaaaagtggggcaggagagtttttttgtcagaaaatattttggcgagaattttttttgtcagaatttgttattgtccgatatagtttgagggaaaattcattcactcattttggacttaattatttttcaagtaggggtaattgatcactaaatattaaaaaagggcatgaatgaaaataaactacataggatggtagtattgaaaaagaatgtcaatagaagggcattcctttgcggaggtcatcctagagaagttctctctcatacacgcttttcgaggcgccgttagtttttttcttagagatggtttttcttcacatgcgaagttcctctggcttgcccctctcctaatcgacgacggctctcactctttcaggtcattctcatcagttaccggagttcattccggggtgttttccagcttttctccggagtgcttccgctt

SEQ ID NO: 58552 - DNA, 535 bp, Arabidopsis thaliana landsberg
caatttgaccgaactttattggattggtcaagtccgagtaaaacaagaaggccattatcattcactaagtgacatatgtatactttaagtctaatcatatctccattatattcttatttgtatttcatatatcgccaagtttctatgctatggtatggatctaacctttgtcttctttgaaatgtcgtttattgcattttattttttataggcatacgtttaatacagtatatatatatatatatatatatatatatatataattgtatacacatttattcatggcttactttgtactttttattttattttcccaagaatacgtatagatggattctagctaatgttgttttatgtgaatccattttaatactttttggcctatgctaatattattctacatctacatatgaccacatgaatctttgcgttataaatatgtggatgcatctagtatatgcacacaagcttatgctggtgataatttttaacgcaagttgcttacttgttggaataaaacattggtgtagatcag

SEQ ID NO: 58553 - DNA, 1189 bp, Arabidopsis thaliana landsberg
tgatgaccagcagaattagttgcaccgtctctatcatatcatgtgcatgctttgttttgcacctttcggtgagataattttttttttttcaaactaattactcaactatcacctttttagtaacttagattctaaatttagtatgactgaagcattaatattgtacaattttaataactctggtttctacatatatgtttcgcagaaaattgattttgaaaggagaaacctccaattggtttgttgtttttaccatactaaatattaattaaaaatgttatagatcgcggtctaggacatgcatggtcacatatccactaacatttgttagtgttattattatttttttattttaaattaatctacgtcacatactcgattttagttgtgagctgcaaaagtctcagtgattgctagtaagaaaaagtttgttcatctgcttttggtttggtccattatattgaatcattaagcgaattttgatgatacattgtgactactttgggttacatcatcatttatcttttacaaagggtttttgagtgtgactttatgatgtgtcaccaaacctcttatgacccattcttacggtgtagcaacatttcatttgttgagtatgtctaaagttagagcagaagaggaacaagtccttatctccaaatatgaaaaaaagttttgaaaacttaaatgatgagagagctttagttggagggtaagtggacctaactctactaactccaacatacccttttgtttccaatctctatatatctgctcacaactcacaaggaattcccttagttacacaattttaaaataaatataccgttacacaaaatacacaaaaatggcaaacttgtgtacacttgttggttttcttgtcatcatcttcttcaatgtgtttgcacctgcctcttctgccagtcaccccgtcgaatggtcgctcgggaaagactatagctcgttggctaccggaaagtccttcgcggtcggcgataccatcggtatgtacatatacgttgtctgtcctatacgtagtctgaaattgtttcaaccactaatacatgcttttgattttacatgtaaatttttttacatttttttttaaaaaatgattttttgataatattgtgttgtaaagtacgtataatctgtttgtgtttgccattaacaaaatgcttttatactt

SEQ ID NO: 58554 - DNA, 294 bp, Arabidopsis thaliana landsberg
ctgactatgtcccaaaaaccctgcataaaaaaatacatgaatgataaatcatacccatcaactaacaaatatacttactagatacatagggtgtaataaaacaaatctaccacctaccaaaaacaaaagtatttcatgatcatcatgatccttaacccctttgacattaatttttatatattaaacaaaaagtaaacatctgataaaatattacatatataataaagaaacaacctatgcctgacgaacgggaattaaacctaaaacctaacaacttcttactaaatagaactt

SEQ ID NO: 58555 - DNA, 861 bp, Arabidopsis thaliana landsberg
tgtcagttatatatataatactacctacacatactgtgttaaaatcatttaaaaaaaaaaattatactccttaagtcttaactaatatactaatataacttgtaagtttttctttcgattaaataaactacagtaatatgaatgattaagattttgacaaaaaataatctgcattaaaattctataataaacagtttattaaaattttagtagaaagttgaatggtaaaatgttcttaaaaaccgtagcaaaaagctgtcgttgtctctgccacgtactcacacactctgtttctctcaaacatatcacatgatgacttcatctccctccactgtgcttaatcaccctactcaccagtcaccaacctctcttcttccatacccgaattctcattttaggatccgacccggtttttgtaaccttatgaagcggggcaagaagaactcggatgcgggtgaccgactcaccaactcggatactcgaaccgggtctagcgaattgaatgcgatgatgaaaccaagtttgagttcgatgaaaacgatgggtctacttctggcggttcttatggttgcttcggttatgttctctctgtccgtggtgctcagagacccaccttccgatgatgttattgagactgaagcagcctctagagttcttcagagcagattgcaccaaggtaaatatttgatttttactctctttgtttgagactacatttagtggattatctcaaatgtcccatcataaaagttactttatttacgcatgaatcgttctccaaaatggttggttttgttaaacacaatgaatcttgcatgtgtttccctttttcttatgttgcattagttacactctttggtg

SEQ ID NO: 58556 - DNA, 611 bp, Arabidopsis thaliana landsberg
agtttgacagccctgttactgacatgaagaagggaatcattcctcccccgtgtcgcatagagtatcatcaattggttccatacttcgtattgagaatgatcaatttccagcgttttttgatattccttcaaggcgctgtcgggcatattactctggaaaaacatatccccgtaaagcgcatgtgccttcgggttatcggggtgggcatttacgataaggcggcataaagtgagggcttcctctcttttggtggagtctatctccacatattttaaatagggatacacaaaagcaatttttttctcaatatcaaaatgcgggttgccaaatgctgatgccatgtaacgtttaaaggcgctgtcattcccttcctttttataaaacagcccgatggcaaccattgcctgggggttatcggggtatttgtggagtaacgactggtaaaccctgatggctttatccggctggttattatccgaatatacctgggccagcaacccatagaatcgggagttgcccgggtccatgtcaatcagcttttgaatttctgaagccgcggaatcaggctctcccatctgaagaaaatgcgttgttttgggtaacgaattctt

SEQ ID NO: 58557 - DNA, 335 bp, Arabidopsis thaliana landsberg
ttagctaagatttgaacgaccagaacatttaggaggcgggaaacatgacaaaaagcacacgacctgctggtgcgtgaccaagcgagcagacacacacgagcgcgcgctacactcactaggcatctagcgggggaggacagcgtacaccatccatacactaactgcctgtccaaacagactagaagagcatgcctatgagcacggggggacacacactgcacctagccaatgacagaaaaagcgagtgatgtgcaccacgggatacgaccggataactagatccatatcccattataggagcacgcataaagatcgacatactactatgcagctca

SEQ ID NO: 58558 - DNA, 674 bp, Arabidopsis thaliana landsberg
  unsure (1)..(674): unsure at all n locations
cacaggctatctattaccaaaggaatgttaatcttattaatttttctcctcaaagagtagaggagattatgaagatagttggtgaggcaagaaccattccaaacctttctcgcccggtcgaatcgcttggatcagataaaaaagatgatgatgaagaagaatatttggatgctaatgatgaagaatggtatgatgattacgcatagacaataaaaatgtattacatgttgtcaaattatgaacggtacgaacatgaacggtacgttcgtatttgtaattatctatatgaatttcggtttttctttttcataatcaccaaattagtttaaatgatatggtaaatgtttttataattagtttaaaaacaaaataaaatagtttaaatgtttcgattttaaaaagggtatgtattacggtatggcacttttattcagttatgtttaaatatattggattaagaaaacgaattattttttatttttttttgaatcatttatatatttccttagaacaacaaataaagttaagcgattatggatagttctctatctatntccaagaacttttggatttttttttaatatattttatctggaattttattgggctatattttgatgttatctttcgatctcctttatatatataaagaatgactcatctatcaaaaaatc

SEQ ID NO: 58559 - DNA, 131 bp, Arabidopsis thaliana landsberg
ctatctaccatacgctgaccaaacaaaagggatgggtcaggattttacgataagcccatcgatgcctatataagagaactgaaatccctataagagactacggacatatgggcgcctgatatcggacagta

SEQ ID NO: 58560 - DNA, 436 bp, Arabidopsis thaliana landsberg
cgctcgatgatcagcgcttgtgccatgttatgaaggaaagttgcaaactttttgaaatgttgccattactgcttgatgctcggttagattgcgacggagcaaactcatatatttgcaatttatactgggctcctgaacaggattgagtcttttgcttataaatgttgaaacctgaactgctgtctgtgagcgggtattctgtgcaggagatggattcaacaaatggtaacggagctgatcttgaatcaacaaatggggcaaacgggagtggggttactgaggcattaccacctccttcaccagttatacctccaaatgtggaaccagttcgtgttaaaactgaacttgctgagaagaaggggccagctcgagttcctatggctcgaaaaggatttggaacaaggggccaaaagatccccttgttaacaaatcattt

SEQ ID NO: 58561 - DNA, 593 bp, Arabidopsis thaliana landsberg
  unsure (1)..(593): unsure at all n locations
ctaatttcatttgactgaacatcaaaacgggaaggggtcttcttctacaaaattggcattcgtaattatcttcttgaaaacaaaacaaaatatatgcaccaattttcatttgtcacacgttgtaggcttcgaatcgtatgcattttataattttacttataaacaaaagtgacatcagaaatagtatctcctatattataaaaatgaataaccaaccatcttcccactgctttcccaagtcttcttctttgtattccttacaccaaacaaaaaaaaaagtcttcttatttcccagttgagcaatttccctcccttttgctatttaatttgttcttttagtaatattatcaatgcgtttatctgacttttattctcctccatggataaaataaagatatcccacttgaggaagaaaatatcttggaagagttaaccataaatcagaaaaagatatggaagagaacagctgtgtatctttgagaccaagtcttgagaagcagttagacaacatggacggggctggttgcattcaaaatctttctatcatacaacggaatannnnnnnnnnnnnnnnnnnnnnnnaaaccatatgc

SEQ ID NO: 58562 - DNA, 1098 bp, Arabidopsis thaliana landsberg
tgatgtttcttgctttgaaacgaaaatataatcattcatctggtcgtgtacgtactatgccaacttccatgaattttcactgattaatttattacagttctcaactatcttcaggaaattcagttcgagttgctaaagaattgggcatataatttccacgaaacttagcatttactatattatttaacatgacttgactatttatactatatatgtgtaatgtgttcccacctatcttttagggtttaaacatttttgcatgccaaaacagttaggtgtggtggaagctaccatatgctcttaacatccatcttctagaattataatcttcgattgtaagcgtgaacattttcatttttatgaaatatttaaatttttagcaaaacattaaattggcatatgagtttctttgtacatgttttgtaagctgtacttttaaagttgtggacaatgttacaatatttcatgtacagtttctttatcttcatgccgtggagttatgtttttactttttaggttgtgcaacactgaaaaataagggttctaatataaatggattcatattttaaaatccatttttgtagcatgtagagcggtaagaactattaaccaagctcaaaattatgaaaatttgtatttgctgcaatgttgaaaatatgatcatcatattaaaatatgattattaagaggttcatattaattcacatttccacaagtaatgtttattgttttggcacaatggtgttagatcttgcgtggtgtcctggtgtcctaatatcgtacatgtataaactataaaagtcttccaccataccaattaattaatgtttaacttgttaatgagaagacaaagttgccaactaaaaggtaaccaataactaatttaaaagagagtagtcttggtcataagtcataactcataaaaatgaagatcacgaactgatttgagcatttagtgggtccttgatggttatcatcgagatgaagtgaatcttgtcatggccggttattatactcataaacactaatgatatatttgaaatagtagttaaattacatttcatgtgggacaaatatgatgacggtataattatgtca

SEQ ID NO: 58563 - DNA, 558 bp, Arabidopsis thaliana landsberg
ttttatgttgatgttatttttgtgatgcattttatgtgagggaagaaatcacaccttaaattgacctcaaattactaatataaatataaaacataatatgagaaaggaaattttcataaagtccttcctttcttccataattaaaccatagggagaagaataaataataataatcagtaaatagtattattgcaaactgtagagtattattcatatcataatttgtttgatccttgaaatctagaatttaaaataagaatttaaacatacattgaaccctgaaaatgggaatttgaaaataaataagaaaaaagataaaagaaaactcacctgctaaccgcgccatgggccaaaatcccctcgacctggcccatttaccatctcccccaacccgctctacccggcccatgtactcctaccccgcgaccactgctccttcttgcctctcccgtatcgcgcgggtgccgctcccaagcgtctagcagtggagccgcgcgacagtccggtcagccaccgtacgccacgacgctcccttctggtgacgcatgtgtgtgggac

SEQ ID NO: 58564 - DNA, 1735 bp, Arabidopsis thaliana landsberg
caaagtcctgaatgcaattaggttcgggaatttgatatgtactcttcttgttgatgtacccccctgaaaaaaagaatctgtttccgagattacgaaatgctttagtagtgtgagttctaaggttatttaccaatggttggacatgttgttgtgtctccttcatcgagcgttcagctccggatgcacaatgttcactctagtcaaacaagctgcttctccacaaatcctcgtgtaaaattttcccagaggtttgatctcaatatctcttctttaacatatgaaatggtttagtagtaacaatgtatcactattgtgttaagtcatggtttctattttgtaggagttgcaagatcgtatcaaggaaagcttacaaatttaatgtttctacttccttgaatcttggatcgtcttgttctcagggagattctacttgtaagtgtacttgttttgcttctctggcggattttgatggtgttgctggttctggttgggttcctattggtgaccaagttctcttgacggctagtatatttcttacgtatatggctggagtgattcctgttcaaaaaacctctacctactcttcgggaaagagtacgatcgtggaggagataccagaagttggaacttcaaaatcttctggtaggtaagagtaatcatctgaaaaattccatatgtgaatgatatctctgttccattttagctttaagatatcaataaaataaactgctgtgtatttacacacctcctttcttctatgcattgactttagggagacagattttgagggtgatttgaagtctgtatgggatgtggtgaaagtaaagcttttagattctttagacgccatcaagcgtgagaatacacttggaagcaaagttctcaaacccaaacctccccaagggaagcccccattgagtttgtatgcgatatctgaagggcctcagttgtacttgctctggtcatgttttcagaaacttgaagaagaggtcagcttttaccttctttctcctatagttcactttgcgcttatctgctttcaaattccaatgatttctaattctagttcaggggcatatatcaataaaaagcagaatgtgcactttgagttaaggaattgcattaatgtccgttctagtgtagtagaaacctgccatttaaaaatctttatggtaagaaaatttgattcacattacctgtggcaagaacttactgattcattcgattgttttcttcctctctggtagtaagatctgtttattctctagccttagtagcattcaagacattagttttctttgattcttcatacctgctgataagctattgaatttgctttgcagacaaataagatctctggcacaatcaattcagatgagtggatgggtagttttactcaaattgttcgagaagcatatcaagcagcatgcacggcttggctaaaagaggaactgtatgtggaaaacactgattctgacaatgtaagtcgatatcacataacgtgttcgtcattatttgattagcagatttagatatgaactccagaatctagcccgtgatttgcaggcgataactcctttgctgatcagaatgctaaatgaaaaggatgctatatttgacaaaataagaaaatcaggcaaggaggatctgtttgcagaatttttatatttccataaatttggatctccccggaaagctttctgctatgacttgagcttctttcgcactcacggag

SEQ ID NO: 58565 - DNA, 666 bp, Arabidopsis thaliana landsberg
aagcacagaaagtttatagcctcagcgttatagttgactggagtcattttcttgcagtaaatcattctttcattgttgtctttggattttacccaccagaacctctagtaacactaataagtaattaaaagcgttcaatggatgtttcaaaaccattcaaggcaatactattttcttatactcaatacgttgaagatagattctgtggggacttattactggatatcatactagatcaaatcaaactctttagactaagatgttaatatcatttcatattattgattatttgctagtccaaaacttccttttttgtttccttctttgtgaattttcttggttacattatacactttttaatgttctgaagaaaaacagcttacattgttatgcaggggcatttttgtaggtaaaaacgctgaagaaggataaggagcatcctttttcaacacaaaaataccgtcactctgtaccatccctccccaaagaagatcaagagaaagatagaaagaatcccaaaagattgaaaacaggttctgcaaacaaattccatatatatgtgcatcaaatcagcttgctggatagaagttctgctgctgcatgccttagatcttcgtactgataacatccatcgaagaattctgcaagcttcattagttcttgatc

SEQ ID NO: 58566 - DNA, 127 bp, Arabidopsis thaliana landsberg
ctatctttcatatgcacacacagcaaaacttaggggggggggtcgttcgataagccggtcgataccagtccaagagaactgtaagcgctaagatagatagtagacatcagggttcctgacccctacc

SEQ ID NO: 58567 - DNA, 218 bp, Arabidopsis thaliana landsberg
ctattttttatatgcctacaaaacaaaacttatggggctgggtttttttatctgcccatcgtaccttttccaagatagctacacaccccgggaaagatacctcactttactgtccctgtcctctaacaaaagtgatctttcgttgaccaaaatactatcctttacagtcccacgttactccccaaaccatggacatagctcctacgaaacaatcctat

SEQ ID NO: 58568 - DNA, 160 bp, Arabidopsis thaliana landsberg
ctatcttctatatgcacaatctacaaaccctatggggcggggtctttcaaaaagctgataacatcctcacctagagaattgcattacctattctagattaccgacatccataagtctgatatcgaactattgtgtgcggtgtgcgcacgcaggaacatcc

SEQ ID NO: 58569 - DNA, 505 bp, Arabidopsis thaliana landsberg
gattagaatggtgaacatcgttaatatggtgcacatcttccacagagcaaaatataattcccaaatccactctccattttaccattgataaaagtaacagaagaatcatgcaatatgcggtaatcaaactttgacaagcttaaaataactcgaaataaagctttaacagatctaacaaggagaaaaagatgaaacataccgccttttcatcttcatctagaaagtctgaaatactttgctttctcgctccagctctgttctgccttgatgatgtaaatgactgtggagcccagcctgaagtacgatttagattgtaaacagcatagcacagataaaaaagcctttgaaaatcaggtaatgtaaactttaccctcttttgatccaactgtattgtaatacccagcagaatatccaccagtaaatgctccatggaaccttctacggccttcttcatcagtcacctgagtatggtaaaactcgagatgttagcaactttccacataat

SEQ ID NO: 58570 - DNA, 137 bp, Arabidopsis thaliana landsberg
ctatcttttatatgcccaatctaaaaaacctatggggcggggtctatcaaaaagctggtaaattcctatccaagaggaatacattacctgttgtagattacagacatccataattctgacatcgaactatagtgtgc

SEQ ID NO: 58571 - DNA, 1678 bp, Arabidopsis thaliana landsberg
tcataaaaagagcaaaaacatgttatggttgctaaaaatgctcacaactcaagtaacactacaatgtgctttttttttagtaaaatgttaagttttagaacatctatgaatttcttttaccgaatacagagataacagaagatcgaattctatgcaacactacaatgtgttattgttacaagcctatttgttcacaattaggtaatcttaactcattcactttacatagtccattgctatttttgtgccattgttgtcaaaatttgacagtcttggagtcaataagacagtaacactatataatctacaattcgattcaagagacctaattctaaaaaaaatcaatctgttatgtgaaaaatataacagcaccaaaaatttttaaaacaaaaacgttccgaataatgaatgagtcaaaactggcgttacctggaaagacagagaagagtaggaaaccgaggaagcgagtgattaaaccggaacacaaagatacaacgccacgtgccaaaaaccgacccttccgagatctccggtcgccggaaatcttccgaacgaaacagaggcttcgctttcttctctacataacagcttttgctcttgaaccagaactctctctcaatctccaccgattcatagacatgcaaactcctcaccatctctgcattaacaaaacccatagaaacaaaataaaaaccatttttcaatccgacccgagtcattccgacccgattcgagattctagtcagagttttgacttacctttgcggatgacgctctggaaaacggcgagtgaggttaaggaatgtgccatgtccgaagaagaccaagagtcgcaaaagcagaagcccaagattttaacataaaaaagttttattaatatatttttctttttttccttttttagtgtgaaaaatctgcagaagaatccaaggttttatgtacttgaagcgtttgtcattaagtgaaaaggctccaagaaaagtaggttaaaattttacccttggtccaccatcgaaattaccaaaaaggcagaatattccggaacgcacgtgtaggcaagcggagcgtgcgagggtagttatgtaaaattaacagtgggaagcgggttgcaccgaaccaagcccatgtagctaaacactcacacgcgcgacgcatgtctgaaaagtggtaattgaattttgtttagaatgattctacagaggttgaatttggtaaatgaatcagaggaatattaagcatttgagcataatttccaatttggtcagattatgatatatgtaaatatgtccatgattcattttctgtttttgggttctctttgttcatttattaagtcatgggctgaagttttcatattttaagtcatgggctgagttctcaaggactaaaactggtattgatattatgatctgttaaaagccaattcatttaaggtgttcaaaatctaaactgaataattgcgttaaattaagccggacatgtttcaatcaaaagtcaatagaatgtgtcaaaatactctgggtacttgggtagtattagtaacattaacttacaaggatttttctctatataaaaatacagagtactagttttgattttatctgagtgagaactttctaataaaactctaatcgaaaacaattaatattttgtataaaatggagtgtagaacctaaat

SEQ ID NO: 58572 - DNA, 1316 bp, Arabidopsis thaliana landsberg
aaatctgaacgagccacctttataagtaattagatgaagaaataaactcaatttgaaaagctacatgaaagctaatctctgacttgagaagttgagatatttggaacctttgttaattctttcaacaccgaaaacgatttcttaggaaatttcaaaagaaataaaagtaaagagggcaagtattctgattgttaaccaagcacaaaatgaagcacccatcaatcaatcttttcaacaatcaacataccgattctaattggtctggcagaataattaccggaaaggaagaagaatagaactccaatatttaattatcgtacttaatctgtttgttcgagaaactaaataatgggttcctaggtatatgtatttattttatacattatcttcacatgtaacgtgcctatttaacgagaatatgattcctatgattcatgcacaaacacaaatcaaatccgggaatttaagtcggatcagggaataaattatacagcccacacacataataatttaaaactaatatatacacagtgaggggatttaaaagtaaaacttatctccaaagattaatgtaagcgactagtgattgtgttggcatattaaccgcacataacattgtttgggggtttggatgctttaaaaaaggttctgccttagaaattccttttagttgacgtaatgatatattattgcttactgtaatactagtggacacattaaacaatgatcttaaagtacgaatgaagaaattaaagaaaatggaagaggaagaatgtggaaatggagaacgtaagtgaaagtgattggaaactaatggaatatccgtttttcctttagtcatggtggaagctgacgctgagaacctacccctccaattgcactactcgctctattactttatctaaccagaagttttttaaataccctttactgtatatataattcttatatgtgttttatacatattgctaagaattccatatatagtgtataaatggcattgaaaatagttttgagttgaaactcctaaatgatattaaatcttgagtttaacctaattaagcaaagtaataaaaactgattagccaaaacaaagaggttagttagttcaacagttaggttaatgtgcaaattgccgtaacaagattattaaataattcttaactttaattaacctctatccattattgcatttaaaagatactattaattaaaagccaccaataaaaatttaaactttattaaagtactaaagacggatatatatattaaacaaaacaattatgaaaaaaatacgacaaccaacttaatacaag

SEQ ID NO: 58573 - DNA, 537 bp, Arabidopsis thaliana landsberg
tttactttttcatccttttgtccatccattgagggggtggggaatttaaaatcaagatagctaaactctactcccttttttttacagtgctggcaacctagtagatgcacagagactgcgttttgttgtagctaacgagactcaaatgctgcatatatcgctcgctcaccggagttgtgtttttgtgtttggttcacgcatgaaacatgtgaaccatgtacaatatatgctagccgcgcgtacgtgtgcctaggcagagaaattccactagtagagtggtgaaacacacactgttcacgtctccatcacactccattataaagctagctacccggggtgttcctcttcgcaatcacctgaggaacctctccagccccaccggtccaccaccggcagccaccccacacacacactctctgtctgtacagccagcccccaacacgacgaggcaggaaggcgccatggccaccacccgcgaggtctgcagcagcgccgtcgccatgttgcacgtctaccagacgataccgatgccgacgc

SEQ ID NO: 58574 - DNA, 759 bp, Arabidopsis thaliana landsberg
gggacacaacatcatcgaaaattattgttcggtccctctgacgtgaccattaggtgccaaattaatttatgatggaaagacatgtactatatcacgtcaaatttattctactataaataaataaaagtgaattttaatttccttttcttctttgtaattgcgtcaatactcaatatcatctgaagactaaaactgattacaaaccatgcactcagctaatgggcccatattataaaaggcctgtcaatgttcattttttttttgccaatctttttcgcaaataaatttatagttatttttaaaattaacaagtatattgattgaagtatcattgtatcaaaggttttgaatgagagaccttctcaaccgctccaaccacaaaatatcctcattataacactaaattaattgctgaagtttattaaaatttgaacactttgtatcaaaaatgaaaaataataattgaacactaaattaattatcgataaagaaaggaagaaaatggggtcgaaatgtcaggtgggaagaaactgaatctgcatcattgtctcattgaaattctgttgtcggccaactttaactatgtagcccatatgtcttatgtactcatctacactacacctatagtttattttggccatgtacatatgaaatatatatatatatatatatatatataatatatataacatgatatttattatatactaaatatatattattatatatataatatatatcatatattttattatatta

SEQ ID NO: 58575 - DNA, 935 bp, Arabidopsis thaliana landsberg
aaacatgttatagactcggttcaaggtgctgatggatcactcaacttgacgtccctctctcctcgccctaggcctcaccaaatccctccaatcgatatccaattagcaaagaactgccctccaacttctacatctcccctaagtaatctccaagatgtcaaaatcgaaaacagagatgcagaagacagtgcaggttcatcaacatcgcgtgcttcttgcaaaggtaaagtaaagccttttatcatcatcatcatttctgcatattgccaaatctcaatatccatcaccattgatctcatctgtctcgtgtttcacagtgaatcctatttgcgagacgcgttttcggcttcctacacacaaccaagaaccatccagacaagtggccttggacgattcggatagtagctctaaaaacatgacaaatttttgggcacacttaacctgccaagatacagcttctccaacaattctccaacataagctcgtgagtataaaggcaacgtacagagaagacatcatcaggttcaagatctcaccagagtcggtaagcattacggaacttaagcagcaagtggccaaaaggctgaagctcgaaacggcagcctttgagctcaagtatctagacgacgatagagaatgggtctccgtctcatgcgatgctgacctcagcgaatgcctcgacacgtctgcagcaaaagcgaacacactgaggctctcagtacatgacgtgacttttaactttgggagctcatgcgaaagctcagaggaaactatgatgtgcttgtgacaatgcttcacttgtatacaactttcttgtatggatctgagagttttgtttcttatttttctctggaaacatgtcttctttagaagaaggttaaagtgatctatttttttataagatgtataaaagcacacttctccgcatcaataga

SEQ ID NO: 58576 - DNA, 1590 bp, Arabidopsis thaliana landsberg
tgcgacgtacataaacatgaagagatgtctctagtaatatttttttagtagcctgagatttacagttagcaaaaaagaagaagggaattgtgattttttggtgtcctgaagctcgagagggtgatgattaccaaagctcaagactgagaaactggtttcagagacagattagaaaactacggagacagtatcttactagaatcgtttacaaggaagaaactccgctcaattgttaccgataaagctcagattcagctatgccatggagatttgttcaagtggatacaccgaataggattcacattgtttgtaacactctacaattgtcactatttttttataactctaaacaactttttgttgttcttttacacgcattaataacatagaatatatattgctgcagatatcttatccagatgttgatgaaagggatttacaagatgtaaatgcaagactgtgatactactgtttgatcgaaaaactgttgttgactgttttgttaagcgatcatcagatagccataaaaatcttagtagttagaaaagtcactatcgagccaccaataaatggggattcgtggctaaaattccactgattaggcaacaaaagtttggggctttatagccacaccaaaccctatacatatgtggcaagtggttctgtaaactcggcaaatggcctcctatatttggtgaccacatactacggacgttctctagtcgctactagtatgtgaccaaatggaaactagcttggtcatgcttatataggtagtaaatgtggtaaaggtcatgtgaattcaatgcctaatagccacagatgatgaccaaattattatgaaaccgttaacaatccatggccaaatgaaaactagcttgttcatgaatatattttgatggtcaaatataaccacatttttagtggctaatgactattaagtagccactaataatatgtgactattttttttggtcaacatattttgatagtaatttgccatttggaaaaaggttgagaaaaacatagttttttgtgttgcaattgatttgataatcaatactcttttggtgataaatgtcactaggttgatgtattacatatttgcaataaaattttaattatatgaatacaaattaatatattccaatgaaaaataaagatatataagttcaaagaaaaacaaccgaaccgatcttctaaaatacatgaattgatcctaaaatgtagaaccaaaaattttggaaccataccaaaactgaactaaaatattcgggtacccaaaaaatcttaaatacctataaatattagtttttctagaccaaataaccaataatatccaaaactcttaaaatatttagaaagaaatcaaaaatagtaaaacttgaaatatccaaaaaaaaatagtggatcacaaaatttagaactgatagaaccagaaccaacccattttttttttatgcctatatagatcttaaattccagaattaaaaaactacaatcgaatgtaaatgaacccaatatccaaacatctagaggatccgtaaaaaaaatctaaaattatgaaatacatcctctaaaaaaatttca

SEQ ID NO: 58577 - DNA, 1266 bp, Arabidopsis thaliana landsberg
aaacctatccatagtttgtttgttagaaaataaaccgaatcaaaccggtaatctgaaccgaaaaatttctgtttttccaagaaaatcaactatacctgcgaagctgcgaagacgtcgttcaaggtgagaatcggataccctgaagtccggttaatcacatcagaaacgacccgacccgaatcaagatccactgttatctcatgtgtttgaccaccccaataagctacgaccgcagctcttcgtgacagaagcttatttcccttcttccactggacgacacgtgtcttctccggctcatcgagagccatggagtgaatcgtggccgacccggaaccaaaacccgggtcatgattcgagagtattgttctgactctattgatttctcgcaccgttagtggatcaagtggatgatgaggcttttctaaagagtggtcaacgtggacttgacgattcgagccgagagttttccggacacgagtaccgaacaagaagcctgagtcgggtccaaagacccaagagtaggtggcaaagataaggagaaagctgaagaacaagagagagagacgagcaaaagatggttctgccatcgtttgtttaagtgagagtttttgactatcttttagaaagttacttataaaagctgagatgaaaaaattacttagtccagttaaacaacatgttaaataagaaataaacaataattaacgctttgtacgcttgatcgcatctatgagatattttactaatttattctaaccatgcaataggtttaggttatttgttttataaaatgttcatgtcattacaaacgcaataaactaatgtaggttctcaaaaaaaaaaaggttaagtttggctcgactatataagatccctttagctttttgttgggatcagaacttaacaacgaaactaccctaagctagtttgtcaacgtaattaaatattggtcaagtttatacatgatgtatagagtttagtcaagttacgatcgcatctagagtttaccaaattaattaaaaatttacttagactgtgtttgatcgcatctctaaatatatttctgaatggtttttgaatttttgatgaagtgacaacttagatggtcatagaggttatcattcaattaatacactatttaaatactatggtatatataagtttaatttagttcttacttgaaagttgaaacttaaacgtggagatttctgatgccaaaagatctcttacctcctaaattcctaaacgaaacaatatttgggtctc

SEQ ID NO: 58578 - DNA, 182 bp, Arabidopsis thaliana landsberg
aggtgggctgccaagaacgtgcaggaggcgggagggtcaaggattcacacctagtatggatcgatcctgtacagaactgggagactgaggatcctctaactgtccctgtccagatatggaaccatgttgccgaggagaaacatgttctatgaatccaagatcagactctatgtaaatctgga

SEQ ID NO: 58579 - DNA, 324 bp, Arabidopsis thaliana landsberg
gttccctatccgatccataatccaacatcatttttaactagtaccctaatcatgcttgccttgtattggagctggctacaattttaacaattgtctccttaaaaatcatcatgcttaactaaaattaccagaaaattccttcttttaaataaaatagcagtgatatatattaacgtttcctccttaaaatcagcatgcttaaccataggcaaagcctatactattaacataaacaaacagtcctcaatagacacacattataggaaatttcccaagtaactaactgaaactcaactacaactagagaattaaacatgatattct

SEQ ID NO: 58580 - DNA, 142 bp, Arabidopsis thaliana landsberg
ccctaccaagggcggcaattatgtagggatgtgttatatattttgtatacagatgcacattctccgtcattctcaccaaatgtcaatgacttctgtagccataggccatggtctatcctccacaccacaattcgaacacata

SEQ ID NO: 58581 - DNA, 267 bp, Arabidopsis thaliana landsberg
atgcctccgaggaatgagcgctgcaagacttagtgtgccactttcacatgatcaaactccacatgttgatcatatgctggagtgaactctactaatttgtattaagaagatgttgtaagtcaaatacgtgcaccggttttctagtacaggatattgccgatatgaccggtgttccgcggatggtcctgaatgataatgacggggtggccacctacaaggagaggcttcgacctactgcgaagagctaatcggctgtggtgagaattg

SEQ ID NO: 58582 - DNA, 506 bp, Arabidopsis thaliana landsberg
caggcggccagcgcggtgccattgcccgggtcgccgggcgccgcgacccagggcgatagcgatgcgcaatccacgcgcagttcggcggcgtacgcggcgccggggtcgctgcgcatccagggctcgagttcgaatgcgatgcctcgccgcgcctgcaggaaacacagggtttgcgcatcgggcgcgacgatgccggtcagcccgcccagttcggcggtcatgttggtcagggtggcgcgttcatcgatcgacagccgggccacggccggaccggtgaatgcgaagactttgcccacgccggcgccggcgcggatctgcggcagggccagcggacgcatcacgatgtccttggcggagacaccgtccggcagagcgccgtccagctgcactttcaggcattgcggcagggtcatccgcacggcgcccgtgacgaatgcgttagccatgtcggtggtgccgaccccgaaagcgacgcattccaccgcgccgctgtgcggagtgtgcga

SEQ ID NO: 58583 - DNA, 473 bp, Arabidopsis thaliana landsberg
tatttctgtcttcttcattcttttttttcttctctatgttgtggtcattttttcttctatatattcaaaacatgttaatgactatactaaatcaatatacaataatgaacttagtaaatcaaaattgatgtaaaacaaaattgtctcagaaaatatatgagttgcggatttttattttattgatttgtaacgcaacttttaattaagtaagtacaaaaagatttgtgatattgcacatactaaataaacttataagacattaatatgtcacagtatttacctttctcactctacttttaatgttttctgtgttttatcgaagtttttatttttaagtagtataacggttctagaaaatgataagagcctctttaggaaaactgaaaaacatattacagcaaaataatatcgttgattgaaagtcccctctataatacatcgacaacccccttaaaggcaatatgagacaacac

SEQ ID NO: 58584 - DNA, 1228 bp, Arabidopsis thaliana landsberg
tatcttatcagttctcatgagatgatttcactctgtaactgtctaatacgttagttatcgtgaacagaacagcattcatctggtgtcttgtagtacttttgttagaaaattgcttgataagtagattttgctctttcttgttctgtgatgaagtatgattttttccttcttgtgttatatttaaccttttcttgccgatatacctgtagttattttttggtggtgtgccttcttcaaatgtttcgatgcccttgagggagattgaggcgaagttgtttgctcttactgcggtgagcacttttgagctcttttcttccaatcaagttatttcatcttaagtttctgatttcagaacaacccagagaggggtacgatcacattgtatgggttttctactgttagttgttttgtctcttttagtgatccatccattatcacttttttttttggagatttggaaatcatagcttaagtttgacagttttcaggagttttagtttctattgttcatccctgtctttattaatggattctaccatttcaggtttctgaaattattttgcaagagggagaggcctttgattttgcattgatcatgcaattgatttctgcattttccgttaggccgtccagcgagctcaaggggtttatatctgttgtatgtcagttcatacctttgcctcaccaacaattttcttgtactgtaaatgcagtcaatatttgacaataatcaacttttaggtatacagatcactggcagatgttgttggctcctattcaagatggatctctgtttttccaagtaacgccagaccgttgctgtaagtctagtttcttcaatgaccgttcacaataatgcaataatttttttagcatattagcttgaaactgttcatatttatttcttttttctgatgctatttttcaatcttgtgtaaggatgttcaacatcaatttctctgataacataagtgctgcatggtctttctggtttcagattatttctcgcaggagggatttccgatcctatttgttcacatgcttgtgcttctgctctgcgtaaaatttgtgaggatgctcctgctgtaatccaggaaacatcgaatttagatatcttaatgtggataggagaggtatcagcttaatcggaccctttttttaactgtcaaagcaaacttcaaattacgctgaaattatatcctgaatcattatatttatatatattttt

SEQ ID NO: 58585 - DNA, 1427 bp, Arabidopsis thaliana landsberg
taacaataaatgtgacatttagacaacactttgtgttttgcacaagttcaattaattacatcttgggcgggtggaaaaaagtaaattcgtcaaacactaacttaattatcctgatcaaagaaagcaaaggtgaagaagaagaggttgtacaaattctgaaacaagcgtctcttaaaacaaatcaaaggtctaaaatcgtaaggtggttttgattattcatcgtgatcccgtacgtacaccacaccattcttacttcaacaaatcagtcaatgcaaagatggcaaacatattttgatcgatcactggctcgatttctcttgcaccaaacgagaatgagtgtttcccatgcatcctccacctgcatagcacggcgcagtcacatttgctaaatacttcctcggcaatgcgattccgaacctctttcctcttctttcttttttctcctttttgacaatgcttccgtcctatagaaatacaaatatatcattgttagagatcctcatagatcaaataatcaataatgtgaattaatgtgattgaccacctcttttatctctgtcgtgacgctttcggtttccatcgactttctcgcgtcttctacatctttttctgcaatagtgaatggataaattgtttcaataacgaaactacataatataacaagcatttcatatataaacatatatatgtctctaacaatgcatgcatccatatacaaatacaaatagtaaatgatttatacatgtatatatgtgtgtttgtataagaacatatgatttaccttcatcatcatcatcagaaggaacatcgacgcaataaaccctaaagcttggagatccaggaccaatcattctctcatcaaagttgttgatactcccttcatcaacatcatgattcttaccatcatctccttccttcttaacattgatgacgaccacatcatcatcatgattttcctcctcttgtttctccacaacatcttgatgatgattgtcctcttcttgtttgttcacaactacttcttccttcacctctttaacatcatctttggatggaatcttttcataaataacctctttcttctcttctacattatgatcaggcgccggagcaaccttagcggacgccttcaagctaccgtcgttctcctccgtatcttctccgtcctcggaagagttatgcctaagaagctctttcttagacaacgtctggctccctttcaagacgcctgcatggctccgtttcttcatctcctctaaccttcgccggagaaggggacgtattcccgctgcaagtggtacaaccccgccttcttccgcccttgtcgtcgccacacctccaagcctcgagccaccgcaacccatattaatatataaataaactaacaaattgatggtgtaatcgccgccaacacaaagatcgtaagg

SEQ ID NO: 58586 - DNA, 1443 bp, Arabidopsis thaliana landsberg
agtaaaaaaaaaaaaaggccataaaccagtaacaaattaagacatttatttttcttgttaacttgacatcaaactttcatgaccgacagttattatatatagcccgcggcctaatcatcagcatctctaccaagccgtcatcgttgaatcgtctctaaaaatatccatcgataaattgattgcatctttgtagtatcatcaaaggccaaaatcaatacgaaaaaaaaagttctctattcatgtgtacatttaggaaggaacacattgcataaattacataaacaaaaaggaactaatatacacgttaaaaataaaccttaaaaaaatgaaaatcaagaagatcgaaacatttggtcgaggatgatggtaagtgccatggccacacgaggttccatctccgattcaacgataagcttatagacatctttgccaaaggcaactcctccgatcaccgtttctttcctcttgatctccgccgttttcttcttgttcctcctctcatccaatattttgcagcttctttgaccgtaagatccttctatctcgtacaacaccgtcttctttgcgctaacccacgccaagcttttccggttagatattatgctaacgttctttctcgccgtgaatattggatctctctctgtttctccatcgtataccatccagcaatctccaagactcaacttctgttcaagtcaattaacaagcaagagaacttaagattagtttcataactattagtgttattttttggccaattattaaggaatcacgtataggtctatcactatatatagatgtttttgttatgaaaaataccaaaaaaaagaagaagaaaaagtaccttgcggcgaatggagaggaggggaaagccggaagcatccataaggacgatgttgtctctaggacaattcatgtagttgtcaactctaaagacaagctctccattggcgttgtaaaccgtgaatccgtcgcagttgaagagaagggacttcttccacaccgttaaaacaactgctgctttgctatcacacaagctctcttcgcatgtgcttgggaattttgggtgaacttttgtcatttctttttttattctctgttgtgtttctttgggctttgatgattcttgttggagaagatcgatgagttgatgatgtttgaatgtgggacaaatgagaggaggtctttgggtttatttatacaaatgtagaaagagagagagaatgtggttctcaaatgaaaagaatggtctctcatcttcttgttttccactagagagatatcactttcagtctattactataagatatcttctcttcaatttaggtccatttttttttatgtattcatgcaaattaatggattgattcctttctataatcaaatattataataacggccggctttcattcacctagactccaacaaaatattatattgaaa

SEQ ID NO: 58587 - DNA, 2041 bp, Arabidopsis thaliana landsberg
tgaaagcactccagcatcaaacccaattgctgctgaaacctgagaggacaacaatggcaaactgaaattgacaatgtgattgcaaatatttaacagaagagtattcacaatggagacttttgagtatttctcacactaccttcaaaataccaagaaccctagaaacatcatgtctcatcatcttcttccttagatctctgcagtacatcagcatcaacgtctcaatatacacctcaacgtcatcacaatctgagatctcaacaatgtacggagaagacgacggcggcagctgctgtttagaccatcgatccgacaatttcatagcgaaaaacctactgtgagctacaagaatctgcctatgaacacacatggtgatactaatcccatctttagagctcagagtcagcttcacatcactcgaattcgggtcattgaactgattcccggggctccgaatcaccagaagatccgaaatccgttgcatcgcaagcgcttgcttatcctgagctgaaataacaagatgattcacattcgtcgtcctcgcagccgtagccgccgcagaagaagacgatgaagacgacgacggagatggaagcacaccgttatggatctgaactggaactttccctatggtatcagcttcactagccatcatttcgaacagcgtcggacttgatcgtgtcttgtcgtgcatcgccggaggcggaggaggagacattggatttagaagacctgccgttaaagcggagttgaacttagtgaagctcgaagggaaagaaaagtcacgcggcgaactgtaaccgttccccgccgtcgtcgtagccgtagagtaatccatgaccggtggagatcctttcggatccgaaaacgaagttggaatcaggtcgggttgacaattcaggttcagacgagagagagtggtgatatcacttcagaagcataaccgttgagaagaagacggaaacaggttcgggtcaaaaaccggaattgaaccggacccgagaacccgagattttgaaggtggttgttgttatgagtctcgtgattgtaggcatcgacagtgccaggagtgataaatgcacaacgcttagaatttagtgcatatttttttcttttttatataaaatgtgtatatattatagttttcgtgatttttcatttttttggcagctacttttgtgatttttatcgatgggtattatcgttatcgctgtggatattatttatttatagagcttcggtactaacaaagatgctcgttctttctcgaattaatcattatcatattaaactttgagtatttaattaggtgtcagcagttccatagagcttttacttttgcttctattgaatttagaaaaaaataaaaaaatacaactaaaattgtctcaataaatttggtttaaaattggattaaaaataataatactaaattagtttgttattaataaataaagatatttttggagaggcaaaaagtaaactgtttttcttgtacaaatttcaacggatttttgtttgtagtgtgggccaaagcccaaatgcatcatgagccacgcacgagattgtgatgacgacttttattttggtgcttctatatactgtgtggagacaatcattctttcaccatcatcaatttattttgttttattccatcatataatcattttttgttagatttaatcatattttatgtttgataatgattggttataatttgactttaaaagttcttgatcactaacatttaatgaataaatcaaagaaagggatgtattatactatagagtgacagctgataattcagtcataacaaatcaagtgtttttttttccactgattagaaactcatgtaaggatataaattcttatggttttctataacaaaatgtttgtaatatgtggttttgttatagtttttactattgtataaggtttggctacattccctcatcctgtaataataagaactaattgggcaccacaaacaatttgaattgatgtcaagttactaaaggtcatatacacttgggtcatagcc

SEQ ID NO: 58588 - DNA, 1293 bp, Arabidopsis thaliana landsberg
  unsure (1)..(1293): unsure at all n locations
cggaatcacctgatggtcgtagttccattgtcattgagctttgcatggtcactgtcgagcagttagattttgacggcgtagaaagcagaaaggtacgaagacgatgaccacacgaggttccttaaaattagggtttttagaggaagaagacgaagagaatgacttgtacacgtgtcaataaaaatcgtcacttgtcagatgtggggtaaaccaaaaatctaaacgctaaattaaattaaatcgaaccgggattgtaccaattaacgaaccgacccgacccggcacaaagcagcaagctttaggtctaaaagattcgaactttgatcggaaaaacaggagagaagtctgcgtttagattcaaacggaacaaaatgctcactaagcttaggattagtaagcttgtttcgtatactttacctcggagaatcttccaacggaggtttctggtaacgaataacactgcagaggagtcgccgattgttgccgcagagtcaccggagctaccgtcttggattaaagactttctatcaaacaagccttcttcttcatcgagttcggtttccaaagatgatgaagattttgttatcccttctttggcgaattgggtcgagagccagaagtttagtcgtcaacaagtctcagagggaaatgtagtgaagaaaccagtggaagatattgataaagtttgcgactttttgaataagaaggacacgtctcatgaggatgttgttaaagagttgagtaaatgcgatgtggtggttacagagagtttggttttgcaagttctaagaaggtttagtaatggttggaatcaagcttacgggtttttcatttgggcaaattcacaaacaggttatgtgcattcaggtcatacttataatgcaatggttgatgtgttggggaaatgtaggaattttgatttgatgtgggaattagtcaatgagatgaacaagaatgaagaatctaagcttgttacgcttgatacgatgagtaaggttatgaggagattggccaagtcagggaaatataataaagctgttgatgcttttttagagatggagaagagttatggtgtgaaaacagatactattgctatgaacagtttgatggatgcacttgtgaaagagaatagtatatagcatgctcatgaagtttttctgaagcttttcgatacaatcaagccggatgcgcggacattcaacattntgattcacggattttgtcaagctcggacatttgatgatgctagagcgatgatggatttgatgaaagttactgagttcactcctgatg

SEQ ID NO: 58589 - DNA, 1790 bp, Arabidopsis thaliana landsberg
gaagcctgaggatttacagctaagtattgtcagtggggagaagggaaaagataggtctgaccgtgagttggtcaccccatggtttaagtttctgtgggagacatacaggacagtccttgagatattgcgaaacaactcaaagttggaagcactttatgcggtttgttttcttctaggttaagcttattggtgatacctctgattttaagttgattgagattgaagacttgtactttataatcttgtagatgacagcacataaagccttccagttctgtaagcagtacaagcgaacaacagagttccgtaggctttgtgaaattataagaaatcatttggcaaacctgaacaagtacagagaccaaagggaccgacctgacttatcagcccctgagagcttgcagctgtatctggacacaaggtttgatcagttgaaagttgctactgagcttggactttggcaggtgcgtttttgttttctatgtgtatttttctgatgctaccttctctattccatatttagtttggctgtatatagcttatcctctgtataattactggaaataagttagtatggttcgtgatgtatctttgcaggaagcttttcgctctgttgaagatatctatggattaatgtgcatggtcaaaaaaacgcccaagtcatctttattgatggtttattattccaaattgactgagatcttctggatttcttctagccatctttatcatgcttatgcatggtttaagctgtttagtctgcagaaaaatttcaacaagaatttaagccaaaaggatttgcagctaatagcgtcatctgttgtcttggcggcattgtccattccaccatttgatcgggctcagagcgcatcccatatggaacttgaaaatgagaaagaacgcaatttgaggatggccaacctcattggattcaatcttgaacctaaatttgagggcaaagatatggtaacataggttcttatgttgcttcatttttattttgcgccctttctttctggtttagtattctaattccatttccttcctgtttcagctttcccggtcagctcttctgtcagagctggtgagtctctagctgttaccctgtctgtggtttagaatatttgtcgacttacaaatatctgatttggaggctgatttttatgcaattaggtttcaaaaggtgttttgagctgtgcatctcaggaggtcaaagatcttttccatgttttggagcatgaattacacccacttgatcttggctccaagattcagcctttgctggaaaagatttccaaatctggtgggaaactgtcctcagctccttctttaccagaagtgcaactttcccaatatgttccttctctggagaagcttgctactctgaggctacttcaacaggtaagccttgttctctatgtggtaggtcaatacccattcaaccattttggatttttctggtggtttatccctttttctgcatactaaatgttctatgttccgattttattttcaggtgtctaagatttatcagacaataagaattgagagtttatctcagttggtacccttctttcaattctcagaggtagagaagatttctgttgatgctgtgaagaacaattttgttgccatgaaagttgatcacatgaagggtgttgtgatttttggaaatttggtaagcctctgtgaaagcttcagctcaacactgattatatcatatgtagttgagtaatataatttttaaccttattgactaaatgcctaatctatttgatcaacctgctgca

SEQ ID NO: 58590 - DNA, 598 bp, Arabidopsis thaliana landsberg
actaaaacctgacgcatgaggatctaacaacttcctttcaccaatttttgtttgttacaaaggaaaataaagttgatctttctttggttgaagaagataatctctggaaaccaatgatgatgcttgatgattacatagcgaaatcgaagctcagtgagagtttaacctctacggtttggttagcgaagcacaagttaaccggcgaagaagcagtgatgaagtgtttcgacctctggaagctcaatcgcaatctccgagactgtttaaacaacgaactggagtttctatcttctgttgatcatcccaatatcattcgtctcctccatgtttctcaagtactaacccaaaactgagtttttcaatatttcttgagtctatgaagaatatgattgatttgttttcttcaattttgcaggatgatgattttctcgttatggttttggaatattgtgatggaggaactttatcatcgtatattcaacgttatggtagagttgaagaagatatcgccaagagatttatgaagcaaattggtatctattgttatataggagaatgatttcactgcatttgcttcttcttgactaatagtgtcatc

SEQ ID NO: 58591 - DNA, 554 bp, Arabidopsis thaliana landsberg
tgttgtatttacaattcataaaattaagggcgtatgtgtttcatttctgatcaaatataaagttacgcagttttcagtgttaaaaatttgtaaattattattttattaataaaatatacaacatatatttaaatatgttatatcgtgtataaaaacttaaaatgactaatattgaaaatatgagaaaatgagtatttaccaagttagtgattatagaggcaaaatccttttttaataatcttccaatggtaggattcctctttttaccgcgtaaagattttaacctaatggtaaaactaaaattttgatatgcccaatggtaaataattgtacgaagaagaacacaaatatagatgagatattataagtttctcgtgtttaggagttgtacttgttctcacatggcaaagacaccaaggtcatgtgagtacatgtgttcactgttcaatttttcctccttaatcttcagtcaaaccctcccttgatccctctttcaaattcacatctacattattcatataattaagcagacttaatcattgaaaaaacaaata

SEQ ID NO: 58592 - DNA, 759 bp, Arabidopsis thaliana landsberg
tctttaattccacaattaaatacataaatattaaaaagtgatatatgggccttacgcggggaaggcggtacgacggtgcttttgacccagtaatttctggatcacgttcacatgccgataattattgttaagttgtttgcatattttattatgtgccttgtttgtgggattttcgctaatttcttttctcgttttttcgttctcctcttccctcaattattttctcaacttcctattcgaccaaagcattaattctacacacgacagtaaaggacccactcaaacaataattagttttcaactctttcagaatatattttagtgacactaaaatagcatatcataaacacaacagaggccaacgactctgaatgatccgtaccgcagtggaaataacagtccggttatgtcggtaggctatataagccactactttcatttcaatttctcaactttgttgtacttagttcgtatcctatcagtttatcatcactttaatttgttaccatatagtatctgtaaaaactaattaatatttatgaatcatgctcatattttcaaatcttagagctactcaacagaacacacacacatacagtcaaaattttatactacataatttttgttttaagtttacagttataaaccaaacaaatcacctcacaaaagtatatagttataccaaaccaagcacctcataaatgaaaacaaaatttagaataataatatatataataaggattattcatcaatactaac

SEQ ID NO: 58593 - DNA, 569 bp, Arabidopsis thaliana landsberg
gcataatcttatttgatgataacataatctaaagtttaggttatgttatttacacatactgtgttatatttacctatttaaattgcctatttcctttgacgttgattattattttgacactgttttattttcttctagaaattggtgtattgtaaaataatagaaaattttaagtgttacgttatacaaaaatgatttaacattataaggtaatagagaatattaaaaaaaaaaaaaaacatatatatgacccccaaagtcttagaaataattgttagcatctagttttgtccaagtaattaacaaattaagaaaggaaaaaacacaagagacattgttctgaatgttgttcttaagaataaaatctagcaaacaatatgccgtgtgtagaaatatagaaggttatacaaaattctttatgtacaacactataacaaaacaaaaacaaaatctagtacccataatttttttaactgcaaacaatatgtttcaaatgatgaccatgcttttttttttttttttttgggaaaaaaaaacttattttccatataaaaaacaaattcccaaag

SEQ ID NO: 58594 - DNA, 1334 bp, Arabidopsis thaliana landsberg
tttatttgtgcaataaagatgcttacgtacataaaactttacaagagtttttcacacctgaacgggttacacacttacaacaaacacacatcctctaaaacatggacgcatgtttaaactctctctcacaacatacaagaacaaacaaacaaaaaccaaaccaagattttaaaaccaatcgactggtcaagtagcaactaacttatttccaatccagaccaagaaattcgaatctgatccattttaagtggagaggatgttaagaagagagactctagcttgtatcattaccttgaacaatccttcaagtccctcttcaagctcttccatggctgcctctacaccttcggatctaaccaatgcacattgaaccctctcagatacttcttcactaatctttttctcttcttcttgatcttcccttgtcatcatcacaacgagcttcccaagctcagattccatagcttcaagcacgagacaagaaaatcccgtctcgtaatctcttttctcctggtgatgatgttctattcctttcttcacaagcttcataacaatcccccaacctttgtggtgatgatgattcttagtctttaaccctttaggcgacgacaagaacgagaagaccgagcgtaagacgaaacaagtcattacactcgtctcttgcatcactctaactaaagcactcatctcttgatcatcgccatcacaccaaacactctccaaagacgcatctgtctctttcgacattaccatatacttcttgatctcctgcttgatctctttcctagacgccacataagcatccacgtcactctcgaggctaaactcacctcctttcttgctccttctcaaagcagactgaagctcgacaacaatcttcttgatcctcgaagctgcgtcattagctcctccacaaacctctaagtatttcagtgatacttcaagaagctcttccatcaaaccatcaccattaagaagggcttgttgagtttcagaagaagacttgaagagatcttcacttaaacatctgtaaagctcggtgagaccagagagactgtcccggactattgtcctcgagtctaacgaagaagaccccaaagctctaaccttggagaccacttcttgaatcctcctaacactcggatgagaccgaaccggtaagctaacacatctagctttgtacgctttgtggagtctcggagacagtgaggccatatacatctcaagaaatgatgacgaaaattagctattcgagttatgctttgttctgtcctttaactctagggtttatataaatacacaagaaatgacataaatgtcaatgagtagggcct

SEQ ID NO: 58595 - DNA, 1251 bp, Arabidopsis thaliana landsberg
gttccttttgaaatcccattttttggctctttacaagcccatgaactactttcaagaagaagacactatcttacaccatatcattgcctttggtatttcgattttttcctggtgtgtgatgaagatctatacacagcctttcatttgtttctccagatcgaatctgagaaccattgcactagtcaaatgcgaggcctcatagatgaagttagcatcaaacagtcgcgggattgttgctctcgaaggtatatccccttcttctttcctcattgggacttgtggaatcctagatgaccatggttcttggaacctattgaatactatacaaaattaactttctaaatggagtagaagacttatacattgatttctgagtgtcttgtagatatgaagaaccgccaggacgaagaacttgtgcagcttaaggatctaatccagacgtttgaaagtgccttactatcacctgtaaaactcattttcttgctttctttttattagtttttctactaatgcttattttcttcctccagaaaaaggaatagcaaaactcactcaaggtggacaggtctggataagaagatgcctttcttcgtatttgtaactgctatcacttgctatatatatacatctaacctgtttcttgttttttatttagcagatgcctgtggctgctgtagtgattatggcctgcagtcgtgcagactatcttgaaaggactgttaaatcagttttaacgtgagatactatactgatttaattcttataccacattttgattgaactatctaatggctatttctttttttatacagatatcaaactcccgttgcttcaaaatatcctctatttatatctcaggtacttaatttgcagggtggtggtctcttagactgttttatattcaacgaattactaaccatggtcttttccaacaggatggatctgatcaagctgtcaagagcaagtcattgagctataatcaattaacatatatgcaggtaatttaatctagcgtgatttttctcctcactgttcaagtagataaatgaggatgaaggctcgttttcccctttttagcacttggattttgaaccagtggtcactgaaaggcctggcgaactgactgcgtactacaagattgcacgtaaggactggattatcttttctctgcgtccctccagctccattactgaaacactttttaatacaggtcactacaagtgggcactggaccagttgctttacaaacac

SEQ ID NO: 58596 - DNA, 518 bp, Arabidopsis thaliana landsberg
  unsure (1)..(518): unsure at all n locations
cctttcacttttcaaacctattttgcgtgctgttggggcaaggggggtcctaattaaaccatggccttttcgtaggggttcgtatcgtctgccgttgctccgtgtatggcaaactgctaaactgccgaggcgggctttctttgtttgtcttctcatcctatcnctttctcacgacgatttggcctgctgtaccgaagcacttgttttcagtctactggatggaaggatcagacacaatggaaacatgtttgctttagacaaatctttattcctttgttcctcaaccgtgttttttaacccatcacaaattattgaatgctgaactgatttgtattaggcgatcaggctacactaatgttctctaatgaaaagggtgttgccaatacggatcatcttaacagacaacacatcgaagaagatatggctgaacaggtgggtcgtttaactcatgaaacagaggccttaaatgagtaagtaataatgcaaatcagaattatctttcctcgatgagcgcattt

SEQ ID NO: 58597 - DNA, 630 bp, Arabidopsis thaliana landsberg
cttcacttcctcaaccatattctgatgtactctatacagactgggaagctcatgcacctacatatgaatacaaaacaaattataaccatatagacacgtaaatgaaaccatatagagagcaatgtaagcatcaagatacctgattcttgaaaacagcttcgtgctcaagcattgtatgtttcatgaaatctttctcgtatccagagtatgatgacgaatccgctgcatctctcattgcgaaacacgtctaatatcgccgcccatacgttgcatctccacgattcactgaccaaaaaaacacttcactgagatccctcattgaataaacactccactaactgatacatatgcaaactcataacatacaagtacaatcacagaaccacaaacacacgtgaaacaacattaacacataaaagcaaactatgagatgatcatctctgctagtataaatatatttttgtcgtatctaaaagcgaagaagaagattctgcaaatagagaaactgcatcttaatcgaatcatcaatgatataaaccagattacacgcaaactaatcccaataaaaaccaaaaccatttacgagaatttaacaaacaaaaaaaaaaaagaatcgaataaattcactgt

SEQ ID NO: 58598 - DNA, 508 bp, Arabidopsis thaliana landsberg
gatcttacttatttggtcgacgcggacgttattttcgggtctttgtttgtttttaaaatagttgttaaagattattagttgttttaccgtacgatttagctaagccatttaaaaaattcgaaacaatcccattattttgactcttaagatcgtctttgacaaaaggagagacttcaatacaaagactatctgggatttttcttgggccgcataatgcttctcagatatggcatttttgggcctatcgatgggtgaaactgtaattaaatatccattttggtttagcatattcaatcacaagaatgcaagattcacaactaattataaactttaatttcgaaatggtattaaattggttattatttggtttttgtagtttatgaacttagaaattcataaaaaaatgtaatgaaaagtttgaactgaaaacggatttaccctaatagtaaagttaactcaaatgcaacaatctcaacttcattacttcaggtgattaagaacttgacat

SEQ ID NO: 58599 - DNA, 1392 bp, Arabidopsis thaliana landsberg
  unsure (1)..(1392): unsure at all n locations
aatgatccgatattactcttagtgtagtacatgcttttagtttgttagaagtctataaattagaggagtgttgtggactttttggtcttcgaagtttcaagctggatttcaaaatgtgttatgtgtatcaacaacagagtatctcaaaatcttaacattaaaataaagaaaaaaagaagaagaaaaaaacaaatatgtaaaattagggaacatattagggtcatctgttccaagaaaagtcaatcgtaatttgtataaatcttggatctacaaaaaaaaatcttgaaactgatatagaattgaagataatagattgttgctttgcatggcttttttccataagttgaattatttttaaaatataaattcataatgttgttaccctttagacaaaggagagcgacttcgttagctttacatatcctcagtgcctttttgtcaatttttgcgtaagaatatctaactactaaattttattttaagaaaacaagaatctctgattacagagagtttcttttcaacgaagacatatataagaaaaggaaaaaacaaaattattttcaacgggatggaatagctatgacctttttgcatgtatagtatacgtaggtagctttatagagaaatacttcagtttatttatttattattattgataataaatgtgaatgaatctaataactaataggaataaattttgtatacgagtaaagatgacgccaaaggatggatccaatccatggttaaaggatatgcacaataaagagagaatgacataaggattcagatgtgacgtgacatattggcctcgattacttggactatgacatttcagacctaccaatttttacaaacttttattccccaaaattttgaaataacaatactataatttttgtaaaaaaaattatttagatcaaacaaatagtataatttataaacaattagttgaaagttattgactattttatgatgtatgtatcattttgttttgttgcagtcatataagttaaaatttgtataattgttagtggttttactagttgtagcacttaaaaagtcgtacaaacttacaggttttgagattagtgttttacgaaaagctgttaattaatttttagttaaattaagtttaaaaaaatgtctaatgacaatcgagatgagacctgatataaaacaaaaacagatacaaagagagagttaaatcaatagtatcagtcctatcagcaacttctgattaaaattcagtaatatcgtttaattaaatgcatatgaaacaaaaaggcccaatgggctatctatttttcttttaattntattttcaagcgtgcgaatcgcaataaatactcacaccaataaaaaaaaagaggaaaagaaagtagaagacatgct

SEQ ID NO: 58600 - DNA, 441 bp, Arabidopsis thaliana landsberg
ggttttgctgccacatccagcacgaccacgacggtgtagggcagggggttttctggcaggctggcagccaggtcgggtgtttggctttgcgtgcgcagtttggccagcgcttcttcgggcgtcaccacggtgacgctgctaaggtcgaagtcgcgcttcaggcgggtggcggcttcgtccaccgattctttggtggcgtcgggtttgaagtacaggctgatttcggggtcgcccacccagcggtccatggacgggatgatggcgctcaagccctgcgcaacgctccagggcattgcaagggccacggcaagcaccagtgcattgaagaaatgcccgaatggttcgtccagccagagcttcagcccggcggacattgaaaaccattgcaatcgtaaccagcgcattgtgtttaagctccgtaagccttgttgatgaattctt

SEQ ID NO: 58601 - DNA, 413 bp, Arabidopsis thaliana landsberg
  unsure (1)..(413): unsure at all n locations
tcttgatctggcccattcgtacatggacatcttacgatagccacgtgtgaccagttttatctcattaacaccgtggaatatcggatggaccggctgatacaagaagcctattcgagctcttcatattttgcggaagaaacttatcatgtcagttatcttggagaagtttacgatctaaatggattggtacagtgcacacccgatctgaatcagtatgattgctataggtgcttgaaatcagcgtatcatgagactaaggattgctgttatggcaaacgttttgctctggtttactctacgaactggatgttgacatataaagccacttttttggcgccaccaccccctcctcctagncttttaccaccttcactacacaacaacgtgtatacggagaaaatgatactcctagc

SEQ ID NO: 58602 - DNA, 533 bp, Arabidopsis thaliana landsberg
gtcgggtgggacttgcaggtttcattcaataaggctgcgtttattatgaatgcaccgccatattgtgaaagtgaaaatgacgttgcaccaaactaaacaattaattccccctcatgcaagatattgatcctcttccagttcttctttggtacggtgaccttcctcaatgacaatgagtcaataacaaaaagaaaaactttgcgtttcatttactaatttattttccaattttagtttaatagatatatcatgccaaaacgttgggaatgtatatttttcatacgtgcgtaatttttattcttccggttaagtattcccaaactttaacaacaaattccgttttcatgttttacacaaaactattgtaaagttgattaaccacattagctatatgactaaattattattgttggctcagttgactaagaaaatagaaactgtctaacctatgatgggaccagacaacagtatctcatagcattattgaagtttggataagtttcattaatgaaaagaatatatatgcaggttat

SEQ ID NO: 58603 - DNA, 102 bp, Arabidopsis thaliana landsberg
  unsure (1)..(102): unsure at all n locations
cgtatggcttattgggggcagaaaaatcctaaacangggaccaaggtaaaataaagagcgggggacccccaataccaatatttaaaaggaagaaactactaa

SEQ ID NO: 58604 - DNA, 465 bp, Arabidopsis thaliana landsberg
  unsure (1)..(465): unsure at all n locations
aaacctaactgagacaggctttcatgaaaaaacaggttcttggagcaggaaggtaaatcccttacacaactactagtactctgattggtgtgtgtccacaatctgatgcaacttttcatttctacctcagggtctctgtcttgttgactggggtagaggaatagacttgagcttgtttcctagaaccaccgagtttacaggagattgtcgtacctcaggcttccgttgcgtggagatgaaggaggataaaccttggaagtttcaggcaagtctttaaaatcacactgcttcagcaagaatttttctttgcatgattagacttttaaccattcgagtccattgtaacatgtgttatatatnaggtggacacttatggactatgtgtaatcgtccacatgatgctgcacaacgtctacatggagatcgagaagaaacaatctctggacgggggctacattaatatgc

SEQ ID NO: 58605 - DNA, 217 bp, Arabidopsis thaliana landsberg
gtgtcaatcctctgcttcgtttcttgtttcttacgccctccaactaaccgactggttttttttgttttgaggcctacctgaaaatacggagaaatcacggttttcgacagaggattgtctcctttaaccattccatctactatcttccctgatttaaatttcaatcccctttactatctttaccgacagaaacaaaacactagtttgtaatggaatg

SEQ ID NO: 58606 - DNA, 501 bp, Arabidopsis thaliana landsberg
  unsure (1)..(501): unsure at all n locations
cgccattacattacaatgaaaaaagtattggattttcgagggcaagtttgatctttcaaactactttttttttttttggtttcaaactgaaactacttctagtgaatgcttttgtagagtttagtgttaggttttgattaggtatattatattttaagaaaaatatatcttaaactcatcgaatatgtgtaccgaaataaatgaaacagaaatttcttaagggggacttgtaattagcatgcaagtatgcaacgcttatattctttcaaataagccaacaacaacgtattaaaccatttgcacccataaatacctgctgattttattttccaatggaaacgatcttaggagtctttactcggtggtattatagtactggatacaagaaatacatagcgttaagttatgaaaccctacccatgcantacaggaactaacaaccattgccaagagcgggagttacataaagcttccttttacgccaaacaagaaattattttg

SEQ ID NO: 58607 - DNA, 317 bp, Arabidopsis thaliana landsberg
ggatggttttgtgttccgcccgaacaaggggatggggtttgtagaaactgcgatcgataaccgagccggttacggcaactcgcgctacctaaacacaaaggtgtgtcattaaacacagacggtcatgatcaaatccctaagagggtacaactactgcaataactacccaaaatggtggcgcttaacccgactataccgcgtgggcagaccacctcatgatagagcgcggggcctcaaaacctagccagcccggcgacggcgcgggcgatcttgtggtagagcaatttcaaatgaactttaagcgaaagggaaggttc

SEQ ID NO: 58608 - DNA, 541 bp, Arabidopsis thaliana landsberg
ccgtacttaaatttatatacaagcaagaaagtctacaagcacagttgaacgatgcacacaaaatcaatttctttcagctgtttagcattttgtatctaaccagaaatatggaagaagaaagaaacgaaaatgagtatggtcttcatttccttcttttattattgatgagtagtgaaaactccaccgatttttctttttttgctaaaatcctcttcttcaaactgatcacaaaccttctcttcatcaatccttcccataaccatacaactataatttctccggagatccatctgtcgtttcatagccgtcgtctccaccgtgatttctccgctgctggcgccacgtgtgacaaaccggcaacgttcacgtgttgtcgtggccgaatttagggtgaagctacgagggagaacggtggttggtgcttcgcagatttggaaattaccgggtggtaagccaaaagcgccggagccaccaccaccgcggatgaaaccggctgagcatgacgtcatgctacgtatgtaatgcgcacgtgccatgatca

SEQ ID NO: 58609 - DNA, 736 bp, Arabidopsis thaliana landsberg
cgtattttgggtgtcaagattccggcaagttagcgactgaggaagacgtaatattcgattgtttcaattcttatataaatcctggcttctataacgagtttgattatggaccttaatcgtattttctacaagttttgttttgattatctacacaatacatcaaatattatttcttagtgatgatgataacattctatcttaaagctctcaaaaatttcttctatggaataaagatgtaaaggtagcaactttattatgataagaacacaacaccattcagataactcttttaaatcccaaatttggtttatgatgatggatcatctgagttttatttatttattaaaagttaaaaccagagtcttgctgaaactgaaactttcctcagttcatcaatgcttctgctaatggaaatgtcggagatatatccaccggtacctaaacacacaaacaaaaccatgaacgcagatcattctatctgcatggatatctcaattctcaactcaatttaggtcttgttatcctgtaaagaaactgtaccttaacgcgttcgagattctccagagcggttttcaatggtccggtgatagtgcagtacttatttagaagcaatgttgctgcgtttttgtcaccttttccttgaatagttagtatctcatggctcaggctctcaactgcaccttcgatctttacatgccggaataacaagattcaggaggtgtttcgatatatgact

SEQ ID NO: 58610 - DNA, 576 bp, Arabidopsis thaliana landsberg
aacgcatggccagttgctgaggcaaggccgctgcccagcagaagagctgcgacggctttggcgatcatgtttcgtggccgcggtttggagtagccttgaccgtcttcccgggtctgcacagggtccaaagtttcccgggtcgcgatccgggccctcgggcctctttataataaacaacaaccatatccattcctctttcctcatggggctattgcgtaagtgactcagtaattagtactactcgcacaaaccttttcaggaaagaagcgctgtctgctgaagacgccgtactcgtacatgctgctgtaccaccaattttccgtctattgttccttgtcctacatggatggcgattcccacaagctcttgggcgtcgagcattgccagggcgtaatacaacgttaccttactaacttggaaaagcacagaaggcctccgctgcccattgagtgggcgaggttgcaccctgatttgaacttgggacattctggcagcttgttcctgacgaagcggggaaagcaagacaaaccaaggcaaaccaaggcaggggtctttttacagcttggttaccgcatt

SEQ ID NO: 58611 - DNA, 505 bp, Arabidopsis thaliana landsberg
tgcttatacttaatgaatttgaagaagaaatacaaattgtaactaacttggaacgttactttcggctcatatgtttacatttaactagtaataaggtattacacacgtttcttaattaattatcttaattcgaatcaaaaaatgaatttaaagttgtgtaaaacacttttaacaacaacaacaaaatatctcaaaaataccgccaatattttattcagtgcgtgagcaatggatcacatatactaattgatacgccgcctgaaatatatcagaaaatatacaatgcattacggtggcggatacctccgcagcccacaactttgacaaataaaaaatagacttcacactataccgattagtgagtgattaaatactacacatataatataaagtatttaacaaataaataaatcattcagaaggactgaaatatatattaatttatttattaaaaaaaaaagggaaaatgtgcgaaatgcctccaaaaccgccgtataaattgagg

SEQ ID NO: 58612 - DNA, 1133 bp, Arabidopsis thaliana landsberg
aaacattctttgaaatcatgattttgaggtgatagtctatttatactaatactaatgatactatgtgtcaatgcatcactaatacatcttcagattgagtagaaaccgtgtatatggatttaactctagttaaacaacaagaacatacaaatttgaatgtaataagcgtgtaaccatttgacttgaaaataaaatacatatgaccaaattgaaaataataatattaaaatccagtgcaacgaaaaaaataatatgttaaaacaataaaacccactcactactttctctatataaagccaaatgcttcgaccaatcttcttcacacctacaaatcttcttcttctctctctctccctcttcctctgtcacacagatattgacaaaaacaaaaagaatgagtcaatcaaatcgtgtcagagacgaagttacattacctttactccaaaaaacctctcatctgaaaaatcactcctctgttctctctgttttcctaaatgaagcaatctcaatctgcaaaatctcttacccattggtcctcactggtctcttcctctacgttcgctccttcgtctctctgtctttcctcggtggtctcggtgacgccactctcgccggtggctccctcgccgccgcatttgcaaacatcaccggatactctcttttctccggtttaaccatgggcgttgagtctatctgttcacaagcctttggagccagacgctataactacgtctgcgcgagtgtcaagagaggaatcatcctccttctcgtcacttctctccctgttacacttctttggatgaatatggagaagattcttctaatcttgaaacaggacaagaagctcgcgtccgaagcgcacatctttttgctttactctgttccagatcttgtcgctcaatctttcttacacccattaagagtttatcttcggactcagtcaaagactcttcctttatcaatatgtacagtgatcgcgagttttcttcacttgccaatcacgttcttccttgtaagttacctcggtttggggattaaaggaatcgctttgagtggtgttgtgtctaatttcaaccttgtcgctttcctctttctctacatctgtttcttcgaagacaagctaagtgttaata

SEQ ID NO: 58613 - DNA, 303 bp, Arabidopsis thaliana landsberg
cacctctactcgatccaataacaggccgatgtcggtcctaattcaaaaccgggatcgaggtcaagtactccaactcgccgtccatcaactccgaacggttcatcgactgtactgagaagtaaaccaactaagcctttgagtaaaccggctctgtctttagaagcttctccgatcgtgagatcaaggccatgggaaccttacgagatgcctggattctcagtagaagcgccgtcgaatctcagaactacgttaccagataggccacaaaccgcttcaagtagcagaaccagagcctttgatgcg

SEQ ID NO: 58614 - DNA, 315 bp, Arabidopsis thaliana landsberg
ggctgagttggtaggtcgctttgcgtaacagatgttgtcatgtgactcgctatccggactcccacccgaatcttactcaatgatgaagaaatgtatcacatactgcatttggaggagcgtgatacactttctacctcaacatcatattttctcatgaataccggccctagtttatctagagcgtgagctatggtgcacatatactaaacgatacagcgtctggactatattgcggaagatactacgcctgacggaggcagataccttcccaaacctgcactctgactcgtagagcctggacttcacactgatccg

SEQ ID NO: 58615 - DNA, 950 bp, Arabidopsis thaliana landsberg
tcggttcctccgtaaccctaattttaaggattggcatttatttggtgcgactcttgcaaataaattgtttatgagttattttcgtcaccttgtactgacgattagggtttttaagtcgatgattactttatcgccgttagtttacccaaaatcttgtgtccaagagtttggttcatcgttttctgggcaaatgctttaagaggcttaggaacgctgtgttgattgaatttgtagtttatcacctcttttagctgaacaattcgtcacattactcttattcgccttgttagatctaatttcttttgttttgtgcataactttgcagctggcattgcacactttgaatgcttcacgttctgcctatcagtgtatcacatttcagtcaagtttctttgatgtatatactgtttctggtcctcaagctcatttcagtgtacttttgaaggtattttactgttattctgaaatttttagcaatgaaattcattggtgtaagtagttgttgctgatattacttttttaccaggctgtttgttctgttcttagaacccctctcgcgagcattgatcatatgagtgtgcagttgccagatcatgatgcatctaaggtcaaatggactttgcagtgttacagtggtaaaatctatatttccttgttcttacacattgtttgctcttgtctgcaattatcacattctctagtaactttgtgtagccgtcctgtgtaaaacctggatgtggcatgtttcagacctgttcataatagtttaatattatctgaaactgttaactgtgacctctacttcttagataactgtgagcagtttatggtttaccgttgaagcgtggcttgaatttgttttatcatatgtacaggtatgaagaaaacatattggattacttgcaatgtggaaccagatatacagcatctgtcccttgataggggtagat

SEQ ID NO: 58616 - DNA, 1049 bp, Arabidopsis thaliana landsberg
tgtgccaatagataatatcttggtaaagatgtgttgagtaaaaaaaaagatgcgttgaatagaaccaataaccggatcatgaagtaaaatgactttaagaaggttatattatagtgatttgattgttgtgggatatttgattttgttctgtaatatgttatcttttcaaaattttggaccgtttttctcacttcatttaactattgagaaaattatgctaaattttcttctcatgtaaaaagttgtccacgatagagggttgttaacatgttttgaactgtaagttaaaaacaattcagaaaaaaagatattctatgagacatttgtaacattggatgaacgaggttcaagaccagtgaacgattgatcgaaatttgagtttctgaatttggttttggttcttgttttaaatgatagttgatgtggtgaacccattcactacaggagaaaacaggctcttgttgttgcccccaaatcagaaagctaccacgcactagacattagatcacagttttagtataatctgcatactagctaggtttggaggacctgagtttatgatcttcacgatttaacaaaataaaccatcacccaaatgaataacacaaacaagctgcaagctaaaacagagatgcaaaaataatacaataaaaaaaataataacataatccaagtgaacaacacaacacactgcagaaagataaagaaattatacaatccaaatgagcaatacaacacacacaagaagaagaaagataaagcaatagaagaagaagggttgattccgattttagacagagaggaatccgaatccagcgtaaagtttgtttagtcctgtctaaagaagaagaaaaagaaacggagttagattcacatgtggaagcgaagtcagatccttcatgttgtggcagtgagttatagacacgcggcataggttggtaaagcaaggaattgtgggactgtgtaaatcatacgagtccgtcttgctttctttgcacttcatatatgtatcaatctctgaaacatgacttcttttcacactgatcata

SEQ ID NO: 58617 - DNA, 1127 bp, Arabidopsis thaliana landsberg
agcgcaacaatgtttgaacaccaaagggccacaatgccaaaaccacccatcagctttcaatgcttggctctgataatgttagaacatcaaagggtcacaatgccaaaagcattcatcagctttcaatgctcggctctgataatgttagaacaccaaagggtcatcacaataccaaaagcactcatcagcttccaatgcttggctctgaaaatgtatcgttgcaaggaaccccgagaagagagaagagaatgaacattgtggagattgtggacgtgaaatgtgggaatccagatcgagcttgggctaatccgataactagtagactcaagaagcttggattctctaaactcaacgagagcattggttaagagctctgcaaaactttcctgtatactctgtgacacatctggtttgtacatcgagtatgaaccggttaaaccaaatcacaatgtaatctttctttgtcaaaccaacaagctttggtcaattacattcattttgtattttggcatcaatctttatcaacaggctaatttacctacattgaaatgactataatgggcggatacatgaataaacgcactaatgtgtgttttgtatatatatttgaaaagacgagtagatgaaactgagctttcgagagagagactgtgcagagaattagtttgacaagtagaagtcatattggcattctctttgttcttcttcttgacaattccgaatttggtaagtgaaaaaaaaaacaagaaattaaatagatatggttagttaggaccagcgacatcattgaacttgaatgttcggtaacaaacacctatcatcatgagtttcccataagttgatcaagtctcttttgatccgcatccacgtggtccaacacatcaattggttccttcgtatattctattttatattgtgattttttgatttttataggctaatataaataatcatttatttgtggatagtttgaactgtttatagtgattagtgaacgattattattgaaaaggatcataactaaaatgttagaatttttaaatacgtatcaaggttattgatagatgaacttttagtaaagtcatgtttcagtggattttagtttattttatatgtctgaacagatc

SEQ ID NO: 58618 - DNA, 1264 bp, Arabidopsis thaliana landsberg
gaaaactaatatgaaagtgagcttttcttattgtggaaaggtggactaagtagatacgtagctatagtgatcatgattcaactaaagtagagaattcagaatgaagtttggaagccttcctagaccactactaagatcctttagacactcaaagcaatcaatactgggacaaacttcaaacaaaaaaactgggcaaacattcagaataggaaactaaacccaatccatatcaggcagcagatatagatggttgatagtatattattgaaagcttgaaaaggaacaaaaactaacaaatatctttgaaacaaaaaggacctgccaaccttccccactacagaagtcgacataaaatcttaagtgaaacaagtaaatttgaggccttagtagggttttcatagtaatacgatttggacatgattggactgcagtataatgaaacataaaacaaacaggagaaagattttagcataccagcaatgaaacgttggatatatcaacacccttcaaggtaacaatctccaaaagtctctcaggtgtagcaactataaattcaggctcaacgctttttaatctacagttcgaaaggcaatttgtcagaattggaggggacaaaaaagagattatcctttatgtagcaacagcataaaaactatgtaaaacagaaaagattgcataaggaaaaagatagacaatgaactgccttaatgtacccggaaatctgatgatctagtggtgctccttggtgtaagctcacagtatgaattccaatacctttcagtgccttgcaaaccgatcgaacctaagcatgataaaaacacaaatgactgcattatgaaaacagtttcactctagaaaaaagacagtcacactcacgagactaaaccgatgtgatcctaacctgagaagctttagactgagatggcacaaggtacaaaagaaaaggactgtttcccaacaactcctcctcctcctccacctcgtctttctcccgtctagcaatagcatcagcagcagtagaaacaatccaagcaatctgttccacagtggaagacattccactcgtgtccaaaatatcattcccagatgagtaacatttccagaactcaatcccccaactactagtaaacaaagacttatcatgttgttcactgtatgtaatatctttacgaaatgagctctcaatctcattcaagtttaacatcagaaactttggtggaccaccatcttctcaacacgttcaatagacataggagatggttct

SEQ ID NO: 58619 - DNA, 510 bp, Arabidopsis thaliana landsberg
actatatttgttttaaaaaataataatatttgcttactaacttttaaaagacaactcattttcatgtaaagaaattatgcttttggatatttatttttagtagatatttttcttgacttcttaaaattagatatttattgatgaatacaaaatataatctaataaattgtatttatatcgatagataatataatatttgtagacatcttctaaaatgagatgtaagtcatatcgataaaatatatgttttaatggtaataataggtttcaaggatcaattttgttcgttttttttttttgatcaaccagttttgttcgtttcatagttatataggctgtggctataagtctagcaaaagatcgttaattcataattttccacaatttaaaaccagaaaattgtagtgtttaaaatctccattcgttaatcgttttaacttatcgtcgaactagcaactactataacaaaacaaaaaaacaaaaaacaaaaaaaatccaaataactcttgt

SEQ ID NO: 58620 - DNA, 502 bp, Arabidopsis thaliana landsberg
tagtttatatacaaagtatcctctaaacaaatatatatactatgattctatactaaaactaatgaaatattaaaataataacataatttaaaataattcatctatatataaatggtctcttgtgtactttgatgatgaacattcgcatttcgcatcatataactatggatttcactaagaaaatattagtagtatttgctttcaccattatgttggggatctcttctgttcattgccgtccaagtttcaaacccatcccttgtaagattttgtttattatgtttcttcttttggtaattcttatctgttttcttagtctttcagttttgaatttttggtacctttttgtctagtgtttggagaaaaattgactcagtgtttcgacacaagaccatgtctgcaagggatgttgaaatgcattgaattctgtagctcaatggggactgccgatggacaatgtaataatgaaaacctatgttgctgcacacatgaatgacacatg

SEQ ID NO: 58621 - DNA, 1145 bp, Arabidopsis thaliana landsberg
aaaaggccaaaggagaaagaggtgtgtgtgcacacatacgtttgtgttggagattttcctgtgatgtattctggtatccctgagatggaggtataaccacccgacgaatcccgcctactttcatagacctcacagctgtttcaatccccggaattacctgcacatcaaaatgtttcagtcatcacaaaacatcatcatagagacatagaagaagtattatcaacttcaaaaacctcaaaccacttagtttgttacatcactattcaaagaagaaatgtatcaaaggtcacacctttaaatcaaattcagataatttttcaagacccatgtcacaaaaacttggactttatgcaacacatgattgagatagaagcatatagagataaaggtttatactttgctagaaccaaggacgaatgtgaaaggaacagcttcaccattactatctttatgatcatatgttgaatcaaatctccatccttgcttcgcagctaatctcccatagtaatgtatttcaatctaaaattcaaaactttgcaaaattgaatcaaatggttcgttcatttgctgaaatctatacaaaaatacaaaaacacaaaacctgatctccttcaatgggaacgtcaccatcgccgattcggaggtcgagagctttaacgccgccggaattagggatttcagagaagtcggctagtgccggagacgagaagcaaaaggaggagacgacggaagacgtgacggcgataattgacagagatattgatcttctagatgctgctgcaattgtcgatgatgatgatgatgatgatgatgatgatggtgcggaagaacgagatgcgaagattctgagagatggcggagatgtgaaatggacggtggtgattaagggagcacctattagtggtgtccacgcgaagcaccgaatcatttttctttcctttttattttataaggaaagtataaaaatgaaggtacacatattctagcttttgagaggtcagaagtggatggaatttgatttggattgggttgggatcacgatagttgctgccaaaacctttctagtggaaacaagaataagctacatattgtattcccttatcaagctttagttttgtgataaagtgttacaaaagtgtataaga

SEQ ID NO: 58622 - DNA, 832 bp, Arabidopsis thaliana landsberg
aggttacaaaataatgtaacacgtactttatcaaaaaaaaataacactgaaacaaagcatgtagtgtgttatgggagactcatgtcttatccgtttcaagatccatgcaagaggaaacattggaatgtctctgtcagtgtctctactgtgaagaacattaagggacagtagtttttgtctggttcgttctcaggttctgcattgtaacaataccacacactcatcaatgtttctctttatgtaatgaatgaggatcaatcaaatagcttataagcaagcaagtgaaatctcacaataggctactgtgaaatcacaacaaaaaacaactttatctgtatcaggtttcaacagtttctttctaattgaacagaatcaaatctttatgccaatttcattctatctacaagttacaacaaagtaaatcattatcctagttatgctcacttgctcagtcattattcagctagctttctattgaagaatgacaataatcaaatatcgaaaatgctatttctctgttggatcaaaggatttcagcttcaagataatgacaattgacacatttcaccattcttgatctctctttggttatatctactctaatttacatcaatttacttactttgaactgcctcactttcaaagacatgaaccaaattacagaaacggcgatgcaactataaaatttggaatacatgtggaatttggaatgagattattcgtttttatttcattttcttgaaataaaacactatatgccaaaatcaaacgtgggacctccttatgacacgtggaatttatgtgattcagacaaaagtcatcctagaagtct

SEQ ID NO: 58623 - DNA, 966 bp, Arabidopsis thaliana landsberg
aaacattccccaaaccggcctttaaacatttaaaaacccaccccaaaaaaaccaaaaaacacaaccccaaccgaaaagcagcaattccaggaagattagtttatgtaaatgccaaacataaatatgaacccgtcacatagttgagagtcgccgtgaatatttactttttaaataaaaagatatggttagccgctggttggtctgacaccccatgtatcattatactcattatccgtatgaaggaccattttttcatagaaggatatacacgtttgtaacgtatgcagagccaacaccaagtatataacttgtactgtcgtctctgattctgttaaagcggttaactagattattgactatgataattcaatgtaacaccaatttatgccccggacaaaaaaaaaaatggtgaaaccaaaatatttgatttgcatcccagttactatttccctgcaatgatatgggggcggcggtttggagatagcgccaatgccacaatttgtcgtaaaaacagttaaacattttactcactagtcactcccccacaagaaaacgatacttagttccactctctactgctacaaaacttgtatacattaaaaatcgatttttattgagtagacattaatgatcggcttataagtctaaacaagtaatgtgacagaattcacgtgaacaaatgctcgagtgggatgtttttattgcttctcaagttggtgatctttaatatcgccaagattaggttgtgcattaaatttagattactttttataaattaaatcaagatatggatatgataaactttctctcttttcttttagttaacatactttatagactttatactacattagattaattgcagatttaaacaatgtttaaaattacaaaaacgttaaatgtcattttttccaaataaattttgttttacgtaaaagcaatttacatgaattttgatggatcatt

SEQ ID NO: 58624 - DNA, 1227 bp, Arabidopsis thaliana landsberg
gctctgtagataaattacataagttctataatctttttattacaaagtaatatctttccacatcaatgttcatttgatcaattagcaaatagtagatgattgaaacctctgtttcatcgtcaagcaagtcatgttttagaaggattatacgaaatctcatcccatttccgtaatcagaaaacttctgcattaagctgtttctcattcaaagggatttcctctggatacataagcatttgggtttgcagaaggatatccattgtttgcttgatgaaatgtatgtactccgttgaacgtatttccttctgtaccaagaccactatactcttgcctttgcacaccaaaatcaatttagagtcaagaaccattcagtgaacactaattaagaagagtcagagtatgtatgtacctgaatgatggggacatattcacctgtgattgctgccccattagtgcacctgttcaccagatttcaactcttagaatataaactccaaccactgaaaacagtctttttacataaatttcgtctcaccaggggaaagatgggatgcaagagctggagagtttggggataaagcggttgcatgaaaaggtgactgagaggtcatcagtccaatggaatctgcagctggacttgaagaatctgaataccctattggagatgacacgtgaggtaagcctcctccttgcacatatgccatagtaggaaactgtaaaagacatagaaaagagaaaggaactgagtatatatatatatttcattttcatcatatatactatcaggaaattaactctaggattcatacttgtggtgtttggtttggagctgtatcatcatagctaagatcaaagggatttgctgcttttgctgtatatgttaaggctcccatagcctgctaagaaaaaggacatatatcagcataaaaccagatgctgtaataattatgtcaatggaacatataccacaggatattgataatattgcatgccatatcccatgccatgatgttgaccatgaacttgctgaggggcaaatgagaagcctccagtgaaaaggtcctgccaatggttagattcttatgatcagagattcccaaaagagtatccaaatttctgttataagagaagggttcgttacctcaggaagcgccttttttatgctagattgtgtctcatcatcttgatgatgctcaaatccaactccatgagcataatctgtgatag

SEQ ID NO: 58625 - DNA, 188 bp, Arabidopsis thaliana landsberg
aaaacaaaaaaccccccaaaccccctcaacacccacacaccaataaaactaaacaccccaccacccccaagacaccaacaaacaccgaaacaccagaccagacaccaccaccaaaaaaaaaaaaacacccccaatccaaaaaccccaaacaacaagcaccataaagaaaccaaaaccaacaatacaaa

SEQ ID NO: 58626 - DNA, 778 bp, Arabidopsis thaliana landsberg
ctcatacttcatgtgcctgagggcttctcttcttgaaacacaaagcatcaataacgttattgcagattttatcatccgggtttcttctggtgtcccacattgctctgtataattccatagcctttcccaatttccccttcttcgtcaatgcatttatcattgtcccatagctaacaacatctggcctgcatttagaagcaatgatatctttccaaaacctcttagcttcatgaacatttcctaatacacaccacccgttgagaatcatattcatcgcttttatatcgcaaccaaactctcttctacgagagcaaaacaaagtttccgcaaattcaacatgcttatacctacacaaccacatcaaaagcccatgaaacgcaaccagatcatcatctatcccaaactctttcctcctctcaaagactcctacagcttcatcaactttatgtgcagcagcgtaacggtttaacaaaacttcgtacgtcttctcgttaacaaatccatctctcttagacatttcgtcgaacacttggtgaaactcttcaaatcgccgcattttcccaagaacatcgagaatctcgttatacaacatcgagctagatagatgaacagattgtttaacgaccaattgagaaagtatataagctggtttccaatcagatcgattccgattaaccacttctaaaacaagctcttcggttaagtctatcccgcacttatcgagaatccgcttaatcttttcaggtgaacttccacggtgatgctttatgatgttatg

SEQ ID NO: 58627 - DNA, 502 bp, Arabidopsis thaliana landsberg
  unsure (1)..(502): unsure at all n locations
gttgcttttatagtgttattttctacaatgcatttctgtcatatgtgagaaagcgttctgatggaaaacactcaaagtttcagcatgtatttactgtgttccagttttcaagtcttttgagttttgtttatgctatactgcttgacagttttaaccacctaagacaccaacagtcaggtattttggggtcttttagtcatttagttcttggtagaacnnnnnnnnnnnnnnnnnnnnnnnntaatttacctgtgtacctgtgcagagtacaggactgtatctggtgttgctgggcctctgatcatattggataaagtaaaggtgtgcacagttttctccaatatgatgctaactaccctgcagattttgaacagctcattctgcgcgtgaaattgcatcgtaccttgggtgtccatggggacgatgtcgtcggngtcatcgtcgtcgccatccttgcttctgaatttacctcatgaggccccaatctcgaacggcaccaggc

SEQ ID NO: 58628 - DNA, 1499 bp, Arabidopsis thaliana landsberg
  unsure (1)..(1499): unsure at all n locations
tcatcacaccctttcttttctgaatttaaggttgattatttcaaggtaatgcagctcctgtacagaggctggcagatgcaatagctggacccttcgtctatactataatgtctttatctgcaatgacgtttgccttctggtatggtcctcttttcatatttctaacggaaataacatgaaatttcttttaagagtcatatatttatttagcaaggctatgtttatttagttatagtataaagtagaaatgtagnnnnnnnnnnnnnnnnnnnnnnnnnnnnnnnnnngtgaaagacccatgttttcttgcttcaggtattatgtcggttcacacatattcccagatgttttactcaatgatattgctggacctgatggagatgctttggccttaagcttaaaactggctgtggatgtcttggtgagtgagacatgcatctcaaagctatatctttcatgtgaaaatatcatggactagccggacttaacgagggaggaaaatggtgattgtggggaaaatgtgaattcacgaagtgaatgtaggattaaagacgggtagaaagaaattttggagaaagaaaatattgagcagataatcaactcgtttttttgtgtgtatcaggtagtttcctgcccctgtgcactgggccttgcaacaccaactgccatattaattggcacctctcttggtatgttatccagcgtattatttctcttccgcataaaaatctgcaaacgtagctgagaagagtaacctaatttgcgtgcaaagttttccaattattaggaagattcgaaactgacactgaagctaccattgttcctgttctgtgcttccctgctgactagtgactaacctgatttatgaaaaaatattttttggttttaaagttctgtcgttgatggcgactttagttcatacatgaaattactaaatatggcctagaaatcatgaagaatctcccttctagtttctgtggtgtcgaacgtgcagtccttctggtaatctttcatgttaacaggggtagttaagcattataataccttgtaataagcaacaataaattcgagattattgaaactttcagcctaaatatgtccaggagcaaagcggggatatcttatcagaggaggagatgttttagaacgtctggcttccatagatcgtgtggctttagacaaggtattgcgaatcatttgggcttcacccatctctctctctactatctcttttttatatgaagatggaaaattctagaaaataagataagtgtatgggcagttcctgttacccctaacccctcaaagttgaacaaatcgagttattgcttcagacaggtactcttactnnnnnnnnnnnnnnnnnnnnnngtgttgcttctctaggatacgaagaacaagaagttcttaaaatggctgctgcggtggagaagacagcaacacacccaatagcaaaggctattgtaaacgaggctgaatctctgaatttgaaaactcca

SEQ ID NO: 58629 - DNA, 151 bp, Arabidopsis thaliana landsberg
cgttacccaagaacgcaccgaaaaagggggtacccacggactgcccatacccccctaacatttaccccccgacatagccaaatagccccgggccctctaggaacccacagggaccgaaaagcccgacgagacaccccgcgccaaacaaaaa

SEQ ID NO: 58630 - DNA, 348 bp, Arabidopsis thaliana landsberg
  unsure (1)..(348): unsure at all n locations
caaaaacccaaaaacccccaaacaaacaaaaannnnnnnnnnnnnnnnnnnnnnnnnnnnnnnnnnnnnnnnnnnnnnnnnnnnnnnnnnnnnnnnnnnnnnnnnnnnnnnnnnnnnnnnnnnnnnnnnnnnnnnnnnnnnnnnnnnnnnnnnnnnnnnnnnnnnnnnnnnnnnnnnnnnnnnnnnnnnnnnnnnnnnnnnnnnnnnnnnnnnnnnnnnnnnnnnnnnnncacaaaaaaaaactcagtgagggggaggacagacaaaccaaactaaactacaaacacaaaccccccgcacaacacaacacctgcgccccaaccgaaaaccatcaacaaaaaaccaacc

SEQ ID NO: 58631 - DNA, 109 bp, Arabidopsis thaliana landsberg
tttatatctaaagtcccacatcatcacatgcttttttttaacatctttgattatttacttcactttcactactatgctattctaccacaagaatttctaaatgtcaaag

SEQ ID NO: 58632 - DNA, 445 bp, Arabidopsis thaliana landsberg
tggtaatcccatctccaatccctgtgtaagagcatacccagaccctaagaacgcatgacggctcctttcactcagttgaatggttccaataccccccatgaacactctgaaaagctatctgcccctgacgccacacctcacggacacggaataacaacacatctatggatacggctatgtactggtccactctacatggcttactgcaccatcatcatatagtctaagcacgcgactacatagagctttgcgcggctactaaagccccaacgggacaatctctgcggccatatgctacacaagctactcccaaagagcttatcttattactgagtcactggggatgtcgatgatgcatgcacaaaccgacacagaatttatgagctctccactaccacattatgtcaatcatggcgttcatctacgtcacgtagcgctttctctg

SEQ ID NO: 58633 - DNA, 810 bp, Arabidopsis thaliana landsberg
ggaaagtagttgttcttcatattctcacacataatcattaatatgttgatagattttttttggccgtatgttgatagtttgataataattaggattagaaacaaagaagctttatgattagtcaaaacttcaaataattaatactgttctagaatcaaaagcatctgcatgtgtcacttttgacgtgataaatagtaaaaaatagagcgaacgagcgacgtcttgccgccaaactggaccgtggatcgcgtttggtcgcagcgacttgaaatttttgattcttctttgtcaccgattaatagaaaatttggttatatgataacttgtacgtattataattgtcaaatgggtagttgttttgttgtgtgtggtaattaagaaggaaccctaaagcagtaactaacaagtttcttttggaataagtaacaatcaattttttgggacaaataagtaatataattaatcatctatttcaaataagactagccgtttctttagaacggtaaaaacaaatattaaagaatattaaaccatggaggggtaataaaaggaaacataaaagagaacttgacttggttgtctccaaatatatattttatgctctgatcgttttcctatatctatatctttaaaaacctccgaatttcaaatatttggttttagaatttgattctgctttttttttttttcagattcctcgttaggtggtgtcaggatcggcccaacaaatttggctgcctaaacactattaaatccatattttaaaaaagtcacaaaaacacataagtgagactcaaccttgcacccaaa

SEQ ID NO: 58634 - DNA, 1726 bp, Arabidopsis thaliana landsberg
acataaggaaactaaatggagtcttagcaagttggtgaaattgcttgaggtttcttaccatcctgatatatctctagcctgctttagcgttgatttcgatatcaacttagtgaataagatacttatccaccattgttaccgagaagggttgttcgacgttggtgattgtctggttaaggaggctggaagagaggaagaaactgaggttagatctcagttcttagagttccaccagatagtggactcattgaagctcagaaacattgagcctgcaatgagatggatctttgcgaaccgcggaaagctgaagcaaaagagttcaaagctggagtttaagctcttaagtttgaagtactgtgatatattaagagaaggaaagagtgatgatgctttggagtatgcaagaacccattttacgcaatatccactccattttaaggagatacaaaagcttatcacttgtttattatggattggaaactttgagaaaagtccttatgcagagatagtttctccatcatgttgggacaaggtaaccaaagagctaatcatggaatatcaccatcttctcgatcagccaattaactccccgttgaaagtcgctttatccgcgggttatgagagcttaccgtcactgttaaagctggttcatctaatggcattgacgaaacaagaatggcaagcaatgaaacagcttccggttcctctggagttagggaatgagtataagttccactcagcttttgtttgtcccgtgagtagagatcaaagcagcgaagaaaacccgccgatgcagttgccttgtggtcatgttattagcaagcagtcaatgatgagactcagcaagaactgcgctttccgcacattcaaatgcccttattgtcctgcagagactttagcttcagcatgcaggcaattatacttttgaaggatttggtaatttagttaatttgattgtttcacctcaataaatcgatgtgaacaaagcatttcatttgttctttcatcatttaaaaactcttgtttactagatcttgatttgatcttgttctctaatatgttgcatttagttgttatactatcacttagtatctctctcttggagttgaagcaaagattcacgtgaattctccaatatttggtatctttcagaaaaaatggatatattcttcagacattatatgattgcagtggtaattgattaattaatagtcattagtcaaaaccatggccttgtctcacatagtatcaataatgtttaattaaacacgcttttaaaacactaactggtccccaccaaactgccgcaaaagtccatctagttcatgactttcagctaacctcacacccccgtcaccctaatgctgtcacatccaaccaatactttacttccacgtgtaatataaccaatgagttcacgccaaaaaccacaaacactatcgtgtcaagttagcactttccaaaaccaccaccgtgataaaacagtcctctccatttctttactcaacatccatccgaaccaactcgaagatattatttttcatggattgagcaaagaagaggacgataatttcgaaaatatcgcgatacaatggacaagttctcgtacaattcgtatccagattcagctgaatcgtcgccaagatctcgcgatgtcgaaattgaaaatccgtcgccatgggaggaccagcagcagcaggactacaaggtgaagctcatgtgcagc

SEQ ID NO: 58635 - DNA, 1057 bp, Arabidopsis thaliana landsberg
gagttaggtacatatatatagagtttattacgagatggccaccttagttcttgtttctttattttttacccataactctttaaagtctaattttgggaatttttgtagtttttgtaaatctcttttcctcttattacccaagcttacgagcaatttcttctcagtagtcttaatttatttgctttactaatgaaaaacgagaaaatacgtaataaagattgtagcagtgagtattattctcttattacagactccattattccttcctttgagcaacatctatttgggggagttcttgatgtcaatcacgaaacggtacttgatgtccttcttcaccactctttcgagagcttcgtttatcttttgaatgggaatcacctctatgtttggataaatcttatgagctgcacagaaatctaacatttgctgtgttattttggtccccccggttacgcttccagcgagcattctcatacctgtccagacatctttggtttcagtatgacagtatcttacagagtatgtatgtaaaattggagattataagaccttttgagaaacataccaagattgagattggcaggactgattttaatttcacttgggaaaccaaccaatacataagttccagcaatcttcaagagagacatgtaaggatcaaacgcgtgatcaccagatgctgtgtcaactagaaagtctagagatttctctagtgcctgcatagatagattcacaagttaagtattatctggttccaatcctaaataatcacaagaaactaattaagtcatttcactaccttcatctggtcatggtcagatgagataacgaaattctcagctcctagcagattcaaagcttcttctttcttggaaatgctggtgctaaaaaccgtaacactaagtccaaaagccttgccaaacttaaccgccatgtgtccaagaccacctagcccgatcaccccaagagatttaccaggttgattcatattgtgacgcatcataggtgcataaaccgtgattccagcacagagtaatggtgcagctgattacaaggg

SEQ ID NO: 58636 - DNA, 442 bp, Arabidopsis thaliana landsberg
  unsure (1)..(442): unsure at all n locations
tttatngtatataaaacccactaaaaagacaaaggggaactgtaggtttatattaatgaataccccttaaccctcatctacatgaaaaaccaatctcgtgctgactatataaagagaaatccatgatataatgttaacaacaactaccacgaaccatcctagcacattcatgaccaaccctatcttatcacatcaaaaaccatccatctattatattccatctactctgcaaaaacctcatcctaatctaacgtgtaccacatccatcactgcagaaccaaattcatctactactacagcttcaacggtgaccatacacctcactcctgtccaaaaatccaaatgtataaaaacactgttgaatccataaacatcgtccccaatttctcactccgaatcacgaacaacggaataacattcctacaccactgcctgaacatca

SEQ ID NO: 58637 - DNA, 1159 bp, Arabidopsis thaliana landsberg
  unsure (1)..(1159): unsure at all n locations
gccgcaaaagtcttcactaaatcgtaaacttaccaaaggaagccatgtagtatttgctttgagatctctgctatttaagatatcaagacttcttttgtgtttgatgcccaatttccaactctctctttctggatatagattgtaaatgtacctgagaaaggcgctaggaaacaccctagaggtgacaatatccaggtttgtcgtgcttcactctactctgtatgttctggcttgcaccttgcacaaacaacaaaggctatgcatatgtatttgttctatcgtgaaatgtcaatatttttatcatactctaatattattgattatgtagacaaaagagatttccaatttaatgttctttgcatggtgattggagtgttagggtttaaaatttgtaatcgacatggtttcttgttttcttgtttaagtttgattagtagtctcccctgtaaatcatctgttttttacatgcggtcttgttgactatctacagatagacacaaaggacatactcttcatatgtggtggtgcttttgtagacattgaaaagactatctcagagaggtctgactgatgaacatatttcaaattcctccgttttttgtttctatcctctaaactgaattgcgttataagcatatgagtgtgttttttttggttccaggcgccatgattcttcaatagggtttggtgctcctgtacgtgccaacatgagggctggtggtgttacaaacgccgctgttgcatcaaacctaatggaaactgtaggtcttttcatctcttcactcaccaaatgttgggtgttcttctacttgttttggtttgtatcgaagttnnnnnnnnnnnnnnnnnnnnnnnnggtggaaagcagtgacctgattgcttatggtttgattcctgaatttgttggacgatttccagttctcgtcagtttgtctgctttgactgagaaccagcttatgcaggtactaggaatgacataaatatgtgacattgtgatttttgcattactagaccatgttcatagaatatgcagtaatatcattggattgcaggtgttgacagaacccaagaacgctcttggaaagcaatacaaaaagatgtaccagatgaatagtgtaactactaatctctctatctctatctctctccttctgctcca

SEQ ID NO: 58638 - DNA, 179 bp, Arabidopsis thaliana landsberg
aaaaaaaaagggatgggaaaggaagaaaaaaaaaaagaaaaaaaaaaaaaaaaaaaaaaaaaaaaaaaggaaaaaggtggatctgacggggggagaagggagaagaagaaaaaagagggggcaaaggggagaggggggggggggggggggggggggggaggggaaaggaggaaaaagaa

SEQ ID NO: 58639 - DNA, 187 bp, Arabidopsis thaliana landsberg
gattatatattttcatacaaaaaagacaaaacacaaaagaaattgttaatattaaaaaccttttacccctcaccctaaagaaaaacaaatctcttactaacaacatatacatacagatgaataatcattattacaacaagtaataataaacttcttgaaacattgatgaacaacaaaataatatcac

SEQ ID NO: 58640 - DNA, 481 bp, Arabidopsis thaliana landsberg
ctatatctgcagattttttgttaaaatattcatttgatcagcactgaattcgtcctttctgatcattgtgggacaataatattcccagtttatcaacttccattgtggtatggcgtacataatgctatcacaaagtcatcatgctttttaaaaagacaaaaaataatcaaaatcgtgttttggagtggctatcagttgccctcattttgaaaagattctgccttgtttaattcagacgagttttggcgatttaggccatttccattttgttgttcacaatgagcagagagtttatagttttttttgtcccttttaatagtgtgtgatctgctatagctcttatctaattgacagtaatatttgtttacatattgacaggagcttgggataaattgtatagaattcatgccatgtcacgagtttaatgagctggagtattacagctacaatacgattttgggagaccacaggtatgacattt

SEQ ID NO: 58641 - DNA, 341 bp, Arabidopsis thaliana landsberg
tctatattctgttcgaataaatgtcaaaccaactcaggagaagttgaatattgaaagaagttaagcccttgtccttaataaaatcgtgacgcacacccaccactaataactacatatggtaaatcacgactaacacttttatgtgcaaacctctccgcacacttacaaacagccaaatcacatcccatatatacacatagtcagacaatactatccttcacaacgttaacattcactacagcctttcttgccccatccacactgactatcaacactaaataatgctactacaacgcctacaaccgcaaccaatacacatctcaacgtagataaccccatac

SEQ ID NO: 58642 - DNA, 323 bp, Arabidopsis thaliana landsberg
cgttttagggatgttggccagagcaggtgcaaaccgacgcgcagatgctcttggcaaccatcttttgatgggagtcgcccttcccgcatgccatccatggccgatgaataggatgaatactcttgcatcgcgtaaggtggatggccaacctttcggggagagctaattgactgctttgctctcccgagcgtgcacccactacagagtgtcacccacctaaaggagcactgagcatatatgatgccgaacgtgactgttgccaaggttgtatgtattttcttcacactactcaagtgtcaaactcgacatgacctagttatagg

SEQ ID NO: 58643 - DNA, 1155 bp, Arabidopsis thaliana landsberg
ttgctacctgctctcttttaatcgaagccatcagcggcaagattattggattaagtctagcaggaaattctgacatccaaacaactgcagcagcgaccagggaggtgactgtgatatgtagattactctgcataaacataagtccagatataggataaaaatggttcaatcgagaaatggaaacatttaatttatatgacatgataatctagcagatcaagatttaaaatagcacatgaattgtatcaaaaatagatcccaatgtacctggacacactttaaataaccagcagtacttaatagctgttgcctagatgactccacgtcttcaaaaacttgcttttctaaggattcatttccagcactttctttgttccacaaatctagtgttgatgcaaagtcaattgtctcatcagcagtcacgctctccacattgagtttattcgttgataataacttatcaaaacaatggcaggtttcaactgtatgcaacaactgagaagcttcattcctcattttagtgtatgttcttgagagctcagcataaggaagaaatatgtctttagtagggaaagcagggtctgcgcaagctaacaaatctagcagccattttttcagaggactagggaaaccaggcaaacttccacttccatcagaaggggccttgcatttagtttctctgaaccaagagatgagcacaatggacccaacctgcagagccagcggtttagtttgaaaaacgcaacagatgtctagtaatagagagaaaacgagatattgagatagagagatgcatacctggcgctgaacaccggacatagaagtaagagtactactcagtggatctaccacaaactgcattgaaccctctcgcaaccgggatgcaaagatacctaatgcagatgctgtaactacccgggtacgggtcactgacatctccatatcagagccgacaataattttagtggacctggcagaagcatcttcctgtttttcaagggaagcagaacttcttgcataatcaaatcccagaatgctagaagcttcgttctcaagtttgacagctttcatcttagcagcagctttgaaatgactcttacgagggggagctactggccaaaacatttttgtagcattcaatgtggagccataagg

SEQ ID NO: 58644 - DNA, 151 bp, Arabidopsis thaliana landsberg
  unsure (1)..(151): unsure at all n locations
gaaggcacaaagagaaaaaaaaaagnacanaaaacaaaaannanaccagacagcagcannagcncagaccananagcnnagagnncngcagncaaaagngacgcgcaacggannggagncagagcccagagggagagagagagagcaggca

SEQ ID NO: 58645 - DNA, 272 bp, Arabidopsis thaliana landsberg
tctcgattcgtttttcccgtaaaatctgaggaaataaaattaagcaaaagtttccatcgatcctctgagaaaaaattcgactctctagtccacgagttttttttttgttcacctctctctttttcgttaatctctctcaaacaacgcctcttcatcatttccttgtaattcactttcttctccgttttttttttttttgaatctctctacgtccttcgccgtttcgatttctggcttcctctacttgatgactaaactttgaacaggtctag

SEQ ID NO: 58646 - DNA, 158 bp, Arabidopsis thaliana landsberg
  unsure (1)..(158): unsure at all n locations
aggcaagagacaccaaccgcggggccccgggaacnncgcgcccaaccgaaaaagagaaagccactcgccgagacccaagagagaggaaagggcgaagaacccagccccggaccaccgaacggagagaggcnnggagaaccaaccnacaaaaacaaacc

SEQ ID NO: 58647 - DNA, 549 bp, Arabidopsis thaliana landsberg
tacctgcccaccgcttcactgccttgatggtcggggcccatgacggcttcacgacggcacatgctttgctgccggcagcatcggcgttggagtctcctcgatctgccgccgccacaacatcgggctccacgtcttgcttcgccgcttacaacactgactgctgctcctcgacaagcctctacacgagttgtagccacgatgacaggtggagcccaattacaaatctatatgtgttctatttaaatgtaggctctacttgcgagtgaatatgcaaaaaggaattacatgcagtcttgtttggttttattcaaagttcagaaggttaataatgcaatttgaagtacaaacatgctgctagaattatttacctgatttgtgttctccttgttgatacattctttataaatgtagaccggaagtgtaaccggaattgccctgggtgtggctctattcttttcagtctacatgttagttgtatttgccatgcagataatgtccatatgtctttctctgcagctgttattgagaaaggcagcgatttatacatat

SEQ ID NO: 58648 - DNA, 249 bp, Arabidopsis thaliana landsberg
  unsure (1)..(249): unsure at all n locations
accagncacaaaaaancaccacacggaaggcacgacagaaagagaaaaaagcagggcggccagaaccacgagcganaacaccgcgggcaacgcacccacgacaacgagcagaggaccgaaggagcnaaccgcccaccggcacaacacgggggaacacgcaacacgccncgaccggggggaaccggagccgaacgaagccacaccaaacgacnagcaagacaccaggagggcggcagcaacgacaacaac

SEQ ID NO: 58649 - DNA, 829 bp, Arabidopsis thaliana landsberg
actctaatcagctcccattttgcttcgtttcacactcaaagccgaagataaaacatcactagactaattcttaatcaaattagacagctcataactaaaattttgactcagaaccttcccattatactaaagaatccaaatataccattagtaagtacaaagccaagatacaacaattttgcaatgtaagcttaagaatataaaactaacagtggctacgtttcatttatcttcctaaagaacttgtagactggtgatttctctttacttgcaacaacatccttgaagattacaaacaatattaacaagtcaggagcaaccatatacaccattactaaacaagtcttaagcctcctcattggacatatacaaaaactggcaaggacatgatcgttaagagtttctccaaatcattattgtggatcggcatcatcgttttggtttaagaagcggaaacccatgatgtatctgtactctccggtgccaagacagcgagaacagtcacttaatccactccctccacaactcttgcacctgtgaccaaaacaaccaaaaaaatttttgaactcctttagttcttgaatcaaataacagatataaaagcctcaagaataccatttaggccattctcctcttggaagcatttccacatccacacaattagtcctcccttcaatcatatatcacaaaaaagcaagaattcaattctctgaagtagttaatacgaagaaatcaatcataagagacatttaaagttgagaaacagagagagaagttatttatctttacctttcccacaacaattgaaacaatcgactcttccacttcc

SEQ ID NO: 58650 - DNA, 1822 bp, Arabidopsis thaliana landsberg
tacactacagtcaatccacttctagagaaagtactaatgcttcttgtaagcttcataaagagacctcaccagagccttgcaggaattggtattgctgcgtttgttcgtctgatgagcgatgctgatggcttgttctctgaagaaaagtggttagaggtggtgtcagctttaaaagaagcggcgaaaacaacttgcccagatttttcgtatttccttagcgaagaatatgtagcaagaagccagagaagtgctctcaacattcagaacagtaatgctgagtctgctgctccaactgctaccgatggcaatgaagagagtcagagaacagcaacccatctttacgctgctatctctgatgctaagtgccgagccgctgttcaacttttgttgatccaggttagttcctctcaagccttacgtttatgtattataataatgtgtgttccttcaaatgaaccgacaatgtttgttccttctttctttaatcaaatgttcttttgtaaattgataactcaaaaggcaaacgcaaacagaaggaggaacttgggagtcttttccgtttacaatttaccaaaaaaaaaagtaaatgcaatttgtgttgttgctgttattgtagtaatgtttctatttttttcaggctgtgatggagatttacaacatgtacagacctcagctttcagcgaaaaacacattagtcctcgtagatgcattgcacggtgtagctttacatgctcacggaataaacagtaacacaatacttcgttcaagactacaagagctaggacccatgacacagatgcaagatcctccactacttcgtcttgaaaacgagtcttaccaaatctgcctgacattcttacagaatcttgttgcagacaaaaccaaaaaagaagaagaagaagaggaaatagaatcacttctagtcaacatctgtcaagaagttctcaacttctacatcgagacttcttcttctgcgaaaaaattacaatcagaatcatcacgggccagcgaataccgatggagaatacctttgggatcaggaaaacgaagagaactatcagcaagagctcctcttatagttgcaacacttcaagcaatgtgtacattggatgaggcatcatttgagaagaacctgaaatgtctatttccacttctggctaacttgattagctgcgaacacggctctaacgaggttcagactgctcttgctgacatgcttggcctatcggttggcccggttttactccaatggtcctgatttttttctctcttttcttattggctttcatctttgactttggcatgtcatgttaatacttgcctttatagagttctctcttaattcatagcggttcaatataacaagcgtttaatggacctgatgggcttaaggtcgcgtaggcccatatatttgcaagctgttctcgaggcactttccgtggtctccaatgatacgacgcgtatttgtccttatgcggagtgatttttcatttttcaaaatttcttctaattggttaaatactttttttttttttttggtaaaaattggtttaaatactgaaatccgtggaacaagtgtatagtatggcatatgtgaacgttgcatgatataatcgcccaaatctcaaaggcgaggtttgaaccctatttcgagacaattagtcaagtaagtgagtgctttgacgtgagtaagtactatatatagtaagtattacatgatgttgcattgtattagagccacatgcgcccatcatcactaattggctttttacaaatgaactggtcggtaagtgggggggagtgacataacttgaaggatcac

SEQ ID NO: 58651 - DNA, 496 bp, Arabidopsis thaliana landsberg
aaaacacgtatattttttactcatgcacaagcgatggtgaaaatataaattttaatgttattatttatgatattataattcaaatatgtagacatttttatatatcttgaagatattttttttaattttgttaatataaatcaaatatgcatatatttaaaagtgtattgataatttttttttctcatacaatttttttatttaggggttaagagagaaaataaattttagaagaatggcttccaaccgttgtgctgtctgcaaaattttgaatgaaacttgtgctccaatgtgcatttatgcaccacattttccatcaaacgatgcaagtttcaaagttattattcagatttttggagccgtgaatgtttgcaatatccttgataatcttgaatttccagaacaacgagagattgctgccaactgtttacgttatgctgctgaggctcgtatacgtaatcctatttctggttgtcatgacatgattctacaatac

SEQ ID NO: 58652 - DNA, 929 bp, Arabidopsis thaliana landsberg
tttcaacaaatccacggtacattcagtcttgtttgtaccaaactaatcgcaattatacactatatagaaagtaaaacaaaattcggtaaagttatgtatggtatagtcagcattgattggccctatccaatcaatcgtattcatacgattcctatcactaccattcacacaaacagtgattgtatttttagtatatattaagcactagacattatgaacaaattcatatccttttaacctttacgattagtcatttctatatggggcactaccactatatgatggtatccatagacaaaaatagcaaattgtaatgaaaaaagttcgaataaaatccacataaaaaggagattatatcattaaacacgaataaaaatataacataataaattgatatttgaattcaactttttttgtcacttactttctagtgtagcatcctcttttacccttaccaacccctaatctcttcttcttactctcaccggaatctccaccgttgcaactcaccggagtcgccgaatcatccccacatgaagcattccatgaaccctcgacggcgatggggacagagacggcgacgggatcaaaagaatcaagaaccgatatagttttatggaaagatcccaagatcttagacatgagctcatcaacgggatctggaccaccggaaactgaacccgacccggaaacaagacgggtctcatcgatgtggtactggttagagtgttgatgagaaaggagaagctgaagctgagtagcgaattcatagccttcgacaagttggtcgacaacttttctctttatggatttcgtgttgttactattcgaatccatttttttctcacaaagatacaatgaatatgtaactttttttaggtttttagtatgatgatttgagaatgaagaaatgttgtaatatagtggaa

SEQ ID NO: 58653 - DNA, 584 bp, Arabidopsis thaliana landsberg
  unsure (1)..(584): unsure at all n locations
aaccgaataaccgaataatcttatgcatttgcgcagacaaagagatttgattatttatgagacaagaggaaggcaaggggggactaaactaatgcaaagcttagcatgagagtcacgcaagcagaagcttagaagcacattccacaaatccgacctttacactactactattactactacaaataggcttcaacattagagactatgcacttcacctttgcaacaaccatttaagtacatacatactcccaaaatggctgcctctgtggaatactttccctattactcaccaccctcccatcaacatcctctcccttctccagttccaccccctccttcccacatttcccctccaccacctccattttctcctcctgatcacccaccaccaccacattattctcctcctcatcagccaccggcatcaccatatcctcatcctcatgcgccaccaccatcaccatatcctcatccccatcagccaccgcctccacctcacgttcttncaccaccaccaccaacaccagcaccggggcatcatgtatcattggcgttgttatctctctgggaagttggtttttctt

SEQ ID NO: 58654 - DNA, 1098 bp, Arabidopsis thaliana landsberg
  unsure (1)..(1098): unsure at all n locations
cagagttgccgaaccgaaccgatccaaagaccgaaattccaaaataatttcgccgatcggttaactcctccttgcagcttcagcgccgataactgaataaatcggtttattcggttcggtttaatcggttttcgaccacaatctttattatatcttgttatgcgtcttacatagccacacgtagaaatctttgttgattctcaatgaacccaacacagacacttttctctcccggcggtaactcgccggcgtcttctccggcgagtcatccatcttcactctttcctcaaatcaacaactgtcgaactataagagacctctctcaaatccatgccgttttcattaaatctggtcaaatgcgagacactctcgccgccgcagagattctccgattctgtgctacctccgatctccaccaccgtgaccttgactacgcacataagatctttaatcaaatgcctcaacgaaattgcttctcttggaatactataatcagaggtttcagtgagagtgacgaagacaaagctctgatcgcaatcacattattctacgagatgatgagtgatgagtttgttgaaccgaatcggtttacgtttccctctgttcttaaggcttgtgcgaaaactgggaagattcaagaaggtaagcagattcatggtttggctttgaagtatggatttggtggtgatgaatttgtgatgagtaatcttgttagaatgtatgtgatgtgtggttttatgaaagatgcttgtgtgttgttttataagaacattatagagaaagatatggtggtgatgactgatagaagaaagagagatggtgaaatagttttgtggaatgttatgattgatggttatatgagacttggtgattgtaaagctgcacggatgttgtttgataaaatgcgtcaaaggagcgttgtttcgtggaatacgatgatatcgggttattcgctgaacgggtttttcaaagatgctgttgaggtttttcgtgagatgaagaaaggggatattagcccgaattatgttactttggttagtgttctaactaaaatttcncggcttgggtctttagagttgggagtatggttgcgtttgt

SEQ ID NO: 58655 - DNA, 568 bp, Arabidopsis thaliana landsberg
  unsure (1)..(568): unsure at all n locations
ctcacttcacccacgtgcaccctccagtccaatctcactacatccacaccggtccgagcctgtctctctagcaaacctcctgatccactagcatatagtatgagaggtaggtttgggtgagtttgtttcacagcttccacaatctgtttgagataaggtaagctaaactcctcaaaatccaccgggctaagctcggttgcccaagagtcgaatatttgcacagcttgagctccgctatctgcttgatagcgtatgtacgttatcatcgaggttgtgaacttctggagtaaggcatgtagaacctgagaagaaagaaaatctgttcaatctctgagatattaaccaaattgtcaagttgtacaattgctttaagcttttactaatccaccttgggttgagaaaaagctaatctttttatctgtgtgaagttcttagatgagccaccttcgattacatacgaagaaagtgtaaatggagctccaacaaatcccagaacagcggcttcattgttcacctgaaataaaacatattcttcagcttaagagcanttgtaatttttggtttttgg

SEQ ID NO: 58656 - DNA, 1286 bp, Arabidopsis thaliana landsberg
  unsure (1)..(1286): unsure at all n locations
ataactcaaattaatggtgcccaatgatttagtcgcgcagctgcaagtatgtagacgtgtgtcaagtctccaaaagaaatggttaaatacgtcactatgcatcagtctatttatgatttaaccaaaagcatggaccgagtaacatgaaatagtgaccttaagagtcaagacaataaccgattaccttttattagaaaactgtctatatcctcaatgaggtttatctccaagttttccatctttctcaaatacggtgacgttttttgacttcgcatacgaccaaaatttctaactatactatactatactattgtgattgcaagatcttctttcgtttgattttggtttcttgtgattcaaaatatgaagattttatgtagaacgattttttttctttttctttttataccgaactattctataagattgcgctgatacttgactcagtttgagatttttttttttctttttttttttgccaaacatacatttttcaaaataaaataatggtccaatgagtttcagagtttaagataaacttattttacctgttgataaaaaaattccttttagtttcacttttaagacttaagttgccaaagaaagtatattattactgatcaacagcattacttttaaaattgggttccacaaatgagagcatataattccttatgtgggaaacaggattcgatcatcaacgcctaatacacacaatgtcggatctgtggcgaatgactaagccaaagaacaatgacgcattatcattaagtcgatctccaagcaacaaaaaaaaatatgattcataccgtacgtctatgcaagaaaggtttattttatttgtcagatgagcaatcgatggtaacacaatttttgagtcaattcgttttttttttcctgctggaatgcatagtatttgcgtatttgatgatctttaagataagcacactctaaaaaacaaactctagtcctctcagaatagatatgaaccgaatgtataatccaatcacttcgttggtatataaagatacttaggagcacattgcttatgggacgaggcagcaaaggaatttgtctagtgagggacaagtatctaaaaaaaggtatacaacgacacatcgtttagtttagcttagtaagcaaatcttcagatttatttattcacgattttatgctacatatctataaatttgaaatgtaacaattacagacaaacatcttatgctnctatataaaattaaacatagacatgtgctataattaacccttgtgttctaaacgggtgt

SEQ ID NO: 58657 - DNA, 941 bp, Arabidopsis thaliana landsberg
accaacaaaaaagggttgatagtaataaggatcggacgtaccgggacttttgtgtagccagctttttcgagagcagcataagaagcatcgaccatggcgtcgaacatgttatcgtaatgaagcttggttttagggtccaagatgcctttgttgtgctcgaaaagggcgtaattgatgtcaattgtgatcgggtcggatttatatgcaagaaaagggtaggcgttaatgtagaacggcgactgaatttgccaaaaaaacgctagcaacggcttcataaacggcgccacatcgtctctgaacgtacacgacgacggtggatacgagttcgcaaacactgcctctgaatgtggactcgacacctataaacaaatattgaatgttttaggctaaatcatcatttaggttctaagtttgatgtcctaaaaatattagagatgatttaaaaagaaaaaaattcaaagagaaatccaaattgatgcatgcctactaacgtatctaagctggattatgatcgacatggtcatattattaatacaaacttctgttactaggttaatagatttatatatttaaactgaatcattttgggtttcaaaaaaatgattgatcattttgggtgtaggggaattctcaactttactcggaaaaaaataatgtatttatgagatttaacgttggttaaacgtgcaatcttttaaaaattttgagttaaaactgaaaactttttccaaacaaaataagcaaattcgagatgtcatggttttagcgacatgtttggtatgcaagattaaggtaatgtacctcgacgacattgtgaagaccgagacggcgaagagcggagtaaacgttcttggctgcgggtaagagagcttcccaaagcccgatatcggtgccacctaaaatctcgttacccaccgcgataccgctaattttagtaccgc

SEQ ID NO: 58658 - DNA, 288 bp, Arabidopsis thaliana landsberg
ttgccttgatcttcagacgccaatgaaactgtagtgtatatgcaactaccctgaaggattaaagatagaagcctagatcaacggctcccagctcaaatgcatttgatccttactaagttacacgttctctgccatgaatgcagttccgaaagaaacctttacttaagcggcgaataaaagagcccctctggataaactccatcctatacacttcagagacatggctacagtgaatctttgctaaccattatgtcatcgcgacactcatgagttatgctaacccctggg

SEQ ID NO: 58659 - DNA, 1212 bp, Arabidopsis thaliana landsberg
aacattttgtcaacaaaaagctttactgttacatttaacttaaacattcagttatttcaaatatagagttttcataagaaaattacatatgtcaaaactggaaataaaataatgtactagttttcaaattccataaagttttgaatactctttatcaacaaataattccaaaaatatattcggtgtgggaagatgttctgatgcaattaataagaaagacaaaaaaaaagtgtatcaaaaatatcaaaaactattattattagaaaaagagataaacccaaaaatggcaaaagatgaaagagaagtcaaagcatggtatagcattaccacgcccacttcatcttcaagtcatttgtacacgttaatgtgtgcgtctgtgtgtgtgtgggtatatagtagtaaggtttaatcttataaatttaagtaatcaagcaaatacttaatttaattatatcaaatcaagcataactactgcattctaatccaatgaaaggggaaacagaattgcccacatgcaaatgtctcgaaatgtcttaaacctgaaagaaaatgtgtgttagtcttacatgtgctgctgcaacattaatttaatgttttctttttgtcgttatgatcctataataagaatttttctgaaatttgatttgattctgaacgccaatggtgattatgataatcgaaaatttagaaacaaactaatcacttgggaattctagaacggagccaacgtcagtcacatgaattccttttttaacattttaaatagattaagacatttatttacgaacattctttagtaaacaagacaaaataaatccatgatggtggactcttttctaacgaagatcaatcagagcagaggtaaagagccagcttgtctacaactcattttgtaaaatacctaatttacccctcccaacctgtcccacccaacctctacctctatatatacaccactgacacatatttaatacacacactaatcagtaatcagaagtataaaacacaacatgaagattatgtgggaaacagcagttgtgttctgtctctgttcattgtctttggtttctgcacacagcaggaaattcacaacaccaaacgtgacacgcctcacagatcaattcagtaagatcgccattgaaaatggcttcttcagacgtttcggagctcacaatattcaggtcaatggctccctcgctaagctcactctcg

SEQ ID NO: 58660 - DNA, 593 bp, Arabidopsis thaliana landsberg
  unsure (1)..(593): unsure at all n locations
cttggggtgcaagatcacggtcatacactcggtatcgcacacgcatcgacaaaaacaacttgaaccctagcgacgttggtttcgttttctcggatcgcctacaggaccaagactgcttggctctcgcgatcgcacacggagccgatgacactttcggctgggaccacgtcaacgaatcgaatgacatcatgtatgcgtcccttagcgaaggtactcatagtttcttgaaatcgactctagaaaatggtgctgtgcaggacgaaccagtcatgcttcgtaaacaagtcggtactttggcagtcgactcacacacggacacaagcacgtctacatcgaccgattcgagcacatcaaacccaacgcaggatgtcagctcatgggctaacgtattcaaactcagcctgtcggacctcgacgcaatgttgaacggtaaagttgacctcggaagcttgggcaatggctctttcaacggctttctacaatcattgctcaacatctntaacggtggcggcatctttggtaatagcaactctgaaacggcgacatcgcaactagcaaaaaccgttgagatcgcaaagatccttggcaacatc

SEQ ID NO: 58661 - DNA, 559 bp, Arabidopsis thaliana landsberg
  unsure (1)..(559): unsure at all n locations
tattttaaataccttataatttaatgctgaagtaggtgtaatagcagacacaaaagcatggtaacatgttgatactgaaatctagttgtactggtattttttttcgaaagtagttgtactggtattgaagtttgcattgccaatatatcaatttgtagtaatctaagaatcacacctgtactcttttctatttgcaactacatctgcatgttattaccttatacgtgaaatgctgttttgtgacctaatagttagcattatactaaggtttcactcaaccaattatccaatcgtttgttaaaccatgacacactactattttactgttaatttatatgctttccaaacattattaggtactggggagtggggaccaagatagaagggttggctgccactcaaagcttgtgagattggttacaatatccatgaaactgaatgttctggtgccagtacactcgtttagatattttaaattatggttgcttgatttgngtagcagtagaggctttcttttgaagcattctagtgttgtccaccttttgtactcctttagtct

SEQ ID NO: 58662 - DNA, 812 bp, Arabidopsis thaliana landsberg
catttagagaaaacagtctttgaattctcttcttcttctccttccactacctcttcttcctcatcatcatcttcttcctcatcgtcgtcgctagtgacatcagcatgtcggaaatcaccaaaacacctgaaatcgaatttgatgtttctaagacaagtcaagaaacccatcacatctttcttcaacccaaaaaacttgctttgcgatctattatcatgtatcctctcaatctcttccatcaccgattgccagttctttcctctccctccgcatttacttggccggactttgatctgacctgcgcaagttactttaggagaagttggttctgctatttcgtcacctcccatattcttactacttgcttgtttagcccacaaaacaggactaccgtgtcctcctccaccgccgccggagagtttactgagctggcgacggtggtgaggacgacggttagtggaagagtctgagggacgagatgggctacaaatgggcttaggagtcagagctaagtgggttcttgaagggaaacaaaccaacaaatctgcagagtaaccagaagaagaagatcctctgtttccattgtttcctttgatcatagcttcttttaagtctgcttttgttttcttggtgtttggtttttggatcgatggaagggttcagctttttatgtttggatttataaaattcttcttctttttttcaggctttgatattcctgtgttgtgacagctttacatgctttttgcttttgcgtggaaaaaaaaaactttctttttcactaacctcttttttcaaaaagtgaaaaataa

SEQ ID NO: 58663 - DNA, 1313 bp, Arabidopsis thaliana landsberg
tatctttgtctttggggaaactttgagacataaatttaatcagaacttttttcttttgtttaagatatgggtgatcgaccttaaagtgacattttgcttatgcctttaaatcatccagtgaagcagcccgagaccgctccttttggtaagcaggttgaagaatctggagtaagtcataagccagaaaccgtagcaactcatccatcaagtaccgaaaccaagcataacattctctctggttccattaacgctgacatgttaagagagctagtagaaaagcaacctctaaaggagactgaggatctctctaatgctctcaaatgcacaccagatccagcaaagctttttctagacacatccatggctttgtgtcctacaaacaccgaaggggaatacgagttcaagcttctgattacttcagctagcagttccttattgttgaatcagctgaagaagctcctgcctaaaattggacatcctgtgaaaggcgatgcgaagaaacttgccgtttactggaaagataaaattgcaaagagcaaaagagatcaattagaagtcatctgcttcctacagtttcttggtatctttggaattgtgtcagagttcaaggctgatgaccttcttggtctactggataattcttattggcaaactgtgtctcctgatctttgccagtttctcgggttggacgacgccattccaggttattcccttttctctattctcctgctattgctaaccgctaggcctatagattcaattgttgaacaagatgtcttctgttaaaaatgtctgaactctgtgagcttgtttaatccttttaacatatgccattttactgaagacggcttgttcatatgggctttgtttcgacaggtttcattcaaaatctcataaaaactggacatcgtatcaaggcaatagactacatatactcatttggtatggtccatagattccaacctgtatccgctattataaacgattccttgaggattacaaaggaatctgcagagaagtcgtatagagaagccaagaacgaatctacaacgcaggtaaaatttaagccttttctttgttcttaacttcttgtatcacaataaaactcaaatagagattgttgtaatacaaagcgtactttacaggttgcagccatagacagacaggttagagcactaagagccgccattaaatgcatatcgtgtcataaactcgaatcagagttccaactcggagaccttgaagaacaaatcaagtcgcttttgaagctcagaagaaacacttctaatggatctggatccggatccgcatcg

SEQ ID NO: 58664 - DNA, 536 bp, Arabidopsis thaliana landsberg
taacgtgcttactattttgatatattcaggatttcaatctagtaaaaatttattatttattttaaataaatatcacatctgtgaaaaagaaaatgaaaagatcatcacgtatatcgactatcgagactcgtatagaatctcagccagcttagacactactcagactagatgcaactatatttttatttgacttcggaagattttattcaaaattaagcatatatgcatatggtagtagagtctaaagaatattaaagattatttaccaaagaaaagagaatattaaagtcaatttgtcgaaggtgccatgtgaatttatggatgctatatatgcattctgatataaaatttcttgaactctttgaattatgggaagattgctcgtaagattctttacaattagggtaatttccaaaagattcttttaccacggcttaagacaactacagaacagaactaactgctcattagctttggcaaatggacaacacgtcatatcacctattttaggaatcattcatattaggtgggcttag

SEQ ID NO: 58665 - DNA, 346 bp, Arabidopsis thaliana landsberg
  unsure (1)..(346): unsure at all n locations
aaaacccacnnnaaacnngaagaaanagaaaanaggaaacagaaacggaaacagagaaggaaaaanaaaaagaaaaagaaagaaaccctacctatgngggccgantactcttccctcagcccactcttctcccctgcccactcttctcccctgggtctaggcctagcatttccgtgcggcccacttcttccaccccagcctatgccgatgctacgctgccagtggggcccacataccagccatgcatctccttcttgccttcctgtgccgctgacaatgtggggcccacttgtcacgttcatcttccacccggtaaacagactccaccgaatggcgcgcgtggaat

SEQ ID NO: 58666 - DNA, 1060 bp, Arabidopsis thaliana landsberg
gttagtcaaaatcctccccaaataagccagactgaaaagctagagacaaaactttgacagagatattcaatccactgttaagattataaagagaacagaagttcaaatcagtcaaagataataagatcaggtaaagcatagtgacatgcaaaaaaaaaaaacctggaatagctagctgcaggagattcaggagttctctgaccaaaaatcatagctctttcattttcccagtcaaaagctggttcataagcaggtaaaggaggttgcccaaaatgctggaaaaaaaaaaaaaagtaacaccttcaaagtaagaaccaaaggatgagaaatatataacagagcaatgaagtgagtaaaagaagacaccttagaggatccaggatcagaaaacggcctcccggaaatactggcaacatcctcctcaatagttgcactcctagcactagcaagacgaatctctgaagaagcagagagttaattgatgtacaataattgacaaaagcaaaaaaaataaaaataaacaatgcatcatagttaccagtctcagtatcagtatcaggtccttcaaaaatctgagtctggaaagaatcaggtcgaatattttcatagtgaccgtatttgttaacatctttaacccattcagtgccataacattgaaccaattgattcaaatgtggccattgttccagattctcatcaagctgaaacaaaagagaagaaacacattaacgaaaagagagagaaaacgcgaataaaggttgaggagagtttaattaccaaaggatcgagcttagggagagcaagaggctgacgaggtagcttacgaaatcgaagaccaagattgttgttctccattgagatagatctaatacaatgtgaggtactactacgccattagagagaattggggatttgtgaaaacctagaaatgggaaaaggacattgttggagtagtaagtagatctgagtgggggagctaaaggaggagaggaggatgaatctttgtctttacgcagagaggaagagatccgtgagaggaagcagttgggagaaaaagtga

SEQ ID NO: 58667 - DNA, 629 bp, Arabidopsis thaliana landsberg
aaccgcgaatgaattaaatatgtgtgaagaagaaaaagaaaaaaaaattttctatttccgagcaaaatggttgagcaagggttgtgtagcgcaatgattgggccgaaacatgttacaggcctgaattaagacccagtccgtgacttctattcacgttatgggccacttatttaacacaagtatatatcgaactatgtatcgaatctagtttacccaaccgaatcaaccatcttaactatcaaatgtttttaattaattgaaaatttctttttattagctattatgatcaacacaataataacacatataccaaaattaatcaggctgtaaatttgcattccaaataatatccacccgtgtctggaatcctggggaatgaatcggctcagtgattgaacatgattttttctgtcttggacacgtgtatgattgttgtcgtctgtgtcttacgtattttatccaatctccattcagtgccatgttcttcttttaaaaccaaaactaattttagtgacatgttagttcaagatatgaaatattagcatttatgtcgttttccattactggtttacacgtgtaatttatatcactaaaatgaaagggaccatcaatcccaaaatcaatcaacc

SEQ ID NO: 58668 - DNA, 895 bp, Arabidopsis thaliana landsberg
tatccatgtaatgttatgacctactgcccgagtatttaagctaaccatgttcaataataaccacaactaatttactctgtcctactagagactagttccaacacgaaggcaaacaacagaacacgaatgagagagaaaaacaaatgctcacctcgctttcatcgtcaagaactctttccataagatacaaatcactatactttgtaatctctagtagaacttccaaaacagatgacctcactgtggcttgtttctgcataaaatcactcgtctcagatacaaacgcatcacacactatataaataaaatctcaaaacgaaaatatcattacttggagttcttctggacttgtttcctcaagaattactccaagaagacggcatgttacctacaaatgcatattagacaactcaataataaaaccaacgcttcaataaggtgcctaacatgaccaaacactatccatagctctgagaatattaatactgatataaaattaccttccttccttcactaagcttctgtctaactatttgccccaaagtaggctgcaaaaatacagaacaaagtgaataatactctataacacaaaatttcaaactgtttagagaaaaagaatgttactttaacaggttgaaagaactgatcaacaacatcttgcaccgcattatcctcacgaggcgaagaaacttccggagcaaccgaagaagctagattcgactgagaagcagcagcagcagcactagacgtttcagcattgtgaatcctacgccttcggctgccttctctgacgttgctctccgggcgttcttatcgccctccacgtaaatatcaccgcaatcgcaagccccgcaatcgcaccaattgatcttgaatcctaaatcacaacaacatc

SEQ ID NO: 58669 - DNA, 574 bp, Arabidopsis thaliana landsberg
aatgacagactatgtgagacaagattcatcagaatatgaattgattttaacgtgtggtagagagtttttcaaaacacatgtggaaaacaattagaaacaaaacaaaaaactgacaccagcccttagaaaaagatttttgaatggtaagaaatttagattttctacaaatattttgaataatcttgattcccggtttagaaatgatcaagacattggtgaattacctatataaaatttcatatttctattttgcataacatattttaaaatcttataatcaagtacataaaatatcaaacatataaaggatctacaagctcaagaacacataaaattattgtttaaaagataaaacttcacatgcaaacggttgtttggactatttataaaaaaagagagagaacaattctttttgagttgtgttgtctcaagaatcaagtgttttctaaattctactattacacagaccatatctatcctgcttattcttttcataaacttcacatgttttgttttcgtaaaccattctatactaacggtgagagaaaaaacgatttgcattttttggtctctg

SEQ ID NO: 58670 - DNA, 405 bp, Arabidopsis thaliana landsberg
ctagtggatcccccgggctgcgcggggggggataagccacagtcgtgtacttaaacatctggtgatagcaacatgcgcgacatgatcagggatatcaaactcagcggaggcaactcagcacgcagggatgaactggaagacggagggagcccagcaccatactgaacgagctgccgacagctatgcgccaccagtgaacgccaacatggatgctcatttatatgggtataagagggctggcaagtctagccctgaatagggtgctacattcgaatgaaagtatagcacatgctacaccgcttgggcgggcccgaaacatggcctaggaggcgcattctagcaaacgtactaccaaagcgggatactaaactcgctagctgcagcactgcacgggtcgacactcac

SEQ ID NO: 58671 - DNA, 560 bp, Arabidopsis thaliana landsberg
tatttataaatctttatcttttatttgttgtcattagtgctaagtttgaccttatatcactaattaaagtatataagttagtaattataaattagtggtacatgacaatacctttttaagctaaattagattttataggtcaaataagacagaatgaaataaaaaaattagtttgaactaaataaaccttaatgacatgaatactttccggtaatcgaaaatgtaataaattgatttatactaaagttttaattcaaatcacaaaacaaactacactaaaagtatatttaacagattcaaaacaaaaaaaaaagtgtataacacatctattttgttttttctatcaaaaggttttggatcttaagttcggtgtgttttttacccaaacattagacttaaagctgagactttgaggtgcattctctttgaaaaaaatcccataatacactagaactaaatacacgaagtcacactgtagttttatgattcaaaaattgatttaagggtcagaagtggtataatttacgtttcaagggtcaattgtaatttaaagagcccat

SEQ ID NO: 58672 - DNA, 1304 bp, Arabidopsis thaliana landsberg
agaaggaaaaatcctaattatcttcaagctttttgtatccggtcattgtggagtatttgggatgatctaaggaaaagcatctggtctgattcctaactatcttcaagctttgtaaatgttcaacgtggagaccagaataatcatcaattaagagaatctgtttctgtcgatgattctgatgcctggtttatggattgttaataataaccacctaatcatttaaatgtcgcgcaacgagtaaatcacacacacagtttacttcgacaccggacaagtactgtttcaattcataactccaccaacggatttccattactggatccgagtatttttctcgacatcgagagcttaatttggtgctttttacttgaaagtcttgttgagttaagcaaaggctttccattgacactgctagatacagcaccgagtttgtgtgatcagaagtttgaagaaatcgtttaagaaggaaaggagagaaacgattgataattatgcaactagtctggattgataccatggtccatagacaaccatatccaaagtaagggacatttaggaataatatacgcgaaaaagttgagaatattttcgacaactaaccaaaactttacaagggaacagtgcaggaactttatatagttatatatatgcgcatgcaaataacaactatattacaaactctttgatcatgacagcattctatacactagcttgattggttatttaataggtattttttcttattaacgaaataaatcccttaagttattatttttatttacatccaaataaatgtaatattatttctattaattatccactaccaaaataggaatttcgaactatatattagtcttgatttagtatttctctgtacacctagctagcagcatctatttatgcagatacattctcatgataagtattttatgattctaatagatacacgtacagatgaggttactcatacatggaaatacatgtttagtaaaatataatatttgtggtaatttcaaaaaagagaatcgctttcccaaatttttactatacaaaagatcttttacttagtttgtatcatattttcctcattatacacatcaacaattcaacaaatatcaattttgtataaagatgattttatcatgtttttcttgtctgttggttatatttgtgtattccttcattttgcgattctaaaatactaataaacacatataagaatatttatcggttcaaccaaaaaacaaatttccgtaattaatcattcctctagtgtgttagataacacttttcttaacaaaatt

SEQ ID NO: 58673 - DNA, 544 bp, Arabidopsis thaliana landsberg
  unsure (1)..(544): unsure at all n locations
ttgttacatcataatataacgaagcaccagtaggcatgcttccatgcaagtaaatgaatacataacagaaagttacagtaaactatgaacattgatgttcatgctcaagttatactaaattgcagtaagttatgaatattgattgcatgctcaagttcactaaaatttctattgactcaaaccatttgcttatgcagttgtgagttgtgactaacatcatatatttcgattgagtactgaaaacttagtaatagactataattatctttgctcaggaatggatttttcttcaacattttaacttcatacagcagcaacaccatcagtttttggcatcaacagaagcaaatggaagaaacattctagttttagttaatatttggcaagaaaggcataaaggtaccgattagagaatggatatgaacattgtatggcattatttgaagcttcccatcatctacatcatacttcaatacagaaagaaggccattctcatctccaagatacctgaatagaaaatgacatattaatagttngaatgcat

SEQ ID NO: 58674 - DNA, 443 bp, Arabidopsis thaliana landsberg
  unsure (1)..(443): unsure at all n locations
ggccacaggcgagncaaaggagcgcccgcngcaggaggaggcccacgagcgaggcgagaaaccaccngcgncaaaagaaccagcccgaggcnaggcacgggcgaggcgagaacgggccccaggagaggacgaagccaagaccagacttgcgcccatcaggccatcgcagcaagcgccgacggagcggaccaaccgagnggacgagcccagcgggaacccctaattatggtccccgacaatgttatttgttcacaatcaaagaaagaagactaaaaatttaacatccgaatatatatctgaatcttcctctacttgtggctaaccgtaacattaagggtgcttggatcctaagaactaacatacaagtgactaaattttaatcagttcgaagctaaggatctaaacacaaagagctaaaagtagctaaaattataaaaatgtac

SEQ ID NO: 58675 - DNA, 591 bp, Arabidopsis thaliana landsberg
cgagtcacaccgtgtcttgtgggatatagaactactcatagtttaccattctactacattactacattagtcccttttggctattttaattagtagaagaaaataagacttctctttctgtctatattcattgatttgtcgatcttagtctttatctttgtaaattatgtcagaaccagacctatatatattcgtgtatgtataattgaaatgctaatccctaagtaggttaagtattaataccaaaaaccttatggaagacaaagaaaagaagaggatggggttggagacagcaaatgctaggtgtcagtcacacgtgcaattccttctgacgccgcgtgaagattctttcttataatttcttttcatttgttgaagtttgaatttatatataaccaggtgattctagcacttgtctttttagcaacgccctcaattacactccggacgacaaaagtgagtggatttggattgtgtgcgaatgtggatgaccgattaggattaggaagaagagaagtttgcgtccaatgaaccacggcgtgagcccttcgagatatgtttacttccacccatttacccaaccagttcatt

SEQ ID NO: 58676 - DNA, 380 bp, Arabidopsis thaliana landsberg
cgttcaacattaataaagatgccacccaaatctctcatggggcccgtggcgttatattcaaaacctattagacccataacgactcagcattcagtaaaacccgaccccaagcgatcccccaaccacttgacaggactcgacagaacatgtatagatagatagcgccgagacaatggcggactcatgatgcatcaaaacatttcgaggcttaagtacctcgccaggatttggcaacttacatgatgacgcttcttatgtggagggaccgccgtcttctcgcctctttgcttgaccagatcgctctgcctcgctacctatctatgcctgtgctttgacttcaggctctgccgtatgcacagcgttcgcttcgcatttattct

SEQ ID NO: 58677 - DNA, 455 bp, Arabidopsis thaliana landsberg
  unsure (1)..(455): unsure at all n locations
acttggcttcttcaaaagatcaccatctgcgctcgggttcgagactaagtaacttccgctgtggatctgtttcaaagtcgcggttatcggatgcttcgaaaggcgagaaccagaatgctagaaaatcaagatggtaatatgatcaagaaattttattcannnnnnnnnnnnnnnnnnnnnnnnnnntaaagactttacatctacattttttctctgttcgcccgttttgtcaagagtgattctctcatctgtaagtgacataaaacatgaatttgaactggtaatgatccaaacatgtaagagcatgaatttacacgaaatcgtcttttgatttatatcatttaagagttagaacgcctacaagatcgaaaaaaagacactaatcgtcgagccatttcctgattcgatccttgacgaaannnnnnnnnnnnnnnnnnnnnnnnngttgcggtgag

SEQ ID NO: 58678 - DNA, 578 bp, Arabidopsis thaliana landsberg
agattaccttactgtttacattatttaagatatatattagctgtgtgcccaaccctagtttatggcaatgcacattttgagggaaactttataataatgttaattaaatattttgattaagacagggggacatatgggtccattgttagatactgaaggaatccatatgatgtattgacggaatcgattttaattatcaattaaaaaacatatagatatggttgtagaggaaagtccaaatttgtagagttgagtagtgattattagtctacgcaactataatatgtgatcgagaaaagaagaaacctatgtaaaggtcactagactccattacttaacgggtgataatgtcaagaaaaagtcgagtcaaattattaattatttaccccaaccaagcctattacatgatgttatcaccgaattagagattatgatttaatttaaatgtaactaaaatcgtagaggaactatgatgcatgctagctatatagtccgattggcaatcattgccatgacaagaacattatagagaaatgatagtaacaaaaacggtataaaaaaatcacattttagtttaa

SEQ ID NO: 58679 - DNA, 417 bp, Arabidopsis thaliana landsberg
ccgtatgattcggccgttgagcgttgacaagcgaaatcagaaaactggtgtttttcatgaccgatgcactcatccgtggctgctccgcagctcttcgagccagccatccgacacgtcgccccaggcttgcgtgcccttctgcaccagcttgttgaatgcagcctcgtcccagatggactgatcagcctcaaaacccaacagggtcaggttgcgtaattcgccggtcttgagattctcctcggcggagacgcgcagcaatgcagagcgataaacccggttccgttcctccgcggcaatcaattgctggcttgcgccgatcgtcaatcccttgccgttatccagcttcagatggacattggcctgggtggcgcagttattccccttgctaccctcaagcatttacttcttcaccgtgac

SEQ ID NO: 58680 - DNA, 541 bp, Arabidopsis thaliana landsberg
cgacaacacgcccctctcgccccatgagcatttcaagtacagacagttcgcgtaccgacagcgccaggcgttcacccttgacgcgcacttcgcggccgaccgtatcgaaacgcagcgggccggcctcgatgaaaggttgtgcctggcccgctccgcggcgcgcaaaagccctgacgcgggccgccagttccggcagttcgaacggcttggtgacatagtcgtcggcaccggcatcgaggccatcgacacggtcttccagcgcatcgcgcgcggtaagaatcattaccggcacctgctggccactgccgcgcaactggcgcaagacctcaagcccccccatacccggcaggttcaggtccagcagcagcagcccataagcctggcctgccaccgccccctgcacttggtcgccatctttcagccagtcgaccgcatagccctgatccaccaggaactcttgcagggcatggcccaacgttgtgtcgtcttcaataactaaaactcgcatggcgtgattctagcccgaacgcgaacttttttt

SEQ ID NO: 58681 - DNA, 209 bp, Arabidopsis thaliana landsberg
gtctctcgcactatcacgacaccacctttggaatgtggtaacaatcaaatgcggtgactacctgcgcataacagccaatgatctatgcttggaatgagggaacaacgaagtcccaccatcattaggattattaaacattgactgatgacgatctcatacgtgggcccgtgcacgttctctgggaaaagatcactactattagaaacttc

SEQ ID NO: 58682 - DNA, 378 bp, Arabidopsis thaliana landsberg
aaagaaaaaggaggaaaaggaaaaaagagaaaagagaaaaaggaaaagaattagaagaacgggagaaaagagggaagagaaaagaacaaagaaaaaagacgagggaaaaaaaaaaagaaggaaaaaaaaaaaaggaagacaaggagaagaagggaaaaaagaaggaaaaaagagaggcaaaaacaagaacaaggagaaaaagagagggagaaaaaaggaagaagaagaaaaggggaaagagaaaagaaaagacagagaggaagaaaaaaagagaggaaaaacagagaaggaaggaaaagaaacccaaaaagaaagaaaaaaaaaaaaggtgagaaaggataacgaacagatggaaagaggaaacgaaaaaaaaagaag

SEQ ID NO: 58683 - DNA, 1256 bp, Arabidopsis thaliana landsberg
  unsure (1)..(1256): unsure at all n locations
atacattaaccaaaagaggactaagaatcccgcaatgtccccactgcggagacttcccagcttcctcaggagcaaaaccaaagaacgtctctaaccaataaggatcaggcttgggctcatcctcagccaaaacccgttttttctgatattttctcttcttagtcttcttcttctcaccatcttcaactttactcgttacaacaggtgtaacaagcgcagatttgatcaaatcaatcactttgttatctctaacatctctcatcaaagaactaatcacaaaaccaactttcattccatccaacacaacactcaaatcacccttaacataccacaaataacccgcgaaattcctccgaatcactctcaacaccgtatgcgcggtcctcccgggccgaaacgcaaacgatttttgcgaaaaccgagattcgtatatcggttccaaaatcatcaacaaaacctcctgaactatcctatcctgaaacggagtaggctgcgtagtagtcaaaatcgctttaatcttcctcttcgacaacgactcgtaatcggtcttatctctaggagatttaatatagaaatccaaccgagaaccccatttaaaccgatcatcgagaacagagtttcttaaagctaacaaattctctaaagctgatctttgaatagagctacgaggaacataagcacctaattcatcacagcaaactttctgataagctaatacccataactcgaatctacgaagatacgaggttaaattagtagcggttttgtcaggttctttgaaattctcaagccacatctgagaacagagagatactccatcttctttcaatagattcgctggatcatctggatctggtgcttgttgttgttgtcttcgttgttgaggtgcgaagtaagatagatatcggaaaatcgcagagccgttgttagggttagaaatgagaggaggatttgtgacgaagcagtaaacgttggtatatgtagaagaaggttttagccatttgtaaggacccaaaacagagaagcttctacgcatttcggacgattgatgaacagcttcgacttcttcctcttcttcgtcttcttcagggaaatggtggaaactgtagtaacccttgttaaaccccaaatcaaagctttgtgatatttttgcgttttggtgggctttttagttgtgaggaaagaatgaattggtcttttagttataggcccaatattttcagccaagttcatatggaactatnactgtatctaaa

SEQ ID NO: 58684 - DNA, 601 bp, Arabidopsis thaliana landsberg
ctggtacaactagtacacaattaggcctgccagggcctaggtgctgttgtcaggtacaggtgtcgctcttgccaaggccaactgtaccgatagagggatgtctgcaggctgcaggtgtttgagcaggcaggcagcggcgcaaaagcctggctcagacaggctaggtagggcggcctgtatggtagacagcccagctgagcagtcactacaaagggcacggggatgcgtcacgagcttgcagcagacacgcaaattgaggccatctcagcggcttgacttggacctagacttaccttactcagtcaggctggttttgtaggccacaggtcctgggcttccccatgattgacggcagcttgttgtagggctgacatgagctccaggcattagggatgccgcatcacaacttagcgtagcgggccgtggcacttgcagttttgtttaggtggtctacagaaccaatgattggtaatcggctgctgttaagcacgcttgattgcatgttggctgcgccatgtggcatggaaggctgggatgcggttagactgtctggcagcaagaagcaagagggcggcagccttgcccctgggccctgctgtgt

SEQ ID NO: 58685 - DNA, 926 bp, Arabidopsis thaliana landsberg
aaaaaaaattgatggaaacaaaaagtttgttaggaggggaggttttgtttgtaacttggttaataattgaagtatgtattggtgtgtttgaagaaacaaaaataaagaagaataggtcattttattaagtttggttgggccaatcatgaataagaatagttaatgaattgatgattaaattggttttttgatatatgcatgtatgtttagtttcatgttgttaacgaccgtagtaaggtaaggaatatatgtgagttttgtttgcttaaagagcacaactttaactaactatggtccctctttctttcctatgtgtaatatacttcaatcaaaatctttcgttgtagctaactaactagaaaatgtttccttccttctaacccaacaaccctgcccaaattaccttcttaccctttctacgacattttaaaaacaaaatatcatataacttaatccaaatctgtactaacatttttttgaagtagtatataaactttctttaggtaaacgaatacactcgtaaaaacattatataaatatctcatgtgtatcttttatcgttaaaaaaactgataaatgggagagaatctgtagagacttaagtgggttaaagcccaatatatgaggcaataagcccaataaatacctcaacgcatattcatcttatttacaaatcttatctgattttctcatcactcataacttcacaattcagtgatcgtcatttgcccaatcacaaaaccaatgggatcaactaataaactctggagccgtaaaccagacgtcaaaaccgggaaatcagaatttccggttaccagattcctccgtacacaaatcgataacatcaagacaacaaccgtcggtcccggaatcggcggcggcattggctgcggcgctggaatcggcattggtctctccggcgggct

SEQ ID NO: 58686 - DNA, 1702 bp, Arabidopsis thaliana landsberg
atcttcttatggtatatgacagagagaagcagaagtttttgtcattttttgttggtcaggtatgtctaaaaaacctatggctttaatttccatacatggaaatgcttgtttttcctttctaaacaatttaactcaatgcagaaaatcaaagtgaatgttgttatggcaaatcgaaattcaaggaagcttatattttcaatgaggccgagagaaaatgaagaggaagttgagaaaaaacgaactcttatggctaagcttcgtgttggggatgttgtgaaatgctgcatcaagaaaattacctattttggtattttctgtgaggtactaactactaacttacagaagttaaaatatctttgaaccttcttgctttattgactggcaagaacggaatctagaatgttgtgtaaaactaaaaagttgggttgaaacagctagaaggtgtccctgcattggttcaccagtcagaagtttcatgggatgcaactttagaccctgcttcatatttcaagattggtcaggtaatatctcgaactatcgtaaacactgctaaggaatacaactgtttgacaaacctttctttttgttgttatcagattgtggaagcgaaagtgcaccagctagattttgctcttgaacgtatcttcttgtcattaaaagaaattacggtgagaaagatctctcaaaagtttatcttgtagcaattggtaactcattttgatatatacctagacccgtttgatgtctttatgcagcctgatcctcttactgaagctttagaatctgtagttggtggtgataatgatcagttggggggacgattacaagcagcagagctcgacgctgaggtattaaagaccttctgtgattttatgtgatgaaaccattattacaggtttctgaaacctttcttctgcagtggcctgacgtggaatctctgatcaaagagctggaaatggttgaaggaatccaatcagtctcaaaaagtcgtttcttcttgagtccgggtcttgctccaacgtttcaggtacacagtttaatcacctaaaatgtatatatcaaaacacgaaaacatctaacagaccgctaaagagttgaatactgttgcggcttccttagcgaaaaaatgtgaacgttttatgttttgatcggaagctaagagctctggtttgctttctctctctttgtaggtttacatggctccaatgtttgagaaccaatacaaactgcttgctcgagctggaaacagagtacaagaggtaaaagaaagaaagagaaagatctaacttataacatctgttttattttaatcttggatgattcagtttttttcctttactgtttatctgcagcttattgttgaagcatccttgagcaaagaagagatgaaatctacaatcatgtcttgcaccaacagagtagaatgagaatattgaggaaggaaggaatgaatgaatccactatttttttgtattcttgaaagtggtatcattcgaagacttataccaagtgtacaacatcaatacatgatttctaatgtaatacttcctgatctttttaatatatgaaaacattttcccaacaaaagcaagaatctggaaatatgtagaatcacctcttctgtgaggaatgaagtagattatacgattatattacttacaggctaacaaattctctcttattgtatgtcatgcatggttta

SEQ ID NO: 58687 - DNA, 508 bp, Arabidopsis thaliana landsberg
tttatgtacgtaaactattgttcttgaacgatgcagatctccaaagtcagccaaaatatctatgacttatgataattctatatttagacaaattgcagagattttttatataaaaaaataggcttgaatcgcagagaatagtgtggactaaaaagcctggtttctttaggtatatgaaattacatttcgtttggttaaattatattcatttttgtttagtctatattttcaaaagtgacaattacgatatccattttgattgaaaagtgttcagggctttggttgggtttaactgtccgaccctagtgaatattaatatggatcaaacacagacacaattgggccttcactaaaatcttcagtttcgggcataaaatatagaaagcttcactactccgattgccaacccccttttagagctagcgcatgcatgttcatatatttgtgagatatatctgttagttgattggtttgtcaaaaatctaacttatgaaattttatgtgctcc

SEQ ID NO: 58688 - DNA, 322 bp, Arabidopsis thaliana landsberg
ctctaacgcttttttacaatacacgccttctacttggggatcggggaattgttcttattatctcggcccaacatcccctcatttatgtccgaaatctaaaccacttgtgccctaacatgaattcgctagcgataccttaggatgggaacttcttacgtgtgcaacgctcaaagattcgtgctgaatgatgccaacgattgcatatctgaggtctgacgagatcagattatccatggtcttcctagcaaaggactcaggctcgcagatccgttggatcactcaaaggagagatgcctgaggagcggatgtgattccttacaaa

SEQ ID NO: 58689 - DNA, 484 bp, Arabidopsis thaliana landsberg
  unsure (1)..(484): unsure at all n locations
gaaccgtacgatccatccagaanttttatagtacatgtccgcatncataggcaaccactgtcaattttatattatgactactttgcagacattaccacccttcctttttgtttttggtatatcaaaacattactcctcctactagatgatttcttttatatattgcgtactttctacagtatttttgtttaccggaaaattctctcttttttataagannnnnnnnnnnnnnnnnnncatggttttttgtcttttgatacgaagtttcctcttcaagtggaacttgaattcgggttaacccacacttgactaacaaaaataacagtggtatttctctatatggctcaattattagctttttttggctttccattatcaccttttaatttgaactgaaatatttgataccacactaaaatatctctctttaactaaccatatggttatatactacactttgcaactaattgataactaaatttat

SEQ ID NO: 58690 - DNA, 187 bp, Arabidopsis thaliana landsberg
gacaaagtgtcaacgcagcagagaattactacattttttcttcatctgcagacagtgccgatgatctgaggggtcttgtccgcgtctaacaggtaatcatgtcccctaatgcatcgtttatagcgtcgttcctcttgtgatcccgttgttgatgcccctattgcatgatatattacgttgatccccc

SEQ ID NO: 58691 - DNA, 665 bp, Arabidopsis thaliana landsberg
  unsure (1)..(665): unsure at all n locations
agattgcagatacttaactaggaaatactttatctgtataaagatatttttttatagtttcttgtcaaacatatacacatattatctctgatccgaattatatgatgttttggtacaagacacactgataagtgaataagtaatatatatatatatatattaatatatattttataagacatctgaattatctttaccttacgatgaataataaaatatatacatttgtagggaaaaataataatttgtgtgtttaaaataaaattcaatagctatggtggtgccaaactaggggtacaaaactacaaacaatacgaatctgtactattatctttcaatgatttgtcatttgtccatactcactttaagtgctaatttgtgctggcaatttttatcggtgtgttgactgataacctaatagtaatagtgatgcatttaccgtaggggttaatcaaaacttggcagtaggtacaaccgtacaaatcattattaatatatatatcaaagacatttttggtcttttatgacccaaaatgttgttttctctagcttctttagagaagaccgtttcgccaatngcatctttacaatggactatctcttttatttgagtgtgaaatatatggatagttctgttgatcccgtagatagtaaaaaaagaaatg

SEQ ID NO: 58692 - DNA, 870 bp, Arabidopsis thaliana landsberg
gagtgataatggtagtaaaactaaaaacggagttgtctttcaacttctcgatcagaagagttccgaacatagatggtttagtgaaaggtaatgtaagatgcttagactttgttttcttgagcggattcagtgttatgagctctaaagatttgttgtggttatagagggaataatgcatttgaatttcttgattcttcctcaaggtttcttagatggagacggagatatcttccggttgatggagataacaggcgtgaccacgggtctgtgaaacagtcaggacctcttgtgtctggtgcagcttactgtatctcttcctgcagcatgattatattgaacaaaattgttctctccagctacaatttcaacgcaggggtctctttgatgctttatcaagtaagacattttaaccccattagctggtttccttgatttgacaaagtatatagtttggtgatttccttatacgtttatttcagaacttaatcagctgtttggtggtagctgtactagatatctctggagtggtttcagtggaaaaatttaactggaagttgattagagtatggatgcctgtcaatgttatctttgtgggcatgctggtctcgggaatgtacaggtaaggtttcgaacatcaggcgagagagtaattggttaaatttcatttaagactaatgcaacattacatttctattccagtttgaaatacataaacgtcgctatggtaactattctgaagaatgcgacgaatattctcacaggaataggggaggtatacatgttccgcaaaaggcagaacaacaaggtttgggctgcaatgttcatgatggtaagttaaattgcacatcttgcctccagttaggttttgca

SEQ ID NO: 58693 - DNA, 739 bp, Arabidopsis thaliana landsberg
cgcctagggtctttacctattgagctaagaacgcgtggtatattaatcttatcttgctaatgcacccaaaattggacataagattgggtttgactactaaatcattttgttcaattagagtaaagttctttagtagcgttgatgaagagggaaataccataagaacatagaacccggtccagcccaaatgggtacgacaaaaaggcagcagccaaaagattccaggactacagattcatcataatttttaagacttttcttatgttttaaagcctattttgttataaaaaaaaaacatttagactataactccatttttcttaacatttaggacctttttacaaaaaaggttagtaagaaactaaacaatttttgtatgtacaaatttactttaaaatatgaaaaagatatagtaagtgtccaaaaaatttggtttgccctaaagctctaattattgttgggctggggcagcgtagaccacttttatgcagagatgtaaatcacaagacaacagtcaagaaaaagtacgtgaacccgtttgatcaaaactaaattaccaatatcttgtgttaacacaaaatattctcatattatagaaaaaggcttagatacataaagccaaaacattctacagctcgctgctttaatatgttagcagggccatcttcttatttaaataatattaatacgtacgtttatatattatgctaggtcggcccttatctaactggagccattc

SEQ ID NO: 58694 - DNA, 489 bp, Arabidopsis thaliana landsberg
cacccattcactcactactccttctggttcgtacctacccgttattagagctaaaaccgtctttccaaaatcgtcaacatctgtatctgcagcacataaaccgaatccatattctgttaacttagcttccaaatcctccccaagcagaatgtttccgcagttcaagttcccatgactgacaaattctctgcattccatgtggaggtaacaaagagctttagccacgcttaagcaggtatcagttcttatcctccaagttagtttcttgcttcgtaaagggtcaacaatatggtcaagtatagatccattcttagcatattcgtaaaccagaaacctcctgcctagctcgcagcaataaccttcaaggtttgctaggttcttgtgatgcattgttcctatcttggatgcagagctcctaaacttcctttcttctgttaatgttgcttccacttctttaacagcaacaagttcattctccggcataacccc

SEQ ID NO: 58695 - DNA, 820 bp, Arabidopsis thaliana landsberg
atgttattgtcaaagttatcggtcatggccttaatctcatcaacagagaatatcatcacacctttcggatttgtcgctttggagaatcgttcagctttcttcttagctagcttcttcttcctccggtaaatgtacacaacgataccgagctgaaatccaagaaacagaacaagtgtagtggaagttgcaccgacaagacaaggaatacagatactgtgagactttgttacagtcactggtgactctttagaaacattatttggatcaacagcaattgggtccaaacatgttttaacatatgatatcgaactcagagacgggtcagagtaaccgctgatatatcgggtcagcttcatgcgacattgaggctctccatcgttcgtgtaagtgactgcagtacaagcagaattctctaaacacaacttcttgcatctctgggagctaatctgagagataacagaatcattagccgggtagatcccatacaactccaagttcttgaacttcaccatgttgaaaccagatttgcagcctggcttctgataaggcaccaagcatttaggatccgagaccgatacaaaagcattaaaagggcaattgcattcggtgtatccagaactgttaaaggaacaaacttgcgaaccacaggttgcgaaaacacgacactgattctcaacagcttgccaaaccggtttccaaatccttgaatcctcgttccacgagtacattctcagattaccatcgcggtcaagcctaagaaaccggaacttcaaaaagtatattgtcttccccaaaaacagaccaaacaggtctcatcaga

SEQ ID NO: 58696 - DNA, 1771 bp, Arabidopsis thaliana landsberg
actgttgaagttcaattcaaagcaaatacggttatcatttttggatttctttaatatcagatttgtttttccataaatgtaaagagtatgataaaattacatattactgatagattacaaaaaatgtagctaactagtctcaattaaaagagttatatagaaagagtttaaaagagccaaaaatagcattttatttcgtcactaatcattttccttggaaaagtccatggaacaacataaaaaaaaattaaaatttgttattttttctcagatttcagtcatcagtatcaagcaattttcatacccatttttgttgatagtatacgttttaaagaaatagttcataaaaaattgtatatcagctataagcctataacgtccacatgcatgccacacaaaaaaaaaagtccacatgcatgccacacaaaaaaaaaagtccacatgcatgcgataatagaagccttggccctcactgtcgcgaatagtcgtttgccatcggcgttcggtatgttcggacatcaccaaacgcattcaaagccatacaatattacgttatggcctataatatgtacaatatacgtttagacgtacgttagagattacgtgtatatatttatgattttatgtacattatactgtttatacaatatagtacaattttcgggttcgagttcccaggtttaatgatggacaacaaattaatactataaatttcaccgatgcctacatatgtaaggatcattgactgcattacagatcctgcattgtcgcatatgttgcaaacacatggtccatcgtcccaactgattaaatgatatccgaaatctgtctatattgtccacgtcgataaatgcccaaaatatagtacaattgttttagaaatcatatctataaaaatgaaagctcacgaaacaaaaatatccaataaaacatatagaatgcttaaaagtcaataaatctaacatttttttaaaatgtatctttttgtaagacaatttaaatttcattatctaaacccaaaaaaaaaaaaaatcatcatgacaattgagataaaaagtcatacgaaaagggaaaacagaaattagggttaagagttaagagagtgggggtggtttcccgtggccatgcaaaggtgtcagcttcgtgtcacagtctacgatggacaccgacacacgaaactcatgtgaactgttctttctctttatttttctctttgttttcttttcactttctcttctgttctcgagaaaaatgaaccaaaatggacaaaggcaaagcattgttatttcctcttttttacacagtaaacataattattctggtttcttcataaaagaaaaatagagaaaaggacaaagagattcatttaacagataaagattttcaccttggaccaaaaaaacagcaaacaaatatatttaaaataatttccaacagtttctcgtgcaactttgactagaaaacaggattcatcttcacctttctttttttcttcacatattaactgtatgtacctttctttatatgatacaaaattcgatgtcttcggttgtcacatttctttgaagaccaaatgactttttgattgtcttaaaaacttatgaattgtttacaaaagtcgggccgagtatttacgtgaagaccgttttgatacgacatatacttggcacgagtaacaaaaatttgacaaaatcaagtacattatatatatacgaaaattgataaatttgttttcttcgtcaaattgactagtataaatcaatggaccatt

SEQ ID NO: 58697 - DNA, 239 bp, Arabidopsis thaliana landsberg
  unsure (1)..(239): unsure at all n locations
ccagaaaccatgangttctctataaacacccgngacttccacttgggctggttgaatttnnnnnnnnnnnnnnnnnnnnnnnnnnnnnnnnnnnnnnnnnnnnnnnnnnnnnnnnnnnnnnnnnnnnnnnnnnnnnnnnnnnnnnnnnnnnnnnnnnnnnnnnnnnnnnnnnnnnnnnnnnnnnnnnaaatattcatttataaaagatcgatatccatctttaaatttaaaatacacat

SEQ ID NO: 58698 - DNA, 446 bp, Arabidopsis thaliana landsberg
ccttggcataaaccctcaataacttttgttgtagagttgatttagagtgttttgggaaagcctgtcataacttggttgaatttataaatttgcttttatttaatcgagcagtctcaagcaagtatatgatttatgttttcatgtgagcatttggttcaaactttgagaaatctttagaagacacttgatacataaagatgaattatgatatagacaaaacaagtcggtttgcataagaattaattagaggtcgacacaaagagatcctgcgggagaatgcggattcggattaagtatttggacgtagaccgactatctagaagcggattcggacaccgattggataacataacaactatcgagagcccgaataaatgagtctggacggtagttgcgagacgatattgaatttccaatttgcatttgctccgagaaatacaagtttt

SEQ ID NO: 58699 - DNA, 1074 bp, Arabidopsis thaliana landsberg
cacttgttttatcttgacctcattgaactccaagagtctgatttctttctttctttcctcgttattatgcgtcattgaaaccttgaactcaagattacttatacccttggagtttcaatgaaaccttgaacttgcttttgcctaaacaataagactctgaactctactcaaaactctataccaattctatccacactaaacattttattagccaacgaagaagaagaagtaacattaaagaacaccatgttctcggcctaggacaaggtgttacacgcaaatactgaacttatctccaaacacctcaaatctcatgccagattcacatacatgtcatcatctggattagatacaaatgataaattctactacatattaaactagatatcgaaaatctaaaaataatgcagataacacaacatgcctattcttctacaatacttaactttctggttcttaatcaatgtcaacagctgagagaacgcagataatccatcaataaactgcagtctgaacatgtaattaggagataaacaacaacccaaaatctcattattcagaatcaaagtcaaaaagagaacaacaaaaacgataaagctcacaactctcatcgagcatccaacacagcatcaaattctgatttttccctaatcttgggaaacaagttgcagaaatttcccaattgaacgtttcaacaaaaccattagctcaagtcttccaatttctacccagtgctgccatgaacaatcgatccaagtgtaccaagaaccgcgaaagcaagcaatggactaacatcaagcgtatcgaagataggaggaatgatgtttctgaagagattcaagtaaggatcacagagatctctgatggcagacaaaggctgtctttcccaagggatattagggaaccaactcagcaaaaccctaaccatcaataccccactgtaaatgtctagccacttctttatccccaccgcaacaaccgtcagcggcgtgttcaagtatcccggaggacgatcccggagagacgcgaagaagacaggtccggcggtactgagagagaatccgtaaccccgtc

SEQ ID NO: 58700 - DNA, 522 bp, Arabidopsis thaliana landsberg
agctcatcaggtttgctctggactaggatttctccattcggttaagcctaaaccgattgtccatggtcgccttacgccgtctaagatcctcttggaccgtaaccttgttccgaaaataaccggttttggacttataatgcatagtgatcaatctgatacgaaacctgatgtgatggcgtttggggttttgcttctgcatcttttaaccgggaggaactgtcttgttttgctcaaggcgatgtctatgaaccagacaagtattctcagggatttggatcaaaccgctggtaagtggccactcgagttagctaaagagtttggtgcacttgcagtgaagtgttcttcagttaacagaggaggaaacatggatttttcaaccaacgagataatggaagagcttggtaagataagggaaaaagccgatgagtttaaaaccaaaggagggtacgaggaagcaaccaattcaaacatggatgaaggagatccgaatgacataccaagtgttttcatgtgtccaatact

SEQ ID NO: 58701 - DNA, 1515 bp, Arabidopsis thaliana landsberg
gggttttaatccccccataaataacccttagggccccttttttaaaaggcacatgtgagaattcttaatgatccccatttaaactttcccgcggtttacacaaatttcggatcttaaataactaacactcaactaaaccctttgatgaatattattattatgctacttatacacgacaagaaattgtcctaactacctacttgttgcgaatgaagcaagcaaatatgtattaagataatttatgtttatgcctaattattatcttaatcaacaaactataatttacaaaattgttttgtgtgactgttgctctctcggacaacactcgtttatttcgcatcaattattctcattcttatgtgactcactcaaaaccaaataagatggaccacttcgagccttgtttctgttatatattcgtccacaggctacactgaaagcgatgcggtcatagcccattctctcgtcgctttcatgtttgttctccaaacctttttttttctccttgattgtgctactgctttggcttctttcaattcttagatatttttaattttattttcagctataacttcatttaatatggctaaatagttttcttggtttagagtctttagactaaggaataatttcatgactatatttttaacttttcgattttcgaaagattcagtttaggcctaactcagtttgccaacttgtgtagtgtgtgaacaatttacacaaaaatcaaactgtgcaaggtcatttttccaaaattttgattattaaaaaaataaaaaaaaagatgaggataactgacatgtcagttttgtggtgtcccttgttttgtctttgattaatgtatggttcatttcatacgagaccctctgttttggcaaacctataacgggttttctcttataagttctaagatgagaaagtactacattgagatataattactcaattacatactgtacttagtcgtaataatagtcggtgattatccttttaaactttctatggaccgaaatgttccagaaaaaaaatgcaatagtttagacttttaactttattttattagcttttcttcatgtaaaccaaaaataacccaaaagcaagcggtaataattattctgtcccccatgaatggcttttactttagtgaatgaagtagattttaaatgcgaaaatatggctgctgctgctcatttacagttttacactaatgaataaatatgatcaagaatcattgattctacaccttgtcccatgtcaagtctagtcaaaagcttattttatcaactccggctctttaagattctctctctctctctctccttcaccatctgagagattgctccactatctcatagatttggtgaccagaacaacttatctcttgagtggttcaacctctatctctctctctttctgccatgaaaatgcaaagccaaatgtaatagttagagagggagaaaccaagaactgaaagaccatgactttcaacagaagcaaccttctgttctcatt

SEQ ID NO: 58702 - DNA, 1549 bp, Arabidopsis thaliana landsberg
  unsure (1)..(1549): unsure at all n locations
atgctgtgaacatgaagcaaaacacgtgctttaacgctctactggctggcattgtactgctgagttatgttgtgtatgattttgaatggaacagtaaaccatttaaaaaaatacaaaaattggagagtcgctatgtaactaagaatttaaaagtaataacattaaataactgttcttgtatttttcagttcgatcaagaaataactgtatttttatttttatttgcaaaatcagcctaaggcatttcgtatgttacaagattatttaaacactaacttaccaaaacagcaaaaaggttaatgtgtcttataaggcatttcgtaagtatgatagtttataaatagcatggattctatgttttataaaaataaaataacacaacttcatacataagtttaaatacaatgtagcaaaaaggttaatgtgtctattcaaaagttataaataattcatagtgtgtatagcgttttaaccgtgaaattttccctttgttatcatcagttttcacatgtgtgttaattcatattgaaattatttggttcactttttgactagttaggtacttacttatttctcataaatgttttacattattgcagcgaattaagcttaacgtaataacagtataatgtagatctctcgtaataatgaaagctgacttttctacacctaaaagtctaagacgatctagttatccaaggccctctctacttgatttagtcataattatatctaattaaacactcacataatatcagaatattctatatgttcacccaaatgtggaaaataatcagaaacggcccaagaataggttcaatgtcacaatccatgcgaagcaaaaaatcagaactattcttgatagactaagaaaatagtaaaccctaattcacaaaacacaccaaaaatatagaaagttgtctcaattattcttaccattttggagatgtcaagtacacaatcccacccatcttgactatccaacggttagcattcttttggctctttcaactccaagttttttcctttatttttttttattgctaattttagcagtaaattattacgtctactttgcttccgtacggtctagagacaacctacggacagatgatgattgtacataccagtagacttacagaatccaacggttattgaactcacgggtcattcatattgttcgttggattataaatttgaatgtaaacgaacatgaataattaaaaacaagttgagatttgtctcttcatcaaatcaaatcacttgtccaccgagttcgagtcttttttcaagccaacgagtctatcttaaacccttttataattgtaattagtattttatttctttaaccaccaaacaatgttttataattgtaggatatcgaaatatataaaacaatgaattattttgcacttactatttttggtaggcatatttcatgttgtatgatagtccggaaaaatttatataacttgctaaaacagaatttgtttccatttatatgcattgtttanaaagtaactaaagaggatttttaaagacagagaaa

SEQ ID NO: 58703 - DNA, 957 bp, Arabidopsis thaliana landsberg
gtaacaaatctgagtctgtggctgttgcaacatcttcatcctcatttcttcaacttctttctcactcaagtgttgttgatgatgagttccataactcacactaccgttcatgatctcactcagcaggagtccggtacacgttggagccggtttttgttgctcaatcatatcaccggagagaaaccctaattgggatgagacggtgataccttcaaaccctccgactgtggagaccgggaagagaaacgccggttccggtggaaacatccccatcatttgactaccacccaaagagagattagtgttgttcttgttcttgctttttcggggtttggtggatttggaggaggaagaggaggaggaagaggaagaggaagccgaaggttgcggctgcggctgcggttgcgtttgagggagagagtgtttggagtggttgtggaggaggcggagtttgtgtttactacgggacttacggttttggaaccagtagaagacgttagcatcaccgacttggccgtattcttgaagctgagccctaatcctcctgatctcctctcttggaggattcaccatcccggagttaaagattgcttcaagtatccgaatctgctctggctttggattccatcttggttttggctctggactcctctccacttcacatcctaaaaaattcacaatctcatcagataagagttctttaaaacaaaatttagttttgaattggtaaatatgtagaagtagaaggacctgaagagaaaggagaagatcggtgagaagcagaaggcaagagaggagagttgatgtcatgttgccattgatggggatgaggtttggacttgaacatgcttggccagtgtctattagaagaagccataactaattaactcgatccgcagaacacagatgtatgtgtatgcatatgatgatgattgatgctgaatgatgatgtgatga

SEQ ID NO: 58704 - DNA, 768 bp, Arabidopsis thaliana landsberg
gaaccgcttagctgaacaattataacgtctcatttttaacgaatcattgtaaaatataactatcaatagtttcgtcttttaatataatattgtagctacataaattattatttttaatttttaagtattaaatctatttaaagaatttttgtaaccgttagttgaactgttgcaactatgagtttatttgatgtatcattgcaattttttgttttgttttatgaaaatttgtaacctttagtttatttgacaaactattgcagcttttgttatattcaatatatactatcgcatctctcgctcttcataaattattagtttatatgctatttttagttactaaaatatatattgattttttcgcaaacacttaattgaactactacaacatttagttgaaaaagttgaataaattggactaattattgcaacttttttgtttatttgacaaaccattgtaacatttagtatttattatatttatagttgcatattttttttgtagagagatatatatatatatatatatatataatgaattgttgctaccgtttaattgaattaatgccactttttatattatgaatatttgtaacctttagtttatttggtgaaccgttgcgtcatttgatatatttgatgaactgataaaatgtttagtatatttgattaactgttgcaataattgttctttataaatgacttttatgggtaataattaaagacaaatacaatcagaaaaaaatcactaaataaaaatatttttga

SEQ ID NO: 58705 - DNA, 1640 bp, Arabidopsis thaliana landsberg
ttcgacatcgtttagataatataactaaagagacgataaaataaaatatacgacgtcgtttgataataatataatacagtaactaaaacagacggaaaatatacgacgtcgttttttggtaataatataataactaaaagagacacagattaagcgacgtcgtttgtggtaataatataataactaaagagacgcaagtgcaaatgtttttgtgataaaaaccataaaaataaaaataagtggagaaatcaaaatcatcgattctcctttgtttcgcctaacccaattcctaaatctcagcatctttcatcaatccaatctctcaaataagcgagagagaaacaaagattatcgaatccttggagacgaaaacatactccaatttggaattttctcgtctttttttttacctgattttggtatacgtttgatcgaaatcatttgctctgatggatctctgttttgttaacccttttgagatttggtagatatggttttgaggattgatatatttgccgctgattgtcgttgaaaaattgtgaaatttgatttggtggtttagggttaaaatgaaattatatgatgaggaatataagaatctgattttttttgattagattctccagatgttcttgttacttgtgattgaaactttgattttgggttgttgttgatttttgaactttggggattttaaagttgaatttttttctaatttatgccaaaacggtcttcttctatggttttgtattgaactgatgatttagatttgtttaaatctcggcttttgtatattgtagtggaagattgaattttttatttcttgtcattggttataggttttagtttattatgatgatgccactagttgcatgattactaacttgacagtggtttatatgaacatatgtgataattttcttaagtttgattcctacttctcttttgggattgttgtgcaggttttaggacatttgggttaccctgaggcttaaggagaatagtggtttagttatttatactgaattttgtgtcattcagactttccgaggattttctgtttggtaccgtttgcctcgtctgtgttttcatttgagctgcatcttaaagtgaaagttcagtgcttaaacagtaataaagtagtatttcaacaggctgctaataagattgctccctttcggtaagtttgttttcagccaactatctctctttgtgaagttaacaatccgttgcttcttgtgatggttaagattcctctggtatgcttagtttctgtgctagtttctagactatgatgagtcagtataagatatctatttcttctgtttttggtgtatcttcatttgttcttgctttggttctgctgctacatgattgttttgaagttttgatattaagcgatggttttggtcttgcaatgttccctttttggcaaaaaagtagtatttataaacctcattcagtgtttctaactttctcgatgcgtgagtagcttacacagtgcttaacaagatggctggtgtaaagcgaaaattaagtaccgagtcagatgttcatgctcttcacaaagaactggatgaggtttcatgtcctgtttgcatggatcacccacataatgctgttctactgctgtacagctc

SEQ ID NO: 58706 - DNA, 361 bp, Arabidopsis thaliana landsberg
gtttatttttggcaaattcatggagacagagaataggttaggtgttgcctaggactagggtggaacaggagacaaccagggaatggagaataaatgctaatgtgtacaaggtttctttttctggaggtgttgaagatgttctaaacttaaatggtggtgatggctgcatgactctgtgactataccaaaaatgaatgcattatatactttaagtgaactaatttcatgatatgtgaaattatctcaataaagccataaaaatattaaaacaaaaaaagtttaaaaaaagtcaaaacaaaggcactggcaccaagtcttaacagtgccttgaagaaagtcagcgttaagtcccaaataaagt

SEQ ID NO: 58707 - DNA, 1270 bp, Arabidopsis thaliana landsberg
aaatatgagaataaaaacttgaaaagaaaataaaaatagtttatttttgtggataagtgaagaacgtgaaatgatgggtagcgaagagaaagaagtctgaattgggacccagatggcagaaggagaaagagagagagagacctggacaatggacagatagagtcagtggatagggaagagtgtcttcataatatacgacgaccaaccaacccttcttcttattattattaatccaatatgaacatgacgccgaagatatttgcttgggaaataagagaattgtaaatgttaagtttttattagtgccctacttacgttgaagttgagattctattgcttttagtaaaagaattaatacacaaaacactcggattctttttgctggttgaaatacgtttaattattagcatgattatctagtccaaccacttccacactaatataagcaccaaatgctcatcagttacataatttgaattcaatataatcctagagccacatttctctaagagaaccaagtatcatattccatttggtcccctgaagaattagatgaaccagcttgccggaacttgttgaacctgggtctcttgggtgagagctgagtatcttgaccaactagactacaatggaatgttgtttatgtaatcttcattaattttactgataattaatctggttcatgataatgtgacaaaacaaaaaacattgcgagtacaattaacttgatctcttcaaattgtctaccaacttatctatggaaagagttattaactcattaaggacgtgtctgttccaaccatttaagctattgaatctgtgcataggagtgtcacagaactatatctttataagagatgggaaactaaattgacacagttttgagattagcgatacagagatgatgccaaacccaaagcctttgtggcaaaaatgacggatttagattcatttataatattatagacaaaccttatgagcttgtctttgctcttttccatacaatgacaacaccatagaaatcagacgaagccaacaagttctccccatggttccacgcaacacacattactggaaacctgtgaccctgcaagcatccatttctcacaactcgtgaatcctgtttcctataattcaaaatccatacacaaaagtttcagataaaaaaaaagaaaagaagttattgtctaacctgtagcttgtttacacatgtgtgcttccgttttgttagatcatagaagtagacattcgagtcttcgcttccagcaac

SEQ ID NO: 58708 - DNA, 275 bp, Arabidopsis thaliana landsberg
  unsure (1)..(275): unsure at all n locations
agtangtttactgaagattcggtgaataatgaattggtccggtttcttgttccactcgttccttccccgtctaggtacttttttattatgttatccactcctctattattacatagacccatagttaacctgataacttctcttatataaaatgcttgactacgactgttacatacatgatccactatcacaataccttgacttaccttgttgaaccatgccatgtaaccaaatcaacactaccacctgaaaatctacttatacagtcactttat

SEQ ID NO: 58709 - DNA, 534 bp, Arabidopsis thaliana landsberg
ttgttggcttgttggactgattatacccgtccctgtccagtcccggcgcttcaggtgttgcaaaccggttatttcccaatgaataccagtaaacatctatgccatcagtaagtagtaggctgggcagcctctcttgtaatggttttagtatcagtttttattgcagttttcaactcagtgggagaacccttttcaatgtgttcagtctatgaaactgttgtgtctaatttggttgtatcaaagccaagacttgtgcagtttcactcactagatttgctgtgtttgtaacagttcccggcacagcggttttggcttgtaaatttatggcttcagaatcagctacaatggcgggttggtagagcagagttagatggagaggcattcactgtatatgttgaagaggcagcaacaattaatcaaacgctggttcaactagtttttctgaatataataatactttacttttaatccgagtttctcttaaagtgtttacttttatttttgggagtcccaaataataaatgcttgcacaga

SEQ ID NO: 58710 - DNA, 271 bp, Arabidopsis thaliana landsberg
tggatccaaatacacctttaacctactcacatgacccctgaaacagtggacacataccaagcgcatataccatatatgcctgtgagccaagctcactagccacatcgaatcattgagaccattagaccacctatttaagataataaaaaatacctagttacatacactgacatgaccacttagatataaaaagcaaagtcttaccaattcaggtgtctttagagcatacagttcagtctaacatagggctttcatacaactcaggggccga

SEQ ID NO: 58711 - DNA, 954 bp, Arabidopsis thaliana landsberg
attacgatatatttggttgtttgacacgatttatacatatcagacgttaaaacttatatttagtactataaagtaacaccgtgaaccggaagttacggccataaaaacgcaaaaaggaaatgtagggttttagttgctaaaaaagatacttaaaggttagatttttttttaaaagtaattaaaagggagtaaaaaggttaaatgataagtctcatatttaccctagcattctactaaacactaaagactttaactgataaaatgatagcaaagaacatagggttgaatgacaatcatggtaaagataagaattcacaaaagatgttttgacaaaatccgaatatagtcttcggtaagtttctcttttttgttaaaaaaaaaagtttctcttttcattttcttttttttcctgttctcttatttatacacacaaaaaaccctccttgagtcgaaatgctactgtgacgactctgtttgcttctcttccttttcttcctcggcaacaacaacacccttcctctcctcactccctatccgccaaaatctcttcttcttcctttttcttattttcctttcaatatctgatagctgcaaaacagaacccaccatgtctggtctgtataattataataacttctcaccttctagagccgcttctccccagattagaaccccttcctccgatgttgacaggtgtttctctttcgacttatcctccctctctaatggcttctttgatgaaatctcttatctctttgttttttgctcgttttctgcagtcaatacatatctcagttgttagcagagcatcaaaagcttggacctttcatgcaagtcttacccatttgtagccgactcttaaatcaaggtcccactcttctcatttcttccttcttagatctgaattttttttggtgaagttgatgtttcctgtatatttgtcttgattatgca

SEQ ID NO: 58712 - DNA, 1396 bp, Arabidopsis thaliana landsberg
aattaccagagagttcttgaaggataggtcttgatgcaagagcggcattgtaacttgtcccacatccaataaaaactatacgccggctgcgtcttatggtctttaggtgatctttcagcccacctaagaggacggttttcgttttacgtgaaccaccgcgtataagtcggcctctcattgtagtagttaaagattctggctgctcgtggatttccttttgcatgtaatgatcatattttcccttgcttatttgctctacctccatctctagaacagataaggcacgttccactgaagcaggtctcgataaaccattacaccttcccctctcattttcaaacttaagtattgatacacctccatcctgttaataaaatgtggaagtggtaagcacaaagaatctgcataaacaatattaataacatatggttatctgtcatgatatttgttacatgtttcagttggtacttgtgaatgctgcacatattctcagtgatcagtcaataagattagttggtcagacgctagaattcaacattcatacttaactttgacagggaatgaatacacactaactaaaatataactgaataattgttataccttgagattgacaacttcgccatcttcaatcaccaaaactttctttgtgtgctcaacaagagcatgtggatcacttgataggaaaaactccttgggatggtcattcttagatagaaagtgagcatcttggaaaacatgactattgctctcaccttgatctagctcctacgaaagcatatgcaaaagtaaggtataccgcagttgcttacaaaccgaaaaggttccgattctgtgagtgaaaaaggaggtgagaaaataaaagctagcatcatgatccagttagaatcttaagtacacaaatcaagctagcaatatgaagcaactgtgccactatccacgctaaaacaatcaacttttgcttctataagtatttaagagagactagcaaggaaacgaataacagccctcttgattctagtgacaaagagttacttactttaacacctaaaagcaatggactaccaagcttgcacgcaattaactcattcggataatgccagcttttaaatataagagcataagctccttcaagatgcctcatcacttcaaacacaacttcacagaatgtaacagtttgtccacctacaaagcataagaaatagatatccccatgaaaatgagcatactaactaaatcaaaacaaccactacttcaaatctcatacacaataagcattaccttcttcattagctttgtcaaaacaaacttagcaagcttaggaattacttcagtatctgtgtccgattcaaaagtaaatccatgcctcactatacgtttctttcaatacctaaca

SEQ ID NO: 58713 - DNA, 582 bp, Arabidopsis thaliana landsberg
gagatttctaaatgcaaatagttttatatttcattcaaatttatataaactttacaaataagcaatgaattttaccactactttttttaaaatacaaacaaacatgtaatgttaaatacattttagtgttattagcgatatgttttcattgtttttgcagaacttcggcaatccattgttggctcaaggtttggatgactcacatccactaagtctagagccattttccataacaaccccatctttaatgtctccttgccatatgctatcacactcaacacttttggtctttacattttgcgcatcccatgaatatggagatatattttttctgcgtaaaaaattcagactggtatatttcatccaaaataaatatattaaattgagaatctattggctgcaagatatattacttctcaccacacatcttattatcgaaatatattacaacatcacaagtccataatccattcacccgatgaagaaaagttaggtggttaatactaatggataaggcaatgtagtgcatctctgaagtatgctctgaaagtatatttagtgagtttgttgtaaattattcct

SEQ ID NO: 58714 - DNA, 1352 bp, Arabidopsis thaliana landsberg
  unsure (1)..(1352): unsure at all n locations
cacacgtttttatctgcccatactttcttatatgcatgccaatagccgtatcaacatggctatatacatatatataatatatacgttattaatttaaggtatatgaagcgtacatcgtaaataaaaatggtatctaccgtaatataaagagaagcgacgtccaattttggggcttgtgttatagatcaaattttgataccatatgataagtcgatgactgatgggaacataaaacatctaaattaatatcaatataataccatgatatgtaatagcctaataggtttggctgacgtgtattggttatatgaatccatgataagttgatgatactaatatttaataacataacacattatatgaattaaatgtgttacacttgattttttttttttaaatgtgttgcacttttaaatatattcatgcactatctttatataaacgtaaagaattctaaattaagacagacacatctttgaccaaaatattaaagacataataacacattctaaaatatattccagatccttatacagtcttcatgtcagtgagggattccgatcgatctcggtttttgagattggtatcttccaacttcgtttaattatttcccttcaaataatttgtgaacacgaaaggaaatgatcgagagagtgtgggcagagctagtgatgatcgtataattggggaggatgagataggtagaaacagcttacctatcaatgcatgcaaccaccaacgacattctcataaatatcagtctttctcacctttcaatttccactttcatgaagttttatatattttcaaaagaaagcgtacccctaagattagtttgtttatttttcaaataaatcatgttcacaactagtttactcctgcaaattttttgttattgctattatacttaccaaacacatatattatatatacagaaaagaggcttaaacaccaccttaaatgattttatccgttagaatcgctagtaatatttaacctaattaacgattttgtgctctgactttaattaattattgtaagctagtataagttttatccgctacgcacacccacacaaagaagaaaaaaaatactggtcatggaatatggggcaagggcaactatatgacatgctgttcaaattttaattggatgagaactagaagtctagaacgccaaaaccctaaagagtatcgttgatagctgatctacgtattcaaactaaataaacacgccttagatttccgactaagtcacatgggataattagtgtgtggctcgcataagangtngaatctcaaaattgggagacaaagntttttttctttcttctttccgctattttaaagcga

SEQ ID NO: 58715 - DNA, 1217 bp, Arabidopsis thaliana landsberg
ctgggagacatatgctggttactttgacagtctttctaagatgtggtcaagaccacttcctgaagtttatgattcacaagctgttgcagattactttaattgcaggcctcatgtcgttgcctttaggcttctcgaggtatttgtttagagtttttgttggttctgctactaatcactggatgatttgaaattatgataaatgctttagagatactgatgtttatctgatgaagtgtttcgtttagcctaacgcattagtattcttgtttttcttgagtgacggaaaattcggatgtgattttaattgattcttaaaatataggtattttctgcgttcacgattgctgccatcagattacgaacatcagcatcagttaagggcaaaagtttagaagcttcagagcagatttttgggatggtgttgaaagaaaccatgctacatttgggcccaacttttatcaaaggtctgtgattagcttattatttttgaagtgaaactatccatcagtcaccatttacatttactgccatatattagatactttgatctgttgtgaatgattcttccctctcttctgctggttcagttggtcaatcgctttccacgaggccagatatcattgggactgaaatctccaaggtcagatagaagttatggtcacatttgtctaaatctcttagcttttaatagtgtctttctggtgcatgtttccattgttctttctctattctgcatgctacatttggttgttcttagggatgtagctgtctgactatgtttgttatgatttgaaactgcaggcactatctgaactgcatgaccgaatccctccctttccctggcctgaggctgtaaaaatccttgaaggggaattaggtggtcctgtcgaatcattctttagtcagctttcgcaagaaactgtagcagcagcatcctttggtcaggtatttactctggtttttatcttacaagaagtaagcatcatatgaatcaacttgtaggatgcatgccttatacttgatatgatatgttaaggtctaccgaggaaggacccacgatggtgcagatgttgcactgaaagttcagcgccctgatctgagacatgcagcgatacgcgacatctacattctgcgacttggggctcggtgaaatctaccaagctatgacacatcaatctgctcgatcatgtcatagttctatgatatttctcttgatt

SEQ ID NO: 58716 - DNA, 1073 bp, Arabidopsis thaliana landsberg
gaactgtgggtcttccgagtaaacataaattaaattttggtttgaaaatcttacattagaaatgtgaggggtaggggttcttgaacaaaaaaactctataataagtagtatagctccaaataaatggtgacacgtacaacgtgaataacccaaagagcatcaatggcatatactccgtacataataatgaaaatttcggcatggtagtcgtctacgatcaaaaccatcaaaactcaacaacacatatgcgaaactgaaaccatgactttactaataatgattaccctaacctcaatatcattgttacttgccgccgccgaaacaatcccgacaactttagacggcccgttcaagccattaacccgccggttcgagccgtctctacgacgaggcagtgacgacttacctatggatcatccaaggctgagaaagagaaacgttagctccgattttccagaacagattgctttagctctctctacaccaacctccatgtgggtttcttgggtcactggtaaattctgttttcaaagttttgtcttttaattcaattttgtctcttgagtcctattttaaaactagggttttgagagttttgtttatatgtttcattttcaggtgatgctatagttggcaaagatgtgaaaccgcttgatcctagttctattgctagtgaggtttggtatgggaaggagaaaggaaactatatgctaaagaagaaaggaaacgcaacagtttacagtcagttatatccctttgatggtcttctcaattacacatcaggcatcatacatcatgtcctcattgacggtaataacgaaccgttgcgacttcattttgttttgagctgagtctcttaccttgcttttaccttctaaagagttcacattacttgtaggtctggaaccagaaactaggtattattataggtgtggtgatagctctgctcctgcaatgagtgaggaaatttcttttgagactttgccattgccaagtaaagatgcatatcctcatagaattgcctttgttggggatttgggtcttactagtaatactacaaccaccattggcct

SEQ ID NO: 58717 - DNA, 514 bp, Arabidopsis thaliana landsberg
  unsure (1)..(514): unsure at all n locations
ctttccatttcagtctccgccgccgtgacgaacaggggcggggggccagctcgattccggttagctcgcattcctctgttgcttgttctagcatccctaggcccccctaaagctcttagacccgctcnnnnnnnnnnnnnnnnnnnnnnnnnnnnnnnnnnnnnnnnnnnnnccgcctcatccgcggtcaccgtggtcaggacgtctcggtgtgtcgttcctgaaattaacctaggggaaacatcgaattaggtgtgaatttggtgtcagccgacggagagcgccggtcacagccccaatcggccggcatagatgctcaccggagttcgtcagcgcgctgccgtcgtcgtggactctgccgtgcgaagaattagaagcttgagggttcttctgcaatcggtcagtgactcgcgtaaacagtgcatgtgcccacttgcggttatccaaaaaggactgggtctttctgcgaaattgccaacgcgggcgtatgcgcgcccccgtttcatgtgctatt

SEQ ID NO: 58718 - DNA, 1573 bp, Arabidopsis thaliana landsberg
atacattcctaacaaacaaactaaagataagtaatgtgtaaagtgcctaccaaaaccatcatcatcaaagtttctttctttttgtataagaaaataaagtaaagtggttttcaatttcattgtgccaaaacaaataagtactagaaagcaaattatattaaactaatagcaatcatttctattatacatataattagacgactatataatagagaatgaaaagaatcataaggtacgccgaccagatgcagcggatgactcatgagcccgtggttttgtaacaagaaaacaaagaccagaatattattctatttataaaacatctggttaaaaaaaactaaaagaacaaacgaaaacgcattaaagttaaatcttaaggtaaagaataaagagtaacgatacaagaaatggttgctgatgatggatcacaaacatcattaacgcttgattcaatatccaaccaaatttctttttctgtataaaacccaagaatattcgatcaaaagaggaatttctctaatctaagaagtttatcttgatttgtcaacttatttggtctaagtctaatcgttgcctatatagataaagacatatatattggtaaggctgtgcaacttgcaagcaacctttttttatttgtttgttcaaaagttgcaagcttaacacccaaatcatgttcctaattaccatgttttaaatatttaattaatactataatctagtaatcagaacaagacgatgattagtagtataatacttttttttccaaaacctaccactaaatgtttgtaagaagttcagattagtaatcacacagttcaaaaatttcttcaccttaatcaccatagaaaaaaacccttctaaatccgttcacaacacaagagatcctaagattaatcactacagagtcaacactacttcaaaatgatttgattcatctgatgaatctgcagctatcacaaacaagttcgatctctagagatctaaacgcagagagacgtgaaacttggatcgatgaatattttaaaatcatacaaattagagaattcagtaactaagaagaagacgaagcggcacccaacaaaactttctaataacccatttttctgaaaatgaacttaaaggatctgaatcaatttgtggtcggttagaaatcccgaaaaaagagttaagaagatcaaatgatagaaacagaccatgaatttgaaagtgcttaccaagtggagctgatgaatctgagattggtactctgttttacttttccttgtttagattattcagctgggaaaaacgcaaaaagagtagatgatgatgacgaaagaaatgcaaattgggtgtgtgtgagagagagaaggagaatcttttagggtttataaagtggaaagtgagtgtggcgtcgtttcgtatttttttgaagccaaatttggcggacaagatgaccgtcgcattttggtttatatttccggttggcctttggtttttttatttaatcttaaaccccttaatgggttttggcaaaatggacatactttcattatttgaaatgtcccaaggaattggttttttaaaaaaa

SEQ ID NO: 58719 - DNA, 1124 bp, Arabidopsis thaliana landsberg
ctcacttcgacgcatatcgttactgctcttgaatccaacttatgatccaagcttttcttgtgaaatatgtggtggaattttttgtacttatactaatttgatcatcttcctattcattggtattgattttcttaatttgattggtaattacaatattttcccctaaaatataattaataagaatggctatatttgttcataaatttataacaaaaatggtagcttttcttttcatgaattcaagcttttcttctgaatatgtggtggaattttctgtacttttgctaatttgatcatctttctattcattgattttcttaatttgattggtaattacagcattttccccctaaaatatagttaataatcttcacattaaaaccaaaataatatatatatagttaataagaatggctaaatttgttcaaaattttataaaaatggtagcttttctttagatgaaatctctgtaactttttcaattattttacccatttgatccttttttccattggattctttttcaagtgatacatcattttatacaataataaataagtaagactatatttaaccaaaaatcacggctatatttgtctataagattatgacaaataatttggaaaactggatgtaccaaataacattgttaacttcttatgaaaattttgcaaaaggctaaagaattactgtcttatgaaaataagactttggtttcatgttctataaagttaactacttatgctgttatgcatcatgatgataaaacatgttagttatatgagtagaaagaaacataatatgggcatatacttatgtcctttctcaaattatgaagcagtgaattgctttcacgcccatagcaaattccacaaccatagggacacacttatttctgatttcgatcggttaaacaaagttgcatcaaaactactcggttaaacccattcataccaatattttcataacattttcatcgttagataataatacaaagccaaaccgggaaaagattggtcgacaaaaagaggatcaggggtattgctttgaattattaaagcaaagtaaaagtagcacagaactgaaacaccaacgtctatattggtgatcggtagatattcgcc

SEQ ID NO: 58720 - DNA, 615 bp, Arabidopsis thaliana landsberg
aagtgtcaaggagatatccagccgtgtttttggaggatagagtaaaattagagtgggcagaacatattctatcgttggaaattttgagtaggaatttcatataattaagaagctagaaagacacactacttgttcaaagagaaagtattttaccattcaacttctcattaggattcggcttttgagaagcaaagagactcttgagagcattcctgctcaatttccccattcgacttatacctgattgtaaatatccagtgactaccaattgccttctttccaggtggaagatcagtaatatcccgaaaacatgtatttaaaggataaatagagaaaaatggagtaaaagtgtggtggggattggggattcgaattcagggttggggaatatcaaaaccttggaaactatcaattgtgatgtggatacttagatggaatttcatgcaacacaatttttgatatttagctgtggtcaagtgaccccccttggttatatagtactaaacgaccaatcaaattaagttttaatttctagacatgtgttttaagtagaaataaatctataaataaatatgagtattatgaaactctttggaccgattttaggaattgaaa

SEQ ID NO: 58721 - DNA, 1477 bp, Arabidopsis thaliana landsberg
caaaaaaatgagcttgcccaagcttctcaggtaccaatctctatctcaccaattcgaatttggactgttttcgttttttcgttgttagctgtttgatgatgaggcgattctcaatcatatcgtcgctctaggtggaattagtttccaatttaagtttagtgacaatgatttaggaaacggtgatgattcagatattcacgaaaattgtggtggatctagagcttcctcgatttaatctgagcttctctgtagcttttacgttttctttatctggttaagttagatcgtctctttcacttgaccaacctaattgaaaggtggaaggtgcttaggtgtttcaatttactgctctctgttttacgatgagattaatgagatgttgatgtaactggtctcacattgtttagcttgtttgttattttcgcaggacgtagaagacatgagagattgctatgatagcttgctcaatgccgctgctgctactgccaatagtgcttatggtaatctattgttccttttcctttgttcggataaaagtaacccagctaacttcataactttactattcagaatggtggtttttcagtttgatgtattcttaagtttagatttaatacttgtagttttgcattctcattttactggttcaaacgcataggtctattattgaactgtattgaaccttcagttataactcttgagtgaatctcttgcatcccaatttatggagagaaacatcttcttgttaataaatatatattcttatcatttgcagatttcgtttgcttgcagaattttctgaatctttgcgagaactaggtgcttgtcttcttgagaaaactgcgctaaatgatgatgaagaaagtggtaagaattttttgagtctttgtcaaacagattcgttaaagatatcatattatatctcatcttaatgtttaaacatttgaaaccgacagtttgtgcgtttatcccttttccaagttttctacacatttctgataagaaacattttgcttctcttattcttcatgtagagtgttgattatgctgggaaagttgcaggttgaattgcaaaaacttgttgataaatatgtgagtttttgagatctggtacaaactgaactggtttaatatttttcaactgagttttcctttgtctaaccaccaaagaaaaatcacctagctatccatattgaaaattcagcgttctcatattatgcaaacaatcactattccctcacagtcacttctaaatgaactccgcatagttgacgtttgatcaaatctgccatatctatatactttcgcacatagtcagaatggcccatgcttgctgcgtataaatgaacttccatgttgacagaacgagatctttaagcgttgattgataagctagctgattcatccctttcaagcgaccattataatgagttttagtggtggtatatgcaggaaatgcggcggctttgtgatgaga

SEQ ID NO: 58722 - DNA, 289 bp, Arabidopsis thaliana landsberg
catgagcccatttgggaaggagtcagcaatcgttctattgtctgaccctaagactgttcacctaaaacgctctgaagactctacttgaatttgatggtgtgcgtcaaaataaaaccagtgtgggtaaataaccggatcggttggtttggtataagacaaaatcattcaaaatactaaacgtggttagtatggtataatcaagttttatatctttccaccaaaagcttatataccaattacataactttcattctttcgtctctcaaatcacttcgcatgttcttaactt

SEQ ID NO: 58723 - DNA, 504 bp, Arabidopsis thaliana landsberg
tttatttctccgacaatgtcttataattctttttggatgagggtctaaagaaattagccttttcggtttttcatttattatccaaaatttctctacattattgctagctcaaattaattccagaggtgattattaacacatgatttatccacaaaaattttcacatccaaacttgaagttttgctatttatttttattttcctaatgaatcagccatttgatcttttaatccataagcacaaattaatccaaataacataactctaaaataatcatcaccgttaagcaatacccataggaacctgaaataaatttaaatcatatttttctagcctcggatctatttgttttattacttataaagaaactcaattttcctatttaaattcaaaccgtgaacaaaatcactcaaatcttgaaatgcaacatttttaaactgtagatctgacttagaggagtcctacaaaaattatttcacaacttttcgggttcacataatcgagc

SEQ ID NO: 58724 - DNA, 2192 bp, Arabidopsis thaliana landsberg
  unsure (1)..(2192): unsure at all n locations
ctgaaaatgtagaagaagaaaatattgctaagggataaaaaaaatttgctacgaacatttttccttttttaagatattgctaattttcttaaaattcaaatatgtaatgtggatgctcttataaattttaaacttatatgtttcgcttttcttctagtaatatatcgaccattcaacagttttcgactttacgcaaacggttttcatgaaggttttataaaattcgttataaatacattaaatatccaaaaccaaaactggttaatacagtatggtccccaaccctagaactaggtcttatcaggtcatagccttttaggcctatggaatccaccggattcttggttcagtatcagtttagttttacacttaacacactaactttatattagtagattttaacctgtgattaactactaaataactgtcttccgttacgcaataataataatatacttaagccatgatgttattagctaatcaaaaacaataaaataacctgaggcaacggtcaactacacggagacacaacaccgcccctaattctacctaactaaagtctaaagttactactaaacaagtaaattaagctttcccaatttgcagtaaataaattattaattaattaattatcaatagatttaaatacaaaaaaaaacttattttggatggccttatatattttatgaattagtaacggtgatttaattttttaaaaaatatttgtatgcaaacaatcgatcaactaattaacatgttcacatttcacaaacgtaacatgtagaatttcgtcgagttcatatgcgaattttgttttactcaaaaacaacttgaaccactttgcatcatagaaacttaaaatatatatatgcttccagaaacaaataaatatcttcttaactctttttttgggtttatttttaaaattagtaatgttaacttttaaaaagacagaattagaggaatattaaaagcgaagttgcacgcgacgtgaggcagacccgtgagtcagattttcatgtggagacagagtggcagtcacgcacgtgtcacgtgtctttcattaactttgtttaaaaatttccaacttttgaactgtttttgttttctcacctaaaagtgaatagtactactactatttttaataactcgttgttgcacgtatcaaaagaaaaaagtatcgtaattgcattatacacgactgctaaattgatttatcgacaaaggtatactaaaaattcgttaaaataacaatcctaaaaataaggaagagagagagagtctcttggagaaaacgaagagacgtcggtacgagactaaaaagggtccacgtcagacggagctgtaaaagccagatgcgaagacaagaaggtttttgtgagattctgacttttgctaacgtgcacactttctaacttttttgtctcgttagaaaatggtattgtttgtgttgtaattacaagtgttgcagtacaatttcatacgtataagaaactaagggcttattatgtatatgattcaactctgaaatgtttcctttctcatgagtcgtcacctttgatagtagctttagtggtgtgtgaacgtgagagcattattcatgcgaaatattgacctttattttactaaagagtcgtcttttgacgtacttttcttttgtcaatgtatataatcatctaagtcatacaccaaatagaaaaacatgaaaattaaacacttttatcagacttcttttcacgggataacctgttttaaaaacctttaggttgaaaattgtaacgatttttttctgtctcatgatgaatgtaaaaattatgcttgtttgatacaaatctattgatatatatgtaaaaaatattatctaagaacttcattttgttttatcgtaaaagtataatttcaaccaatattttgctctctactcacgtcgctgcaaggtaagaaaaccttaatttatacggcggactttaccaacggaatatctgtagacctttgtgttgtcattcgccttcagccacgtcagtgttcgttcacaacagttacggtgagcgtcagagacttagtccagcctacgtgggttgcttatcagtcacgaaacctaaattccggcgaagtatgtatgagtatgatatataacagaattgcanatatataacttgtagaatggctcaccaagttctcatagatgcact

SEQ ID NO: 58725 - DNA, 625 bp, Arabidopsis thaliana landsberg
aaatgtgatgttatatagattcatcgttctctgcttgtcttctttctaatggttcttccaatgatggagaagataagcaagaggaagaagaaagaattattaggtgagaggaaaatctgaagaactctgtttttgggttttcctcttcaatttttgtgttttacttttaaaacaaattttatgggtttatcaggattcagggtaggtcttgattgtattgtactgctatttttatacatttgaatcttcttttcttattaatgaaaattttatcaaacataaacaacaaatgtacagttgcagaagaacagtcagaaatgaataggagacaaatgtcttaagctgcagtgactattgtttgaagcagagtttccaagtccgtcaatctacaaacaacacggaaacaccataaagttagcagatgggtacgaggaacagagagaacctttacgcataatttttgtgagaaacttcaagtttgatgtatgatcctacttacttcacattactgagatcagggtatacggcaatcgcatcattgaaatcctggataaaaaaacaaagttttcgcctgttcttaaaccaaagagcaaaagaatagagaagtgagaagatgtgttgttgt

SEQ ID NO: 58726 - DNA, 190 bp, Arabidopsis thaliana landsberg
ttatcactcgatcatacactccaccatatgcttcattttccccacctaatccatccctaatttgcgtctttattacctttatgcacccgtaaaaccatggtattagaatctattgctttacactcccgataataccaattttacattgcatacactcggcacaagatttctatgaaaaccgcatctgtct

SEQ ID NO: 58727 - DNA, 670 bp, Arabidopsis thaliana landsberg
  unsure (1)..(670): unsure at all n locations
agcagctaatatattattataggacgatttcgtgaatatatacaaatgtgatatcacaatttgatagggaaaatacactgttcgtcttaaacggtagtcactagcttaatgaatagtgagacgacgggtcatgtatacaataacacaaaagtaggactagtattattaaaagatactgtatcaattattgcttataataatgtttaattaatgtaacgaacgacattgcctttttctctgatgttcacgtaacacatccaaatacatattatttcgtagtgatatccaacgataggctgtccgattcaattcatctaactgaattatttttggattattaagggtttggttgaggtcatctctttgtaaatttggcttaatttgtatagtttcttcaataatgcaagtcatctgatacaactttaaatccaatattatacttttaagtttgtttttatcgtacactaaataatttccaccatctgaacggtcgggtgttttttctctgagttaggttatctatattttttttcttttctttctagcttttacgcatttttttttatcatttgaaagtccaaaaataattattatcccttgtatccgtgttgatttttttaataaaaaagtggattgtcaaatanataaagttgaaaaacaagagaagaaa

SEQ ID NO: 58728 - DNA, 567 bp, Arabidopsis thaliana landsberg
gtagtatgtcttccaaatgtataaacacttttgggtgggtggttgaacctatgattatgatcggttgcgcaatccgcctatactatagcctgccttggtcccgggcgggcggcacctagctataaaaaaagtgggcgtatcagaagaaaagaatggtttcctgcagtactttttagtaggggaagttccaatatatatatatagccttctcgaaagaagagcgcgcgcagagctctaagaaaaagcatcactcacttacaataataatgaggaccaggaaccaatctctttgttgcgaggaatccgggaaataactaactccaagtcacttaactcactctgtaaggccatgaaaatcccaaaggaaatataggaaatacaagtcagtcaaagaaatgcaattcggaaatgcgcacgcaccagtcaatctagtcaagtgctactcaatctcctactagatatatagaggccatatagaggcaggcaaatccaggaatgagatatagcggagggaatacgggcctccttacctacctgaaataatctatgaaaattcacagtggagta

SEQ ID NO: 58729 - DNA, 343 bp, Arabidopsis thaliana landsberg
gaataacttaaaaatgtcccacgttaataagatcgaagttttatataccgacctcgagtaatccccctaaaaagaaaaatgaaactagcgtttaaaatataatgacaaaaaaaaaatatagtcacatttactttcaaatatcaaaacgagagttgtatatatacatactcttctgactagtcacacagcgtaacacccaatttacttcactctgaacgactagactgacttaacatggggaaaaatcactatccttactatacgcaatcgatatactgaatcattcaaaatacatataaactaatggtatatcacttaaaccaatgctgaaacatatccaaca

SEQ ID NO: 58730 - DNA, 1239 bp, Arabidopsis thaliana landsberg
  unsure (1)..(1239): unsure at all n locations
gcacatttccctagatttctaaggctactcacacatacagtatatcaaaacctgccatacttaattttttattgattcacaatttattttaactgatttgtcaaatgacaacattatcattaaatcatagaacttaactccatatagctttataacaacaaatgtatctgacaactttgttgtatgacaaagcacaacataaaacaaatcttattgctactacaacttaatccctacttcctcccagattcatatgtctgagatgagactttatttaaaagcttctgaggccaaaagatacccacttcccggctaagtaaaatgtgaacataaagaaaacacagaagatgcaccaatggagaaatggttccactgaaacgctgaccttacaaccgtgagctggcttgtttcacgggagcgctctgtaatacaaatggaagaacaatcaggaatctgagttacattgagtcaactatgagaggtaaactgggcaagattagatagatggtcacgctagtatgttgattatgtattataaaccaagctgaaagagattatctttattgcaatccaaaagaaactgaaaattacgaactcaccaaaggaactcctttagatcccctctcagccaaaaaagcacaaggcttgaagaaatcaccataagccttcgaccactcatccagcctcgagtaaatgtatttcgatccgatggaatcagcccagaacatgattcctcctctgttccacaagagatttagattgaaaccaaaatgagtcaaagagaatttgataaggatctcggagttccagcatatatctcattacaacactgacctgtaaggtggaaaacccattcccattatgccagcaatgtcaaggtctgctgctttgacagcgataccttcagcaaaaaccctacacgcctcgtttactactgggaagaatgtcatttcaataatgtccttctccgacaaattcgccaactgtatgcacaacaaccagttagattccgaaaagaatagtgagttcctttcaaatgcaaatgacaaactttgctaaatttttggacagagggataccttagggtcaagctttactccagatatgcttcttgccttttcgatatatttctttagctcaggatcaggtttcgccttgcgcttatcatcatacaaatagaaaccttngcgagtggcttcacctgaaatcaacaggaaatccaacataatttagaagaaa

SEQ ID NO: 58731 - DNA, 209 bp, Arabidopsis thaliana landsberg
catgaatccgcaaccatcaaacgcccaatctatggaggacgttgttataacagatcggaggcgacctctcagtaagaatctgacgaccagttacgtttctgcgccagaagagatctaagaggtcctggaactccacgtatgacacgtgcgttcttttcttacacataggtcgccttagacgaaaaccgcagctgacaatgaggcacttc

SEQ ID NO: 58732 - DNA, 1354 bp, Arabidopsis thaliana landsberg
ggatggttacttgcgtaagacgaatgataagcattgtacactaaaacctccattaaccctaacgactttactccttcgaaggcttctcttacactactgggatctgcacaatcaattcttatagcaaacacttgtgctttctcttctcttgctatctcttctgctactctagataacctacctgcacaatttacccgactatattaagagagtgaccaacctgagtatatccttaagtgttactaaaaaaaagtgttatatatattttttgtagtggatcggcaataagtgcaccgttttgtgattaatattagctgatgggcgtgacttagtaactatttcatatacatggagggatgaagaaaactatttattattatagtcaaatggaaaccagtttaatgttcttatcaccgaacagaatgaaaaagtatcttttgtgtcaaacaaaaacaaaagttatttaaatttaatcaaataagttttcactgtactggttcttaaaaagctgaatttatcgacacatttatttacactgaaaaatttccactattagtactatgtcttacgaaccagttaagcctatagtgaagtactgaatagtgaatactgatgtataaacccaaaatcttttttttttttttaaccaaatatacatttaaaatgcaccttttgactataaattatatattgattaatatgcatgtatgtgtgtcagtgtgtgtgtgaacttgtgtggtgtgagtcagccacattaatatttgccaaaagcagaaatccagcgaagaaaacattctaaaaataactctccttttttgtttgttcaaggcttcaaaaataactcattttgcgaagaaaactgccgcaattccttttcttcattggaataaaaatgaagaagaaaattcccatgggaacatatatagaaaaaatcatatttatacatggaaacatgtgggtgtgtatagtgtatgaatagataaagatatggataaaaagaaaagcaaaaaacaaaatgaaaagagagaaagaaaaggaatcaaaccaagatcacgagcgaggatggcgacggtgtagccttcgtgagcaaacttccgagcgatggagcgaccgagctttggaccaacgccgactacggccgctatgcctttgctgccagagctcgaactccctacgtttctcatcatcgatactttatgatctttcctttctccaccttcttctctttatagctacttctctatggataaaatcgataaatagtgaaaaataattataagaaaattttagtttatgttgtgtccccttaacctaggcctttaataagattgtgttgagagagtgagagagagaa

SEQ ID NO: 58733 - DNA, 632 bp, Arabidopsis thaliana landsberg
aggggagacaatgtggcaggtctagctaatttctctctctctcaattttcttctaattattttctcctaaacccttttggttgagttaaaacaattaaaatgtaatcatagaataagatgtgttgcaaacaaaataatgttgaaatgtgttaagaatatataacacatatatcattcctttagtagtgaattatctcgcctttgggaatgaatatgatatgatatcatcaacgtacgtgaagacgaaaatagtttggggttgatgacgtacttgatgttaccctaaaaaggaagttttggtcctcctgcttaagtcaataccgtctatctgtggattgactccacactccagttagtctggaaactcttctcaaccaaaaattattcaattattccacattcctccttaagagctagtcactttaataaacgataatatcgaactcgtggaccatataaaagcacgtcttgtggtctataattagtagtctgcttgccaaaattgaagaggctataaataatatttggttgaattatattttcaactacttattaattatggtgtttaaaaaaaaaaatcgttttttaactaaaattttttattattttcaactgaggaaatcataattttt

SEQ ID NO: 58734 - DNA, 432 bp, Arabidopsis thaliana landsberg
ccttcatcctataccatctaacgtctaaacaaacgatgcaccattttctaactattcacattcacactataaatcaaaatcatacgaccctctacccctttaatcctcacctgaaccctgttcaacttgagctcaacctacaactcttccgatgtattcttacatatagagccaccccctacaaactacccaccttactatgtcccctctacccgatcgacccgaccaagctagccttgtgaccaaatacaggcgttgtccacagcctcctattcacttacccagctcaatcacagttaaccatatgttagttcccttcagccatacctacacttcatcctatacctagtaaatccatttcacaacgctcggtctacactcaagctaaaccggcacttattttccctgtgcttcacacaattccttaccctt

SEQ ID NO: 58735 - DNA, 1061 bp, Arabidopsis thaliana landsberg
attactgtctgaaataacatatataatatcatcataacaatattttttcaacttctcttatttataattccattttttgtttgtttttttatggtaaaatacaactccctagtttatatatttttttttcccctttaacttttcattttatcaaaaaatgtttttaaaaagagtagaggactcataaagcttcgtacttgttttatttatataattaataactcgtatcaatgtcaataactatcatccatcccttttttcttcctagttcaaaaaacttttaatattgtttgtataaatatctagttatctactattagaccattaatacaagaaaacaaaacttttaaactgtaaatagtggcttgattttgaatgacgagacttgtatgtatacgagtggggtctagaatattagtcgctgtctagtacatggtttaatggttcggttggtgcaagtaattaattatgagaatctttgcttattttttaaaactaataattccacaagtaaatagtttaatacgtcaattatatatgtctttgtctaatgaaaattttaaaacttccacttaattctcagccgtccgatcatccaagatgtgaccttttcatgggcctagaaccgcgaatcgtagcaatgtgggcaacacgtcgagaggaatctcttagacgaagtaaacgccgttagacttcgagattccccgttattaactccgttagtgaggcaaccgttggcaattgtaccgtaccgtaccggtttttgtcgtcgtacgcacacaaaagtccaacacactcgcatagcaacccaaacatgtgtaacgccgattttgcccccaaaagtctcatacggattctcatgccacgttccaaacaaaagtatttggctttttctttacttttcttttttgctattagtatattttgtttttgttatatcattttaattacaccaatttaccacgaatctcgtaataataatagtataatactatacacataatagttaatatctttatcaaatttaataagcttttaaaattttttgatatataattcat

SEQ ID NO: 58736 - DNA, 1255 bp, Arabidopsis thaliana landsberg
ccaaattgcaatcataaggtataaactttgagttaggtgcatacacatttcaactatgtgaaagctaaatgtgtccaatctggtatagccgatccaaaaaccaaactcgaaaaggaaatgaaccgatttcttctcttgatgaccttgttaaactgataaagatttctgaagaaatgtcttggagtatagactaatttgaagaaaaggttttggtctagaccgtcttctcgtgctagtaacaagcttaaaccactggcttctcggatcgcaactcgagtttcctcgtaaacatttgcagctattcgtcacaatgttgttattctccgtatccacatccaaacaaacagagaatccattctttgttatagaagagagttgcatcttcgagtcagaaaaaagtttccatttagaacagtaagattctgagaaaaacagacgtagcttcactgactttcctttctcataagcttttaaacagaggatttgttcttctgctagtgataaaactcgatgagaagaaagcctccagctttctgatctattgcaagaaccaagctttagttgaaacaatgattttcttacaatgcaaagtccagttgaaggatggaacattattttctttggttgagtttccattagccctggtcctgaatattgcaaatttgttattgatcaagatcatataaaacaaaagtaagtttgaaaaaacaaattgtgtacctataaaaggagtctgaattgcagatatcatctgcaaaatggttgagttccttatgctagaccaattaaaatccaaaactccataagattcatctgatccaatacttttctctcttatataatagcttcctgcaagagtccatagtgaccaatctacatcacgatcagctgctaaagccataaaacaacttagaaacttattgtcgtttgcattgtttcctctttgatcaatcccaaactcgctcacaaacaacggtatccctttctcgagcaaaaaccccgacattttcatcatcttctcggtttctttcccgcaaatcttgttcaagttatctccttcccaagtattccaaaatccataccaatgtatctcaaacaccactttcctcctgaagctaacttcaaagggtctctctcggagaaacgataagtcagtagcgtaatttaaacccgagacaataacaagaacattcggattcactgagtggaccgcttcagcgccttctctcctagcttgtacaatattaatgttgtg

SEQ ID NO: 58737 - DNA, 227 bp, Arabidopsis thaliana landsberg
tacaaaatatcctaccataaaaccaccaaaataaccctccatctcatttataatatatccctatacactttaacatacattttcatacctattaacaattcatttcacaaaataaatttcatgacatacaggctcgatcatcacaaatcatactacaacacttacttaaacagtacataataatccattactattaaattcatacattaaaaaattaaccattatat

SEQ ID NO: 58738 - DNA, 1134 bp, Arabidopsis thaliana landsberg
tgacttttgtgtttgacttaggaaaatggaagtgaaagctagagctcctgggaagatcatacttgcaggggaacacgctgttgttcatggatccaccgctgtagctgccgccattgatctctacacttacgttactctccgctttcctcttccatcaggttccttttttttccatattctgaggattttttgtcttggtgttattgctactttgagatcaccaaacctgtcattactgtattgaactcatgagtgaattgtttagcaaaagatctgagctttttctaattcacttggggatatagcatatgcatgagtttacatttgttcaaatttggtttgggttctagactttgaatgttcatgttatgattgtctttgtgttagctaatgtcaccaagtaatagtattatcaaagggcttgaggctgtgttaagatggtagagtatcctgccttctatgtactacgggtggttaattcattctgcgctcgtgcttactagattcgagttcaaacagctaatgcaaatgtgatttcttaagtgccaataggcagatttgtagcaaatgacttgaccttattactgaattcaattcatgtttgattatactcttttgtcccatagaaacaaatctgaaagctttatgtttctttattttttctgacagctgagaacaatgataggcttacacttcagctcaaggacatttccttggagttttcatggtccttagccagaatcaaagaagcgattccttatgattcaagcactctctgccgttctacgccggcttcatgttcagaggagacccttaaatcaattgcagttttggttgaagagcaaaatcttccaaaggaaaagatgtggctctcctctgggatctccacgtttctctggttatacaccagaattatagggtacataactctaaatagttgacatttctatgttcttgcaaacattttttccgagttcttcatcttgttgtgtttcacgtttcttgtttttaggttcaatccggctacagtagtcattaactttgagctttcatacgggtctggcctcggttcatcagcagctttatgttgagctctcacagctgctctccttgctttttctatttcagagaaaa

SEQ ID NO: 58739 - DNA, 550 bp, Arabidopsis thaliana landsberg
aatcatgtatcttttttttttattattgcttttgaggaggactgtgatttcgtctggtttctaccttcactgttaaaagcaaattaaaaaaaaaaatcttaatatttgttattaatatggtcgtaaaatggtaattagaaagttttgttatgggcgtgttaaaaaaaacaaagctttgttatgggctcaatttttttaataacactggtatttttatgccatggactgagaaaaaaagaatccagagtcattgacaatttctttaaacaagcccaataatttttttgttatccgttccatagtaaaaaaaataaaaaacatacgattaccttcttaatcattattaacctcacaggccaaaattcaatttactcaatttagattttatcatggataaagtaaataaatgccaataaaccctcgaacggtgtcagacgtaatcgctcgcctgaatgagtttcgtcaacgtaatgtttacgatgtatttttggaaagtccatataatacgtctcttttatgacctcacatcaaatatcttcttctttctttc

SEQ ID NO: 58740 - DNA, 547 bp, Arabidopsis thaliana landsberg
agatcgttgccgagcttcctctgggcgtagtcgatggcgcggcgcagggcatccatctaaacgccgtgatcggtgcgcagcgagcgcagcacgtgggcttcaatcaagttccagaacgacaaggtgggcggcggcgtcttcgctggcttgatcaggggccgaaaatgaccttgaccgtcaccgactggatacgaacgcccgacaaaccacgcacgcagcgttgccggcgccaccttgaggtagcgcgcggcttcggccaaggtgtaggccggctggctgcggatgtcggtctttgccatgtcgaaggcgggctccggtgaatgggcggaattgtaatggaacagggctgttccgctgccgtgagtatctgggggctaagcagcgctttttcgatcagccggcggggcggcccggtgcccttggcgattgctcagagacaagggctttgcaatcaacaggttatgatctgtcgccgaccgtcggtttatttgacgggtagtttgaccaaagcgacggggccagcgcagacgggggaatacgtgagcct

SEQ ID NO: 58741 - DNA, 1061 bp, Arabidopsis thaliana landsberg
accaatcaagtgtaagttgaacattcatgaaattgaacatagggtggtcgtagtatgtttataaattatgattcctagagtaagatttcgagatgtgactcaagtgtcatcatttataaagtacatgtaaaaaatcttacaagttacaatgaaattcgagatgggacctagagtagtatataagagatatgagtccatcatctatgtgtccttgatctaggagaattattagtaaaatgtcgagaaatttctagttaaaaaacactaactaagagttctttgtaaatcaaaacttcaatatctactttgtcttaaatgttgattaattgttttgatttcagggctgtggctagagctccatatcaagtgaaccaacacggtagtcatcttcctcccaagccagagatggttgctccatcgataaagtcaggccaatcgtcgcaacacattgcaactcctccaaaaccaaaggcccataaccatatgccgatggaggtggacaagaaagaaggacaatcttccaaaaaccttgaactcaagctttagggcgtataaaatgcacgatcgagttcacgtttctagttttcacttatttaggatttgaacccaaatacccttttatattttcttccattacttttgaccaatttaagttatttatagtactgtattacgtagctagtatttagatttcaaaacatacatattttgatacttgttttttagattctttaattaaaattgtcatctggattaccctttatcgaaaatttttaatcacctgatataatctcaccagtgatggatttgcgttgttagtaatttttctaagtggcaaaagtatattaacctataataggtttcaaagatatacatataatgtttctatcaaagatattagtataatattttaccacatgatcgaaatctcaccagttatggatttgcattgaatgttctagcgattgggctggaccgtctcaggaacccaaccttaatgaaaaaacatcgtctcattgattttaggtcgttaagtctgttttgcccttgtcttatcccgt

SEQ ID NO: 58742 - DNA, 1355 bp, Arabidopsis thaliana landsberg
aaactttaatatacagtttaaaattttgtaaatattatatcaaaaatttgaaattggaaaaaaataacatacatcacctaagctttttagatcacaaatattgaaagcatttaaaaaatatatttccaacctttttaaaaatgatctatttttatattgcttgaggtttctttctattataatatatatctttttacatatactgtatgttctaaattatatatgaaaatccagacatgatcttttatttctgatataaatcaaatttacacataccaaatccagacagaagcttttatattctgagttaaaccaaattacacatcctagaaattataaatatccaattttcgaattggattaaatctccaaatatttttcccaagtatacatttcaagatttactacaaaacaaaaactttgttaatacaacaaattttgagtgacgtcaaaaactgggttccacttgtggactcccctgacacagatcggtcacaggttcacttttatctcgaaaacagtattttgatatgttataccagagcaagagaagaagcattaagatttactgtcactcttttgaccttaatctaccatcagttccagttagttaattcaggagatcccaatttttcgttttgaccaagttagagagcccaaatttgcgattcatatctttataactttcgagtattaaagatcgaatagtatgattactaatcatatgaaacttgctctccataccataacgaatcatgcctcactctaacctcttagacaatcaaacttaactgttctcagattattacatcaaacccaattgcacaaaattggagacatacacaagagatgatcaatgaacagtccaaatatgattggatggatttcttttcagtaacacaagtgtatgagaaaatgagaagtctttgtggctacgtactggtccatcgatgttaaaagatgatagaacatacctggtaacaatatatttgacatacttctgattcgaaatgacgctttcggtatatggattatctagatatatgtatctcaatttctaccatcgacatcgaatccagcacctgtccaacctcctctgcctttgttcattattccaattcctcttcccctcccttgattctgtggtttctttttcgcttttgattctccttcagctgttgctggtctctgtccatgttctttaccaccttcctcgttcccgtggttattttcaggttttcccgggtgagtttggttcgcattggctgctggtgcgctgtctactacagatttagtctccggttcttgcacctaaatatgaatgaaaaaatgtaagatgttaaaagcatctttcg

SEQ ID NO: 58743 - DNA, 496 bp, Arabidopsis thaliana landsberg
  unsure (1)..(496): unsure at all n locations
ctgctccccctttgcctttttcttcagctagctgccttacactctcgctcgattcagtgggtgaaccaacatgagttctgatgatatgctggagttcgtatttcgccttatgcgaatcttgcttcctattggaaagaagaatcgcagccccacccattctgaagatagtgttggcaatgagcatcgacttacacttccctctgtaaccatttggactaacagcttccatactcaacactagggccaaagaatcaccatgaatcttcataagatcttttacgagattaaccgaaagaatcccggcgctgcagcccataccgctcaaactgaagctctttatgtcactcctcatgccaaacttgttaatgatcatagaagttatggatggagaaggacagaataggctgcagttagacacaaggatgtcaatactctttggatctatctcatgctttgagaaagatcttggacaatagcgangaggatctcatgagtt

SEQ ID NO: 58744 - DNA, 211 bp, Arabidopsis thaliana landsberg
atgacatatggaggactagcacaaccttactagtggaggtaggtactggccataccatactggcactaacctatattggatcagccatggacatcgtcatgtgaacatgcaaaatctcacgaacatacataggatacctcaacggctaagataagatgatatagcgtttcatttgttgtaccgatatcatcaattggctagcatgaatcat

SEQ ID NO: 58745 - DNA, 587 bp, Arabidopsis thaliana landsberg
  unsure (1)..(587): unsure at all n locations
ggattcaaaattgtttagaagaacaaaagagccaagatctataactgtagagtacttggatggattcaagatacatctatctaagtcatagaagtgcccaagactctagccaaatgattgaatcatacatgcacaaaggacttatcatttttgttatacagggcatggaggtggctacgcaaaaaagcatcccggcttgaaggaaactcttaaacttagatccaactttcatgtatgtataaagcttgcacatcctgcaatttatctaccaatgataattcatattctttttctgatttcagtgtttgacataggaaaaggggaacaatctatgtgaatactacatttgtgactttattcacttcttcataggtaccaagtcagtatcaaaagatataagaggtacatcaataatgtcttcagtatgaatgtcgattntagaataataaagcgtctcagctntaaatttaatataaatacagttttattaatgcttttggcaaatcagagttgataaagatgaggaagaactactcctctttgaaaagacccaggcaattaagaacaactatatggttataaataat

SEQ ID NO: 58746 - DNA, 513 bp, Arabidopsis thaliana landsberg
  unsure (1)..(513): unsure at all n locations
tcagcagctcgctgtaagcgatgaaatgaaaaattcttaagccagcttatgctaaccaaaaagggctatgaatagctgtagttggaaaagtatatgatcacctttccctcatgatatcctctcaacacgtagtgggctaatccgaaatccgcagcagaaatatagacatatcttgtaacacctggtcaacgatgggaacacagttaaaatgccagtaaactctcgctaatccaatatatgcccagctcatatatntccaggaagccatggtatcacataacatttcagtgctccacttatccctacgatcaactataataaatgatgaaccatttggctctcagtatcatatggtcactcagtgtacatctgagatagatatctcaaaataattacatggctatcataagaagacagattggaagcatttatacagacctgattaatgcaaactagaagaactcatacctttttctgaagcagccctaattgcgttgatgtgcgcagtcccgt

SEQ ID NO: 58747 - DNA, 112 bp, Arabidopsis thaliana landsberg
aaggttctctaccggatactcatgatcccgatcattcacattatggggcatggaccatgtttgtttgtgtgaaacgagtgaaaacaagtgcaccttgagtattacatgttgc

SEQ ID NO: 58748 - DNA, 1222 bp, Arabidopsis thaliana landsberg
aaacagatttaatgtgtggttcatttggaatggattttctaaaaactaaatgtatcttgatgatacaaatagtcaactttttttttgggataattgattttccaattaaaaaacaaataacaatacaagttaattgatctaaatttcttatatactccctcttatgaaattaggtgttgttttagaacttaacttttgttttttaaacaattgtgttttacattttttcatatgttttgatgtaaattatagttttatcccactgatctaatgtattgaccaataagaaaatttaaaagtatatcaataaacgataaaaattatttgttttcttaatatgtaatatgtcaaaaaacataaccaatatttatttataaatggaaggagtagtaatcttggctttataatgatcataaagtgaggttttttaaaagtcttttggataatcatatttttgtgggtttattcattttaaactgaattccactttaagacattaaacatgcttagagttactgaattctaatactatatgagaattacgactaagaaatcaattagtagttattggatcgactcatatggtattgaatattgatcctttaacactttcgataagaaaattctaacgtcaattgttttaaaatcttttaatgcccacataacataaggagctcgtgaaaagactgagcactctcactactcactagcctagtaatggtggggcaaatttgtttaattgtcaattagtatccgatggacattcttcgtcgaatgaacgcaatagccaaaatacattgtatgtcaaattttacatttgttttttcttgtattcacttgtatcaaacgtcacgaattaaacaattatcatattttcccatcaatttgatggaacctcaacaccacatttaaatccaccaaaaagtgaataaatattttatcagaccaaaaaaagtgcaagagggatcaaaaggaagcacgtgacaatgacccaactcttgcaatttcattgaccgcagggttaaaccctaagcagcctaaccagccttgcttgtacggcaagaatgtcttcctcttcaattcttccgatactgctctgttcgcagtgtaatgcatctcgtgagccgaaaccaccgcgccgttcctcctccttgacctagacaccgaagattcacaactctctctcgatctgatactcgaatttctcacttcctcggcatct

SEQ ID NO: 58749 - DNA, 442 bp, Arabidopsis thaliana landsberg
aggatatgacattgttccatctacagtactcagtttaaaacaacttttcatcttttgtgaaatacacacttaggattatccgcaaaattcaagagcctagctgcaaaagcagcaaaagaataacaaaccgcgctagatcaaacgacacaaaaataagtgttataacctcgttgtgcccctaaccagattataataaattgatagtctgatacttatatgtttctatatctaaccaagattagattatagtccaagagttcatcactcattaagctattccttttcttgaccctggcccctcacttgtaaaagaagtcacaactctctgggcattaatcttagaaccaacttcaactttacttcatagaaatacgaaggatttttcccattctacctaaaaatatatattgtgtttctaatcctttcatctaactattctctc

SEQ ID NO: 58750 - DNA, 1099 bp, Arabidopsis thaliana landsberg
aaagccttgtactgagaaccaccatggggatccacctgatcttacttatcatcttcgtgaaagattcttcggttatcacaaacaaggaatctggtatcccgagagttaagttccagcgtttgatgaagactagatcaagcattcctgagaagacgtatagaagttgtgcaaagaagagtatgttcctaaaggaatagcctttgagcttcttgtgatatatgagaactccaaacatagatgccaatgccccgattgcatagattattcccacaaactcctgcatttagaccaaaataagcaagtttgaatctagctcataattacattattggataaagaattttattagcttgttcagaaactccatagctttatatgtcaatgtgacactaccacacaatcataatttcaacaccatttcataaggcatgcagatattcacaaacctaaagacaagatttttcctagctaaaataggctttcaagagaagtgactccatggagattaatataaaccagcgaaacagtctgaaatatgattcacataatatcatgacatactaccacagtgtcaatcttgagcttgcgatccatgggaacctgtttttgctagcttcccatgtcgtttagtaactatactggttcctatgaactcaatctatataagacccaaactgtttaaccactatctttattctttaaatcaagatctttaaaaagagcttcttcaggattgtacaaccaacctgggaaaaggcgggcccagctgtaggatcagtgtaccagtagaagtggccttcatgagtgctgatgttgagagctaaggatatgaacatgtaaagagatggcttccacacttcagggtactttactgttttgcacattcccttcaccgctactcctaagccatctgtgtcctgaagaaaattcaaacgattgctcaagagttcgatcaagattccaagtcatgagataaagtcaagaggcatgaattttcaataatccggcagaaacaaataaagacaaggaaaatttctgtttggattattctgctgcgacgccaattctggtcacttgtgagagagatcaaagggagtga

SEQ ID NO: 58751 - DNA, 246 bp, Arabidopsis thaliana landsberg
tttgatttttcttcaacgttaaacttaataacaggggctgcatgggcactttgacaaactgctacaatcacataacataaatttcacagatcaaatgcttagtcaaaattaatacagaatctttattcaaatttcatctatcttgattcgatgttcataaacatataagcaaaccattctaactagataactgatccttgaatgactaaacacaagacttaggatctcttctttacgaatacacta

SEQ ID NO: 58752 - DNA, 1261 bp, Arabidopsis thaliana landsberg
ctcacatatcagtattgttgtgtgataaccaaaaaagatgctttcatgaatatttatattcaagatgaaagcacatctatcagtcttactctattctttaaaagtaaagaagctactgactgcaaaatcttaagaactcagaatgaattttcagatacttacgctttgtagacatcaccaaacgatcctcttccgattagctcaaactggctaaatctggttccagctgcctcttgtaaaccagcaacatcatccatttgcacaacaaaaaccaccttcttccccctctgcaaatacttgattacatcaataaattcgccaattacaagcacaatctcacttgcaatcaaattcccaaaattgagtcaaccctacaactattacactacgcattcccaaaaactgagatctataactaaaatctgataatcacaatgcatatagactctttactcgattcaagcaaaaaaaaacaaagactaaaattttttcccactataagatagcaaaaatttgaacatacacgtaatttgaaacgccttcattgaaatatctccaattcgatcaatcaccaaagcatacaagtccaattttttctacgataacgatgtcaaaaatcagagaaattctaggatcgcattcagattaccttatatagttgaacgaagaagacgcgttgaatatatacagatcttacttttgttctatcaccttcccaagaaaattctctatccaatgcttctcgagcaccaagagatcgagaagatgaacaagaacttcgattatcaagttttctcgattttgattattcaatttttcatttttttgttttctacttctgttttttttttttttttttttttttaatttcctaaaaacaatacgaaaaacctttacgacgacccgacccgacccgacctgaacttcactagtttactatccaagtaaagataaacgacctggcccgagttatcattaccgcttagtttaacgtagacctaatcttaacaagttataagataggcccagcccaaactttgacgagacactgattttgtgattttaattatttttacgattctgaatagtaattaattattatatgtttctaaattttaaagtttttttccttctaattttaaaaggtttatgattttattgcttcttaatctttcatcaataatcaaaagaaaaaaaaactttgattactctaggtatttttggcttggagttccctagttattttgatcatgttttcaca

SEQ ID NO: 58753 - DNA, 1806 bp, Arabidopsis thaliana landsberg
tgggatcttcttgaagagtatcaatggtgatctatcacttatatacctgcgcttcagagaaatccaatcgcagtcgtcttgtctcgccggagaagacgatgtaactaactctctttcccgcctttctattttttttttttggttttaatatttccaactgcacaatcgtgaatatatagcaatctaattgggccgttacaagttcttagagggcctaaaccaggtctagagttaaagtcaactttaatttcccccgtattcagaaaaccacattataagcatataatgggctaacaataaggcccactaattacaaaagtaaaattgaaattgtagtcaactctcctaaattgatcactgatctcaggactaaaaactaatctcgatcgttaaatataattcgtttagaaagagtctcacactgctttttttttaatgtattagaaaaatagattaaattctacaaaaaaattatctgcaaatgcaatgcacaaactttttatcaacaaaaagaaaaagattacattgttgcctttacaatcaaaatcgtttaacctctaatctacacagaagtgacaaaatcgatcagttacaaatgaaatttaaacacttttttttttaaaactcaaaagccaaaaaagctatgaaagaaccggtaatcgaatacatccacattgaaccggaccagaagatcaacgcttttaccgcaggaaaatcttttgaccattagcacctgcaaggaacaaagcaaaaaggcagtgatgatgatgatggttttgaattatgatgatgatgtggttaagaggtggacattacgtacatcggttaaagatttctacggctaactgcaagattatctcgctttctaattctagcaactgggcgtgtttatctgcaagttcttgtgcctcttttgcttggaactccaagtgttctgcctcggcgattaattttgctactgcgtccatctgaggattttcttctggtgctcttggtacgagagaagtacagaggaaaatcatttgaccattagcacctgcaaggaacaaagcaaaaggccagtgatgatgatgatgatggttatgatgatgatgatgatgatgtggataagagttggacattacatcggttaaggatttctacggctaactccaagattatgcattcggaatttagcatcaaactgtatctatctgcaagttcttgagcctcttttgcttggaactctaagtgttctgtctctgcgactagttttgctactgcttctgcctgaggatcacgttgtggcgttgtggaatcttctctagtagcaggaacacgttggggcatcatcatcatgtagcggtttcctacctgcatttgcaagtttttttttactgagctgaccaaacaaaattctataacgctatctcgcaacttgcatttggtattaggcaatgtatggagttaccttctctatttttctttcagcaactagtttttcaacctcgcctctcaatcgctccctagaattatccggtatcacgtaccggtcctgaaatttatattaaccacaagaacaactttcaaactagtatccaaacaagctatacatgtcatcatcatcatcatcatcatctaagatcaaaacctgaaaacggatacttataggtagagggaaaaagattctacttacattgctaaatttgaaaaccctatctacattacgaccaatttcattaaggttctcaatatattggtgataaagctttaaaaaaccattattatctaaacttaacctcgtacctttaagaaaccaatgtctca

SEQ ID NO: 58754 - DNA, 1131 bp, Arabidopsis thaliana landsberg
ggaagttccaaagacagaagacgagaacattattagaagtattttgttttctatagagacaatctaacatgtttattgtataaaattcgatcatctcttccagtgttgctctctaacaaagcgctctgcacaagttcctgcaacatcatttacacattcttttattcaattgacacaattctatgtgtttaaaagaatgatgacaaaactctacatttaccttgacttcacggtgagatagaaactttcccaagctgtgaatggttactctcatatcttcaacctgtaaaattacacgaaacagtacttcagctgcattcacagagactatgagatggctttatgtacaagacaaattagtcttcttcttaccctaacataccctgcctggttacggtcaaaaaatctgaaagcctgagccaaagaaacaaagtgaagaaagatttagcaccttaaccgcagtatcatttaaaccgatttctcaagttttgtagggattatttatttacctgcaacagctctttatcaactgtttcttctcgttttgctgcatcagatgttcctccatcttgtttcccgtgcttttccgtttccgacttgggtttgatttcagtttttgagtcgttaggacctctttcttcttttctattatcagtttcggcttcagttataggatcagcaacagtgccactagttttctcaaggttttcttctttcttctgcggctgaagaagagacatgaaacaaaatgagaagatttatgaagaaaacatcttgttgttggattcaatttgaaagagtcaaatgagtaaatcatacctcttcagcaggctcttcttgctcagtatttgcaacgtccatttcctcgcattcttctggatcttcttccggatcttcttcagggtcttcttcaggatcctcctcaggatcttcctctgggtcgtcatcaccatcgtcatcctcctcatcctgattctccacttccatattagcagcttcacccacagtaacttctttactgcccaaagtttctttggtctttgctacagcttccttatctgcaatttcccggctaccgtccacggtttccttgcctgaagtttctttatcatccttcccaggagcagattc

SEQ ID NO: 58755 - DNA, 462 bp, Arabidopsis thaliana landsberg
taagtacatatctctcgatcaggctctctggaacctattgggactgtgtgaggcacaagggccatcacatggtacattacacagggcaaaaaaaagtttcaccaacgtacagcttacagggtactccatctaaatattggccacgctaactagttatcagtcgaaatgttgtcgaagagccatctcggtttcgctcttccaggacgcatgcgacgattggcccctcatcctcttgatcttctccttgtctttgacagtggaacccttcttcttttcgggctcttttgtcagcgccggtctatcaccacattgagggcgaaccatacccttgccatgtgagtaggtcttttggaccccacattggagacacatccttaacaatgagccgaagtcacaattaagaacactaatagtattaaggaattctggaatatattagagttcacgtaaaacatgtacaca

SEQ ID NO: 58756 - DNA, 524 bp, Arabidopsis thaliana landsberg
catatcgtagcattcatttatatatgcttaacttagcattaattaacacattattcaaagaaatgacatccatgtgtaaatatattatcctaagtgtatgtgtatatagttgatcaagactaataagtatgcaacggtcttgtctgtgattagttatgttgttagatgtaattatcacattgagatataaaatgatcatttcccacatgatatttgttcatatacgtgaacacaatgacgttacaaccacctagctatttcgttgcattgcgatgacttatctcggaattatttatatatatggtaggcataataaagtaatggtttcctcgcttctaatcaccaagggacatagtatgatgttctcaacaagtggacactggtagtgtacatgtctgctaaaccctcaaaagtcaataacaaatcttgtattatatctggttgactgtttcaatagccaaaaacatttaagtctgaagttattatggtcgcaaacatgcaaaatggtactgaatatacaaata

SEQ ID NO: 58757 - DNA, 1104 bp, Arabidopsis thaliana landsberg
aaaactagtctcattcttttttacttttgggtcggttttagagttttacctttaaattgcaagcgaattaatctcaatcaaagagatgttctttaaagccagtaggacagctagagatgttgaagtgtttgtgcattcttctacaaattttacaacccacttaagcccatttataagagtagaatcattttcgtaaaatggggtcttttgttctctatgttaacacaaaagcggaatgttttgttgtagtaataaaaatagatgaatttttgtttcatgctcacggtttcttaattctctatacaacaagacagagagtcagagactactaaaacttagtttttattgtcttctatagtaactgaagcaagaaggcttaacctatatagtttgcaattagacttgtgtgtgcctcgcaagcaacttaaccattctacatttgatcacaatttcttcatttgaccaatttatctgtactctccaattcactgtcctctaggatcacaaaaccaattcttcaaatccataacacagaacaaatactttggtcaagcaaatatgacgaggaatcacacaaatacataactcttactttaaaaactcgaaacatttcatacattcaacaaaagggttctttttttctcattcagtatccaacaagtaagcatagagaattcatcatcatcatcatcatcaatgccaacacttacataaagtaacaacaagaagaaggaaaaaaaacacaaactttaaaagcaagaggaagtgatctgattcgataactctcagcaacacagcatcaatctctagatgttgacctgatcaaaagcttcaagagcatcaccagtaagtctacaaactctccactcctgcagaatctgagcacccatctgctcataaaacttgatagcattaacattccaatcaagaacaacccattccactcttccataacccatcttcaccgcttgtttggccacagcagtcaacaacatgctaccaaaccctttcctcctataaggctctctcacaaatatatcctcaatgtaaaaaccaagcttggacaaaaagctagagtaattcgggaaaaacagaacataccca

SEQ ID NO: 58758 - DNA, 491 bp, Arabidopsis thaliana landsberg
ccgctgccgctagccctgctggcagtagcagcacggacttgcagctgcctgagattcgggtggagtgcttcctgggtgacacgccgttgtggtccatgctgctgtcagaggtgacggacgacctagagagccgctatctgagggcccagcaggccaccatggacttcacgctgtcggtgccgtcaaaaggttcgttgctgcgtacactattgacgcaggttgtgtggcgtttgatgagtgctggacagcctgttagccactcatcatgcagctgcggcgcttaactacatctgcggcgacagcaatcgacagcggcctttagtcacggttcgtgcttcttgcatgtacttgccacaatagcgcatgacgctatcgcatgcacatttcagcttccaagcacatgcccttgcactcaataagctcccgcccgatgagcgcccccccccccccccccgaggggggcacaacggctggattttcccaatcctaaa

SEQ ID NO: 58759 - DNA, 1151 bp, Arabidopsis thaliana landsberg
ctatgaattgtttttttccctattaatcaactatatcaggaaaaatacggataagctttttctttcgttgggttgaacgatcgacaagagactgcaggggagaagaaagaaaattattagacaagaatcgcttcctcacatagcttttttgtcttatcaaagcatagtgtcgtagaaaaaaacaaaagctaaataagaaaaagtgatgatttgataataataatcgtatcatttccttgttgttgaattatatgccatcaatcatttgctttatgatgttccacttttcttctctttctttctttattcgtgtatattgtatttttgttataacggccttggttttcttatgtatatttggtttctgtatatctctacaagctacaattatgattgaatatcaaacactaccgtctgtactatcgtcgatctgtttttgaaatttacaaaataaaatgaaatatattagcttgataaagaaatgaactgatcgtacatatatcgaagtaatacgatcacaacttgttacatttagagaatatatgattttcaacgcttcgggagcgtatatgcacaacaatgccacaaaagagaagaggtcgtgcttggaatcgttacgagcgataagcgagtgaacttagccaagttgattttttatttttaaaatgtcaataaaataaatacagtaaggtttgaggctatccgcgcaagctctggtcaagatactataaaaaaaaaaagaacatcatgaattactacaaaatttcttacttggttgcttgttacttgttagtgccggtcttgtaggttgtatgcttgctctaattaattaaccttcagacaatctttttcacggcgtaattcggaattgggtttgaacttttttaaccatgtaagaacattattattggcagtatcaatgacacgtggcaagcttaaaagaaacttgatttaagctgatgtagtcaactttaaaagctccaaattgttccttttattagttatagattataaaatattgtcctccttactttttaatttgaacttaatttatgttaataattattcaaaatattattagtgaaccaaaaaaaaaataatttttgattcattaatctgaaacatataatgatatattgatttcattttta

SEQ ID NO: 58760 - DNA, 936 bp, Arabidopsis thaliana landsberg
ctctacgtgctctctccacttccttaatgcatccgattgacacaatcaaggtgagtcctgttggtgcttttgcaagctgtatataagtaaatgctctgtttagacaagtttaggtgagaacttggctaccacaaaactctgcgtaattgacatctgcttctacaatatttgaatatttaaatagatgagtatgccaataattcctcctggcttcttgtggcatactgttgacggattcgttatcactttcatgccagacacgtgtgcaagcatcaaccttgtcatttcctgaagtaatagccaagcttccagagattggtgtccggggagtatataggggttctattccagcaattcttggacaattttcaaggtcttttcagttgtttcaaatcaaagatattttcacttctacctgttaaatttgatttccatgtggcttaatctctttcatcattgtagccatggcctgcggacaggaatattcgaagcaagcaaacttgtgttaatcaattttgctcccaatctcccagaaattcaggtgatgatcactctctattcactgtttggctggtttcgtcaagattctaattttgtgcttcaagtatatgtattattatgtgttcttatagatgttgtgttactgaagaaattagtattgaatgacttcaaaagtccacttgtcctctggaatcccaacattctatcgttttcctagaacctcggcactgcttttgtcctgtatagttcatggcatctagtaagtgaaccatatgttagaggaaaaatccaatatcaaggctatttcattgcagtacttagcttcctttgatgcatggttgagatggtagttggtagatcatttgatactcactatttgttgcatctcctggttctgaagtctagtagttataacgtttatggctagaatatata

SEQ ID NO: 58761 - DNA, 122 bp, Arabidopsis thaliana landsberg
gcgctgtgcgtatcgacccgtgcagtgctgcattttattgtcaagtatcccgcctggggagtacgggcggaagaatgaaactgaaagggctcgactgcggcccctacaagcggaggaccatg

SEQ ID NO: 58762 - DNA, 537 bp, Arabidopsis thaliana landsberg
  unsure (1)..(537): unsure at all n locations
cactcttacatgttgcatattcagtgaaatgagantgcggttaccttgtgtctcaaaaataaggtactccagtcattcctataaataatttcagactttgttttaagtaaatatattttgactttggtcagctatatagaaaataacaatcatgttataatactaaaggtcatcattgttctattatataaaatatacgagtcatactttacctcttttattatgtaataatatacatgttaatagtacaatactaaatgagcatgacaccaattccaactcttttttgtgttttcgtgctctgaggcactgacgtgctcatggtctattgtcgacttcaatctacttgtatttgggttcgatgaggtcgggcggccaacagggttcggaagagggtgtccacgtgcgcagcaagttgggattcagagaaatcaccatacgagacacttggtacgatcctatgctctctgtactttgtgcgatagctatactatgcatctgttctttgggggttaggccccatgatctacttgtttg

SEQ ID NO: 58763 - DNA, 136 bp, Arabidopsis thaliana landsberg
gttggatctaatctcattatcacaattacattagggggcgggataaatttatataccattaatccccaatcccttcttgtttatttataaatacactttctatttgcacatatacttaacttacccctctattcaa

SEQ ID NO: 58764 - DNA, 516 bp, Arabidopsis thaliana landsberg
aataaatagatactattgtttaaataccgccatgactattcgtaacaactaaattttctcatcttcataattaaaccgctcagacaaaaacatttcatgcaatagaaaatgaagacaaatttagacgaacccatgagttggatgtcgaaattaattggtagggttatgaattttaattagagcaaagaaaggattcaaaacatggctctgtcaagggaacacacctaacagaatctcatggattagcctttgtcttctgctgctcccttacgccccactacttgtcacattccttcgtttttattcttcaataaataatttaacttttcaaattttatttttaccctcaatgttttcttcattattgtccttccatataattttataatatatacacacagaaaatttcgtaccaagttcaacagagccttaattataggcatgatctcaggtcgggtcatattccccaccttcatataaattggttagaccgactgttgacaaaatataaatctt

SEQ ID NO: 58765 - DNA, 139 bp, Arabidopsis thaliana landsberg
ctattcagctgggaagaaagctcaatgggggcggggggaaatttgatgcgctaccagcccaaccccttatagcgtatgaatgatcgcacatgcgtgtgcaactataagaacccacccggtcccatgagccagtgtcgat

SEQ ID NO: 58766 - DNA, 977 bp, Arabidopsis thaliana landsberg
acatgaatagaattggtgttttattaatcgccaaccttccgtggaatactaattatcaccttgatccaattgatcattcgaatcaaagaagcttcaacaatgtgaaagtataactgagagaagagtgtcttaatcagtgagttcaacctaccagtttgataagcctacatttcacctatcggcccgaaacaccctaacacggagtactaggtcgagatgtttccgtcagccttcctcaaaagactgttctcttgatactgatttatacatacataaatcattgtaacactacactaatccaataccaggtatagccgaggacgatcgatcttccctagactgaacaagatcaaccctcacttgtttgagcatgaccaaccattcttcaccaaattcaaattgtatttaatttaaacggttcggtatcacaaaccaaccattggaatgtaaacaccaccgtcaaatacaaagattgccgagtcgcaacccttagagtttcggctagcctgatcaaagcgtggatgagcctctgctcggtgtcctgaaaatcctgcatgagaaccaggtttgtctctttctctcttcttcttacggtctttctttcactggatagagtttttgaattcgtatgtgagaactaaaaggcatatagaaaaccttatcaggcgtgaccatctcacactattgggcttgttttgtgtgggagactaatgtgccgcgctgtattcatatgatccacaaaattaaggtttatatttggttcatgaagtcttagttacattatcagtctttctaacttagccttggatcctatttttagcttcttggttctagcgtttgggttaaacttcgcaatactattgaggactgggaccattggtgcaacatgacttctgatatttttttaacaaagtcttcttttgattccaatcatgcaaaaacatttttgtttacccgaatgttctttacattttttt

SEQ ID NO: 58767 - DNA, 1151 bp, Arabidopsis thaliana landsberg
ctccaaaccagggtggagaaattgtgctacctcatcaagtaaaacttcacatgctgagtattttaaactatttggaccttttgaaatctctatactgagccatgcaatggctataagacatgcttttgaaacactcttgtttttactctttagcccttcttgtaaaccacaaaacgtggctttgcctgtatcaataattcttctagctatcttacaacaccatccatctattcctgtatcctgcagaagttatgaagttttcataagtcactctttttggcttggctatatgataaaacttacaaaaaggtacctgcaagcattcatctgaccagttgatgtttcttatcatattcatatgtgacatagaagttagacctcctcttttcattagccaagcagcagtgtaaggttctcctgtccatgaataagttccaccgatattcgcaagaatgaacgttgataaaagctgcatatttgaaccttcactatatgtaactgcatcaagtagagctctggtagcttcatttctgtactttttgttctcaggtggagaatcctgtagagaatttcgatacgtaaatatatatacttagagatagaatcaacaagattttgatatttagaactaaccagtgcatttaactgaagcaatatatctgctgcaaagagtttgtgatcaccctgcaagtgtttaatacagtacaataatgtgaccttaatgtcaaaacttccttctttctttatctgtggcagaatcttgattgctgatgacctgaaattacaagtaaaagtgtgaatggtagtttaaaaatagaaattttttgctgagatatgtataccttggtatcttcaggacctcatgaagaaattgaagagcaatgcaaatttcttcttggtctttgctttgcaggagatgcgcaaaaggagccactcgagtatgctgataaatatacttcctgttaagtccatcaaattgcatgcattttactaaaatacttgtcaaggagatgaattcccctgagtttccactctttgcaacatcaagaagtccacaaaggacagaaggagagctgattgcagccaagtgcatttgtgtttgttgcatgatcaaaagcaatgataagcacttcaattatcattaatgatgc

SEQ ID NO: 58768 - DNA, 253 bp, Arabidopsis thaliana landsberg
ggatggggttgtacttttttggcgccttggtaaaataaggattgtaattgctaggtgtaccaatgaatctgaaaccaagggagagtggaaatagtccattcactaggacagttaaagatttctgaacctcatcgtcaatgagacatttctacagggccccagttaggtccattccatccatttttcggctggggaccactaactttaaattcatgtaaaccataatatgtatccttcatgcttcattgaccaa

SEQ ID NO: 58769 - DNA, 967 bp, Arabidopsis thaliana landsberg
gctctcaggtaagcatagcaaatataaagccactttcgaaactagcaacaatgacggtgaaataattttatcctagtttagtagactagacagtagaaacatgatgtgacaaataaaatgatttaatctcatttctcatacttcacttaaataagatattatcttaaagatttcatgctttagttagcttctaagcgtgttttaatgattatagggggacataacgacattaacaacacacctcaaatagtatagtttaaatgtacatttacagaaaattcattttaaactgactctaaaatgtaaatttacagaaaaattaatttaaactaaattgataacccttttatgaaaaatattctaagatgttagtcgcaaaattgaaataataagaaaaagatttataataagaaaaagatttataaaactcaattttaaacacaattattggaaaaaacttctatacagagactttgagagaccagcgagcacgtgtcaaaggcatggcatttacttcgacggctaagtgagggacagggaccctgaccgtaacagttcccaaggagttacaatgttccgtacctccttcatttgctaatccctaacacttacgtgagtagtgttagttatttaccctaatcaacatttggattaggctaatccatgtttgtgaggaccactatgatatttttctctctttttttgtttctttatcattatgatatcattataatgaaaaaaaataaaaatgaccaaaaaaaaatatcattatgataaataaatatataattggcgattaattccacatgccaccatacttttacctttgttcacaaagtctcaaaattacagtactcacagtcagtcaaaattatagaactcatcaatataaacattactaatttagataattctatgttaatagtggatctaatttatgaacccccaaacagtagaacttttgttt

SEQ ID NO: 58770 - DNA, 537 bp, Arabidopsis thaliana landsberg
  unsure (1)..(537): unsure at all n locations
gtcgtcctcgaatcaaaagaatatatcttgaagttaaaaaattaaaaactgacattctttggtaaatcatgtcgctgagttggttaaaacacatgagagcatgggttgcaagcactatacatatatgtatatgtattgagttaattaggttgatgtaaccaaccaatcaaacacttgcaacaagcacatgagtatcgtttattcatccatatactaatagctagcaaatccgtatggactaaatgggaagtgaagctggcaaaaatatattgagggaagaattaatcaacaatattttatatgcaatcatgttgacatttatgcaaatcacatgaacgaactttgatatatntatatatattcctacccgataaaaacccataaattagtttcatgcaatcaagaaagaatcgttgcgaacttgcgatcatagactatgatatatattaaacacatcatgtggaattcacatgcatgtacaaataatttacatctaaagaagccgataaattggaaaatgcgccaccgtatgatcat

SEQ ID NO: 58771 - DNA, 351 bp, Arabidopsis thaliana landsberg
ttttttcttatatgagaaaaaaatatggtgacttggagcaccattccggttttgacggaccacggatgatcttacttggctattgatgagatagcacgtgcatgtcgtttagggattacttaaattaccaaactaccaatgggatgattgtcaaatgttaaattaagtgcatatcattctaatattaaatgagacgatcaaaggtatgaaataattattgatcgtagtagattgaagcctattatattgatgataatggaattatcatacgtataacatggacaccttcttaaaacaggcctgcgagattagtctattgaacacaagacatatataaatcatgttgaaaat

SEQ ID NO: 58772 - DNA, 486 bp, Arabidopsis thaliana landsberg
agacaaagatgaagagaaacacgacagaagaacaatacaaaagaagtaaatgagagaaaaattgagattctcatcttcttttttttctaatcaatttgtaagaatttcaaagtagagtttaatagaatctctttacggtgttaaaacagagatctacaattgtatcatgtaaaaatagaaacctatagaaagctttgtatattattgtagaggctatttatacgttgtttttactagaaggagaaaaaatcctaaagtaagttttcagttctgtaaaaattggtttttctatttgttacttattcagttaagtgaacatatattttatgtttattgatctgtatctatattcttgaaacaacataacttaaagttcaaaaagttataaacagatttgacggattctaataccctgaaatcgtaggtttttatatgtttttcataataaacgttagactatccttattgatggtcttttaacataac

SEQ ID NO: 58773 - DNA, 376 bp, Arabidopsis thaliana landsberg
cacgatcaagcaggactttgttccctcgctctgtgtcttgtttttgttggatactgtagcagttacagcaggacatgactttaaatgccacttttaccaatttccgggcgccatgaagggtgattggaaataccttggttcacctgagaaagagccaccaaaagcggacaaggcggcacccgcagcagcagcggttgagacagatgcacgcaagatgtggcagaataagaccgtgaaaggtcagggtaccacggagagcgcagacgatgccaccgccgtctacacccagcatcagaacagcattacggacataaaaccgtacggagacacccaatggtcaaccaaggtcgaagcattctcgacatcggggctggac

SEQ ID NO: 58774 - DNA, 1190 bp, Arabidopsis thaliana landsberg
  unsure (1)..(1190): unsure at all n locations
gcaggagaggcttgtcatgactctgaaatggaatcctcaaaaactactctctctgatgacgatgacaatctttctgttgaaaatgattctccttgctgctccagaagtgtcttcaacgttaatcattctgctgcaaattatgatgaaaacgagcctcacacaccgcctctgactggaccgtacaagagaagaagagtaactaaggcaatcagcaccggagttgaagttgactatatggaggaaacacccagaagaaaagataactcggtagaccactgggaaagccatgtacctgattgtgacaacatcattgaagcaacccagtataaggatgtactagttcttgttaggtgtggtgaccgtgatctccctttcaagttgcgagaggttataatggctgacatacgattgcttactttacttgaagctggtctcccttcatgggtcttgtttctgcagtcttatcccggtttctgtcatctttatcgaccctggatgtgccatttcgccagagcattatatgtgatgatatctgtcatcactgttgtgattggtttttatgacctgtacaaaaatgtccctgttctgaaggctactgcatctcggttatgtgggccactgttcgattgggttgaaacatgggacatggtatcccgaataaagtacttgggaacgatgttgtttcttcacaacttccagaaagctgtcaagtgggctctgactatggcacgtgctatgcagtcatttgtttctttttgcataatgcctctggtaaatcctctcttagacattcttgaattgctcctaccgttatggaattcgttggcggaaacagtggcaagcttggtttcagtggtttggatagtgatggagtctggttgcannnnnnnnnnnnnnnnnnnnnnnnnnnnnnnnnnnnnnnnnnnnnnnnnttggaacgtcagtaagtaatcaaacgtttgcttgagcattccttttctcatctctatataatcataatcctgatatttttcttctttttgatgctacagcaaatactgttttactacctctattctggatcatatgggaagtggtatatgcaccgatcagagtgggtgctgcattggccaattgttaagctggtttcttctcatacatattcgatgttattggagatttatggaggtatatgagcagtataccttcag

SEQ ID NO: 58775 - DNA, 552 bp, Arabidopsis thaliana landsberg
  unsure (1)..(552): unsure at all n locations
tgtttgttgttttctgacatggatgattccgttttttctatattggtatactatcgcgaaatcgctcgtaatataggtaaaatcatatttattagcatcttcgaatagtggatctataaatttttaagacagaattgataaagtcattaaagatgctttactatcaatgataatatcatataccactgaaaacataaaactattaaattcactaatattagtcaaacataggacctcgagtgttgagccatttgttctnnnnnnnnnnnnnnnnnnnnnnnnnngcgctccgtgtttgtcttcattaaaatatttactatccgtcacatgagtttctcattttgggtttttcttaaatcaaattatttaaactttgatcaacaatatataagattaaattatgttaaactaaaagattacatgttatggtagttcaagtcatgatgaatctagtaattttatttttatgtngtaagatcttataaaatacctggtataacgtgcacctgcacgacacacaatatgatacccataaaaaataataataaatct

SEQ ID NO: 58776 - DNA, 104 bp, Arabidopsis thaliana landsberg
  unsure (1)..(104): unsure at all n locations
caaaggcccaagggggctaacaccgggggaacaaacccacnacccccaaaaaagaccccacacaagccggaaaaagacgccaaaaaccagccgaggacccgaca

SEQ ID NO: 58777 - DNA, 378 bp, Arabidopsis thaliana landsberg
  unsure (1)..(378): unsure at all n locations
cttgcgcgctgatgtcccctcctctttcggctgcgggtccttctactggtagtcctgtnnnnnnnnnnnnnnnnnnnnnnnnnnnnnnnnnnnnnnnnnnnnnnnnnnnnnnnggttcgatggttggcttgtcgcctttcgttgtcccaaggtctgagatctccttccttgggattggtattctttctcttgagaaccaagggtctgagagctcctcccctgtggttggttctccggttttggctcctttagtgggtgtggctgacatctccaattctgagcctgaatctctggtttccccccggcctcaccatacgtggtagggtctgagagctcctccccaactcagatagagttctccacctatcgctcagggat

SEQ ID NO: 58778 - DNA, 727 bp, Arabidopsis thaliana landsberg
  unsure (1)..(727): unsure at all n locations
aaaagaaaaaaaaaaaaaagaaaaaaaaaaaaaaaaaaagacgagaagngtagcaggacnanagaaataaaaaaaaaagaaaagaaagggaaaaaaaaaaaaaaaaaaaaaaaaaggaaaaaaaaaaaaaaaatagataaaaaggaaaaaaaaagaagaaaaaaaaaagaaagaaaaaaaaaaaaaaaaaaaaagaaaaaaaaaaagaaaaaaaaaaaaaaaaaaagaaaaaaaagtaaaaaaaaaaaaaaaaaaaaagtgaaagaagagaaaagaaaaaaaaaaaaaagaaaaaaaaaaaaaataaaaaaggagggaaaaaaaaaggaaaaaggaaaaaaaaaaaaaaaggaagagaaagaaaaaaaaacaaaaaaaaaaaaaaaaaaaagaaaaaaaaggtaaaaaaaaaaaaaaaaaaaaaaaaaaaagaaaaaaaaaatagtgaaaaagaaaaaaaaaaaaataaaaaaaaaaaaaaaaaaaaaaaaaaaagaaaaaaaaaaagaaaaaaaaaagaatagaaaaaaaagaaaaatatgagaaaaaaaaaaaaaaaaaaaaaaaaaaaaaagaaaaagaaacaaaaaaaaaaaaagcaagaaataaaaaaagaaaaaaggaaaaaaaataaaaaaaaaaaagaaaaaaaaaaaaaatagagaaagaaaaaaaaaaaaaaaaaaaaaaacaaaaaaaaaaaaaaaaataaaaaaaaaaagaaaaa

SEQ ID NO: 58779 - DNA, 1237 bp, Arabidopsis thaliana landsberg
atcttttgacgtttttctctcaggtatgaactttggaaaccaaatctcagagcccttatggaacatgatatgaatgaagttagcgttggcaggaagaccaaagctgaagttcttgaaacatgtttgcagcaaatgaaagcttgtttcttagatgtgagtcagctgttttttattagactttttgtcttctctctgtggccaaatctgttattgctgaaggtgctgctaacacagtaggctggaactgaatgccgtgtttttctaattgtcattcacaaatttaattctcgcaggcaagagtaaaaaaatcaaagctcctagaagcaatgacaattttctttgaaaggtagtctcgttactttgttcagtactgtgtagctgaagtctatttcttcgtaatataatatgatactgcatgtgcagatctaataacactgatgagagtgaaagtcagacagctggtgaagttgtccgacgatgcaatctctgcaatgaatcagatatggcactcaggaagaaccgggtatcatatattctgtctgaacaatattttctctgttctccctattgttaatgggaaccacaggttaaacgttctattccctttctttgcaggatggcaatttcatggttgggtgcatgaattatcctcaggtcagaatttcaccgctctttacataccatatatattgttggaaatttaaactttttgctctctgtattgtaaccttatttctgaagattatgatctaatcatttgacatttcagtatttcttcgtttatgcttccttgcttacatctattatattaatttcacacattttcctttctctagtgtcggaatgcagtctggcttcctggaccgacattggaagcatctgtcactactaatgtttgtcaatcctgtggtccaggtatagccacagattctccagtataacagtgaattgaatttcaaaaactaaattacacttggatgacacagcgtgtacatgtgtctttctgcctttattattaaatggtgccctttctctttctgtaggcccggtctacaagatacttatcaagttcccgtcaaattggaattccaccaggctttgatgttaatcacttaggtaaaaaaaattgcagcccatttgttttcttgtttaccaggctttgatttttttaccaggcttagattttaatgtcatcacagccaccgcgccaattttatcgtgacttcttctaatatgt

SEQ ID NO: 58780 - DNA, 1382 bp, Arabidopsis thaliana landsberg
ttttacttttaagcagttaattgttttatttgattccattttacatgaaatttttctaatgtttttctaacgtgtttgatttgcagtttcaaatgtaacaattaaagccacacacgttacaacataatcgatatgtatagcatagcgaaaactgcaagaatatcagaagtagcaacgaaactgattatttgattagacagtgaaaggtatcaataatgaacataagataatttttcctattaataatgaaattacaacaacagaagactacactaaaaggtacaaatacaatgatccgagaaaattacaagtgcaaaagtgatgaacgctctttaatgtgcttcacaatgctctttcaacatagtttgctaaaaacttcactttagacatatatcctcaaacatcaatgatgtcttttgtaatttcttcatcacacaaccatatacctagttttctttttgcatatccatgaatatgtctagtattacaaaagatataaaatgaatcttatatgttcactaaaacaaagattatcaagatccatcttactcttttgcatatactcgaatacctatatgggattaaagatctatgtttctaccatccgatcaacaagagttacaactttttttatagggataagactgaaacatatatgtatatcccatttctaccatctggaatacttgaactaccatctaaatctattgaacatcgtgtttcaaaatacacaagttcaaactataatcaagtgaatagtttaagtatcatcattcgcttggagagaaaaatcacaaaaccatgtcgtttcaactcgtaaaccgccgtatttattctagtgaaaccaaaaaacagagaggaggagccgtgactgacacatgcttggtaacaaatccattgtatcatccaagatattatcattaaaccaacttgtaactcgtaaactcactcccaaacccaacctaaagctatagaagatgctatgataggctactcatagaaaggactagctataaaagtacctttcagtgggatacaagatggagaatcaatctaacagctgaatctgatcttcgaaacccatcagtgtgacaggagattctgtcctctgaatccaacacaactatagtgtttcaccaaagtggctcttttctcgatctctttgcagagcttggcggcgcttatacttatttttctctttgtttttgacgtcacgactaggtttaggtttatgaagtcataagttgggtttatatatcaaaaacgtttccgtatgcaaattttcttttttattccaaaaaatatgtgaatatatggctataattagtaaaatttgggcctttcttggcccagctttctctagtaaacaactcaacttcatt

SEQ ID NO: 58781 - DNA, 433 bp, Arabidopsis thaliana landsberg
atgacttctacattttctctgttgcactaactttaggagtatattttccaaaaaaattctctgtaacgttgtcttacttacattatgttgtaattgaaaacagtttgataggatcatttgttccgtttggtggattcttctcaacaactccttctgaactgaaactacccttctccggtttcaaaacggaaatcaccggacccgtttcttcaatatccgatcagacacaatctaccttgccaccttggttacaaatgaccacaagaactgatttaaaccaaaaatcaagtgccaaggtcggtttactttctcttctcctaatttcttaatctcccataatcctacgagtatgtttcttgtactacaagtttcattatgttatgttaattgcaacgtgtatttacatctcctcagtgcagaccaaagaagggtt

SEQ ID NO: 58782 - DNA, 934 bp, Arabidopsis thaliana landsberg
cttcaagctcattaaccaaacgtttgagttctcttcacaatgatatttttcctcgatttcggtttcttgagccggaaggttcatatcaagaactccattagttgttctgtttaaccgttttacgctctccacagtatcttttgtctcctgaagattccctaatcccatcagcttcctcttgttcaccgaggttgggccgtaaaccgatcgcaccattggtaaactagatacagtttcaatccttatctccacttgccttcctttgactctcaatagtttctcttcagaataagatgttgttgttgcggaaccttgtgaagatgacgtcataacaaaaatagtgtttccgataccaacttctctcccgtgtgaatccataaacttcccagtttcgattgcctttgacaagctcatctgcagcttctcgtcagctttttcaatgttctcaaggaaaaccacgcagaaaggattcctacacatcacttcaaagatatgatcaaccatcgtctttcctctcaacctcatcggatcatcacaaccgcccattccctgctccgcggcaccaagatcaacggccataaatctgtgttcgctttgatacacaatctcagcaaggacaagcgacattcttctctttcctacagtatcaggaccaaccaaattaagccaaacatctcttcgagtgacactcttaggcggttgtgacagtgcacagctgataactctagcagcctcatcttgtcctgaaaccatatcggttaatcttctgtaaataatcttgaaactctctgcgttgaggtcccttgggttatcaaaggaataggaggacacagattgtggctgagaaaaatctttgctatccaaatgcttcttgagaccggatcctgtggtgactgaacttaccctaagattcagatcagtggtgaccgattta

SEQ ID NO: 58783 - DNA, 380 bp, Arabidopsis thaliana landsberg
tcttgttagctatatgcggtactcaaaaagttggatatgataaggaaaaatgatatcgagaggatactactagagcgaaatatactaataactgtcagatacccctttttggtaaatgtcttacttctttgctactgtccaactataatattctttcaaaggctgaacacctgatgttattaatgcaggttcgatttttttactcattcacctgcagagataatctctacttggtaatggaatatcttaatggtggtgatctatactctctgctccagaaagttggctgtcttgacgaagaaattgctcgtatatacatcgcggaactggtaagttgaaggctttatatccatactgaccaaagttgtttggattcctta

SEQ ID NO: 58784 - DNA, 1134 bp, Arabidopsis thaliana landsberg
tgatttttttcgcaagatcgaatgctatcccaaatttctttactgtttttaaatccaggattcaggaatttgaaactttccccatgtagatatagagacacttttgaggtttggttatgatatagatgatgatgatgaagatgttaggaggaaggcaaacctggccacgtgggtgtcttcccttgtgagcccatgtatgattaggttggtatgcgcccatggcgatttcagtatctttggtgcctgccatagatctttggttgatattagcagatcccatgagtacatactcatcatctactatcatcccttttgcgtgcacgtaaatcatgaaacgctggaaattataagaatctgatacctgaaaaatgcagttaaaatgatcataaagaaattgttccactgattactacaggaaactttatgtatgatttatctatctgtaagctacagtttttgtgaatgaaacattcttagtcttagaagtttgaagattataccacactgccattggtggctggcatatcatctggaagctgctctcgtttaccaaggcagtaaaagttaaggtaatcgagaggatgagcatctgattgcaccgctttcagttcttttgctataacatcatacatcatctgcatagtttggctctacgaaatgaaaagaacagaagatgtttagcagaatgtaagtttctcttttaaagaaatggaacaacctattttggtattggcacttatcttacactcagctaaacaaagttacctgccaatatagaatttcttgcacagggccagactttgggtcgccttcaggccacaatggtatgacaacatatacggcaaatctttccttagctctgattttactaacaatctttagtgccaactccataggaataagattgtcagctcctgctcatacaagacgaacacagaatcagaaaatccgcgggtgaaaaagttactaagctttatttaatacagttcaggtaactgtgaggtgaaaatagagccacaaatacaaaactagtaactgagaacaattctagacttcatgctgtctgcaatgtgagtattttattttctaagctaagaactgtactcaaagatcaaaaggcacctgctgttctat

SEQ ID NO: 58785 - DNA, 367 bp, Arabidopsis thaliana landsberg
ataaatactaaaaatgaattcgttaaaagcggagcctaaaatcttattcactctaatacctaagaaaacatcactacaacattcttacacagaaaagcttctatgttgcgtttgtttacaaatacaacactcttgtgcagataagagctctatgggaagacatctcttctattgctcagaattctccagcaagaatttgataggttgcaaatggccatggcattcatgcgaaagaagaagagatcaaagggaaggagaggtcgcagtgggaaacatgggaagactaaaagtggctaaagtcaaggagaggtcgcagtggggaacatgggaagactaaaagtggctaaagtcaagaaaggttttctat

SEQ ID NO: 58786 - DNA, 983 bp, Arabidopsis thaliana landsberg
caatattattattaacaaaaaaaaaacaataatactatcattcttctttgatatagagtaaaacaatatttttttttcaaaagtgtgtaattaattacttttacgtggtatctaatttgatcagtctttaagcttactcacatatgttaagtttttaatcgattatatatatatttttcttgaaaataaaggatagtccagttggggcagggtacagtttcgtggagggcaatcaaaaggatttgtatgtgaaaagtgatgaagaagcagcacaagatttgaccaaactgttgcaacaactcttcaacaaaaaccagactttaaaccaaagccctctcttcattgttgctgaatcttatggtggcaaaatcgcggttaagctcggtttatcggttattgacgcagttcaatctggctcattgaagcttcatcttggaggtaaagggattacgtgctttctttattttctttttttctctgaataaaatgaaactaataatgtagtagacaaataattctattttataatatgtgtgattaggagtgattttgggagatagttggatatcccctgaagattttgtggtgagtttcatcatttttttaaaacatgttactcttatttatttgtgattaaattatattcatatgatttttattgattaattgttacagttttcatggggacctcttctcaagcatgtctctaggcttgatgacaatggcttggatagctctaataggtctttatcttaatacaaaatcaatttttctaatacgtaattaatttacctctctaatctatatagtttacttttttttggagcagcttagcagagaagattaaaacacaaattaaaaatggtgaatacgttggagcgacgcaaacatggatggacctcgaaaacttgattagttccaaatccaatttcgtcgtaaattatttctcctcttatttttaaatccattagtatgtacaataa

SEQ ID NO: 58787 - DNA, 821 bp, Arabidopsis thaliana landsberg
atcttctttgcttctccattcttgtttagacttaaatggttttaacatgctgcagatactatcattcgtagcaggagttccatacattgtcgttggatttaggtatgaatttgccaaccattctaaggataaactcaaaaagtctaaacctttcgccatttaagcaaatcagttcaagataacattaccatatcccttttcatcttgatgtagagatgatggaggaagactagtacgcacagagagactaacaacgagagatattgcgcatagagccagattgaaaaactattggcaggtaagtgttatcagttctcattacagacatgaatgataagaaacactaatgaatttgggaactagggaggagtgtgcttggcatttgccgatgaagttctttgctggctatacggcactgttaaagaaagtaagttcattttttgttacgtctacatagaacaatggaagaagatcttttaaatttacatttcccaacaatgtgttttgcagacgaagattacatacttcagttcgtgcaccctttcatgagactagagcttcttcaagctcaatcttgtcctgatgccatcactaatcatgttcaccttctacaaaatcctgcatcaccaccaccaccacctcagtaactttatgcttctttagtggagtcataaactgtaatacttagggttcaaaatcaaatttgaaatgaaggtttagattttggatttcttttgtaacattttattaaccaaaaacccaaacattgaaaaaggaaaaaaaattgtgattcaaagattttaaactgggtccaagcagaa

SEQ ID NO: 58788 - DNA, 756 bp, Arabidopsis thaliana landsberg
aactacattgtttagctctgttataggcaaaatgaatactcagcatccaaaactagactgcgtctaagatcaagcttttagcttttgttaacaacaaaatgaataacattttttcaagaacaataggtcaaattaagaaatttctaatcaattttaagaaagttgaatcccaaatcaggagaccaacacaggacaagaactcgaaataaacaatctgcgaatacgataaacatagagaaatagcgatagaggggaaaatcgaatctaaccgtcggaaatgttagtcttagagatagaaccagaacgtgaagattccttatcatgcaattgctgcttccccatcaaaacggaggtcgatgttaccttgccttttccattgacaggctgagacatcgaatgcgaaggcctgttatcgtgaatctcgtttattcgtttccgatcgaccacctccgacttcgatccaaccatacctctctccctatacatgatctaaaatctctccgaaattccgaatctccccgtcaccggagatccacgccggtgaaagccaaaaacgaaaaggccgtacctggagagagagatgagctctagggtttttaattggagcttctcgtctcgcgaatatctatctgacaactaatctcatggtgtggtacatggacagttttttttttttgttcttgctcgaagttttttttgtagataagaaaagaataaaagaacagggaagggcaaaacgggaaaggaatgaaacaa

SEQ ID NO: 58789 - DNA, 1190 bp, Arabidopsis thaliana landsberg
ccatgatttttatatagctgtgcctagcatctctcttcaccttatttaggttccccttctcatgttcatttgatagttggcccatttcggcccaatattttacatgctgttcgtgagatgggtttatgcatgacttgtgtttcctaatttcagatcgttctagatgaccttctgggtatataaagtgtatgcgattttttgtttcttttcgaagaaaaaaacgagttaggcccgtagcaaaacaataagagaaatcgggcttaagataaaagacttcgaaaagatgggtttaaattcagttgggccttaaagcctgtcttcttatcaggcgggaacaatcagaatcgcataattgtgttacaattttccacaagtccacaaccattagccaaagacgctgtcctctggctcttttgatgtagttggacgtaagggcacgtgccaagttggagagcgtgagagtaacaggtaagtggaattgaggtgggacattacacgattcacgaacttagcgtagcaaccaaaaggtgtcccaataaataaataaatgatggttgtattaggtcatacaccgacagcttcaattcaagccacgtgttctcccttcttcttcggctgcttctctttgcttcacatgatgtctttcttttttatgtttggttacatatttcttcttaatttcactttcaatttaagtatcattaactatagaaaactgactaattaactactatcccatttttatcatctagtactcgccgattgccttagtccttcttatgttaagaattaaaagacttaaggaaaagttcaattaccatcactttcactactctaccgtattacaggcaaatatttaattatctagttacgaatattttcttttaactatgattcttatttatgattaattatgtccaaaatgtattcaagattcttttctgattatactatagtattcggaaattgatgtaacagttttgtatttgagtatcaaagaatattatgaccattggaattgttgcgcatgactatttaatatattacctaaatcacggatcaaaaatcaatagttattcactttgcataagtagaattccatctgaagagtttaatataagagcagagcttgtttgttctgaaatagtaatactttcatttattaaaaaaatagtttatcaataaaagac

SEQ ID NO: 58790 - DNA, 522 bp, Arabidopsis thaliana landsberg
taccatattagattcgatatgtatatgctatatactaattttagtatactaattatacatctacgaaataggccaaggggggcattaagtataatatttattttcatgtatgttgagcaaatgaggtaataaaactatttcgaaaagaaaaaaatatgaacagtattactatttcgaaatgattaatttaccttgagattgattgatggttaatggaacagtcaaaggaggaaaacaatttccaccgccatttccatctccgccgtataaattgatcgccggaattttatcaaaattttcgttagtctccaaattaacgccgttattaacggtagagaatgccatcccttcttccgttaccaccggtacaacaaaatcgccaaaaccaaacgctgattgagcagcgctcggatcattatgaaccggaaatagaaaaccggccggttcggttaccaccaacttattgttttgaaccggatataattcggttttttggtaacaaaaccaaaacaatgatcagcg

SEQ ID NO: 58791 - DNA, 449 bp, Arabidopsis thaliana landsberg
aaaaaacatatagtacaaactattatatacgttagtgtgtattataaatccaaatatcaaattcaaattagagctaatgttatagtaagaaaaatgtctatacgtagataaattagttttttttcaaatataatctagggagaaccacacaagatggagtagtttgacagtataaatactattactcacaagataggccttcatcagctaataaaccctcacaaccttaacagccttatcaaccataccattgggccttaagtgggtatttgaaatagaaaatgtttgatcccaagaacttttactactactttgtccttgcaaagacactaaattttaaacaattagtgcacgtttttgcaactagtaagcaattatttctccacgtaatggatataattagtcgatctcaataaactgcaatattttagagaaaagagaaaataaca

SEQ ID NO: 58792 - DNA, 451 bp, Arabidopsis thaliana landsberg
acagctcgctctacgatccggggttggtatgccggagcagatccattgggctgccaccagtatggttaacacgatctgtgttatgtgggtcgctggagatggtgaagaacgttgtgttagatccggagccttgaacgattggttacgtaatgccgcggcggcgcgtgggatgaggtactagagacagcacatgtgtgattcgccggcgaattccactattgggtggagagatcctggttggattatttgataccgccatgaggaatttgaatgatggctttagatactgttatcaggtaatctagcctctctacttggaaccttatgcgtgatagattggggagaactatgtaaagactgatcaaaaatctgatgctatgaattaggatgggaatgattctcagggaaggacagagatccatagtctcatcgctcgagatgtgactgcaga

SEQ ID NO: 58793 - DNA, 517 bp, Arabidopsis thaliana landsberg
tgtctcttccttcccctccctccaaactctatccccaataccccgcaatttaacaccaaggaaatatatacagacgtaatgaagtcatgtatcatttaaattaagaaaacatcgcatagaaacaaaatcaaaccaagaaatgcgattataagctctaaacaaatataaacacaaactacaccttcatctccgccccagcagccttccttaaccgattcatcaccgcagccgccaaatccccatctcgatccgaaatcccctccacataaataacatccacatccaattcatccaacgcccgcagcgcagcaaacaatccatgcgcaatagcacctgtctcagaccctaaatgataatcataagcggtcttggtccgactactcggactccccgtttcctgcacgggaacggggaaactatgtagaccctcgatcgcggatgaaacaggccgcagcgaggagattagtgtatcggtggttgcgagtccaagaccctggggccaattgcgcgtgcggat

SEQ ID NO: 58794 - DNA, 424 bp, Arabidopsis thaliana landsberg
ctggacgagaaacgtccccagaatccagctgtagatcacgagtttttagacgatcatggccttcttccgcttgcggtcctgatcggatgtcgagttgttgctcatgactgcactcctcccgcgacgacgcgcatgttcgaagccgcggcgctgctgtccagcagacttgccgcggcgagttcccgcaaaccttcggtgatcgcgccgtcattgctgagcggcgcgagaatgcagacttcggcggcttcgagctcggatgcgccggcggcgaccagcttggcggcggtgaccagaacgcgggtcgacggcggctcgaaatgaaacacgtcgtcggcattgcggatgctggtcgcacacttgaccagacgctttgcggtcgccgtcttgatgccggcctccgacatcagcaccagaacctcgcgct

SEQ ID NO: 58795 - DNA, 351 bp, Arabidopsis thaliana landsberg
  unsure (1)..(351): unsure at all n locations
gggggggacacttgtggtgtagagctaacctaggctcgttaagctcttcgacgaacacagatagctgcattgggggggtgtacattttaacgaacnnnnnnnnnnnnnnnnnnnnnnnnnnnnnnnnnnnnnnnnnnnnnnnnnnnnnnnnnnnnnnnnnnnnnnnnnnnnnnnnnnnnnnnnnnnnnnnnnnnnnnnnnnnnnnnnnnnnnnnnnnnnnnnnnnnnnnnnnnnnnnnnnnnnnnnnnnnnnnnnnnnnnnnnnnnnnnnnnnnnnnnnnnnnnnnnnnnnnnnnnnnnnnnnnnnnnnnnnnnnnnnnnnnnnnnnnnnnnnnnnnnnnnnnnnnnnnnn

SEQ ID NO: 58796 - DNA, 296 bp, Arabidopsis thaliana landsberg
agatgtcttttttggagctgctaaagtctccatgggagggccgggttgtacactattgaccatccggccccagcagggcgccttcggttttgtgcataggctcaatgcgttgctaactggcagtccttcccgagtataagatccttcatatttttattcatttagactaaaagattgtggcgtgccacagtgcccttcattgcaaccaagaagctgcagtatctgctgaagcgattctggtctgctgctcaaatataatgctgagagtgcgtctgcgtgctattgcttcaagcaca

SEQ ID NO: 58797 - DNA, 1166 bp, Arabidopsis thaliana landsberg
aacgaatgattaggaaaactccaaatcaaaacagcgactttatattgccaacaaagattcttcatgattcccccgatcacaaaacacgcagaaaaggatcgacacaattatatacttacgtttcacttatatactaaatgtaaggacacacaaattaagcttctctaatatggacaccaattaaaccaagctaaagtcaacgatatgagaaaatgagtgaatatggagttaataattgcttcaagaaaaccaaatgaaggagtgagcaatgatgtcttctagtgaaacatccacgtcacaagattaatatattttaaaagtacgcgaaaagtcttcatgcatgccgtacatgcgtatacgaccaggtcttatcacaaccttgagtagagattttgattggcacaatcaaatggatttcctaattccttaatttacaaaacacaacttgcttaactagactcttttccattgaacttgtcaatctgcaaaatattttgaggtttaatattcataaccatgacgcattaagaaacgttaagagggagttgactttcgggtggtcatagacttgaatatatactattttcaaacatgtaaaagttttttttttttgtgatttatatgcaaaggtgtgcgtcaaattgttatcctaaatggatcaaatactctacacattcaattagaaaacagttttgaatgggattcccatcctagatcccataatcattctcttttgattcgatcatcctcccaggatttggttaccctttctaagctctttgatatggcgagaggagtctttttagagaagcgttacctggcctaggttgatgccattacatcttgtcgacttgtcgtaggacctaggtcaacgattacaaagtgcttttagttagcagtatagtgaagtgatctgactgtattggggcctgggcaatatgtttggtctctgactggatatcaccttggtcgagagggcatgctccgcatgtttatgatgcggacatccccctgttactccgtacaagtagattaaatactctgcctggttgattgacaagaatattcgaaaccggttgagtacaattagcgggaagcactcagttttggttagcctcaaggcaagattaagatagtctgcttagtagaataaatgttttggagag

SEQ ID NO: 58798 - DNA, 380 bp, Arabidopsis thaliana landsberg
ccaacccagatttcgaccatattatcaacaaaaacaaacatacgggcccacttggcaaattttagaagattaccccacacacctcctaaaatacgtcatattatcgtcataattagccgtaagtattcatattcatatgtctactgattagtgtttctgacgacttattgacttattgttattaatgtacactaatgagtacatgaagcatgccagtatgcaattgtatagtacaaaacccttataaccatataatataaataatgttagttacaaagacaattaccttgagaccggtcattgtcttaataagatacacatgagctaacatcctccattaaaaaaaaccttattcgctgtgaacctactatttacagaaa

SEQ ID NO: 58799 - DNA, 1144 bp, Arabidopsis thaliana landsberg
cggaatgtcaggttgggttccattagatttgaaagggtttatgttcttgcagacattggtaattgcgggaaggggcgtttcaggatccctacctcctgatctgtttagtttgctgagtaaacttcagatcattgacttcagaggcagtggtttcataggcgctttaccgtccaggttatggtcgttaccggagctcaagtttctagatatttctggaaatcacttctctgacatgctgcctaataccactgtcagttttgattctactgtctccatgcttaacatatccgggaacatgttttacggcaatctcacacttttactgacaaggttccaagttgttgacctgtcagaaaactattttgaaggtaaagttcctgactttgtgccaaccagagcttcattgagcaacaattgtcttcagggcccatagaagcagcggaagttgtcggattgcactttgttttattcaaaaaagggcttaactttcaacaatttcggacaacatgaagagaagaagagttttaaaacttcctggttaagccacacgaaaatagttatacttgctgcagttggagggtctatattgcttatgctcattctcatagtgttaccaataacagtgagtttctgtgtccgtcgaagaaacagatcatcaacaagtaatcatcctagaggaagacacaacggtgttggcccattacctcctgatgaaacacttccctcaagaggaggagtctctataaactttgggagtcttggatcatcatttacctatcagcagttgctcaatgccaccaaggagttcagtgattcaaacctgatcaagaaaggacaatctggggatcttttcaagggagttctagaaaacggagttcagatcgttgtgaaaagaatcagcttggaatctacaaagaacaacgaagcttatctaaccgagttggatttcttcagccggtttgcgcatccgagaataatcccattcgtagggaagagcttagagagcgcaactcataagttcttggtatacaagtacatgctgaatagggatttaccaagctcattgttctataaatccaattccctagttgacaaaagattgagatctctcgattggatcaccaggctgggaatagcattggag

SEQ ID NO: 58800 - DNA, 965 bp, Arabidopsis thaliana landsberg
gatatagtctgagccattgaaacataataagctctatacttaggagaatcacctgcaatagaatggggagggtttccaaaggtgcaacagcagtcttagcaattgccccagcagctcctccagcgataagggtttttgcaagcacaggcaatgtatccacaaggctcatcacatcagccgagagtgtggagccttgtgacgaacccatctcagttcaactaagttaaattcggaaagttctcaccttttatctgaaagaacaccttatcccatctaaatctagggtttacggtggacgcagatttcttattgaaatccaaacttgagaacctgagaaatcccagaaacgagtacgacgagaagcttaaaagcagattctcctcctcctctcttacagcaatattcattaacagtctcaatgaaacactcttcgatgatcaaccacacatgaagatcaaatcatttccgatagctcaatcgtaaaaactagcctattaatctgacagatccagatactattccacagcagaaaacaataacaatctcgttcgattgagcaaacgaacaactacccttttgagatcgatcgaaatcaatacctctcagatccaaacgaaccaatcaataggaaaattcgttgcggagatacaaatgaaaccctaccgctaattcacgaacaggaaccgaaatttctgtggcgatgtatataagacgaagttatcggagaagattcaggaaatttatggggctgacgatgagcgactagaggctcgccgtaaaatacgtagaaataaggaagacgatggttttctcgattcgaaaattcggtcacatgctctgtttactcattggtcgcgcattttcacaggcttgaagaaacagagatacctttttaggtaagaattccatgtggcatggtgcacccaatatatggtggaactctaaaaataaaaccatacagattc

SEQ ID NO: 58801 - DNA, 593 bp, Arabidopsis thaliana landsberg
aggctgccaaaaattcatttatttcattcacgacattaagtggtccaatgtctgtctctatcaacattactgattctagctttcatgcgataagaaaattttgaaccatataatattcgctttaattcaaaagcattctaaaaatgtagagacagatggaattctacaattctatttaatacaaaagcttacacttttcatttttagcttattctaagctgtcaagtgcttagcattaattatattgttattatgaatacgtgttttgagtgcattattgaaaagaaggtggagatctcaaccgtctccaatgagtgatttaggagtatatcttaaataatttgcatttttttggtttttgaaattttaacataaagaatcctataattaggttttaaaatcaaaagcaagaacatttctaatattaatgcctattaaaaggggcacatttcaactgttctgacctctaattcttggttatgccgacatgatgtttgcagtagacagtaatatcagtatttttcataaactctagcttttaatacatgatcggtaatctaggaaagccccaattcttacatgatatttttttt

SEQ ID NO: 58802 - DNA, 1134 bp, Arabidopsis thaliana landsberg
ttgtgggctagaaaagagttgacatataggattcaatccaaccgtttttacaaagtgttcttagtctactcaaatgcttttcatggatttggaacggcgccatatttaggtctagtaatgtccgcttttcaccaatgtgatgatcaggctcgagactagaagctgtaaactcgcatgtttcctccaatttggcaatcccctgtacagtttcagtttccactggaaagagaagtcgagcaagtgcaactgaaaagtatagaccatcgttatcattagttccactcattttcctacccgaaattcgatattcaagtgaaggaagaaagcatacctcggttttcataatagagcaacctcatcctcaactcctctggagttactggaagagaaagtgaagcctctataggcgacaaatattctagtttttgttcatgctcaagtacctctatgcataatccgcctttcagagaaggcgtaccgtcctccgtactagttttgtagtcatccgctttagtgagtcgttttacaatcactaaagcggttctaccatccaatgttgtgtctaaaatatttgcccctttcattaacaaagatattatcaacttcggctccttccgcatcgcagcaacatgaagcacagtgtatcccctcggatttctaaggttaacatccgcaagctcaagctcgaggagatcatacgcggtcttcacagcgcagtgagcgatagcaaaatgaagagcatacgcctcatcgagattggtgtgtccttctagcaaaagcatcttgacaagctcaacatcatctgagtctagcgccttgtatatgttcttgacatgcctttctagtttaggtggctctagacagagcgcttcgcggatgtctatgatttgcttgaaaatgtgttgaggtaaagacttctcaagactaactagttctatatcagacttcacgataatttctatgcatctatccaaaagcttcttgtatgttgtaccacatagagtacaagcttgaatataaccaagatgtctcgactaaactttgtctcaattccaagaactgctctgaaatgaaacagaggagcttaagatgatgttatgagcaatgagaattagtggatgtgtttactcatca

SEQ ID NO: 58803 - DNA, 719 bp, Arabidopsis thaliana landsberg
ggaaaataggtgtatatgattaaaaaacaaagctggctctcattgcaaatgatcacctgcattccccccttaaaagagaatgacccacgcgaacccttttttgtgccaggagaactctttgagtctctacttttaccacctttagcagcaaactttgttctgattgcaccgactataatagagccaaaactgaaaaaggaaataatttctttaacatctaaccggagaacagttaaacagctcatcgccataaaattagcatagggaagtactgaactacgtaaaactcaggccaaccccaaaataaggaagctaacgttatttgcaatgctgtctttggcagtaaaacttttctgtctatcatattacacatcaagggaccaaaacattatttgatattaccaagcatacaacgacacgagtaaaggaatgaccaatttaaaacatgactgcataaccgtatcaacacagaaaagaatcttggaagtattcttcgagcggaactcattgaatatagtgtagttacatgagaaagtaccttttctctacattccagagatctgggaaagaatgcttcatctggtcataaaacgtagggaaggatataaaattgaagaatatagaacgattaattttaaaaacaaattccatatgttaagtgcaaagttgctcactgaaagggaataagggtccgcaacacttgtttcacccaacaaaaa

SEQ ID NO: 58804 - DNA, 1251 bp, Arabidopsis thaliana landsberg
cccaataagttctccttgcgcaagactttcccaaatgatcttcaaacacatcggcccaaataggctggaccatatgcacataagagtctatataaggcccaaataagatttgcaattagagcatttgacccaactgaataacaacattaccgctagcagaacactcatcttttgagcttcgctatgtgcatttcttgttttctttctttttttaggttcttctatctattacatagtttcagcgatacaagagttacatgagccgaagaaatgcctaataaagtaacctgttagaataataaaactttatccatccctatattattcaatacaaaacaaattcataaaacccttaattcatcgagaaggtttttttcattatttagtattctacgtcccgtaaacaaagatccaactcaatattactataacaaaaacaaacgcattacaaacttataaaaactccattgatttaaattatttcgtttaacaaccatcgtcatataaaggttcaaggacatttggattttccaccacgtgtcttcatgttggcgtaacaagatccacacttctccttattaccgtaggtgcctgggggaacacacttgcagcggtagcagcacgtgacgcacgctctcatacatacgttcttcctcgagtgttgcccacacctcgtcccacataaaggcacgcaatctaaaccgtccaaaatttagtccaattatacatccgatctaatcaacgaccgataatcatcacacttttgaaagaaaattattattacctatccgagttcttacgggaggtggtgttggaggtttgacaggcggcgctgtaggtggtttaaccggtgtagttgggggattgtacgtaggtggttggaccggtggcgtcgtggtggggggtttaaccggtggagttgtggtgggtggtttaaccggtgacgttgggggtttgtacgtaggtggttggaccggcggtgattgaactggtggcgtagtgggtggtttaaccggtgatgtagtgggtggtttaaccgttggagttgggggtttgtacgtaggtggttggacggacggtggtttaactgttggcgttgggggtttgtacgtaggtggttgtaccggcggtagtttgatcggaggagttgaaaccggaggttttactggtgtaaccgaagtagttggaggtttgaccggaggttttgtggtgggtggtttaataggagtagttggcagcgtgggtggcttc

SEQ ID NO: 58805 - DNA, 714 bp, Arabidopsis thaliana landsberg
tatgactatcatttatcataacccaaacttcctaaattacccctgtacacttcccccttttgataattcacaaccaaatggaactttcataatttcaaactcactgcgaaattccaaaacaacataattgtcaaacttcctgaaaaatctgtgtaaaatgaagtatagtaattgctagagcagtgaatataaaatccaaggacaaagggacgaatatgacatttttgggtggaatttttaattaataaacgtcgtagtgaaggatgataaagacaagatcttttttatataaagaaaatacaggatattttgtacgaatgataaatgataaactatatttgtaaagctaaaagatggtccctgggttttctcaaagaaaaaaaaaagatgaagataaatttcaacaaaaatctatgcaaaatgatagttatgtttttcaaactctcctcggctaacgtgaagacaaatttaatggaatattcgaatttttggcgtttttgacgaaattttaaaatcaaaatcagcaaacatacaagtatctcatgaactgtttctataattacagatatgttacttaccaaaaaagaaaaagtataattatgttgaaaatacattagcgtttagtaatggccaattgaaaaaaagattagcatcttcattgccaccaaaataaataattactctttttggtaagaaataaacattaataatttg

SEQ ID NO: 58806 - DNA, 566 bp, Arabidopsis thaliana landsberg
tccttctccttagggttttgaccgcggctttcctccacataactgtggtcctcatcagcaccaacaccgtggctctcgaaatttcaagcacgtctatcaaattgcgtttcaacgatgtctatgcttataggtaaataaattatttaccttctctgtgaaaattttgtatccaatatttgactaactatttttacctattttttgcatatatgtttggattcatcattcatgaagatacatgctgtccgctgccgtcatcggactagtttacgccgttgtacaactgttcttaacaatctcccaatttgccaccggaaaaacacatcctcttacttatcagttcgatttctacggtgataaggtatttatatcatttttgaggaaatactatctttaaatacattaaaattataagtcatactgtatattgatatataacaaaatctggttcaaatttggacaggtaatatcatatttacttgcaacgggttcggcggcaggatttggagtgagcaaagatttgaaggacacatacttagcattaatagaattggattcgactgatc

SEQ ID NO: 58807 - DNA, 1154 bp, Arabidopsis thaliana landsberg
tgcaagaaactattgaaaaatgacggaattaccccttacgcttgtgaaaatgaacattttacttgaggcaagttggttggtttctagtgaggcttgataagaatgatgacgcggttttgtccaatgcgagtctcactaatacgaccaaggtggcgaagaacctgttaatagacacatcaaaatttgacaataagcatgtgttatcgatgttagtctaactctggtgaagagtttaaggaagcatgaaaatgttgtttcttttttgttgaaattttgaaatgaagggaagatatattagttacttacagtaagtattgcttttcctgtgttgtctagtttcaaacttggtcccttcatgtcagtttcaagaaagaaatgtttgcccttcactgcttgctctgttacgatatctcgtagtttctgcatataagagtttcaagacaatcaaagattataacaatgttttcactagtgaacggatactatcatctagacagtgtggttgatgagttatattagcttacaagtgctttctcccagagattttccgctagctttggcaatataagacaaaagcgtcagtacaattgtagcctatataactcaattccttcagctggtaaatataccttctgttttgaggctgcaataagatgagcatttgcttcagcatatgaggccatgtcattgatagcagcattcactttctcaagggtgagccttcctctcatgtatcttgttttttggaaaaatgtcagaaaagcggtatgcatttcacataaacaaggagaagagaaagtaaaatgtacttacgatgagagtgaattgagttcctcaacagttatgtaccaaaggggaggagacccgcgacccttcttctcctggaaacaaaaccaaagatcaaccatagacagagataacagaaatacacaatagcaacagtttatcattcatcgccattgagtcttagaggccataaagtctctttgaagaaaacaaagtatatgcaagttctaccttgggtaaaacagctgcttcctcatcaaatttcaaagagctgaaagtagaatgttgctcgtactgcttggcattctcttggagcagactggaatgagaaaccactaatcttaatcaaacttctggagtagtaatat

SEQ ID NO: 58808 - DNA, 1681 bp, Arabidopsis thaliana landsberg
tcgaagttaggttggatcttccatgcactaaggtctctttccataaataacgagaatagtagacattggatcgtcccgactatgctgtaaaacgaagccactttcatcacatgtggatacttttttaccgtccctgtctgccaaagacatgcaaaaacaagaaatatatttaacctcaaaggtaactaacatgcataaggataacgatggtttccataatggatgattgagtacctgaacaacattgaatagagagacagaaaaaacagcgacggccaaaaagatacagccgagaaaccaattgtcggggaggttgtagtagaccaaaagtttagggactgatttaagaaaacgatttggggaagcagacgaagctggtcttatgaatggacctttgtacaactcttcaacaaaagctccgcttaatgagactattgttcccatcagtttagccctcgtactcgtgtttctccaatccaacttgctccttctacacatgcttagatatttattatatacttgaaaacattcatataatttatgtggagagtttgccatggtgatgagagatgtcttacccgagaagaatagagagcaggaaggagaaggacgggatttgcaatcccattgcacatacgactattggtgagctgaagcgtagtcccacaaatgccaagttttggaacataaatatccttcacatatttaaaatgttacaatataatcagtgcatgtgcatatgcatgaataacattttatgtacgttcaatgcatgcaaatgcgtgtgttctcacaagtgagtatattattatatgagccaacatatacgtcacacaagtttgtatttctattttaacacaaataacacatggtgtgtggtatacgccgctcccaaagaaacgtcaggatgtggaaaataatagaacatattaggcctagttgtttattttataaccgagtaaacggcacgcggttttgtatctttttgaatatgcatgacgtcgcaaatccatgtcatagaatattcatccaaccaattagtggttgatacatgtacgtatagattttcgaaacatggacctcatcttttgatttggttttaggaccacgtagttactgttattgcaaaataatattagtacgtaagaatctggtctgcgactcataatcaatatgataacttcctaagaaaacattaattaataaagatagattatgtacccacccggtgaaacctagaaagaaaacacgaacgaggagtggccaagagaagatagattgttcggttctgcaagtataaaatatcatcatacaaaccaaagatcagaaaagaaccaagattgattagtaataacatgtatatactatgatataaaatactgaacgtggaccgacctctcattcctgtgaaagaagaaagaaaatggaagaagaagaatagatccaaaagcgtttgtgtaaacaacgaacacaaaaggactcatccctcccgtcaacgccgttttcgccattatcgttagagcaatcgtgcatgcttccattatagccattgctacaaagggtaccaactcatctcttctaaccttcacctccatctctctccctttttctttcaaataagaaaaacgcacgatgtctcctaactccaaggatttagggaaaaataaatataagtagcgag

SEQ ID NO: 58809 - DNA, 663 bp, Arabidopsis thaliana landsberg
  unsure (1)..(663): unsure at all n locations
aaaaaaaaanaaaaaagggaaaaggaaaaaaaaaaaaaganaaaaaaaaaaaangaaaaaataagaaagaaaaaaaaaaaagaaaaagaaaagaggggaagggggaaaaaaaaagaaaaaaaagaaaaaaaaaaaaaaaaaaaaaaaaaaaaaaaaaaaaaaaaaaaaaaaaaagaaaaaaaaaaaaaaaaaaaaaaaaggaaaaaaaaaaaaagaaaaaaaaaaaagaaaaaaaaaaaaaaaaaaaaaaaaaaaaaaaaagaaaaaaaaaaaaaaaaaagaagaaagaaagaaaaaaagaaaanaaaaaagaagaaaaaaaaaaaaaaaaaaaggaaaaaaaagaaaaaaagagaaaaaagaagaaaaaaaaaaggaagaaagaaaaaaaaaaaaggaaaaaaagaaaaagaggaaaaaagaaaaaaaaaaaaaaaaaaaagaaaagaaaagaaaaaaagaaaaaaaaaagaaaaaaaaagagaaagaaaaaaaaaaagaaaaaaaaaaaaaagaaagaaaaagagaaaaaaaaagaaaaaaaaaaaaaaaagaaaaaaaaaagaaaaaaggaaaaaaagaaaaaaaaaaaaaaaagagagaaaagaaaaaaagaaggaggaaaagaagaagaaaggagaaataaaaaaaaaaaaagaaaaa

SEQ ID NO: 58810 - DNA, 512 bp, Arabidopsis thaliana landsberg
cataagactataagcctaggactacttcccaaccgggagtgggccatatttaaagttgtctacaacaatcctcgaaatgcttttggtaagttggataaccctagatgaaatcaaaattgattaaagacggatattactaaaaatggatacaactactcaggctaatagtaactataattcaacattacacgacaatggacaataattgcgtttgcaaattcaatgcaatgtcataaaatacaacaacttttatacaaaaaatggttgaaaaatgcatgtgaaagacaccagaaatggagggtgaagaggagctttactgggctcctttggcgttgtgtgcctttcaaactttccatctttatgcttcctttgcgttattcggaatctttctctatgtgctacttttaataaacataaaaatattggaatttgtggattactttaaaactttataggagaatgaaatattttctttgggaaatttcatgaacccaacaataaagatttaattt

SEQ ID NO: 58811 - DNA, 606 bp, Arabidopsis thaliana landsberg
tatttgtgtcaacttcttcggcctatattttaggggagctgggtagttgaatttcactaatcactacgcgttggaaaatatgtgattgcaaatgcttagattaaatctaaattctaataagatggccaatggatgtggagattgtaccccacgcgtcaaaaaagataaagattagagaatggtcactatttgtagtttgatctttccatgcacgtagtgttagctttaaattattactctagttcttgcaacttttttgcctccttttctttcggttgataaaaacgaaaagatcatattgcttgccagcttctagagatttttattggatgagattcgtttatagggtaacctaattagtaaaaagatacgaaattaataatcgtaatttatttaatgttaagtaggattcatgaaatcaaaatttatttgattcaagggattcacattgtagaaatttgtttactctagtttaagaatctgataattaaccattcgatacagtccatggataacacaagaacaaagatagtttcgtcacttcttaggttaagaactaaatacataatatatgtgaagcatactaattacccttttcttaggaaa

SEQ ID NO: 58812 - DNA, 767 bp, Arabidopsis thaliana landsberg
atgttgcacttgcaatgtctaatatgttttccaagtggtttgtttcgatctgtaacttggtaatatggtatgggtcctttaaaatctttaaaataatatcttattttttggattctaatctaaaggatatccatacaagtggtggaccgttaatatagtacttcacgttcacggaagggcagagatcttcccagaagcaaacaaataaaataatttttcgtaacataaatatatatctatctttatatgcgataagctgcggcggatttttttcataaagcgacgtattttttattaagtaaataccataggtaattagatggcaagtgtatcgaagcaggaaaaagtatttaataattttaataaattaattaattactaactagtgttttgtcaactcatgaatttagtatttgaaaatgattattcatgaacttttttgttggtcaacattattgtggaattataagcatttcaaatgaaaactacatttctttttcatatcctcaaggatcacgttgagtaaattatctgttttattacccaacaaaagacaagaaaaacaataatatttaaaagtagaggtggaggtggtgagtgcacgtcaatagtgcgatcttctagcaaaacattagtgagttcggacaactggagtctttggttctctgttggagaacgtggaccaacaagctagtgacacataagcttccaaagtagacccctccaaagatctctagttctttaggtgcccaagtgataaacctctc

SEQ ID NO: 58813 - DNA, 493 bp, Arabidopsis thaliana landsberg
  unsure (1)..(493): unsure at all n locations
cttttatcaaaatagaaaatactattgggcttattggtgcatatgagtctatgaagaaagataaaataactacaaacaaaatagaataaaaacaaattataagaagtgggagaagatatatcatgggtaatgggttcatgctattgctgaggctagctcacggataatgggcagagtaatcgtggcgtgcaagccgacataaaaaagcacacatcattagcttgtatcacatacggtcccttttcagccaatacttaaatcccacttcgaaaattgtagtttctcatttatcagcttaatccatctcaattctctttgattaaatgttttattaggtataaggcatgaagtgtatttttttttttttttagcaacaaggcatgaagtgtatatgaactcgaatttagtgagctggcataattaaatgagcacactntactgattctgtattattgtcaattggtggggagatatacgctggtgacattttttt

SEQ ID NO: 58814 - DNA, 528 bp, Arabidopsis thaliana landsberg
  unsure (1)..(528): unsure at all n locations
tggccgccaacttagatccgacaagctccatatatcttcggaactacaagaagcactagatctattgctaagagattgatcgtgctcaggagctccattcgaataacaaacaatttttttttgctttgtggtggattcgcagtggggctttcaattttatgtgtcgtgtgtagtgtgagggtcgtcgtgacttctgtttttgatataagcacaagctgttttgaagatataatgaataaaattctaaccgaacaaaataacataggagtaatgggaatttattttacatgggaaagaaagtaagacaacgtaacggacaataaaggaaacttcggattctaaaatcgcctatcgctaatggaggtgtggggacagtcttttaacagcatcgattataacagatgacgtcattgcttatggaagtaatctttatcttcttgaagcttgcttacacgttacaagttagaaacagaagttgtagatgttgtttcttgggatatatgacacacgtagaanatcgtgtaaaag

SEQ ID NO: 58815 - DNA, 472 bp, Arabidopsis thaliana landsberg
gtatccagaatccccgatcaatataatatatcaaataaacaaacgcatggcgcgggggtctttgggcgactatgcgagaaagaacttacaactaccgaggctactgtcgaaaggtaattacgtttagcagctacagatgaaaatacttgactagacataaccatattaatttaacaatcgcgctatgcataaaataaagttactatatgcacttaactattataaaccactatgtaaatttaaatggttgtcgcgcgacgaagcacgcaacacaatgcataatttaagcggaattaaaacgaatcgttccgtaacaaagcgcgcgacgcaatacttaaactaaactaaaatttaaacgaatcgtcgcgcgacgatacgcgcgacgacctatgcttattaaaccgaatttaaaataaaaccatcgcgcgacgaatagcgcgacactacacatttacctaactgaaattaaatg

SEQ ID NO: 58816 - DNA, 1482 bp, Arabidopsis thaliana landsberg
gaaagagaactaagcgtttttcctttgtcttaccaggacctaataagtaacgattgttgaaatcatgattatctttttcgacggccacattatctatatttaaaatcattttcttgcgatataacaattcatatattttttgttcgtgggtcaacaccttgatcttatcttattctaaagaaattacgaaaagaatctagagatgttcattggcaagaatcattctttagaaaaagtaccaaaaagacttaacttaaggtatcggatcccttaaatgtcatacatatgaatatgatctcacaaagtaaagtcagtttatgtaaaaaacgaaaatagttacaaaactaataactctttgtttttatgttaaagaaaaattatggattttgtgctttagccaaaatatcctccgagcgattggaattccttgtatgataatatacttttgagatttaatatagtgatctaaggagattatagattgaatttgtcaaattcatttttcgtgaccgattattcatgcatttttcatgattttgatatataagagagattaatgagatttttaaacaacaccgattttttattaaatgcatccaagtgtatcagttttatataaatgaaaaaatagattataaaattaggtaaaacattaaataacaaatcgagccaaagtaaattaaataacaaaattctttaatataaaaatcagaatctccctctctcacaagacttctgcacaagaagatttcttccctcctctgtgtatttttgcgtgttcttttcctaactaatcaaatctacctttcttctttcttcatatttgtttccaaactaaagataatttgggaaagcaattttctggtacacatatatacatttttctcatattttactgttttctttgttttttctctcttcttattctgtggaaattctctgagagttagattaggcagcaatctaaaggtatcttttttcttaattcttgatttcttttttgatatacgtttttggttatttttgtgtttgtttgaattgtgaaactgttggtagggttttaagcgtgtggagtatttattgcgttactgtgtagaaattaggtcattgtccttcaatctcgatcagaagtcaaattttttatctaaaaaaagatcggagtttttttcattgttttgtaatacaagtgattaattttcgtaacggatcatgatcaaaattcaattttgtcgtttaggtattaatgtcattgatgatcaacgaggaaatatacacatatttgatcatgactcttaaagtcaacatttgtccttctttgaatgtattgagtcatctttggtagatttttgtctaaagatttgttctttatgatgtcaaattctagaatctgattagtgaataggtaataaaagacaaagaatcagtttagaatccattaaattgttctaatatgctctgttcataaacgtcgagatctttttg

SEQ ID NO: 58817 - DNA, 493 bp, Arabidopsis thaliana landsberg
  unsure (1)..(493): unsure at all n locations
ccccccgggcctattttcaccaacatacatcaaaattcttttcatactatcacaaaaaaaaacccaagggaaggttgacttgaactttccaccaaaacctaccccnaaacccaaaaccttaatggcatattacactagcacactttctaaggtcattctcgtcatttatagactaatcttcaagctcaacgaacacacttatggaaaaagaattctatannnnnnnnnnnnnnnnnnnnnnnnnnnnnnnnnnnnnnnnnnnnnnnagtgtgtacccgtgagatatttctccccacacgaaataaaaaaataaacttgacatctctaaaggcattactacacaattacccaactggcttctttggcacaccaggaaccactcttcttaataaaaaagccattaatccatccactttttatgaagaaaaaaaaaaatacgtgtgaaggattaatacccttaacaaaaagactagatcatctaataataaattct

SEQ ID NO: 58818 - DNA, 373 bp, Arabidopsis thaliana landsberg
  unsure (1)..(373): unsure at all n locations
gagtttttttatcgggtgaaccaaacaccccctagttagcgttcaacatgccgacgccgcagctccactgggtgtgtgtgggtgggtcggattcttcgtctgcatctaaatcagcagctgctcggcgctgaaagtttcattcatttaagccaatccggagtaggcaggatgtctgggcaagtgagcctgcctactactgatgaccacttgtctgttgactcgtccgatnatggatccccgcccccactggagctgtttttctgcttgccccgatgctgggaggcgagacctanattactgttatctttgtcgtgcgcgtgacacactcatcgggggtagcctagcctaaggcgatcaatctacacgccagata

SEQ ID NO: 58819 - DNA, 312 bp, Arabidopsis thaliana landsberg
gggggggagaaaaaaaaaaacaaagaacaaaaaaaaaaaaaaaaaaaaaaaaggtaaagggagggggggaaaaaaaaaaaaaaaaaaaaataaaaaaaaaaaaaaaaaaaaaaaaaataaagaaaaaaggaaaataaaagagaagaagagaaaaaacaaaaaaagagagaacgaaaaaagaaaaaaaaaccaaaaaacaaaaaaaaaaaaaaagagcaaaaaaaaggaaaaaaaaaaacgaaaaacacagaaaacaaagaaaaagaagaaagaagaaagaaaaaagaaacaaaaaaaaaagaaaagaaaaaa

SEQ ID NO: 58820 - DNA, 503 bp, Arabidopsis thaliana landsberg
atgaaaaaaatataacctttcaaattttagcgattattattcggattatggctttcccttaacccttaaatcattattggtccttttggggtcaggattaaacatcgtttatttgactattcattgacaaaaatttaaagcatgtcagattgcaattaaattggaccacttgattgaatacacaaacgcaatttaactagaaccgtgaaaactaaatatttccacacattagttatcgtctggtccacgaaaataaagtgaaacatagataaatttggtaatgtctgagaatgttgtaataattcaagctacgatttaaacagtactcatgaatccatgatcaaattcagtttgtattatttcatattttacaactgtgaatatgagtttagaatctctacgtgttattcaaatctaagtagtagtataatataaatagtacttgtttaaagtttaattgtgttctggcatgcttaattgtgcattctaaagggcgttttaat

SEQ ID NO: 58821 - DNA, 1033 bp, Arabidopsis thaliana landsberg
cacagtgcacaccttggttatacggtgcattatttcatcttctttttgatgcttcacagtgatacattcacaactaggtatcaaatatgaaaagcatggtcaacacattaactgtgccataactttttttatacacatacaacaaataacatcaatatggtgttagtggttaaaacgtggcgatccgcaaactttgggaaagcctggttttgaaaaagaaaaaaagaaacaataataattgttgataaaaaggaaaaagaaacaataataattcatttatattggtcaatttaattcagaaaacgaaaaaatgatattgatagatgtacatgaatataaaagttgatgttcgataaatatatacaactatcgaaagagaaatatttttgatattaaaattagctttttttctccaacaaaatacatcgaacatggatcttctggtgcggggatttgttttccaatggacctccgtaatttacgggaatctcaacaatcattctccgaactctacacgcccaccatctcaatgtcgtcaccatcagtcaaattttctttgattaaaatgttttgtgcccttaatcacattctacgacgtcgttaatgtggcaacactcttgcatgcacgcgtccaccgaagcgcatgtgcacacgtggagggacccttacccattggttcttttacttttacattttttcactcaccaaagagtgattttcaacggtgactctcacagtctctctgattgacggctgtgatatgttttaaaatcatttactatcatataagaaattcagatttactgacaggtcgattgtcctaacagttgataaacttccaaaaattgaggatttatagtacaatcaaattgtttctagtgtcttgaatcaaagaacaccaaatggtcttgatctacagagagatatctcgtactttttgaatttgcaaaagatatgtgagatgacattgcagaacaatacattgatgttacttgtgagtgttgacagatgtaactataatataaaaataatg

SEQ ID NO: 58822 - DNA, 1467 bp, Arabidopsis thaliana landsberg
agaagccgtctgagatatagaccaaaccggccctgcaatgttaaccataatttggttaaagacagatttggataaagagaaaatctctgataacaaaatgttgctgtgtatgtctgtctttacccattgaaatccgacgagaacgaaccagcagccgagtaaaccatagccacttcgtgtcacgaactgtcattatcaacaacaccagcaacaaaaaagcattttaggtttgctcaaattgaaagtgtctttgaagattaaggtctatgagaagactctataaagtaccattagtgtgagacaaccaataacgaagcttgaactcattactgagctgacgaatttgagatcacgtcccgcctggtgaacaagaaacctttggtttaagcatactatcttgtttcaagattgaaatatctagagacttattcagctgcttgcttctcaagaaaccacctaatcgaaaaagagtttgtaatttaccagcaatgtaccctcgagtgatactgtcatgggcaatgcagacaacgccatgaagaaaggtataagcagtctatgcatctggcgaacatatcaagaatcagattagaccaagttaaacacaaaaacacaggaaacaaatgttgatttgaaaaaccaaaacagacctcggatatgatgactttatcatgtgtgtagacaccaggaaacaggcctggaaccgctgttccgataactcccaagactaatccaagcgtggctccaataatcattagggacttaagcaacgttctagccttgggaagattacggttcgcaccatataacatctctggcataaatgactgagccgtttgggagagtggctcaccccatacattgcacatcctatacgtctgagccatcacctgtaataaaaccagaattataaatatacaacaccaacatggctaggcataaagatctctgttttgtaatgtacctgatgagcggctaaaacgtgagttcccatggacgtagcacaatagatgatgaaagagtagaaagcaatcttggagaaaatggagataaaaacaggtgcagcgagtgcagagatcttccatagttcttgcggtgaagggatcgcaaaagagtaagcattgtagccttctttgttcagagaatccatcatcatataagccgcaacaatctataacataacacacaaacacataaatccgtaatgaaatcttctgcatttacatttcaagtgttgggcttcatgatactataattaatattacctgtgaagcagttgctgcccaagcagctccagcgataccttgtccaagaaacaagcataggattgtatcgccaagaccgttaatgatcgttgctgcagctaatgctttaagaggtcctcatgagttcttcatttcaagactgagacagattctcacatcagagtaagtgatatagaggcggaaaatcgacacagaacatcgcacg

SEQ ID NO: 58823 - DNA, 898 bp, Arabidopsis thaliana landsberg
cacattgggtctggacaagtttctgaagtcgattgggagagatcccgtatacgttgaccttgaggcaaatactctaaacctttaacttgagaactcatgttccacagttcctttcctcagggttaaccttttgaaccttttgctgtttcaggctaacccggtagttggtaaagaccaggctccagatctagctgtttatgttccgtctaattcagttattgttcccgagattcctaatcaaacatcttctacacaaaatcctcttccaaaaagtgtgtcagcagaggtcaagcctgtggcttcaggtatgcctgatttatcagtttcttaaccatgcgctccaagtcttgttaaactgtgaaggattggtttatataactcggttttcttcaacggtgcagccaaaacgagcaagccagcttgtaaggtgaagagcgtcgctgaaaattcagctccatcagcttacaagaacccggagaaatttgtgcaggagattttggacaaaacttcggctctattattgtccgaggtagtaaactcaatcccgaaactaaagtcgatttcgtaacatttatagatcaactctgaaccggttttatatacaggctaagggacagtgcgtggaggctttggcagaaacactaagaaaacgacttacctcagagttgacccacctctctgtgagtacatttcgatatacatggttcgcatcgggtaagactaagccgtttgtactaatcttggttctatgtaaattgattgcagattatgtacaagaactcagcgtacgcagaaggtttttatgctggtacacgccaccagccgaagcgattgtaagaggtttggtttacatgttgaaccggagatatttgggagagaaacattaccggttcagcaa

SEQ ID NO: 58824 - DNA, 1166 bp, Arabidopsis thaliana landsberg
tagactggagtttatggtcaggcttttccttgtgtttattatgttctaatgcaccgcacatggactggagtgtatggacaggcttaaccgtgtgctctggatgttctgatacaccggacatggactggagtgtatggccaggcttgaccgtgtgctcaggttggacctcatgatctggctgtagcataaccatcccaggcatcatttcatggttcagatctagctttcttggctccatcatagggaggtccttaagaatcctgagtgcaaaagtagagctgaagaagcatagtaagaagataaacccaaagcataagccttggtgtccctgagccattatttctatgtaataagttgatcctgctgtacattcctgataaaatgatccctcatgcttttataggaaggaagacttttacttaatagaaaacacatcccctaaacgcaagacgccttgctgaaaatacgcattaaaaatcgaattcacaaacatagcatgacaggcataagaaataactttttttgcgataacacaaatcgtatgttcagcaacttcaactctccaagtttcgaaaccttattacgattatttgcaaaaaagaaactacatcaacaccatcttggcagaagaagtcattataacaaaaacaaacaccaaaaaaaaaaactcaactgagagtattcaactgagcactacttggtagatattagacattatcaccatcaccttgtgattcagcagctctcaaactctcagccatagcacgagccctgttctgagtttgtctctctacagcaaccatgtataaacctaaacaattatgggttaaagaaagtgtcccatacaaacaaaaagctcatgaatttgagtaacaaaaaccatagtctctaagatgaaaatgtgggaaagatggatcaatcataccaatagcacttccgatagcacaaccccatagaatcctcattgaccacttatcgttgataatccctctcgatcccattttttttctctgcaataactctttcaaagctagctttttatccactaaaacgcaaaatttatgattccaaaacagcaaatcaaactcaatcctgaaaaaactctgctaattatcggagatttaagagataaaccttattcttattcttttgataaaccttattct

SEQ ID NO: 58825 - DNA, 1049 bp, Arabidopsis thaliana landsberg
gttattcactcttctcgcttgctcttttcctcggcctaaccacatgtggaaacatcactttcccggtttcctcatcagcctccgagaaccaccatctccgccgatgtatctctgcaaaaggtcccgcattagcggagaggctagtatcaagccatgtttactccttcagtttattcctcttctccagtctcatcgctatgtctctcaagcaagcaattaggacaacaacaacaacaaacgggaactgtttagaggaggaggcgcgtgtgttgaacgcgggagaggggcgtgtgaacttggcagctttaagggttgggattgttgcttcgtgtgttgcgtcggttttgggatgtgggttcttgacaatggcgttagtggatcttgttcagattaaacttggacctttggaatgtaagagaagctttcatgcacttgcagctattgttcctcttgttgtacttgttccttctgcacttattatctatgtgttccttgtgctctacgcatttatctattaacccttttttgggtttctacaatctcttgtctgatggatttgaggtttcagattcgattagttctgtagccagagatctaatctttggtttaacattagacagtcaagtatacatcattgaaacagtttttttaagaacaaacaaaatgttcaaacaatcaaatattgttctgtttcaacttgatattcttctacagagacgcacttagagaagcttctagtaatatagtgaacctgcgaaaatatcaagattaggcatatgttataagcaaaacaaacaaagacgtggatattgtaacaaacatcatttggttagggtatgtatagtaccttgccaccagtttcctctagaggcgtcagacgaattggcatcgttgttatctctgttctgatccttgttaatctgaatgattcaacgttttgtaaagtcaaaagattttgtctcttctatgaaaaaatcaacaatcaaagtaacatgaaggggtggatgataaaatgatagttatgttaactcactgtagggtaagtatgg

SEQ ID NO: 58826 - DNA, 1223 bp, Arabidopsis thaliana landsberg
tttgccgcttagttcttcgaccaatttaggatccatagatggatcaggcttttgcgtgttttgaaagttatataatctgtccataatgaaggaacaatgtgtcactccaatcgtatgtccacctatacatttataaagttaaacgcaaaacaaatgtcactataaatttagaaaaccaaaagatttagtagttgtttttactagtcattttagaaactaaattcaaattcggtagggtgatgtttgacttgtaaacaacaaaaaatatatgatttgaatttaatatgtttacttcacataccaagaagtagaaccatatcggtaaggctaagtttcctctgatcaaatttagcagcagtttccgcgacggtcatctttggagacggcaaatcgacaagcaaagccgaagagattttaccgtctaatcgtcctgttggtatctcatatcgtgttttccctccgcttgccttcaaacaaaaatttaaattatatttttgaagttgattaggagaacatacataaatatataaaatagaagttgtagataaaagagatgtgtttacaagagtaacaagatctctagtcgcgagagctatgatatcagcacaagaaacgaccctgtcacattctttttcgaccgcagacttaatgtcatctatcacttcgtatccgcgtacacttagatttggtgacgcctttttctcactgttcgaaccatctagaagaagcgatgcatcacacccctacatacatttttgatacaacaaagatcaatatttatttcttttgagactctctaggatattctagagaaatttgtagtataatgaagtatcaaccaacttacgttgctaaaacaatcgtgaaaataaaggcggatcattgcgggtgcaatcgatgaatccttgatgaatgcctctccaacaactttagatacgatgttttcgacgttttggcaattttgactgtagaatccgagtcgaagctggccataacaaccatggccgaagctaagtagagcaagggataggatcaatacttcaatggtcgagatcttcacggccatttttagttgaaatttctatatgaattctagtatgtggggaactgtagaaaaattgttaacaacttttatagtgttcaagtttgttaccaaatgtgtggcaagcacgattctctaacgtgcgttcatgcatatagcatttgtttctagctcactcatg

SEQ ID NO: 58827 - DNA, 504 bp, Arabidopsis thaliana landsberg
  unsure (1)..(504): unsure at all n locations
acttttataaaaaattgctttctctttttatataaaaagacctttgtctccggtaaagacagtcctttctaggaaagttaaaacgagaaaacaatgaacaacttagacaattctcatgtttctatcttttggaagatattgatctctctctctctttcaatctatgactcatagatcttttcataacgctgaatggttaaagactcttaaagtgtttaaaatggtatttaatcttattccttacggtaaaaatctgcaaaagttattatcatttatatcaatttgaattagctataaaatcattattatatgaagaaacataaatctcacatatataatacaagataaacacatattactctagtaaattaatatgtactatctagaaaaaattattctgtaagcatttgacagcaaaaaataatctcgctgaattatataattacggatcgtatttcttttcttctctgtggcatgttcnctttagcttacttgatgatctac

SEQ ID NO: 58828 - DNA, 520 bp, Arabidopsis thaliana landsberg
gccggatggtgacgaagagaacagttgtcgcctggacattggctatgggcggcgcgtttctttaaagcgcgcagtctggcttccgatgccgtggatagcggcaaggtgcgtattgatggtgaccgggccaaaaatgccagggaaatgaagcccggcatgctggtcagtatcaagaacaaggatatgcagattgaagtggaggtactggccctgagcaatgtgcggcgtggtgcgccggaagcggcgctgctctatcgtgaaaccgaggacagcatacgcatacggcagcagctcagggaaagcggcgcagaccagtacgccgagcgcgaccgcggcatgggcaggccgaccaaacgccagatgcgtgatatccagcgttttaccggacgcgattgagagatcgcgttattctggctagcttggtttgggcatgccgctgagtacgcctgtttttgccacagcctgcgcccggcaggaaacatccaacttttggaagatgcgtttcagatgatttttcacg

SEQ ID NO: 58829 - DNA, 1756 bp, Arabidopsis thaliana landsberg
tgatttcatattgaaatatctgatcgcgtctaaacaaagaaagagaaatgttgtgcattaccgaataattacttttaccagttaaattaaatacggattttgaatctgtcgaagaaaacagagcataaattatgtggaaagaaacaaaaaatattcctgcctctatgattattgacgtttaagagtcgtaaacagggtttaaaatgattctatatagataccggtttaaatgaaccggtttgcttcttctgtctcctctttccttcagatttactttactcggaatgaaaaagatgcttcgaagctcaaaatcaaaatcactgtagtgacgaaaataaccctgaaaagagaccattattacaatcctttccttttaacggctagtttctgtgaatgttccttcatcttgtctgagctagctaaacagacacgcaccaaattagacaatactctttctctctctctctgttcttctatattctctctgcgaatttctaatttagtgtaagatggaggcatttgagcatatgatagtggatgagtttaacgaagaagacttctacgagacaatagaagctcccaagtttgtagacctcaccgcaccagatcatcgccctgaaggagatgatcgttactggttctgttctagagttggtcagaatcttgttcactctttttacatttcccttgttcaaaattcgaatcaaatcattactaataacattaatgttccacagatctgggaaatttgattataacattttctgaaaattgctaaattagggttttagtgaacagtgtttaattagtttatgttttgatccattttggtttcctggcgataatgtgtatttaggatgtgatcagaagcatgaggaatttatggattcggaagcaatctacaaaaaattcgttcttcgggttagcttaaagttccaaactttttttcttcttctcttccttgatttgatttcgttttaaagtgtatcattaacttaagaatttgatgttaatcaacattaataggtcatggcagctaggagtccaagtgttcgtcttcgaaaagctctttatagaaaggatttcaggtaatgaacttctaactatttgagaaatgtgtttttgaacttcgagagagattaatcactgtaatgtgtgtttaacattgcattgtgctacatactttttttttattacagtgttgatcctaaatgtcctaacacggttcctgcaaagccctcaagatcacgtgtgtctaaattggctatgatctcatcgattcctcagaagggtaatggtaatatcaggtcaaaagaagtaaaagtagtttccacaaataagaatgtgactccaaaggcaaaggcaaaaggaaaagagtcagcagtgatctcatcagttcctcagaaggcattaactgagaggaagaagcaaatgcagagtccagcagcttttagaagtgtacagaatccgagaaatgcaacaatcaaggtgtcggaaaacagagttgttgcaaaggctttagtgtttcaatctccaaagaagttggtgaaactgaagagatctgtggagcttagttcctcggtgaagaagttgtgtaatgggatgaggaagcttgagattgataacaaaagaaatggtttgggggttaatcataaggttgtgagttcagcgtcatctagaagacctctaaaaacacgagaggtgaagaaccgagtgtttgattctctgcggtcacagaaacagattgatcagaagt

SEQ ID NO: 58830 - DNA, 522 bp, Arabidopsis thaliana landsberg
tttgattgatttttgctcgaaatccatccacgtgggttgacgatgaatggcaaccgtggaatcgtagaaacagatgttttataggggtagagaagagaaggaaaaatataaaataaataaataaaacacgttctaatttggtgcgagatgtacttttttggcctgtgcagatagttcatcattgtcaatctagtagtagcctaaaagtagcgttttcttcttcgttgatgtgttttttgtgtagcttttctaacaaattaaagttgcgaatgaatacgtggagtcatctgttgatgtgcatcagatgagttggatgttgttaatcagataaacttgcatgtggtttttcttagggttccttacagggcagagttcatcttggacttggcatgttgcgtgagaaccaattcactttaacatataaccgacgaagtgaaaaccaaacgaccatcttcagttatcaggatacacaaggaattggaaaaaagttagatgaattgagtgttgggttgctcgtgcaat

SEQ ID NO: 58831 - DNA, 473 bp, Arabidopsis thaliana landsberg
aagcacgctgttaatgcaatcgcaagcagtatggcctacgcggctgatcaattgtttgcgacactggacaccacttcacgtcgcgtttacctggccgagggcgtagacatggtgttgtctgacaccgtggggttcattcgcgacctttcacattccctgattgaagctttcaaggccactcttgaatcaactgtgcaggcagatctactgctgcacgtggtcgatgtcagcgccgtaaaccggcattcccagatcgaagaggtcaacgcagtgcttcaagaagtggaagcccaagacgttcctcagatcctgatttggaacaaaatcgatgcctgtgagcgggatgtcgtcgttgagcgggatcaggatggtaagatttcctcggtctcggtaagtgcaaggtatggtcttggcctgcctgaacgcggcagtgtttgaccgaactggccaccgaattttattcacgcaacaag

SEQ ID NO: 58832 - DNA, 1140 bp, Arabidopsis thaliana landsberg
aatacctcagccagaaaacaagttcatcactggtgagactaactaagtatcttaagcactccatcagagagtaactctgagtcttaccatcaatagcgaaacgggaaagccgagaagctcccattctcttaaacaaaggatccttcacatgtaaaagcgatattgattgatgaattaagttatcacctaacccaaataagtgacaatcagtgatccaccattaataaaaaaatgtaagagctgattagatatagagattcattcacatacctaagtaagggaaaaactggtatccaatatacgttgctgtgcccgcaaagaaaattttgagacaccaacctattttcctctcagcttcttcctccaatgtaaggtcatctagaaaatgaaagcaaagctaagaacataacacacccaaacctaaaggccctttacttcttttgatgagtccaagtcacactcttctctactcttatgactacttcatgattgtttctaagactaaagtacggattcatcaaacaaagcaaccactttggagtaaaattacaagcaaatgtgattgaaatcgagactctcactactagtgtgaagtgagaaatggacttcaattacaactacttaaccaaaagctcatcagattttcgaatcaatctacttcattctatcttaatctggtgtaaatttaagaccatgagtcgatcctttcacagattatagacttgattgaaaaaaagacaaaaggaaaaaaggaggcacctttcttgttcgacgaggagaaatttcgagatcgaggattcgcgtttcgtgccctgcaaaaatgctgcaaattttacttcagattccagaagaatcggtaacgacccgttaaacccattgatgaagagaaagacaaggaaaatcttataaacgggtaaagagaggaaatttcagatgaagaattttgggtaattacgttagctatgcgagcagtaagaatccgcatgatttgtcgaagctcgaaatcttcttcgtcgtcttcctttgtcgatgttctttggtccttgggaggttttagtaaatagaaaaaataaactagatttcagcttaagcattggagaagagttttttgattgttgaaaaataaaaaaactttgagac

SEQ ID NO: 58833 - DNA, 575 bp, Arabidopsis thaliana landsberg
ttatctgagtttgtgtctacataggtaatgtcaaatctctgaggtagattgaagtcgacctgcgtgccaaccagaacccgttaatagagaagtagcatcaggtatttgtaagagtatatgaagctttcttacctgaatagttgagcactgccattttctacccaatgcatcttcaatcttaaggtcgatctttgggccgtaaaaggcgccacctccttcgtcaacctcatagctccatcccttatcatctaaagcatctctaagggcacaggtcgccttctcccatatatcatcacctccaactgatttttcaggtctagttgataagttaacctcatacttgttgaatccaaacctcgacaatatctcttctgtgagatctagaacacctctgatctcatctttgatctgatcctctaaacaaaatatgtgtgcatcgtcctggaagtaaaaatgtcaactaagttaatcctagaacttcataagaacagggttagcgtttagattaaagacgtctaagttaacctgtgtgaaccctctgacacggaagagaccgtgcaagctaccagacaact

SEQ ID NO: 58834 - DNA, 652 bp, Arabidopsis thaliana landsberg
atgttaaagttagagctataaatctctttcattccttaaccacaagaaccgatacactgtttacacaagagagcctctagaacatctttaggtcatataattctcaatcacagaaacacatcgtcgctcacaagtcaaaatatcaaacaatgcataattaatcgtatcactcccatgactctttacctccacggaacctgcaggatgcttccaagtctttgcttactccagctcatccaagtctttggttaaatcgttagtcaccactcacttattctgtgtcattactcatgataagaatcttttttgtcgtccgtatgaaaacattcttttctttaattcatacgtggttgaatctttagtcacctctatcgtcatgataagaatcattgttgtcgttagtattaaaccatcggtggctgcattgctccactactcagaaagctttacgggttgtcacaatgatattgtcaacttcttttttgtttttttcttcaaaatatgtaaaaataacaatttagaataagtttcatgttgaaactttagctcgagttgtttaacctttttatgtcaaaactcttgttataacatgaaaatattcattttcattttaaaagaacaattcttggttgtgaatttttttttataagtg

SEQ ID NO: 58835 - DNA, 1400 bp, Arabidopsis thaliana landsberg
taaatgaatattttttaaaaatttacgtattaaactatatttttttcaagcaaactcaaattaatactttaaatatctcatatattgttcataatttacttttgtaaagtagacttttaagttttaatcagataaatcaaaatttaattaattggaattaattaaattttgatttatcttttttcgaagaaaatgatgacaatcaggtgagagggcctttgacaccttaaaaatttgtctaatttgttatttgattcgattttaaaataaatatttccattgtccttttagttttcactttttcagattaaaaatcacttttttcctcctccttcattgcttccctcctttcgctctcgaccggagattcagtaaaccaccttcccggagatgggaaaatacattaagaagtcaaaagtcgccggtgccgtttccgttaaggataaatctcacccaaccgctctaggtttccgtaccagagccgccgccgctaaaaacctcgccctccaccgtctccgttctcattccgacgaagcagactcctttaactacctccagctccggagccgccgtctcgtgaagcttccattactcactaataccagaaaacagcagaagcaacagctcattcctagtgtcaatcaatgtcaaacgaaaaaccctagggctagttccggtccggcgaagaaattagagccggatacgacgacggaagaagcttgtggtgataatgagagaatatctaggtctgattgcaattttggagataaaggttttgatttggaatcagaaaacaggtaactttaactctgttttttttttcattttaaagctccaaactttttttttactacaatacagagattgagttttgatatgttggtctctcataggagcatgataagtgattcaaaatcaatacaaagtgagattgaagacttctttgctagcgcagaacagcaacaacagagattcttcattcaaaagtacaaatcccattttctttagtgtcttgattctcttgagtttttagagtttggtctgactttgggggagttatggttttgcaggtacaactttgacattgtctcggacaatccattgcctggacgttacgaatgggtcaaagtgatgccatgaaatgagttgtgttcgatgtaaagttgtgtgctttaggaaacatctgtgttggaacagaggagatgaaaattgcacacagactaactttgtggggttttagggttggtgtataacttgttagtcaagaataatgtaatgttaatctctctcatttgctacaaataaatgtctaatttaactgtcaagttacttaaattagtattgtaaatctcttcattgttctttggttacttcagtgaaggtctgagttttgtggttct

SEQ ID NO: 58836 - DNA, 1067 bp, Arabidopsis thaliana landsberg
cctacgattcctattgctaccaatgataacaatgtagtgaggactattatctttcttataatggtaatgttgagtccccacattctctctaaacaccaccgtgacatcattgtgagcaaacgcatcaaacgcaacacaacctcttcccgcttcccggaacttcagatcatcactccaagcacactcaaaaggtgccactgtcagaaacttgttctctttcgccgcaaccatctttcttcataaaatctcttgccttcacctacaatatttccaaacccacaagccatcaacatctatataaccaaagacaaagacactaaaaacataaaaagaaacaaaatttcactcattgagacattttcacaaacacagagaaatcaaccagactcacttttgaaaaaccagatcatacgttttgagaagacaatgataacaaatgggtttttaaaaaggaacgttattttcaatgaatcagctagaaagcaatcaacttggcaaaaaaatctgaatccaactggcttcataccccaccatgaacttccgccgtcaaatttcaaccacaacgtggtaataaaacacgagaaaaacaatcagatgcagagtacatcaacttttaaatcgaataaagacaaaagatttgagaagctacaaaaggaaaaataaaaatgggtgatttgatcataaatcagatatttagatgggtggataaaatttgcggagcttacctaatgaactgtgcgtgacacgtaatagtgagtcagatctaatcctttttggaaagaagagtcaaaaaaggaaatgagagacacgaatacgaagaagaagacatgctgagatattttttgtgtcaggagaaacgagttggtggattattgtcacctgtatattaatgggccaactaaatctgtataaggcccacattttattctgaaactgagaattaaactcttttttttggaatgagaaatggataatatgtatgaaatattaaaaagtatttaaaagtttaattatcttcataaatacatatgattatttttattttttaaagacaagaaaaggaatct

SEQ ID NO: 58837 - DNA, 258 bp, Arabidopsis thaliana landsberg
attatccgagacaggggggactgttgcacacagagggagcaagagtccactataaaagaacgagaaccccaacgtcagagggcgaaaaaccagtgatcaaggcgaaggcccacgacgtgaaccataaccctaataaagtacttaggggtcacggggccggaaagcactcaataggcaccactaaaaggagcccccgattacagagctggaccgggaaagccgcccaacgtgtcaagaaaggaagggaaaaaagcgaaa

SEQ ID NO: 58838 - DNA, 214 bp, Arabidopsis thaliana landsberg
  unsure (1)..(214): unsure at all n locations
acaaaaaaacacnggggggcagccccananacccggggacccccacccancggaagacggcgacaggcgagccgagcccaggccagcaccagaccacacgggagggggcccgagcacgcgggcgccggcggccagagcggcacccaagaggccgcacaagacacgggccggcgccngacaacggcgaggccgggaaaaccccggcggcacccaa

SEQ ID NO: 58839 - DNA, 617 bp, Arabidopsis thaliana landsberg
  unsure (1)..(617): unsure at all n locations
agaaccttaaaattatcttaaaattcatcacttatgcactgatgcatagtttccaacaatgttatgtgttatacatttacaagaatacttacatattgcagcgtggatagaagagaccgaatgtttccactctttccgcttgaccacttgcggattttagcatcgatgttctgcagaggttcggattccgttttcttttagttttgaggttattttcaggtaaaagaatcgaaaatatacatatctttgcagttgcagtagtattaccttgatttcttcagcatccttattggcctcttccattttgttttcatcttgtgttatatcctccacctgcacaacacattacaagttccatgtcaattataaatagaaacatacacatttttagattgaaaaactgaaaggtggaagggcgcgttaaattacatcgaaatttacatggaagggctcatctatatcctctgaggtagtatgtgctgatagaaagaaaagaaaaaagatgttatttagttgtgtagtaataacaagatttaaaaacaatccaagaacttacttgtgctaggttcttgtctctcttcttgacagnatcaccaggagccttatagttcatgctc

SEQ ID NO: 58840 - DNA, 397 bp, Arabidopsis thaliana landsberg
  unsure (1)..(397): unsure at all n locations
cgcaaccatcggatccaaatctgagttacgacaagaaccacctttacggatatggggttccattcgaacactgaccaaaccagacacttattaccaacacttgaattcttacaattcaccagggagcataagtagcctgataaccatatcgtcttgacttaacactgcttgacatgaatctttaatgatctcttcacacttgatgtgacccgacaaaacagcttatggattggaggttcattagaggtagattgcggtaagcttcaggtttcgtcagaagttttcgggcttccactctncatgttatgtcttgagaggaaagatggtcgagttctttgtcgatctcgctttttgagatcggtgcttatcgactgcaactataaaccgaagcttctgg

SEQ ID NO: 58841 - DNA, 1462 bp, Arabidopsis thaliana landsberg
cagcaagaaaatatatccatgttttccgagaaaaatcgtcattattaacaaataagtaacgtttaccaccttgagaaattggcgtaattggcccacagagatctgcgtgaatcagctccaacttctctgatgccctccatttacttttcttagggaatttcctcattgctgcttgccaatgttgcacacagtacacaccttgttgtcctctttgatatttggaagacctttcaccatctcttttctctgcatcaattgaatggacatgttgtttagatgcccaaacctcttatgccagagagttcccaagtcttctccttctatcttgaggcagttggtggtgattggtttcttcacagcatttactaagaacatgcggtttttggtcatctttgtctctacgatcaatcccctttgagcatgaaaaattctgcacactccatcttcgatgatgattgaaagctgcttctcttgcaattgaccaatgctcagcaaattgttagtgaggtttggaacataataaacatcactcaccacttgtaagattccctccacactaattcggatgttcccttttccctcaactcctaatttagatccatttcccagcctgacagagtgtctgaaactctcgtccagttcggtgaaccatgacttctctccggtcatgtgatttgagcatccagagtcaaggaaccatgaaccttgatcttccacactttttatctctgcatgtgccatgagtagtaactcctcctcttcgtcaaactccacaaagtttgctcccttctcaaggcttgtgcactcaaactgataatggcccatttttccacaccggaaacacttgattgcagatctgtttacaaacgatctgcttcttcctcgtcctcttgagctgctgcctcctcgataggaattcccatttcctctaccacgagcactccttggctcgttttccacaaccaagacttgttcttcacctctcttctcagtcaccttacgttcgtgtatttgtagagacgcttgcagctcatccactgtgaggcaatcaatatccttagattcctcaatggagcaaacgacatagttgaaattgtctgtgagactacggagaatcttttcaacaattttgacatcgtccatgctttctccacaatttcgcatgtcattggtcgtctccatgactcttgcaaagtagcttatcacgctctctccattcttcatctccagtgtttcgaaagtcttcctcagcctctgcaattgagccctcttcactctggcacttccttgatgtttaaccttcattgattcccacaattgtttggccgtctctttctgcgtgatcgtcttcagagtggttttgtcgatcgactgaaacagatagtttttggccttgagatctttgagatttgcatcatcaagtgccttttgttgcgccggattggggtttttcaattcttcc

SEQ ID NO: 58842 - DNA, 1121 bp, Arabidopsis thaliana landsberg
atatttgggagcgttttaacacaattcggatctactctcgcttggcataaaagctgttttgttccagaacataattcataagcatgcattggtgattggtttgtcactttgtgaattgtgactttgaatagccatcctgactcttggcagaattatttttggatttggtttatatctgatcaaattccaaaacttaacaaaccagtcttgtactcttgtttgatttcaactggaatcttaaaactagctcatagttgccactcaaaaggaattttaaaactagctccttttttttttacttcgtcgaaatctttaaactagctcatagactgcaccaaacgaaatgcagatacatcatacatgtcacggaccggaccacatcgggtttggcagatttggcatcctagtttcgacatctaccaaacccactaaagaaatctacacggacactaataagccaaatcagcaatccgacaaacggttcatattccaccacgtggctctcaatatgaattgtcacgtcgacacctattaataccgttctaattcttctccggaacagtagcttagctaaaccgtgatcggaaatagtttcagagaagaaaccactatcggagtctgaagcaaattatgcctaatgtttctcagatctctactgttctacgtctagggttttcgtccaaacgaagactctccaatggcttacacttcgttgctcgttcctattccacctactgatcctcccaaacaaccatcaggtactttcagaatcttcaattcgttgagaattatgcaattgagattaatgtcgctcctttatcaggtccactgaagaattacactaagttagtggagcaagggaggttacaacatgatccgtaccaagagaaagttgtttcggcattcgaaaatttgtttggaagattggaacatttcgagaagcaaatggaggattatcatgtaaattgcaaatagtgtaacaatttggttcaattgtttgcatatagatgtgtaacatttcggtgtttaggtgagattagcagagtgggagaagaagagagaggaggaacgaagaaagctaatggtggaagaagctgagaagaaggaagatgatggaatgt

SEQ ID NO: 58843 - DNA, 1827 bp, Arabidopsis thaliana landsberg
  unsure (1)..(1827): unsure at all n locations
gtacttgtcatacatatgttagacacaaatcattttgtttttggtttaaatacatcatcactattgctctagataaggtttatttgcatttttttaataactttttaatacaaggaatgttttgttaccttacctannnnnnnnnnnnnnnnnnnnncttttgagtttctctataaaatcgaattctaggacgtaacatcgaaaaaaaaatagattattttataatatggagtaatatgattatatccattaaaataattaactgaaaagatgatatcaatttatccattcagctctaaaaaaaatattgaaaccaaacttattaatttctcaattatatagtatcaaaatatgtccaatagataaagtcgatctattactatgccaagctttccagatactagtttcgacaatgttcaattacgaaatagaacatgcattaggattttcatcactaaacatcatccatctagccatttctttctcatcatcactactagggttcatataaacacctctatcaatttcattttcttcatctttcgttataggttcatcgtcctttttttccttttccattttgactatccttttacgcattttttcctcaagttctttccacaatttctcttcatcaaaatcgccagtgatgacaacttttttgttttctacatcgaccttacatgttttgacccctattcatacaccattcaatataaatgattaaaataacacatatttcaaatatatatgaataatagtattatttttattatataccttcgaatttagaaataacttttccgatgtctgcctcatacttctcacttagaaatgctatatgtatttcaagttttcttgtactacaaaaaaaaaaaaaagagagttaaaacacatgtaccatctcaagaaagtacacttgaacaaatgtaataaaaattattaagttagaagtgatctaccttgtttcaggtttgtcaattttttcttctacttcaggagtctcatcttttttgtcgactatatcaccttcttcattcttctttgtaactgtctcttgttcattagcttcattttgaacaacatcttctttctcaactttctcattcatcgtcaagatttctgcctttttaccagtttttttcttagatttttcaataatttttccaaattaaaattaccagtaaccataactttttgattttccatatctgttttacatgcttcaactcctagcaatcacatatcatttaaaatggttatcctcaataatatatatgatcagttcaaacaatataaatttccaaagctgtgtgataaatgttcacatcataatattatatttttgcatataaactccactaaacacacaaattttaaaaacaaagaatatataaaacaaaattttttaaaattttgcaactataatgtaaaacttgagatagtaaaaccatacatataattttatatagtgtcaattacaccaaaaatatgaaatataaatatggattcaaaaaaaataattctaagtataagtgttaagctattgtaccaactaccatgaatgagatcgatatagtgttatcataaatgtggactataatatacgtttaccttcaaatttggacatagcttttttgacatctttaacacaattttcacaatgcatccaaatcttcaactcgacttcaattgaattgctagaaaaattttgaaaatagaaaacacgtatatagtatcgtaagaacatagaaaacacataactcttatttaattaacaaaaaaaaacttatttcgtcactctacttttcaggaatatttcgtcgt

SEQ ID NO: 58844 - DNA, 1152 bp, Arabidopsis thaliana landsberg
  unsure (1)..(1152): unsure at all n locations
ttcattgataaaagttgtgaaattgctctctagcaccaaaatttctaacaaattctaactctttgttaaattttacaacaacaaaaatgattcacaatcttcttaacacatcaacaacattataatcttcaacttgaactctaaagaatttggctatattcttcaacattgtataggaaagaactacactaacctgtccatgatagataaaaggtccataggcagcagcaaaaaccgccacaaccaccgcaccaatagttacaagccgtcggaaaccagtaactaaaccagaccagcaataatgcctaagtagataaacaaagtaaaccggagcagtgacggctgaacaaatgcttaaagcatagaagaactgcgaataaaaacccacccaaaagatctctcccttcttgaagaaacgaaatcgaaagcaataaccaacccagtagaaatccattatactgaaaatgaatgtgatctacgatcaatagccccggagaccaaatcaccaatgcgcagatcagatttcgtttcaacggttctaattttcgagtcaatcgataaacaccgtagagaagacatagatctgagacgattacgctgattcgtggaagtaaattacagatnnnnnnnnnnnnnnnnnncctgattgaagatctacgatcctgggatcgacgagacgcgcgaaaattgagaggaagcgttcgaagtaggcgaagaaaggaggatagtcgagtgtccattggctagtctcgtcgaagtaccatttggtaagaggaagagagtttgtgatagcgagccagttacggtggacctcgaaatcggtgcttctggacgacggaatgagaaggagttttacggcggtggctacggcgaagaaccatagcagtagtcgccggtcactcttttcccggtgatccatctcggcaccgatagactgggaacattannnnnnnnnnnnnnnnnnnnnnnattgatatgggcctaatttgggacacgaaccggcccacttagtaactacagaagtttacgtggagttgtagatatggcagtacataattggttaaaaatatatgacatggcattacgtggaactgttcaaattggtttttatatcggattaaaccggtttagctatgaatatttcgttgtgtg

SEQ ID NO: 58845 - DNA, 389 bp, Arabidopsis thaliana landsberg
tttttctgattcattatctaggaaaacatgtgcgggggggaagtaattctctagatgtaactttaaaaacttatgtaaaacttatcttattctccaacgacaacatgcatatccattataaactcatattgctatatatgtcaacaccaatagaggatgaagctatgctcaaacgaaaatgggggaatcttgtcacatagagtccaaaaggctatataataacatgttaacgattcccacgtggattgtcaagcttatgaaacatcacaactcacacaattcacgaaatcaatatattcaatgttgtataatttgtcacatgaaaaaaattctagaaattattgtgattcatttgcctaataatcaactgacgttaagatccttgaaat

SEQ ID NO: 58846 - DNA, 133 bp, Arabidopsis thaliana landsberg
tacccctatcaccgtgaaaaaacagggacaccttggtgcttgaaccacggatataaaaggcttacctatccgctgcgtgcctaggaccagcaaagtgtgcacaggaatatgaccgggggacaagaactacacc

SEQ ID NO: 58847 - DNA, 289 bp, Arabidopsis thaliana landsberg
tttcagaaacttttgtgtcaacattttgagcttgggcggcttctgctggactatataaacggaacatagctggagaaaacgagtaaacggatatacgactatctggcttctcctgcaagagcagtatgaacacatcaacacaccattggactaccacattcgtatgtttattctcttttagtggggatatttggtgaggctctgccagagaaaaaaggacagattatattttagtgctatagagagatagaaagattctgttgcaattttatggggattgagtttcgac

SEQ ID NO: 58848 - DNA, 461 bp, Arabidopsis thaliana landsberg
atctaatccttaagggggctgggggtgtctcctaaagaccatctctcacaatcaacccgaaaatatgtgctccacaccgcatatggagaaaataaccattcaaaacacttgttccccgtgaaggcacctttttcaagtattttaatgcaagattattagaacttacattacctactttaatagtgagaactttattgacttaccaaaaaaaccaagcacttctcaagcattctaccaattgtttcaccaacatgattatcacttatgcagaaattgatgattctcttatgtcgcttccaatcctcatctatataatgagctgctagacacatgtagctcatattcaatatgattgtccaacaatatgtagttaaacaaatactgcctttatagattctaaaaaaggtcctaagtgtacttctaggcatgaccaacatataactgtcatcgtattgcggacc

SEQ ID NO: 58849 - DNA, 142 bp, Arabidopsis thaliana landsberg
ttctgtacaagcattttttttgttaaaccgtatacgagaacatgtaatggtcactttatgctgcatcaaaaaagcacagacatactacacaaagctgaactaaagcgagcccaagcttgctgtgacgataacgcacacacat

SEQ ID NO: 58850 - DNA, 1963 bp, Arabidopsis thaliana landsberg
tgctaggctcaacactaaatactacgattgttgaagcttcattatcatcagaagaaacaggccgcctacgctagattgttcctcctgctgctacaatcagatcttgaagatatcctttgtaagcaagctcgaaatctcccatgatgtaaaacttaagtccactaaaaagttttggcttctgcataacggagaatgaaaccacttagatgaattattatcaagttggttgtgtcatagagagcatcaaagagagacgaagctaacctttttcaaagctctttgtcttccaagataaggtccttctcgtattccatgaacatccatagtgatctcatatggctcctcgcttacatattttgtatttttcatacacgccttaatccctgcaagaaaagatagacaacacttagacaatttgttgattgttagattgcaaacatatatgtttcgttgctaatgggttaagaatactgacaatcaatggttagtatccatttcccctccaagattgccatcatgaatttgagggtccttttgcaggctccgttttcattgattgatgcaataacatgtgtaacagttgactcccagttttttgagatcgtaactccagacagttccgcaaattctgcaataacagtctgcaatcaaagccatccatcaaatacaagtttcagctcgagtgttgcatatagtaaaagagtagatatatccataccttctcttcaactgtgagccctgagcaagataagaccaatttcttggaaaatccatggaactgcttgatatggagctcacggatgttagcttttccagatacttgtttaggctgagagtgcagtggtctagagaaaacaatgatctattgtcagctgtctaatttcaaatattggaatcacatcataatccttatcagtagataaaattgcatactctttaggagtacgcttgcatttcctgtcttttgaattagcctcttcacagggcaacttaatggatgcatccaaagggcatagcattacaaattttacctgttgataagaaaatgtgttaaaagaactgtgtaagggactatatagagcttctacaatatatgcaacacttacattgtcccatctgcattctggtatgagttttgcacacgtaacatgaaaactattcttgcaactcttattgtaacaaccaagtgctgcgcctttaagcccacagcagctgcaacttattctccggcttcttgtcaactccacatcaagattcactatggtaaggtcgttgaagtatacatttggagccctgaaaaatgcaaaacagttttttacgttcagtcagtggtgtatcagaagcacatgtgtcattcaagcattttaaatgatgtcaaaaggcatgagcggataattactactatccagatttcttaccattcagcacagtttttgtgaacatgtatgaccttagacccaccattaaaatccgcagagacaggttcacctctgtagtagtgagtcatttctcctgaagcctgttcacataacattccaattaataatatgataaaagtcaacaaagggctacatctaggactccaatgtgagatagtgaattcaacctctgtgtcttctgaacactgacaaaaggcacatgtgaatctcttcgttaaaggtccattacatcgtcgcaaatgtgcactgcctccagatgaagacttgtttatcgttgagcatttctctataacttgcatggtatgatcgtctttacccacagtggatttcctattgtttcttgaatcttgtttatcacccccttgattcaacccagcagttagaataccatttccatgcggttgtgtagctctgcttgagatcatatgggaatctagattcaatttcttctctgaagcctacttttgtgtttatccagatagaatctttaaagaggagcttgcattggattttctttccctctt

SEQ ID NO: 58851 - DNA, 514 bp, Arabidopsis thaliana landsberg
gatttgagggaaacatatactccgagtattaggttatttgaatgttatacgtacgtgtcttgttgctagctagaggttgtaataacaatcttgtaaaatcgtttagaccatgattagttgctgatgttataaaaaatgataaatcttagctgctaagagaagttaaacatattcttaaaaaattgattgtaacgttttttgttcctttgttaaaacatgcctttgaagtttatccttcatttaaataaaaaaaagatttatttgttggtatatttcacatttaatatagaagtaaaataagaaacagtttactcgatcgtctttgatatttaaaatacgttcaaaacttcaaatcaacactttagttataacctgaacccaataatacaaaacaccacatatatctaacagaacccaataatacaaaacatcatatatatctaacacttttagatcaaagtgtgatagtaaatcacgggtaatgatgttgtacatgaatacataagaaatgctg

SEQ ID NO: 58852 - DNA, 1507 bp, Arabidopsis thaliana landsberg
tctgcacaatgacaatgccactgccaataccttttgtctgcagcagagtggctagcacaaacaaggaaccctgagcttgtacatcatctccttcagaaatatattgaagtaaagtctccctatttacaaagaaaaaagaaataaaaaaacacataagcttaatagtaaaaaaaaaaaaaaggacaatactaagacagcaactatcccaacttcattcaaggtcttatttgctaacactttacctaaacgtcatatgagaattgttgaagatacttttcggagtatcttcactgcataagtgggaatttccatcgtcactcatgcctgccgcagtgcttgaacactgttgatttgcctcctcagtaacacccttgtctggatgcccatttacatatgtaaggccttcaggagccaagctgctattaggtttcactagggaacttgaaatgaatgcttttacagggcagaaaagagtagcagcagtcatatttgccaaatctttgattttaactatccgcaggatgcatgaaagcagataaagagaagtgacaggatcaactgatatatcctgaaataaccacaaaatcaatactttagtgaactaaaaatagaactctggcaaaaagtcaaacctaacaagggtaacaaaaaaaaaaatcccaaaggaacaaataagtcaaccctgaaaataaaattaagaggaaaaggtgatatttggtacatttacagcctctgagcataaagacgggagaagaagtgggagagttagatgctgcagaatgtgatctgttatcagcctcccgatatcaggtatgccagcagagataacatcactaaagtagtacaaggtgtcctcaatcccatcaacggcagaaaacaattttccacctgaatccggagatgggcttctgtagcaaagattaaatgaaaatctttcagaatacaatttatccaaatcatacacaaacaaaataagtaggtagatgaaaaggggttgtgataacttattatcaattttacaagctatttccctgggaaatgaaattgcactgaatcttactttagagtgttcaagaccattgcacttagatccatgcattgcttttggaaaaatgaaattaattttgaaaagtactcggtgtgcggtggactaactacataatcattcacagattcatcgccaactgcaaaaaacaaattaaaggcatcagaaatgttgctaaaggttctgattacttttatcatacaagtgacaaatctaaagaactattagaagtgactgaccgtgatatacattaagagtcagggcacgaactgcagtgcgtatcatgttctcttcatgaaatgcaaattgtatgccttcgacataaagggggaaagaaactactacatcctagacgcagaaacgcagaattaaaataaggcagaaaaatccataaaggaatataaaagttaaaggaacatgaaacaacaagaatactcacgttctcggtcgtcaaaagcaacg

SEQ ID NO: 58853 - DNA, 1285 bp, Arabidopsis thaliana landsberg
tattaattcacatcatattcaagatttctggaatggtctcttaagattatatataggttacaaacaactcacaatatttaataatgacttgatttggcgttacacgttcttacataaagctaactccggatcaaactacgctgttttaaaactttattttcgtgcaagccatataccttgtccaagaagcaaagttaaattttaacccgacccgagtccataaacgttcggagccaaccttggcttaggatgtaccaccaaaggaaccgctctttgcagtgtaagcccataactctcctccatattcagcttctccggcgtaactcctccagctaattcccaatcaaatccttgaaccaacgtcgccgtaagaaactgaatcgtacgtaaccctaaacttaaaccggcacagattctcctcccagctccgaacggtattagctcgaaatcgcttcctttcacatcaacgccggatttttcaccaccgggtaagaatctctcgggtttaaatgctaacgggtcggaccattgatccgggtcacgggctatggcccatatgttcgtcaatagagtcgatcctttcgggatatggtagccgttgatctcacagctctctgacgcgatgtgtggtaacgagagtggtgttggtggatgaagcctgaaattctctttgataaccgcctgttttaaaccaaaaccggattaacaacaatagctcgctaaccaaaacaattccaaattccggtttgggttaacggtacctgaaggtaaggaagctgagcgatgtctgattcattaacaggcctgtcacggcccacaacaatatcaagttcttcttgggctttaaccatttatatccgggtgacggataagttcagctatagcccagtccaccgtacttgctgacgtgtcagttccagctgtgaacatgttctgtatttacaaccaaaaaaaacaatctaactttcattatatacgatttttaaggaaattaattgtcaaaaaactgaccaatagcaaggctttaatctcagtatccgttaagcttcctccgtcaccgtcaagatcagttcctttaagggagattaaagtgctaagcatatctgtatgcttttgatcttgaccgttcatttcgtgctctttcaaaatcgacgatagaaaagcgtcgaatcttttgtgaagccgtttcattttaccagcgacgccttgtaaatctaaccaatcaagtgacggcacgaaatctccgatgttaaatactccggcgagagccatcatttccgtcacc

SEQ ID NO: 58854 - DNA, 1025 bp, Arabidopsis thaliana landsberg
cctgacatgattcttgattcctttcttcaggcctgatacctttaactgctgtagccaatagacttgccgctcggtgtattctaccgcttctgctggcaggagttcttggtgcaccaagtaaacgcgaagaattaactatcttcttacgacaacttttagttgagagcaaaaccaaggaaaaccagtcatcgaagcacaacaacgaggttttggatgcagttcgcttcctttggtgcgttttctttagcttccactgtttattatggtttcctgaagctgcttcttcttaccgacgtactcctcaaacataacagcacatttgaggtacaccataacatgatattcggcattttgtgggaaatggtcgttgattccactgcagaactcaaaatcaacgctgctaagttgttgaagaccatcgtaagcttctcaacaacactacacactttcatttttcccccaattttttctaagaagctttgttatttacttgcgcaacaggttccatatatcgacgcaaaagttgcttccgccaatgttttaccagccttgatcactcttggctcggaccagaacctgaatgtgaagtacgcaagcatagatgcatttggatctgtagcacagcatttcaaagtcgacatggtaataatgcataataaactctggaattacgtaaggatcttttcttttatgcgctaattaaattgtatatgatgcagattgttgataaaatcctagtccagatggatgcttttatggaagatggatctcatgaggctataatcgcagtcattcgtgcactcttagttgctattcctcacacgacagaacggcttcgagattatcttttgtccaagattttacaactttcagcaagtccaagctcttcaacagacgtaaatcgtcgtcgagaaagagctaacgcattctgtgaagccattcgtgcactcgatgcaactggtaagagtatcaaaatcataactttcttcttcttcttcttcgatgtttcaatgttccaagttaca

SEQ ID NO: 58855 - DNA, 1105 bp, Arabidopsis thaliana landsberg
atcgaaaacaccaaagatgctaattgcctatatgacgactttccgttttatgctatatgtgattatgtaatttcatcagacaacagcttgttgattcagtagttctatcgattaagtaaagaaattggaaaaggggggaaaaaggtgggagaggtggacaaagaagttagggaagatgttgacgtcttatccataaatatcctccaaaaataatatccaatcagaccggtccccatcaccctcacaggtcttccttgccttcatttatctcttttccttttttctctctttctccatttcaatgcgaatatatatcacttccatttcattttattctttaagttattccatttagaaatttctagtttatagttttaagatgatttctactttgtttgattttacgaaatcaagttgggactaatcacattttggttatacattatccaaaaaaactaattttggactatcatatcaagttgtatacagaacaatgatataccaatttatatcctagagatatttttcagaaaatgccaaaaagaaacattgatttataatttatttgctatgtgaactacttataaacccaaaaaggagcattctttatttcaaacatgaaaagggtttctttggttgttcccaaaatgtgctttcatactcgaataaacataacaagcaaacaataaagaaagtagagtaatgcaaaagagcaaatcgcgctctttctgatacaactttaagagagttttaacattaaccattcaaacaaattacattaccttcttctccttctgaagtagctttgcatcccaaaaccgttaaaagttgttcgttcagattttatttccatggagaatcatagcaaattccctgcaaaaacatcaattttgtaagacaggtatagagcagaaagatagttacgtaaactaactgttcattacggctcaagttcttcaaatgcccaaagaaactagatacagagcagtctaccttgtcacaaatacattctaaaaggctgcgtaaactctagacctcagcttttaagtttgcaacagaagattaaaagagcaaggactggagatgcaaacctctggttaacaag

SEQ ID NO: 58856 - DNA, 771 bp, Arabidopsis thaliana landsberg
tcatctaatttagaaaccatttaaccccagcctgtagtatctctattatgttttcattaactagtagatgaaaaatataatatgtcgttttaaatttgtgcatactaattcaccaataaaaccatcgataattaagaacttagcaggagtgaattcaagagagattaatggttttatacaacgaaattaatggtataacatagttattcccaataagaaggatttcaaatttcaaaactgagttaatatgggctgttctgaggctgttccctaatctccataaaaccagcatgatgagatcaaatatctactatcagcgcttaacaagttgttaataacaacggcataaaccatagcattatggaaagtcccttctccgtgatctttcggttatgcgatcaaaaaggaacatttttgtaattacacaaattttaacgtaatgttttctcatgtactgaattctcaaatgaaaaaaaaagtaatcaataccacaatctttacacacattcatcaattgaatttgaaatcaatatggtctagctccaatgtaattgcctgcggggtcatagttacacacaacaatactggcaccattattacacttagccttaccacaaccgagacgagctgagccacgccacacgacctgcgtgtagtgtccacaagccggaccatggcacgagtttgagtaaaaatcatagtacgacttctcatgtacccacatcgcaaccgcctgagcggccgacatgtctccactgccaaatgcaagat

SEQ ID NO: 58857 - DNA, 305 bp, Arabidopsis thaliana landsberg
tctgttttcggacagagggcttgaggcgcgcgggaggggaggatatcttcatccgagggaggcctaacacagggaccatagaaggtgcactaggtcagtctccaaaggccggtcaccgagcgggcgcggaaaaccgacacggggaaactccagcgaagacgaaattggccgaaaacatagcgtatctggggaaaatgagcacggaaacgggcgtgtcaccttctggtggagctcggggcggattggcatggcctccggtgaggtagatggcctgggcaacctacacgtgaatgggggggggggcg

SEQ ID NO: 58858 - DNA, 1291 bp, Arabidopsis thaliana landsberg
atatggttgctagaatggtatgattcttccttttgctgattagagttgcattggtggaatgatgtagtggtacattgacagtatgtggttgattatcacatgatgttgttcttctagttgatcgagcgctttaacgggaggttgcctggatatattggctctggaacggatagatactccttcagccatgttgatgatgttgtggagggtcatgttgctgcaatggaaaaaggtaggcttggtgaaagatacttactcactggggaaaatgcttctttcaagcttgtctttgacatggctgcactgattactggaaccaaaaagccaaactttagcattccattatgggccatcaacgcatacggatggttatctgttttaatctctcgggttacaggaaagcttccacttatcagtcctccggtgagtttcaattgcattcattagttgcccacatattatagattatcttattaggtatagaataatctcaactcttagtattttgtgatgaacagacagtgacagtgctgagacatcagtggtcatactcttgtgataaggctaagctggaacttggttataaccctcgaagcctaaaggaaggattggaggagatgctcccttggttgaagagtctgggcgtcattcactactgaaattcaaatttcccatctttcaggtatttccaagaataatattcccttaattcagtcactatgatgagtgatgactacatttttacttctcccgttacacttttaacccaatcgatttttatcttgttacaaaactgcttcgttttgatcgtgtatgtcaaataaatgtgaaacattgtgtgcaaatgctgatgatcatattttaagatgttgagctacgtgtgagagtaggaaagagggaatatgtaaatgtgggaaataatcacattttatctgccaagaactatatgattacatctataacatatatgatcagaagataaatactaagtatccatataatttgttcatgatggttttgatcttttaggatatccactttattgtagctgcatggccgttggtagtcaatcttcttttcagtttatgctgttcagtgttcacaaaacaaattaaataggtcaattagaggattatgtagttagaagctctcacaactacacatgtttcggcaatattaaaaagaaactgcagtagctacctgttacagtccacagtcttagagaaagggactcctatattaacaccacatttagcagggagttgtttggcaaaatcatcattaattccag

SEQ ID NO: 58859 - DNA, 1494 bp, Arabidopsis thaliana landsberg
atgttgagtcccaatcatttcagtttcaacgatggatactcgtttgaccaataacaaaaaggttttccatgctcatttctctacctccatttttgtttgcttttagcataaaaacagctagaatgtgagtttcatatgtattatatactataagaaatcatataaattaacgactagaacatattgttttcattctagtggtatatctgagtttgactagaacgtttggaggcagattaaagtgatttcgccttgtcaaaactactttgtatatgttatcaatcaatcgctcaaaactaaatcggaaaaaaactacataaataagatatggaaaatgatactaacacaaactagtaagtaagtagtcactacatattctggtcccatgaatatggcttacatagtacatacattgtgagattaaatgaatatgatatataatacaagcatataagcatgtgcatgactatgaagtgggaatacatttagtgcctttatatgcaacttgacagaattaccaattatgtgaatagtgaaacttatattgcgtcttggccttttcacatccgtgacatgatccctcaaatctatatcttcttgcggcatatgcttatatataaacatatgacttcgtctatagatttatatccagataattaattctctcataatatcttctccacaatttcaactcttctaaagtctaaaccatgaagttactctcaaagacctttttgatattaactctcaccttcttcttctttggcattgcactagcgaaacagagctttgaaccagagatcgaagctttgaaatccttcaagaatggtatttccaacgaccctttaggagtattatcagattggaccatcatcggttcgttacgacactgtaattggaccggaatcacctgcgatagtaccggacatgtagtctcggtttccttgctggagaagcaacttgaaggtgttctgtctccagccatagcgaatctcacctatctccaggttcttgatctcacttcaaatagttttaccggcaaaataccggctgaaataggaaagttaaccgagcttaaccagcttattctgtacctaaactatttctctggttcgattccttctggaatctgggagcttaagaatattttctatcttgatcttagaaataatttgttgtccggtgatgttcctgaggaaatctgcaaaaccagttctttggtattgattgggtttgattacaacaacttaaccgggaaaataccagaatgcttaggagatttggttcatctccaaatgtttgtagcagctggtaaccatttaactggttcgattccggtatcaattggtactctggctaatttaacggatttagacctgagtggtaaccagttaaccggaaaaataccgagagattttggaaatctcttgaacttacagtctctcgttttaactgaaaactgtttgaaggagaaatccagctgagatcgaaact

SEQ ID NO: 58860 - DNA, 1306 bp, Arabidopsis thaliana landsberg
  unsure (1)..(1306): unsure at all n locations
gttgtcttgttttcataaggccaattccaatcacggaatatcacaagtctgtacatttctcagaatttaaaaatcaaagtacatccccaacagtgtcgacgaaaactatatttacgaaacaagacaactttacatgtggtgctgaaaactataatactaataatagtccgagtatatatcgtttatcaatgactcaatgtataacttatgcatgaactagtggtaatttgatgaatagtataaatgagaatcgcgggataacaatactctaaagagaacagaagtcacctttttcagttacctcaattttagaaatttttcatatttttttttacggacaatgatatatcaaaatcaaactggaattgataggtcagtgatctaacttcatgtccttagatctcactgtgttggttcaaatttctatataagaagttaaaaaggcctaaatccactagagttgttgacaacaaaatagcagagccgatttttttccatacaagtttctccatatagaaaactatttctcttttgaaaatactcgtatccctttaaacaataattcagtttaacgaaaatgtaaggaggcggatttttgggaagcatgaaatgcttttttttttctttaacaaatgttcaataaagaacctttctgatataaaagtaaaaaccattgtgggccatatcttacttccactaacattattccaaagttataaaaatatatctgtcccaagatttttttcctcttgtccaatcaaaatatgcatattaacacattactctctcttattcgtggaatctaattattccctttcaaaaattagaatagctaaaaaaaggaagaaacaaaagctccttttctccataattaaatcacctttctccttctctgaatcaatgaagacaatacttacattatagatccctacattcttctctaacgaataacttaacatctatctttcatacataacatctattcttctctgaatcaatgtttatactctttagagggaacggaacactcgtctgcacacttcttcttcgagacctgctgctggactgattatggagataaagaatcttattcgcactcatcttgatcctctctcacgagctcaannnnnnnnnnnnnnnnntttatcgtacctcgccacttggttcggtctctttatttgatcatgtgctctgttttacttttctttgttgtttcgtaggtgttactcgttttggaggcactgtgtattcgatttcgttttataaatgaaggtaatgttaaaaaaaaaaaaaaaaaaataaaaaa

SEQ ID NO: 58861 - DNA, 1249 bp, Arabidopsis thaliana landsberg
gtcctcgaaccgcatcccactgcacattcaagaaccgacaatcgggaaagattgcgagagaattaatgtttcagattcagaataagaagtatatgttactttacttgagctgcttcgatctctaagtcctgtttttgaatatcgaaggaggtaggtctcaagagacaaacgaagaataaatctgactttgcaaaaaatgactcgtgggtttggctgcaaacagaaggcttaaaggataagaacgtgaaagtatcaagaaacaatatatgaagcagactagcagaggatatgacgatgattcgtaccagaaagctagaatctccaaaaactcagtgtcgatctgaagataaatgtatgaaaacgttaggttatatatattgatggttgactgatttacattaagatatatggatcttcttacgcctgtttcttcttttacttctctaatggctgcggcgaaaatctcctcaccctagacgcaagaaaataaaatattaaagatgaaatcttcagcaaacatataaagtgggattgaaaacttgttgctacatgcagataacacatacctcgtcaacaactcctgttgggatcttccagatacctgatccgcataatgaaccgtatttttcctgcaccacaagaatctgcctctagttgtaattttaagatgcaaatgctggaatatggagtacattttccttaccattctaggatgattagaatattatgacttggaaatacaaaaataaacaatataatggtgtcctatctcctaagtacctctttgttatggttcaagacaacagcacctacacgaacacgatgggaagcattcaaaggaatagtactctcggcttccggaatccaataaactagcatcaggtaagttggctcagcatggtgataccggaaaccttcctgcatgcacaaattatttatgggaccagtttgttcatccctcaatgtaataatacatggggatatgcagctataacttggtatatcaactatacatcccattaacctaaatatgtcaaacccaaaaagattttctttttaaaaacaaaactaaaatatgtccatggtacaaaagagattcatcttaatactaatattagcaatagataagacaatgacatctaattaacaaaagatgataattaagtaacgttaatatgcaagacttaggaatcaaatttaatctgatatgtgaccttaaccggggttccacgaggtttacgtgtgagag

SEQ ID NO: 58862 - DNA, 1461 bp, Arabidopsis thaliana landsberg
acggtttatgtatggatgatggttcacagtcatgttagctaatggtggtttgtgtcttggaacttttttatctcaactatatcttcttccatctcaatatggcatggactccttcacatctcaatatctctcagcaggataattcttatttccaaatataccaattcaacagaacacgactgcgtggtttttgaagtatgaaagtgaaacaactaaataagccatttattaatataaaaatctacagagaaattatatgaaaagaagaaacaagtttctgtgtccaaacctatggttataacatgatacattgagtgagacagagaaaagaaagatacagttccacagtagtataaaaaggccgtatagaaggaaaaaaaactccctaagtctgtctccttgtgacccaagaaatcgagtgtaagcttcttggagtcttcttgccagtaatgttatcagagaggaggatgatcttcttctggtgtctgtggtggaaccggtttccaaccaggtttctcgtcccaatacatatcccagtaaatgtgtcctggagtcttgttctcctcacaacaccatattcccacatatctctttacccgtcttctaaatctttcttctcgctcctgcttgcaaacccgattcggtcaggtcagatttacatggtgtatcaacatgtctaaatgttttcacggtttaaatatctacttgccttgtcagagaatccgatgaaagcatcttcaattgaagaaaacttgatcactttgacatcgtcgaaggaagagaatatcgccttaaactgcggtgagcacaaaacaaggcgataaggctaagccagcgattttgaaatataacaaagagtgatagatagctaatgaaatcttagttaccgtatcttcattgctccgctttgggaacttaagaacccgagaggggctagtgttatttgatgcctcgcatccttcttttccttcttgacaaagctgaacatcaagccatgactctttcacctgaaaaatattttcactcctgacattttttctatgaaatgattaattagaaaaatatatctgggcggctatattacttgttttggcagcaatgggttatctagaaaagaatactctctgataccaatcccagggccaaactcttcctctggtagctccttaagcatgatattgacctgtaattgaaattattcagctgttatgagtcatttgcagaggaagaatcagatattgacatgttacaacatcattacaaatactacctcaaagacatgatcaagtgggcagatgaaaggttgtcgggtcatagatccctgaagagtaccaggatgcccaaaccaaagcctatctaacctgcaccatattggtggcatcacctgataacattgtagagaccaaccagctatatataagaatcaatcattatcaccaggaaatatgcattaagctgttg

SEQ ID NO: 58863 - DNA, 507 bp, Arabidopsis thaliana landsberg
agtacatcgattaagtagctagctacttccatttccaattttgtctaagctgaagaacatatttttctaagcacgtgtcgtctttttgaaaatatcgactaatcttgatgtaagttccttcttggtttaaaataagaaggatacacaaaacaaactcaccttatggttaaaaacacaaagttaataattattattattattagaccaaaatccataaacgaatatagctggtgtttgcaaccagctaaaatatgaatattagggaacaccaaacttaaggatgatcgattacttgttttatacatacttttaaaaagtgctaatctaagacagcattaatattgaatcttttcaaagttattgtatgtactattttctgaactgaaaagttcaaaaatgaaatatgaaggtacaatatagcctaaaaacaatgaatagaaaggagtatgttctatgttttctttagtgtaaataatattaagatattttaagaataattaagctaat

SEQ ID NO: 58864 - DNA, 471 bp, Arabidopsis thaliana landsberg
taaaacttactagtagtgtattcctctaaattactgttattattgactgcatacttcaaaatccgatttcaaatcggcataatatattttatggataaaaaaccacaaaaaatgtttttatttgttgaattttcaaaattagaatttattattttgatcttaggactagttggctcgtagattttttctacgatactgatttttgttgtgtttttcggatctaactgtatgaaaataataatagtatgtcttaatatatatctatgtccacatgctaacaccaaattttaataacttcgttggtcagatttataatttaaaatcttttataatgaaaaaaactgtagaagtgtattggtgtgattaataacagtgtcaatgtgaactggctgatgtaatgttaaattagcggtccatttaagcattgtcccatttcctcgtgcatagtttgaagctgatgcctacatttgg

SEQ ID NO: 58865 - DNA, 422 bp, Arabidopsis thaliana landsberg
cacctcagtcttaattgagcaagaggttcttcaaagatcgataggttagtgctaataaagtttctttatagttagttattgcatatttaaagtacaaaatagcatactcgaacacgtacgtggcacatacgaaaacctttcagttatgcgatatgactcgtctttgaatgtctaaaatgcttataatcatattcctacaatcttaaaacatctcttttctgtaaacaaatagtcttttcgattaaatatcttgagacacagagatacatcatgtctcgtgatgttatatttgatgaatttttctcatataattggccacctcctcagtcttaattgagcaagaagctcttcaaagatcgataggttagtgctaacaaagttctttattagttattgcatatttaaagtaaaaacagtacact

SEQ ID NO: 58866 - DNA, 251 bp, Arabidopsis thaliana landsberg
ccacgatgataatacttacgataatccatcaccatccatagtgaacatcttaagtcctaagtgcactagtgcctaacactcttaatttcaacacatttagaaataatgttcctcaatttctttcccctttttatcttcttaggtttttccatccttgagctgattgtcctcttatcaggggggggatcatacacaaccataaaataatattcgtgactactgacagtatctaaacaacatattactttctc

SEQ ID NO: 58867 - DNA, 203 bp, Arabidopsis thaliana landsberg
cattaaacacggggtcacggggagaatttaagagaataccacctaactcaccaaataacaggggtaatgctggattaacacaatctcatcaatgtaagcgatattcacaagaatatcaagaacgtacattctaaatacataaatccctaattcccaaataactttaaaaaatctaaaatccacaatcatccttacaaataaac

SEQ ID NO: 58868 - DNA, 1274 bp, Arabidopsis thaliana landsberg
  unsure (1)..(1274): unsure at all n locations
ctttcgtacaaactttaacttatttgtagacaaattagagtaaataaaatatgatttatgtttaataatccgtacgtgtaatagaactctctccgagaagaatctttgtaagatcctcctgggatggaaatagcagatcccatcgtctttggtggtttcaatggtctcttctcttcatcttcctcatccttaacaaaaaaaaaaaccctcattatgataatcaacacctaaaaatgtaatcaactcttataattattaccttttgacaaatcttggtacgtctatgtctacaaagtttgtagatgtaatcgtagtaaatagtctggatcaccaatactacagtgctcactgtgtaaagctatagagagaggaaaaaaaaatagttacggggctgatttgtaaatagaataaaataaagcggtcgaataaaataaataaatccgaacaattgacgctaattttaatagaagcgacacgtaagctttgtagcgacatatgtttatttatgcggcgagaagacggtgatgttaccaaggctgtgtagaactgagtcggcaactacacaattcaaaataagataaacaatgagaaaacaataataagacatgaaaataattatgtactatagatgttttgtgtatcttacagtagctggttcaagaagacaaccgacgagattgaagatatcactgcaccgattgataaaattcatataaaataacgttagggaaagagagagattatgataacaaagaagaacttgagatggtgtacggacccggcgacccaagcgaggaggaaggagagagagacaccgttacttgactttgtacggaagttagtgatgacctgaggaatctctgcgactccccaacagaggaggctagcgattccaagtgcgaatgaaacgtcgtcgtttaagttacagagacagtcatcgaagtatatctctacccatctcacgcatgtcttcttctccttcaagcagtaacctaaagacaccatatgtctctttgtttaggtcttctctctctatatatgttatatatgtcttactctgtctgtgtgtatgtctctctccctcggaggttcttgattattttataggattatgggtgaggaaaatgacaaatcataaggagataggggagagagatatctgtaaatacatgtattcattcatatacttgggaccatttattttacttcgtatattntacccaccatatctaagcttgttacgttatactttattngtatgttttcgaatcatt

SEQ ID NO: 58869 - DNA, 597 bp, Arabidopsis thaliana landsberg
atttcttgtgatatgcacgggtaaaaaccgataaagttttctttcgatatgtaaattaatctgtgttgtgatctttacttgacctgacatttgttattttgaaacaggactagagctgttcaaaagatagttgaaacggctaagagagaggaggagatttcaatcatcatttctgctttgaagcatggcattgtgcatttgataaagaatgtaaacggtaatcacgttgtacaacgatgtttgcagtatctgttaccttactgcggaaaggtaacaactttctttaccgttttcatgaaacatcaactgttatgaaaatgggttttcatcttatttggttttctcttcagttccttttcgaagctgcgattactcattgtgttgagcttgcaactgatagacatggatgttgtgtacttcaaaaatgtcttggatattcagaaggcgaacaaaagcaacatttagtctctgaaattgcgtccaatgctctactcctctctcaagatccttttgggtattttttgtgatccctctctgtctctctttgagcttttatctagttattggaataatacagaatagatgccaacttttttt

SEQ ID NO: 58870 - DNA, 499 bp, Arabidopsis thaliana landsberg
atatgagttatttattgacatggcaggtttcgaaatgtagaattcgtttcacgctgacttttgcagaagtgatccatttgtttcgtactcgtacatatacgataacaaatactatcctatcatgcactaaaaaggtttagttctttggttcctaatgccaattaagtattaattttaagactctattatatactatagtctatggatgatgacttattgcagccgtaattgtatattctggctataagttcgtaaactgtaaattatacacattgtatctcatattccataatggattatgtaatatggtttagcataaaccgtgcctcaacaagtaggatgagattatatgcgcatgggtatcggaattgaaaaaacaagcaaattgtattggcaacactaatttagaaaaatttaagtctccattttacttgatatttatcattaaacagattctacgaatctaaccaaaacttctccaaaaaggataaacctcaaa

SEQ ID NO: 58871 - DNA, 556 bp, Arabidopsis thaliana landsberg
  unsure (1)..(556): unsure at all n locations
ttatattcagatggtacggacctacattnnnnnnnnnnnnnnnnnnnnnnnnnnnnnnnnnnnnnnnnnnnnnnnnnnnnnnnnnnnnnnnnnnnnnnnnnnnnnnnnnnnnnnnnnnnnnnnnnnnnntccgcagtgctgaattaaaggtgcaccatgtacctcccgttgcagttgttgtatgtgctttaatattagtagcacgtttaggttttgagtttggtccagtgttaagatttattttggttggcagaccataaaatagtgttaggatgttacttaagatcacttctagtaaaaaattatataacattatttctaatataggataaaataaaacatagatgaagcacctacatttaatacaatgttttattgtctgtatcatagacaatttaatgactcgtgaagaattattaatcacgccaaaggagataaaactcacttgtgatctctttctttaaaacatgatcatatctttaaaaaaccatctatatgggagcctattnaatacaaatgaaattaaatagactccaatagactagtcttaggaaag

SEQ ID NO: 58872 - DNA, 545 bp, Arabidopsis thaliana landsberg
  unsure (1)..(545): unsure at all n locations
cgctgcatcgctgggaccggcattggggctggccggcgattccgccggcggtggtctggcgctcgcctgtgcgctgcagattcgcgatgccgggctgccgatgccggccggcattgcgctgttctcgccgtgggtcgatctgagtctcagcggcgagacgatcgtcagccgcgccggcagcgagctgatcctcgatccgcagatgctgggcgaagccgccgccgcctatctcgccggccagccggcgcagactgcactggcctcgccgctgttcgccgatctgcgcggtctgccgccgctgctggtgcaggtgaccgacaccgaactgctgtacgacgacgcgcgccggctcgccgagcgtgccggtgccgccggtggtcgaagtcgaatacaagggtgtggcgcggcctgtggcacgtctggcaatgtgttcgccggcaaggtgccggaggccgacgcggcgctgcgcgaggcggcgaattncatcgtgcggcagacacgcagctaggtcggctccatgagtctcagtcgctggcgcgataccg

SEQ ID NO: 58873 - DNA, 410 bp, Arabidopsis thaliana landsberg
tttattcagatgaagccctgacccccggggtcaagggctaccaagcgcaagtcgtgaagaacgcccaggtcgtggccgagaccctgaccgcccgcggtctgcgcattgtctccggccgcaccgagagccacgtcatgctggtggacctgcgtgccaagggcatcaccggcaaggccgcagaagccgcgctgggtgccgcccacatcaccatcaacaagaactccatccccaacgaccccgaaaagcccatggtgaccagcggtatccgcgtcggtacccccgccatgaccacccggggtttcaaggaagaggaagccctcatcaccgccaacctagtggccgacgtgctggacaaccccaacgacgaagccaacctggcgcgcgtgcgtgccgaagtggccaagctgacc

SEQ ID NO: 58874 - DNA, 1905 bp, Arabidopsis thaliana landsberg
ttatgggctacaatacaggggcctgttttattcattgttgctgaatctccttgatctacatagtttacatacaaagcaagcccaagtctattagagtatgccctaataaagttgcattccaaagcctctatgagtttacgagactgccgaaacccaaaagtgtaaacgccaaagacagacttttttgattaatgaaaaagatatcagaagctgtcatatccacccttagaaaacacacttgtacatcaaattggttatgcaaagaagactaaaaaaggagaatcccaaataaccaaagagaaagtttgatcgacagataataatatgccgatgcaaacttgtgagagtagtaagccaattcctcttaaaaaacgaggcaaaaggcttaatagttgcacacatccatctacactgaaccccaaatcatcatcaaattcaaaatcatatataaaagcatgatgatgatgatgatgagatcctatctaatccctcatctttggatgttcttcccttcttaacatttgctttctgtctcgagaaatctctaaagacgtcgcatgccatctgttttgctctgcattgttttgaacagaatgcccccaagtatctgccagatggttgcaacaaggattttcacaaatgaaaaccatagtaacaatacacacaaagaatccctaacaatgatatatctaagcagagaggaaaagaagcaaaaaactgacccgtacatgaaaacgtcctcgtcatgacgtagattcttcttgcagaaacgacatagctcaaggaagttagtgagctgaacttgagccttgtctttctctgccggcaaccaatccgaagaacctacgtactttggatgcttctcagagaagcttggggctcgcggtctcttgctcggaatcattatattcgccatcccttgagagagggatttcggaggaggaggcaattagagtgaaattagggttttctgatttttgttttttgttataaggaagtgagaaagtctagaaagtgagaaaaatacatcaaggagagagcctctctatattgacacgcattgtaggaaccatagtggatttcttacgtggaccaataataaatcagaaaaaatagacacgtcatcaaaactaattaattatatttattttttagtcttttgaatacaagatttcttaccttaatatattagatttctttaatgggctttgtagccttttaagttttgaaaaatgccacgtttccctaattctgaagcatattcctattttcatttttgtgttattattcatctatgcattttggaaatttattcaatttgtgtttgtcttaattacattagatggtagtattcaagaacaaagtatattggtcatgttaagattttaatattcaaaagatcaaaattggttgactaaaaaacttttgactaaaaaactaaaccaaaattttactttcaaatacaataattaaaacttgcagcgtatcttagactagagactcaacaattctaagttgtaacacacatcgggtagcttaataattacttttccaattcattcttattcaactatatctattgttgcactattataatcgccctcatgttaccatcaaaactcacaaagattttatatataatagcatatatgtcaatacgattatgaggtaaaaaagactgaaattaacatttttgtttaaaaatttgatgaagttgccaaaatagacatattaggatcagagaatattcaaatcgacataagtatgtattcttctaaacttggtgacaatttctcacacatgtgttgatgaaaagaaaaccatttggtatttttgggtggaaagcaacatccccaaataaagaacaattaaaagggcccggtactggggggaaaaaatcattaa

SEQ ID NO: 58875 - DNA, 446 bp, Arabidopsis thaliana landsberg
tttcaagcgaaacatttaatatgggccctagtagggggcccattatgtatttaaaaaaatatatttaaatgagataatttactaacattttatttagggccatattagttagcccattatacatttttccaggcccacgttagcttcttattcaacttaagaagtgtattaatccatcactggtccaaaagctctaggacgaacacttgatctccaagcaagcaataagatctccaagcaagcaataaaaatcatcaacaagataatcacagtaacacctttttattcaatacagtagtgttaaataaaatctttctaggtaacggttacattatattttcatgttttaattttgtaaaaaaacttttatgaattattttttagtggcaagcctttccttaatcttatcaaccatcttagatcccacttgaaaagtcttagttaac

SEQ ID NO: 58876 - DNA, 1280 bp, Arabidopsis thaliana landsberg
caatttttcttttcttccccaatttgttttaaccagtttcttctttggcaaaaatgccaagtatattgggcttaaacaatgaactaataattatgaaggcccacaagggcccaataattctcatttccggtcgtatcacggcacctacatgaagcaaatggagaagaaaccgaatgtcacgttcccaacatttttatttctattttcaattcaaaatttaccttctaaaggctgtgatttactttgaccaaggtaaagttcaaatcatcaaagactaaattcgtattacaaatattttttttttgtgaaagaaatcaaattacaatgtaacgatgagatcaatatagaaaaggtttgaacaacaattctttctagctctctcagtccacaaatattacatttattcattgctccccgaaatacaagatatattgaattggaaaaaggcttgatgatgttgatatgatataaggacataccaaaaatatattaattaaccggtgtttaatatagatcatgaatagaggatcgatcttatattattttaaagagattgatatagatcgatgtagtctattcaagcggcgtaacagccaaggtaattgtaaatgggttcaagagtcagatccagattgttcctcctcatcgccgtttggtcttctccttggtacaaaccactgaaattacaatcatatatagcaaattaaaatcataatacaataatatgcatgcatatccatcaacctctaacgccatacctaacacaaaccctatatatgaagtgcattcactatcattgcctatatgactgactgacaacacttcactatatatgagaatttgacattatggtaagaaaaaagaacttaaaaaaacaagaaatactgccgttaccccatatttaggaaaggagaagtctgatgagcgatcatgtaaagatgggggtgttgaaatggttgtggctgtggtacatcgtcgacgctgcggttcagctgctcacattgggtttgttttgtctttaggatgttttccctctcctttatctataccgattacacacgccaagaaaatgatataagcatcatcgttatatagattcccatttgcaactaatcagctatttgcatttattcaaggaacttcaattttttattcttatacttttttttgtaatatgatattttcaaacaaaatgcaaagtaataattaaatctgcaaaatattaagcgaattttagcgtcgtcaaggtcttactattgtgatatcttttcatttaatat

SEQ ID NO: 58877 - DNA, 837 bp, Arabidopsis thaliana landsberg
ctctcttattttctttatattagtcatctaatacaatcactacatttcttttggctttcctctcttcctccttcctgaacttgatcccacaagcattgcataaactctgaaacacatttaccaatttaaaaattaataataattattaagcagcataattaatatttaaacatgatttattagttgaaaattcggagactaattaccttaggaccaagaggacctcttcgccacataggagtgttaagtgcgttacaattcatgttcgtacacttcttcatcccttcaatcctccccccgcagaatccaccacaaccgcgaatccgcttcggggttgcgttttccttccaagagtttgtcatcaccgtagagttgttacgacgagctctcctagcaggaacatcaatcagaacatactcatcactcactggaggagtctcaggtgccggtgccggagacggaggcatcggataaggagcaaagttcaaggtgttgggggcaccaacaaactgttgaaagacgtaattgtagattctgatgttgaactccacgttgtttcttgtaggttcgttgtggatcacttcatcatctcccaaaagaccccgacggtggtttataacttctccgccgtccacgacgttggttccctatatttgtttgttacactagtaattaatgcatattttatgtaatatttgtccgtatgtaggaattaattgtaaaaagaagatgatgataaggttccaatgtttttttcctccaattagtgtttaaacctttaaaaagacagtgggattagcgttttttaagagagatttttaataatttaataatacg

SEQ ID NO: 58878 - DNA, 936 bp, Arabidopsis thaliana landsberg
aagacaaggcatggtttatgagtgattgcagactgaccagttttgcttttacggacagagcatgcttcctctctttcaatgacattgttcctccaatctccaccttcacctgcaacaacaacataaagagaaactcgttaaaagctcttctcttctcacattccctagatggtcatccctattagtacttactagagatttaacaaacttataattaaagctaagcctaaaaatataaatgtcttgagttttttttttctttcttacctctgtccaagtcgtctgcgtgaaaatcttctgatttgctcttgatgttgagccatttcttgaccaacgttttgggccatgacagctgcagcagaaacaatttaaggagatttagatagagatcatcttaggagataacatcataatcaattgagagagatagagaaaacaaaaccttgcttttcttgaggttaccatcacccattgttcttcagcttcatacagagatggatagatctctgattcacaattcaatctttttgtaaaaaaagtcaatataagcctcccctgaaccgaagaagacccaagaggatggttgacgaatttagaagaggtcaatgtgagaccacttcttcttataaacagaggaggaggttaagggattctcactcttcctatcctatattcctatgcaggaacaaggaacctcgtttcagaccaaactgcttgttgttgctttgctgtttgtttgtttctttgaacgccaaatccaagaaggggcaaaagaaagacaacaactttggaacccgagttcagagagatgggtattcgggtacagcccggattttcctcttcctttcttcatcttcttcatgcttcttgttttctgaaatgtatccgtactctcgctctctctctccttctgtgtctaaaagaagaagcggatca

SEQ ID NO: 58879 - DNA, 187 bp, Arabidopsis thaliana landsberg
attttataattaacacgtggaaaaacaaaagtattctgttgaaacactaatatgcacttgggcctataattaacactacactacacgctaaccaaactaaacgaaacatatcgatttacgtctttaacctctcttttgtcaccagaaggaaaaaactttaatcatggacaaatgcttatagccacaa

SEQ ID NO: 58880 - DNA, 535 bp, Arabidopsis thaliana landsberg
gaatatttaatttactggtatggaatttctaaatatctataatttcttcatattaatttatgatataatattttagtatttacataatttttttatctgataattatatttccagtcatctttcttttatttgtaaaaaaaaatcatcacatcatttatataataacagtatagttttttttaataatattgtaaatttatacataatactagaaatattcaaaataaaaaacttaacttaatgtgtatatatcttatactttaagaatatatgtgttagtctacaatacccacattcatatggtgaaatgggttaggatttaatgtttagggtgtcctttgcgtctttgcggcttgaactgccaagtcatgctaatcctagtccgatgcaagacacattaattgaagttagaccatgttgacactcataaaagtacaaatacattaatgtaaaaacagtcgcttatatgattatatatgagactataaaatctgcacggttattatgagatcagtattggactaacttatactt

SEQ ID NO: 58881 - DNA, 621 bp, Arabidopsis thaliana landsberg
  unsure (1)..(621): unsure at all n locations
actcgtgaatgaggaaaacaacatgcgtatctccggtttaaaaagcgttttaatgacgttgaaagcagatatacaaagccaaaacataaaatttccttcctttttttgttgaaagcaacatttattattttttgtacttattcactataaaatgatatttttccattgaagaaaattcaataaagaaatttttttctataaaaaaccaattcaactgtattagagctataattaaaacagaatccttattttcaataaaataaatcttccgaatccagctaaagttccatttttattagctgtcacaatttttttaattgaatttttaacattttgggacttcaaactacccaacaattgtaaatcagtggtctttttctccttgaacttttttttggtataaaccttttttccttaaagttgctaaatccttttatccatggaggcactgaaaagtgggttatatgcattatttatcgtttaagccttaatttggtatatatatttttcctttaactgagctacaatatatttagtggtttttctttgttgataacgtctntattttttctatactttattaatattaagactatcctgtccactcaagttttgcatttg

SEQ ID NO: 58882 - DNA, 332 bp, Arabidopsis thaliana landsberg
  unsure (1)..(332): unsure at all n locations
tacatatgatatatggggggtgggtgagattacttttagactaaatattttggttttgagtatagaaataaaatgtaggaaagtgatgctgacctannnnnnnnnnnnnnnnnnnnnnnnnnnnnnnnnnnnnnnnnnnnnnnnnnnnnnnnnnnnnnnnnnnnnntaaacgatttatatacaatggcgacttcaaatttaaattacgacgtaccatgtgcattaacacacatacatccacacatattcgctgtatattaataaaagggacatgtcatatggagcataccaaagccggcatgaaagccactactatctttgcgttcgttaga

SEQ ID NO: 58883 - DNA, 132 bp, Arabidopsis thaliana landsberg
ctttgtatgagacttcattgttattgcttcattctaatatgatattgacctgatgaacttgtgattatcacatatgcatggtccataaacttgggtatggaaactgggatgacctaacggcatcgtttctga

SEQ ID NO: 58884 - DNA, 531 bp, Arabidopsis thaliana landsberg
  unsure (1)..(531): unsure at all n locations
agtcttgggaagctaggggatcagtgactttgtcctctgtaccatggagaacaaagaaaggcactgtaacagatttgaagttccgggtcaagtaagccgttatgcgaagaatctcataccctgttcggactctaatcggaccagtgtagactaacggatcagagtacttggctaagagagcttcagggtctcttgagaccggaatgcctctcttgtttgctcctttgaattggaaccttggtgcgagcaatgagaagattggagctattgcctacaatgaaacatagagttaatgatacctactaaattctccagccgaaaatgagaaaaccatctaacttaaatactgcaaaggagacgacttaccccgacaatgggatgagcgggtttgacacggagtgcaggcgatgttaggacaataccggctaacatatcttcaatagagggagatgaagctgcctatataacacanggtagaccataaatcaggacattgtaaacaacagaaccttaaagagagcttcatgggta

SEQ ID NO: 58885 - DNA, 479 bp, Arabidopsis thaliana landsberg
  unsure (1)..(479): unsure at all n locations
gtggcccttcgtaatgggggggccgacatgcttaggctggcggcaatcgcggtgggagggatgtgggcgatggcggcgcgcttgcggcggagctagccggcgaggaagacgagagcgacggcggcaccaaggactgcggagacgagagcgaggacgcgagtgagaccgccatctggccttggcttgctgcagcaggcgccaggctgtggcgaggagggcttcccgtgctgccgcttccagtcgtcgccttctcagagggattttannnnnnnnnnnnnnnnnnnnnnnnnnnnnnnnnnnnnnnnnnnatcgcacgatccaagtctttcatttcattcgccagctaggctataaataaaggtaacgaagcatcgatccgatgctgcttccactacccctctctctctctctctcaccggatcggattctcacaccacaatgcaacaacctagctgggactgggactgggactccgagct

SEQ ID NO: 58886 - DNA, 660 bp, Arabidopsis thaliana landsberg
  unsure (1)..(660): unsure at all n locations
tataagaactcgtcgtcttcactcaggtctgtctcttgcaactctggctcttttcttagcggacaagcagagcctttgggacctttcatgtgccagtctccaatggcacgtgcaactgatagttgcccgttgaggtaaccgtcatacacaactccacctaacttttctattcttactttctcggctgtgcagtttggtttgtgatctttggacaactcaattgccctacctcttctccccagtactgctcggcaatcaccagcatttgcaattatcaacctcctgtaaagaaagaaagtagcaattctattcaaaatcacatcaaaactacaaagaaacatggtaaaacagcccgttacataagtctttacactaagccttattctctatcttatacacacaggcaacctgataagtattgatgattatacaggtgataacatatatagcttcccaagttcataaatacgaatttaaatgctcttaccgtccaaaaataaaagctgtaagcgccagtggtcccagaagaagatgtcaagagaagaatcatctgcaaattcataatcagcttttaagaaagcactcttaattgctttctttacgcatagtgngaagggggagtcctctacaatgaatctcagaatgttctttctaacaagt

SEQ ID NO: 58887 - DNA, 937 bp, Arabidopsis thaliana landsberg
atcttcttcactttcttcatttgttgagtctgctacaagatcaatgttctgttgattttgggtatttgatcaaaatctgaaagggatcttgtggaagtaaggttgctgtagttgtcaaggtctttggtgaagtttgtttctcacaaagtttgatccttgaagttggtctctattgatcttagatctagtgtgaataaaggaagtccttggaaagcagcagacttgaaaacgctatcacaagaggaattgcttcctgaagagactgtctggattgctgatagatttatatgattcagagaagaactcaccgatgagtatggatttttcacctttgttaacggtacttgagggagatttcaacaaggataatgcttcttctgcaacagaaattgatactttagagaacttagatgacactaggcagataagtaaaggaaaacctccgaggcacctcacaagcagtgctactaggctgcagcttgcagccaatgcggtaatatacttgaccctgctttttctttttccttttctttgttacaatgggattcgaatgatgtaactggtttctgtttgtgcgcaggatgtggatgtttgtaacttggttatgaagtcacttgatgacaaatcagagtttctacctgtataccgatcaggaagttgtgctgagcaaggggcaaaacagttcatggaagatgaacacatttgcatcgatgatcttgttaatcatcttggtgcagctattcaatgctcttctcttggagccttctatggggtgagtttatcttccaatcttacccaaagaagcataaaagcaattcactagcctgattcttctttcttctcctcttttgtactagtacgatataagaggtattacttcaaaaactcttctaacatttgttgattgtgtgtcctttggcaggtatttgatggccac

SEQ ID NO: 58888 - DNA, 461 bp, Arabidopsis thaliana landsberg
cagaggggagaggaggggaccaacccgctaccacccgccgcgcccctcctggggagccccatcccggcgccgcaggggagacccgcgagccactccgccgccgccgcgcctcgcccgctctcttttttggtcgcagagagaccggatttgcaagccaactttatgacgatgtaagcgtgttggtgacggaaggtttatagcaatagggagaaaaattgcgaaaaagctcggcagatcacccattgcagcagtcacagtggcagcacggcttcggagcaacagcagcatcgatttctgggagacaacagcgaaccttgacatgttggacgaaacaatgggagctctgtggtggagctatcagcagctaggtgtagacgtcaggcgatgccttgcatactgcagcacttttcccagaggatacaggttagtacgagacgagttggttcacatctggatagcgc

SEQ ID NO: 58889 - DNA, 254 bp, Arabidopsis thaliana landsberg
agggatatattaatttgcttctgacaagcgttttaattttattccagaaaataggtactgttatcatacagttttgtttgaatatgaattgtcgaatttaaagattttttttttttttttgggggagaagagagcccacttcagcgactgataatgatgacgatgactgtcttaacatcatgaacatggagagaccgaacacatttgcatgccatgccgagtccatcaaatttcagtctcatcacttctctccc

SEQ ID NO: 58890 - DNA, 554 bp, Arabidopsis thaliana landsberg
ttgcatgaacaagaagtgcctgagagtgagatgccgaattttggagaagatgggtcggttgctaggaaggaacttggaagtctcttaaacaaaagacggtgatatatgtatatatctttctattctattcttaaatacaatcagattatatgatagtttaattcagtttgtttaatacatttcctaacaaatgcaaaagacggaaatcaataatacaataaaacaataaaatcaataatacgtaatttcttcaatgttgatttaataaagactccgtctgttctttgaaacttcctccgtggaatcaattttccgtagatgaactcatgctgaaaaatagaagtattaacgacgctaatggtcaagaaatgactataatcaatattaaggaaatgaagatcacactaaccctttgtcgacaatcacgacagtacgaatttcgcaattggcaaacctgtaaaataacatattagtgatcaatagattataattggaccatgtttattgcaaaattgaaacctttgtattacctcttgcaaagttcatgtctaatt

SEQ ID NO: 58891 - DNA, 499 bp, Arabidopsis thaliana landsberg
  unsure (1)..(499): unsure at all n locations
tccgtnnnnnnnnnnnnnnnnnnnnnnnnnnnnnnnnnnnnnnnnnnnnnnnnnnnnnnnnnnnnnnnnnnnnnnnnnnnnnnnnnnnnnnnnnnnnnnnnnnnnnnnnnnnnnnnnnnnnnnnnnnnnnnnnnnnnnnnnnnnnnnnnnnnnnnnnnnnnnnnnnnnnnnnnnnnnnnnnnnnnnnnnnnnnnnnnnnnnnnnnnnnnnnnnnnnnnnnnnnnnnnnnnnnnnnnnnnnnnnnnnnnnnnnnnnnnnnnnnnnnnnnnnnnnnnnnnnnnnnnnnnnnnnnnnnnnnnnnnnnnnnnnnnnnnnnnnnnnnnnnnnnnnnnnnnnnnnnnnnnnnnnnnnnnnnnnnnnnnnnnnnnnnnnnaagattcccttttgaaaaaaagacggactacagggtaatgactaatcatttcaaatgaatacgtactgtataaagggtctcatgtgaagactatactggatatcatgggtagaccaagatgtgatg

SEQ ID NO: 58892 - DNA, 1040 bp, Arabidopsis thaliana landsberg
accagaactaaatgattatttatgacttcaactagaactaaaattttgatttctaatgattcaacagataatagagggaggggtatactcttttgcacgtaattaaaggaaaagtccacaaatattgttaattttgccaacatgagaaaaaccctgacgatatgacccaaagtatgaatcttttgagttttgcatcttagacagataaaaacgaaactgaacaaagaatcatagagatgtataacttcagaaactaacaatccttgtcgaatctagcgcaaatttggatcaaatcaatcaaaagaataaagaacaaaactcaccgattttcatggcattgctattggtgaacagatacataagaaggtgaacagttctcatactgaatctctgttgataagaagagagagctccttgaagctccttatcatcaataaagccactaccatcttgatctgcagcctgaaagcaagccactatattcggatccgttcccggagcaaaacctgacggaatcagagaagcaaaaggacttccataagaggcttgcggaggataacctccgtatccgccaccgtgaccagaagacgctggacgaggtggagcaccaccgtaacttccatagtcagaaatcccatgcggtggagtagctccgtatcctccaccgtgcccagacggctgcgacggacgaggtccagcaccgtaacttccgtaatctgaagatccagacggtggtggagctccgtagcctcctccgtaaggtttctcctttggcggcttattgtagtctcctggagaaggcgcgtacggagctgaaggaggcggtgctccgtatgatgaagatccgtacggcggcgcagaagaggatgatgattgtggtttagatgcgccgtagggtacagcgtaaggagaagaggttgttgatgatccgtagggaggattgtttccgccggaagagtaaggtggttgaggtggtggaggttgattaccgccgccgtaaccgtaaccgtaaccttggctcgtcggaggatatcttgaca

SEQ ID NO: 58893 - DNA, 495 bp, Arabidopsis thaliana landsberg
  unsure (1)..(495): unsure at all n locations
ttactactggggacatggattcattagcgcataagttaactaccataaattagtttagttaaaaggtcaaattaactaacattagttaaacaaaagtataattaattattaaaacgtgcgacatggtgaaacaaaaatactaacgcatcgacgatgctcacctacgtgcggacatggatggcgcgtcgtcggtcattcgtcgatgcttggaaaccgccgagcacgatggtggcgatggtgagtcgtggacacacggtgaaggggctgcgcaggcacacgacgtcgcttggtaaggcgagggcactgcacacggcgcgaaagggctgtgcgactccgacgaatggcggtggtgactcggccacgaccgaccgggctacgggagcacgagcacacgggtcggctggccgcactggcctagggtaggccgcaccggggctggccgcgcactggctgcgcgccgcaagccgncgggctgtgcgcttgatgcccaggcgg

SEQ ID NO: 58894 - DNA, 514 bp, Arabidopsis thaliana landsberg
tgatctccctgtccaggcgccactgcagccggttcttcttggtcggcaagaacctgcgatgcgaggcgcgaatcagactaaatcctcagtcaatcgaaatgagttgcagaggaagagcatatcatctctcttgagcctgcctgacgaacgaacctgtacccagggacgaagaccttgcggaaggcctcggaggcgaaggccatgaggcgcgcctgcatgcggaacacgacgcggccggagtcgtagctgctgccgaacgtagcgcgcgtgatggcctcctcggcgacggcctggtaccactccgcgacgtccacctccacctcgcctcccgcggcggaggccatggcccgccacctcttcgccagcgccaccaccgacctggcgacgtgcggtgccagccgctgggggaagccgggaagggaaggagatccatcgagagggcacgtgtcagtgtcgcgccaccattggttgccgacagcgatcagattaaagcaactgagagagagagagagac

SEQ ID NO: 58895 - DNA, 155 bp, Arabidopsis thaliana landsberg
  unsure (1)..(155): unsure at all n locations
agggcctgtatgtccataaaccggtgggctgtccgtctgggcttttcgtccgggtgagagtttctccntctcccttccatctttgcgcgcgtaactggaaagtatagagcgtgtccaaaatgtcacctccgtcacttaacccatgatgttcattt

SEQ ID NO: 58896 - DNA, 247 bp, Arabidopsis thaliana landsberg
aatcgtcaagagggcaagtatatacgtgacagaaaatagaggcacaaacagagatctcatagacgtctaaagggtacccatgcataccaccacacccagggcctgtggaatagcactggccggcgactgctgtaccgagaatctcatgcattgcctctaggcatccattgatgacagtgacagcactacctatgaatgcaccattagagactgcttgattgacgtgtgcaccagatatgttcatacc

SEQ ID NO: 58897 - DNA, 508 bp, Arabidopsis thaliana landsberg
actgaacccttctgtacggcggcgttggtgcatacaggctgcacgcagaaaaggaaagacaaaggctcttccctctgttaacacggattattgcagttgatgaaggtgatgaacgattaaacctgtgcacgatactaaactaccaaacgtgcggctgttataataataaaagtccaattgcaaccttcgggataacatttttccgaagcccgttgttccagatactgccgatccaaaaaaatcaacatttaggtgtgtttggttgcttgggcaaacctggcctgggtaccccaacacctagcccgggctaacttggcctgtttggttggctacagaagctaggctgactgcatctgtattttgtttggttgcctgctctcctgctggattgcacaacgctagcatggacttggcatgattggttccctaggttagttttcttttggcctcaccaccacctgcagtggcgaccttaccaccggcaatgaaatgctttcttagatctgga

SEQ ID NO: 58898 - DNA, 273 bp, Arabidopsis thaliana landsberg
tttttgtctttattagtggtcaacataccatttggggttttattattattttactaattattttgatatgtcttaaaaaaaaaagatgaactaattcaatctttgaaaactgattaaaatttaacattatcatcctttattcctttagctaaccttctggtatattatatagtgacattaggaatatattagatttgcttattttaaattaatgtttataatttcttgaaaacttaggttaagctatgggaaaagtcttgctcaactaagttt

SEQ ID NO: 58899 - DNA, 1280 bp, Arabidopsis thaliana landsberg
  unsure (1)..(1280): unsure at all n locations
aagtcttctgcaatacacatggctatctttgccgagtggaaattctcattcctcaattccttgtaatatccatgccccagggaatctgatatctggaaaaacttaaatttcaacaccagagaacaaaatttgggaacaaagcaaactgaaaacattgctataacgagtaatctgactcaaatatgaacatagaaatgccaaatgtcaaggaattgctaatactccaggccagctcaagatttgtaagacttaatatctagacttggcactgaataaattatacctttggcatacgcacagcnnnnnnnnnnnnnnnnnnnnataattttcctatctttcgatcatttatgccttcctcctgccagaaatcagaagcattgataagttaaaccaacccaacaagataaccaagagggacatccagttttctattatagtacctaagatcgaaaaagtttaatatagacaagggaaagcatagaagattaaaaaccaaaaatttatgccactctggaaaaattccaaacacagattgcagagtggttgatttaacaattttgtgcttccagaagcatggcaacgtaagtcaatcatcaaccataaccctcagtaattaaagagagttaagtatgaacttgtcaaaggaaatcaaaatccaacttgcatagactacaagaagtaacaagtcaacacaagtctaatagaagggagatgaaaatggctggatacgaacctgattacgaggaaaaatctcagcaatgagcttcttgtacctcttcacaggctgtctagaccttgcacgaagcgcagggcaaagaatacaaaggctaccacaaacaggcaaaacttgcctcgagattacacccgagactgcgcntcatttcttctactcactgatataatcaaaattccgcaaattcctgttaaatcttatttacgtgttaatcctccctccctccctcttgatccaccgaaaaagccctagagcttcctcgggaaagaaggaaaacagagctcgatgattaaacgatacactccttagaactcaaaccttcgcctgaaacatccaaaatttaaaaaaattcaaaaacgatgtaatgttgatcaaaacgaaaccaattcattgtataatccagagtcaaattccgccgaaaacgaattacccaaaaaaatcatcacatcccgaggaatcaatgatttaacaaaacccagattgatcagaagatttcaacgtaatgctgcaaaagaaaaatcaanttacctcagatcaaagcacaaat

SEQ ID NO: 58900 - DNA, 1709 bp, Arabidopsis thaliana landsberg
aattcttaatcatatgtctctaattcgacagtttatctttttctttgataagttaagccttgtaacttaaaacttcattttgaaaaatcttaaaacattcttctctcttgcttttcttttttaaattgagtctttttttttctttctaatttactttcatattttggccattattactcgagtcgaatccaatttcagaaagaaaaaaatactatcaccacatcgaaacaaattgaaataaatctcgtgaagacatcgaggagagtatccactagccgctcgctcgcatggcccccactttgaacaaataatacgatgccacgtaaccttgatcaaaagaggatcctacttaacgatatttggattttggaagactaacaagatttggacaacctcacaaatcgagattctatcgataccgtccgatgttttccacgcgttcgttaatctcgtacttgattgcgattccaaaattgcagttttttttttataagtagacatatcttaaaatttagatacgagcagttgtatattcttttaccttctatcaaaataataacatttgtatttgatatttattcatagtatgtcagactgccagagatgattatagtattcatacagcaagatccacagttttgatttgctttcatattcaaacaagtagatccaaaaattattggacataactattaatacatgtaactatgatatactctacgtgtcaatatttttgtttgagtagctgaaaacgtgtatatatcatttatgacatagtttctgaagaagttaaaggaggaagaaaattctaatatatactctcaatgtttcatataattcatatctagttttatgttatccttatttcaaaataaacatcttttttttactttcaatgtaaatttttgatataaaaatacatatttgatgtcaaaacaaaaatgaacaatgatgaaaaataaaatataaaaaaatgaacaaaattatttaaaatatgattgacaacaattaacttatgttttatagaagaaaggcataacataatttgaacatatttttagatatgtatgaaaaatgtcaaagatattaacatataataactttgtttattacttaatgttcgaattcttgaattgtttacaaaaagaaaattgaatttattgttactcgtccacactatgtggacacataggcaagtagattgaagtagatataggcattgattctatttatttatgtttaggttaatgtactaggcatattaacaaccacatatgacatcgttggggcttgtggggatacaacttttatttattggacatagaaaccgaaaattgaaagcatatatagattgtatagaaatgatttctacggtatcattgtactctttacttgtttatattcaataatacctgttcttttagtacatttttgtcatatcatatatgtcgcataacgagggagtataaaggtcaaataaactcagccaaaattaggaattgtatctttgtgtttctttggttttgttttatatgagcacatatgatgaatagctgtagaagtttttcagaaacgtaaaattaaatgaaaaaaaggggtcaatgggaataataatagtttttgtgggcctgtttttttggaaagagatttaggagacagagtatttctttgtaaagtggggcgggggcctttaataattatttgacata

SEQ ID NO: 58901 - DNA, 1014 bp, Arabidopsis thaliana landsberg
tcatggtggttacctgacttctctctctctctgactcttgcatgatcctaaaacttttgcagatttcataaaaccttatgttgctgtttggaccccagattgtgttctgtacagacgatatgatcaagcgttcgttatgggaagcagttaccacaaaacagcctgacctgaagagagtgaaagtaagtggcgtttcaattccacattcaggttcttttgtcttgtttcttacgtaaatccgctgtgcagatcgcggaatcactgcctcggatctgcttcttatctggtttgacaggagaggagatgatgatgttcattgatgcattcccagaaactggtacctacaatacaaattcaaaatgaaacaataaaagggagactttaatgcatgtcattttaaaaagtggtggatcaaatgcagggctggaaccagttgtgtttgcagctatggttccgaacagtgctgataaacctatctttgagttaactgaagaaatcatgggagatcatgagttactggttagtcaatcttaaaagtgttgcaccaaagtcacctatggtcttaaatctatgcataaataatgaaacacttgttctctacgcagaccgggagcagttccagctgaaagttttgagtgaggaagacagcaggacagctttaaaattcttcaggtttctgcaacaagactcttaagactttgtgcattacccaaagtatattgtacaacagtgcagtcttcaaataaaaaagtgagctgcacaagaatgcaatcagaaattaagaacttacacaagttatatgagtcaaaatgtaacttcacttggacatatccagtcatcaaacaaatgtaaaatgaagacgaaaccaaatcaatctcttttttctctgattggtgttgtttcacaattcacatacctgaaaaaatgattttactatacataaactcaataagtatacagagatacaatggactgttaagaactcataaaaatcaagagctaaaatgcattgat

SEQ ID NO: 58902 - DNA, 463 bp, Arabidopsis thaliana landsberg
agcggcatcttctcgctgccggcctctgcaggctgcagcgtcgcacatccctaatcctaatcctgcagtcctcccttttgccttccaaaccgtgtgagccttgcgtgtgctccgtaagtatacgggctgcattttttcgagaggagcctaatgggccgaaagcaaggtctcttgggccaatcgcgatggaccttatgacactttctaaggcaagaacatgaaccttttgatgacagatcttcaatggccaataactgctagaaagccaatggatacgccacatggacggactaaacgtgtggtgtctatgcaaaaagttgtggtgtatcccaataactatatttacattaggggctatatacccattgactagcccaatggtgggtgctagtatatggtgaaatcgttagagtgtcttgacacatcattaagtgtttgtagcacaaaaaacgcttaacaaaag

SEQ ID NO: 58903 - DNA, 516 bp, Arabidopsis thaliana landsberg
cggcatcaactcctataccggcacgacgacggtgaacggcggcaccttgtcggtgaacggctcgattgcgtcgtcgtcgctgacgacggtgaaccccggcggcacgctcggcggcaacggcacggtcggcaacaccacgatcgacggcggcacgctggcgccgggcaattcgatcggcgcgctgacggtagcaggcaatctggtgctgacagcggcatcgacctacatggtcgaagtgtcgccggcgggcagcgacttcacccatgtcaccggcacggctcagttgggcggcgcaacagtggccgcgcagtttgctcccggtgcttacgtcgagaagcgttacactattctcaccgccgacggcggcgtcaacggcaccttctccggcccggtgaacaccaacctgccgaccaacttcaagaccgcgctggcccatgacggcagtaatgcctatctcgatctggcgctggactacacaccgccaacgcctcctggcccgacgccgcccagctatgg

SEQ ID NO: 58904 - DNA, 1171 bp, Arabidopsis thaliana landsberg
tctttctctaccgagcaatgtaaacaacacagagcaagcacgaggcgaagcaagggaaggttcttgtaaactcatccactcatagaaatatagacaactcttcacaaaaccagattcacccatcatcactaatgcctctacacactctgtatcactaacccttctttcgaaacctgataacatctctcccaaagtttgattctctttcaaattcttagcaagttccaagatttccctagcgacgccactttcgaatggagtatgcacaccaagtgtttgttggtttgtcacaaagacggattcctcaggctcagactcgatttcagtttcggggtcagcgaattctggagctaaatgccaggaagttcgacgattcttctggagggagaatttggattctcgagctgggtctgcagttgattctgatgttaaagttcgtgacttgaagaatttaagaattgggtctgtgaaatcatctccttcatcttcttcttcacattcactttcttcgctattgattgtcgaattttcttgttgttggatcttatctggtaaagcgtcatcgaagcaggagaggaaaatggaaggagaagaagaagatgacgaaggggaagtagcagagagactaagtggttttcgaaagaaaaaagaacgaacaagaagataaggtacagggaagtgaagtcggtgagatagaggaaaggaagaaataaaggattgggtcgcaagagaagaagacgccatggacatggctcagcttccactttctagcgaagctaaaggctcaaaattcacaatttaagagcaaaagacgtgagacaaactttaaagttataattaggtttggtattgaacttgaaagttgaaacccatctataagtaagtagcagtagagaagcccagttagtgaaagattcaaagaaaatgaaagtttaacctcaaatcctagcctaataaagagagatgtcaagagagtgaagatacaaaacgataagcaaagaccatataatatcaaagactaacaaacaaaatgcaagttcactattgaacatgtctgactttagacgaatgcaagctgccaggtgggtgaacgcctacaagaaaacgtagactcctaaatcatctcatatttttggtcgggattaacggattcgggggagaaaacgaactt

SEQ ID NO: 58905 - DNA, 857 bp, Arabidopsis thaliana landsberg
gagaaatatttgaaagagcgatgaaacttattagatagtacccagggatgatagcgagtcctgtttcaggcaagccaaataccgcatttttgcctgagaatttccaagtattaaccataactgcttatctaggccagtagattataataagaaaatgtccagatatataaataccacagattcgaagatcacaagctagagccatttcgagtccacctcccagtgctgcaccttctattgcagcaatagttgggatactcagtgcctagaaacacaagtcttcaaagtcactatagcatgcaaatctcactgagatccaaaatctagaactttaacatagcaataaaggaacagaaaaaaaaaaacaagtacttaaaaacaatttatatcagtagaactactatacattcccctttactttccgtttgaagactattaaattctaaatcttgatgagagattgtatacattaatgtcaagcatactttaggttcaccgttaactttacccaacaatctttccatgaatgacagtagcagctaatctatgagaacaaacaaggatatttgagaatatacctctatgaacgagaacatgtagcgcaacgagttgacatatgtgtgaacctcagatggactcatagttctacgctcctgacatccaagcaaattaaaacaaaacagaaattttcaagcatggctagcaaatcggatttgaacattccgggagatatgaaagtgacaaaactaccttcagatcagcacctgcacagaaaactcctggaaccagacttctgatcatgacaaccctagctgaactatcttgatggatggactccaatgcgttttggagacttt

SEQ ID NO: 58906 - DNA, 255 bp, Arabidopsis thaliana landsberg
tgtaaagcagggctgggcgatcatttaaattcttagagggcacaaataatatacatgatagatcatacaacatagacacagcacgtatacagaaagacgctatgaagccttactgtgtcatggaattggcttaaacctaaacctgcgcctcttaggcagaatacgaataaagccctcgcacgagaggggccgtatcatcactgacataccattttgtaacatctaaaataaaaaccgtgtgtcaaaacctaccgt

SEQ ID NO: 58907 - DNA, 525 bp, Arabidopsis thaliana landsberg
  unsure (1)..(525): unsure at all n locations
aaccaaaatcaatggattcccagaaatcaatcagctaatgtatccaaaagcctaaccacctggtttttattgaaaatggtcacataatttatctaacattaagttgagtctagctagcttaacatcataagaaaaaccctatatgtggataggctattaatgttcagttcattttacaccaaaaccatttgccaagacgcaaacatagagacaatataattcctcaacttctccacgatataatcaagggattcaagtattattttattttaataacaacaccaaatccgctctaaatctcagcaatacatgtttctgcgaacaaaacttgtccaattacctatcatatgagaaacagactcacacacacaaggcagganaggcatgtaaagtacctcgcttgaagaagcagatgacttcgatatgtccatagtaatatcntggaagtgacaaaccagaggagaagcccttgcaactccttcaaataaattgaagtttcacaataaactaactgaaatataggat

SEQ ID NO: 58908 - DNA, 152 bp, Arabidopsis thaliana landsberg
gtctgatcatttgcgtaaatttgaaaaataatcacttcttcatcatgtttcaaggttatcaaatgaaagtaatttagacaaaaaatcacaaataagacccgaaaagaagtgtattcacatacgaagataaacagagatgtggcgtttacatc

SEQ ID NO: 58909 - DNA, 1000 bp, Arabidopsis thaliana landsberg
atcgactagcattatgcgtcaaaatacagcagatgatgcaacggtgtatagtcaggacatatctgaatgtgacattaagttggtagtgtctgaacacaagccaaaaccgctgcatatggggcctggttctgcgacaaagtcccgctccaacatcagtaacttcgagaaagatgtgatgcagaaaataggtggaacagagttttcaaggattaacagttggcttcgttcgcaatctgaaaacaggagttacgtgcttgacaagactcaacttcctgcgactcatttcctagaaaacctaaacagatcgttggagaagtcaccaacacagagttttacaacggagaagatcactggaaatgaactggaaggtatagaagagactaaaacaaatgagacagtggttaaccctacactgatgcttaaaaaactgtttgagctgcaatgtctctgttctgctgaagaagaggatcagattttgtccagattcccaattcctggctatgaggatgatgatgagtctcgttatcctccaattttagaaaacgatggatttagccagcacatagacaatgaatggtttggagtcaataattacagtgcggattgggagcgagattcaccagccacgatcccgttgttagaatgcgaaccggatctcaaacagctgttaccggaattgggtttggatcgatcacttaaaccaagaggtttggcggtcgccgagggtgcagctccaccattgcttagagcaaaagaaaccttgggagaaagaggtaaacgtttgtgttctggcgtgaaatgtttttacaaacgcaaacgcttttctaagattctgtctttttctgttgttgttgcaggaaaaggtccaacgttcatgcagaaacttcaggctttatgcttccgtattcttctgggattagggtttatggatgtgggctttggtaatgacttcaacaacgggttaacaaagtaaagacattaacagatccaattcgtcatc

SEQ ID NO: 58910 - DNA, 1014 bp, Arabidopsis thaliana landsberg
  unsure (1)..(1014): unsure at all n locations
ataaattatttttgactattttttattgtctataacatttgctgtgactgaaacaattatttagaataaaattgagaaaaaaacacatgtctgtatatttttcaaatattcccaaacaataataatcacacacttgaatacacccaaatgaatgacttacaaatacacacgcatatggatctaatcatttctctatttctttgtcgaatttagatctcatcttttagaaatctgtttttgtcaaaaggtttaaacatggannnnnnnnnnnnnnnnnnnnnnnnnnnnnnnnnnnnatgcctcttcctatgtatatctcactcaaagcttgaaagctacccatcctcatttgttttcttcttaaatttatttataggaatctgaatacattttaaaacacgattttggtgacggaatacaactgtttcattaaaatcatgaactaaaactatctttaagaataatctatgatcaaaatatagatgaagaggaaatgatatatatagcgaaggaactttcggtgatagggcaaaagaaacacgtttctgggaggaataaatggtttcgtcagctttcgtctttgactttgagtgtctcttcagtcaagtcaagttttgtgtgtactttgtttttcattctcaagtctctctcctcgattaaattaaaatcgtggtcacatctacgaatctaactgtgtgaatgtctcgtcgtgatctggttaactaaaggttgaatatttttaccctaataaaggttcttttttccaagcttctacactaacttttctttttaattaaaaacaaaattgaactagtttatgatttcatttgtgtatattattttacgtatagaccatgtcaccatgctatttttgttatatatcatcgnatcagtgtttgttatttggtatggttattgtggaccattggccaaacatatatgcattgtttcaatcatgttgaaggtttaatctacaataacaactctcttggataatttttcacacaaaaataa

SEQ ID NO: 58911 - DNA, 407 bp, Arabidopsis thaliana landsberg
gaatccaagaattatgaaaagcttcttgatctttcaatatcacgtgctcagagacaaatattgtaagatatgattagatgcggataactattatcatagacaagtggaaagattatgattcacatgtatatattatagatcatgaatttgatcatcaagataatgatttttcaaaagtaatttggtgtttttagaaagaatgatcacataaagcgcacttataatggtccaacaacttgatatgctaactgataaggataatgggtgaatgaattggtaaatacgatctgccaaaacaacaacaacaaaaacaaaaaatgtcaaaaacagaaagacttactttattatatatgtaacctgagtgagttgatgaaaaattctgaccctagaacgtaaggagagtatac

SEQ ID NO: 58912 - DNA, 519 bp, Arabidopsis thaliana landsberg
ttactcttaatatttttgtattaatatcttgagatgttacatagcatcttgacatgctagaacatgtcttaagtttttcttctttttaaagttcctacattattaaagttccagactttgtacaaacttgaacccggaatctcgcaatcagttaggagtaaatttcattaatggatttgaatgtaactaataagtaaattttgttggaaaacagattaaatttttatgagacaaaatttgagttttttcaaagatgttgatttattttgtaatttgttatttttatttacagaaatttacgttacctaaaaattaaaatgaagtttctttattttaacatatacagtattaagtgttaatgtgttacgcaatcgaatcatataatatttttcttaaagtttcaatgaattaaatgtccttatgtcaccactcatattaaaacacacacacatcttgaatgttgtcaataacaaaaacttgtacctacttaactgtgtgaattgtcagcattctgttttg

SEQ ID NO: 58913 - DNA, 193 bp, Arabidopsis thaliana landsberg
aacttattaagcttagtgttttgagtgtggtttcttgctgtttacaggcatatggagccaataacacatggagattaccctcaggccatgaaagatgttgttggtagtcgattaccatcttttacgcccgagcagaaggagaaactgaagggttcttatgattatgtcggcatcaattacttcacttctacat

SEQ ID NO: 58914 - DNA, 1279 bp, Arabidopsis thaliana landsberg
atttgatttttttcacgcaatttaaacacaatcttgaactctcattctttgtttacatgatatatcgttatataacttaagcatagtatttagtaaaaacatacttagttttttttttttggtaggaaaaatatacttagtttttctgtaacttaaattattagaaagtagaaaatgaaatagagtaacaagaaccaacttttttttattaaaatatgatgaaataattcatgtgtaaatatgtgtctcaaagaaggtaatcttgtgattcttggtgggccaaaatgaaagacaaagctaatagtcaaagttcactaaaggaaatagagttccatttgcgaggaaattacagttaagccaatagcaaatagagttccatttagagatgatgcaaaacccaaaaatgctaatctcaagatatgaaaataaaaagaagtttcatttcccaattcaaaggtctctttctttctcaccaatcaatctccttttcattaacatgcaccacctttactcattctcttctctctctttatctgactctctcttatctccactgttcccaagcccatacgggcaaaagaacctgctcccaaagttggctctgcaacagaacagaactcttaattgtagtaacactaatgtatccactcacagtctcacagtttccaactctcctcaaacaccatcttaaacttgacttctcttctacttctcatcttcacacttgcccttttaaactcatcctctcaagcccacaacactcacattctctttctctccctctcggtcttcagctcaaggtatagctacattcatacgcatttcattttaggttggctttccaagttgtttgtgcacttattggaagttaatataatccttagtcacttttttgtatgtgtatagataacatagactggaagatcattaccatcaagtagaagtggagggagaagaagagatcaagccaagcaaagatgccaacaagacagacgaaaacacatcatcattaagaatattcccctgcctcttttgttctagaaagttccatagctcccaagccctaggaggccaccagaacgcccacaagaaggagcgaaccgctgctagaagagccaaaagggcttatgattttgtcaacaacaatgacttccttcacacgttacctgttttcttatcctctccctctcaacatcacttgaccatcttaggctaccctgcttctgcctccgttgcctgttttccgacggttcatcccgaccatccgattttcaaatcc

SEQ ID NO: 58915 - DNA, 887 bp, Arabidopsis thaliana landsberg
atttcctataatcttttggattcaattgcattacaacaaccaattttatacaattcacacctctctatgttaggctaagcttcacgaagaaacgagtgtctagtttcgtgatcttgtctaagtattatcatatagcttctaatgtcgagcgagaattctgagtaatctccaaatccatcactttgttcacaaagtgagaatctttgtctctcttctctgtttcttctttcttctgaaacattgtcttcagcttcatctctaaaccctttggagtataatataaatgcttactatcactcgtaggatcttcttctactagaagctttatgtagctttgtaggtaactcttgtatcttggcacaactgttttcaccattgcttgacatatcttccataccaacttgtcatcctcaacaacccaatttgattgctttgtgtatatctcatcaaatcctttacaaaacgcttgtaatgttcgcttaatggactcacgggctcgttttcgtttcacaggagatgattctgatgatgatgatgatgatgatgatgaagtggtttgagctttgtttgtgagtagagacaagagatgtccccagctttctttgacataaagtgcagcgtaatagtctctgtactgctcgtgtgcgtttaaccaagactctcccatcatttccccgagataagtctctctcaagccgcagaaatgggagtgattgttcatcataaagatgcaagaaagagcggtttctttgttggaacttgaccatgcgtccaagttcaaagcaatctctctcagtatgttgtagatgtgacctgtgagaagctcttcttgatactttgcgttcttccatcccaaatcaatttcgaggaccttcgacaagattggc

SEQ ID NO: 58916 - DNA, 633 bp, Arabidopsis thaliana landsberg
  unsure (1)..(633): unsure at all n locations
cacacgctagcttattgagaaacaagtgccacttaatttgcttacaccaccttcattccaccggagacttttgacctttggatcccaacaggcttgccgctcaagttctggaccatctgactgactttcatattcccaattcttaatttagcatcacagaaacataattaatctttctcattaactgaaaaggaaaagggaaattacactgaagattactattttgcatcaatagcaaatcaatgtctaaatatttacctagctcgggtcccttgaacagcaggtggggatgggggcagatgggaccttaattttaatgggtgaacatcaagccacaaaatgagcctccagggccagactttgacgtctgaatgctatggactaactagaaacaaatcagcagacgggcagtggggtgtggctcatcgggaaaggtgcttgctccatgaacctggagacccaagtttgaacccataactaaatagagagagaaaactaattctacaaattntttcttttgtccactgaaccacagacacacacattgtggcacatatgttcatgcacgngcatacacacacacacacacacacacacacacacagaaataacacacgttaaaaataagaaatc

SEQ ID NO: 58917 - DNA, 1105 bp, Arabidopsis thaliana landsberg
tttacctaaaactagcaaatatgttttgacaaggcaaacatagactctgactggtaaagaaagtaaaaactagtggaaagtaaaaaaacagacatgcatcagaaaacataaaaagaagaaggttattttgatgtgttatacagagggatcatggaaagtgaataacaaactatgtactgaactatgtcacgactctatattaaagataagctctgacctgttccttaagttcggatattttcaaacatgctgataagatactaagtgcagcttccatttgagaagtaagctctttttcgaattgacgtcgtcgatccggacgagcagctattttgtagttaaatgtttcctggtcatagcaagaaggacaatataagatcaagacatcatataaccatctagattaaagctaaacattcctaaagtgaatcaagttaatgaaagggaaaggtcaaacgatgtggtagagatttgtgaaaaaattagaatcttcatttagttacaaataaactaccaacattttttgcaaacaataccatacaaaatatcaaggtcttgcccagccaatactttagggattgaaataacactcacagagtaacgtcgaatgctacctaaacatagatatggaaaaagtaaaaaaggaacagaatattctccaaataggtctacccaatttgaggtcagtaataccagcataaataataagtaagaagatccaagtcagaccaaaataaggcctttcatatctatatagccggatacatgaagtcaaattaattactgagggagatgaacacttaaacaaaggaataaaaaatactctacctcgggcaaaactgtcaagagttccaagaaaccaggcacatattcaggatgcatatgcatctcatccctaagccagctaattataccaccatctccccagtctgccgcaggaacatgcaccgccaaggcagcaacagcaatgctaatctacaatataaaatacttaaataagataactcgacacaaagtacatgactttatacgcacaacagaaaattccacatatgcacttacctgggtcctaacttttggagggcccttgtggaacttttttaac

SEQ ID NO: 58918 - DNA, 532 bp, Arabidopsis thaliana landsberg
  unsure (1)..(532): unsure at all n locations
taccaatagacataagtcagtagaaatcagattatttttgccaaattaattacaaactgtccaagacaacagaagattattaaataaaggtaataaattgtgacccgttttcaaatatacatccaatagcttattgaaattgaattagccttttatttttattgtatttttgggaaggtaggaatagagcgttggatatatttatacacatctgaaggtttttaaatttagctctctggttgcagtaattgaagaggcgaaactttgaatgcacgtcatgcatgggcagtgtaggccaataaatttttctctccttttttttcttctttctaaaacaatatattttgtaatgaaatanatgcaaattttcacttgctatatataaaggtccttcgaaactgtttggcctacacataattaagcacatcgtacgtataaatttttctacgtgatgttagaaattctagacaaaggaaatctnnnnnnnnnnnnnnnnnnnnnnnnnnnnnnnnnnnnnnnnnnnnnnnnnnct

SEQ ID NO: 58919 - DNA, 270 bp, Arabidopsis thaliana landsberg
  unsure (1)..(270): unsure at all n locations
nnnnnnnnnnnnnnnnnnnnnnnnnnnnnnnnnnnnnnnnnnnnnnnnnnnnnnnnnnnnnnnnnnnnnnnnnnnnnnnnnntccttcttacagctagaggcgatgcatggctttcgatggctgcaattcttaatggaaatttcccattaaacgatgttggatttgaaagaatgttgacagattatttgctcttttgaaaagatactatttacctataccttggactatatacatggtaaaatgaattgctcgtattgcttacggatgtt

SEQ ID NO: 58920 - DNA, 217 bp, Arabidopsis thaliana landsberg
tgcattcgcttgcatggggtaaatacaactagcacggaaactttctatattcatcctttcctgtgccaacagcattgacgtgactatcatataatattagggctataaatgaatccaatacctcaaagattttggggtttagcaaaaatcttctaaaaaatggcgcacattagattggtacatttaaacaccaaacatggtcccactacaaaatgaa

SEQ ID NO: 58921 - DNA, 1259 bp, Arabidopsis thaliana landsberg
  unsure (1)..(1259): unsure at all n locations
aaggcttctctcacatcaaaagtggtgcaatcaaacagtgtatgtttcaccatgtttacgattacagatgtctaaccaaattctaagctcttaaaatgggcaaaatacaatcaagagaaaaagagccaattcatttctgacaattcttaatgtaacaactccagagaccattcacctgagcttccaaccatcaggtagatggcactaagctcttagggtttagatcccaaagcaagaagtatcttcttcctcggaccctgcaacgaaaacatagcttgtgaaaagagagcgtaataatgttgaacgaagagagtggatgtagtttttcgcgttacaacagatcaaacanaactgagaaattgaaattcattcaaaatctgcaagatatgataagagtgatactagatgttgtgtggcaactcaacatgaagcttaccatcggtatgagcatagccttgaggtcatcatctgtcatatgcatgagagcatccatatcaacctgtgaatgaccgaaaaggataggaacgttatatatgcatcatccataacataacataaatttcaacctaatagaagatattacatacttcttccacttgaaacgctgttgaatatttctcgagacccaatgattcaagaaagctatcaaccgatgaatcagcctgaaccagaagatgacaagcaaagaaacattagtggatggcctgtatacaagggaagagacatcgtaagctatgtgtctaactacattttcgcaccggtcagaagaatggtttctcccaagcaataaagtactgatggaaaaatatagttgaagaaaagtgaatcatattgcctgctgtgatttcttcctggtagcttgactggaagtttttctagtctctgtttcagtcgctacgctcttcatacttggcctagcagcctccgctttggattttggtgggtcactgttttttggttgctgattcattgtcccagagagctgatcccgtaaatcccgcacgcctgaaccagcttctcgcccactttgagacccatgatgtctcttttggagcttcaaacgaagatctctaggatcaaccctgcgatctaaataagccatccgatagagaatcaacaaccaaacagaaatacttttgtcatacttaattttctactgaaagaatagatgagggggaaaaacatacttgaaagttgaggtgtgtcactactgaaaagactatgctgccatttgtggaccatgcctttgtgtgaaagca

SEQ ID NO: 58922 - DNA, 115 bp, Arabidopsis thaliana landsberg
ccgcggctcactttttctaagggggggtgaaaaggaccgaaacatgcccctgaaagactctactgggataaagatgcgctcgtaagaacgtagaggaggtaggatggttatcctt

SEQ ID NO: 58923 - DNA, 167 bp, Arabidopsis thaliana landsberg
  unsure (1)..(167): unsure at all n locations
ttttgacgctttgtaaaacagaggtgcttaaatgtnagtancaccaaactcgtgatgtgaagatgcaccaacttttgctaagatttcacttattagttcaatcagtaagttgtccatccttgaaagaacggtatttggtagtgccatatcttctaaccatggaatcc

SEQ ID NO: 58924 - DNA, 566 bp, Arabidopsis thaliana landsberg
ttatcttctatacgctctttctgtaacgttttatggctagctatataatatatacaacaagtactgatcattctattattaatctaggttcgaaccacattaacgtggatattctatgtacactcatgttcagccagataattagtcgtaccaaatattaatattttgcaataaatatctcagcttttctcaggtatgtagcaatcatgagtcatgcgtgatgtttttggacaaattatcttaaaagaaaataattctacgaaagggtagtaaaagtgacaatatatgattatataatttggtttacagaccatcataatacagcagcatgattagtggcgaaaatagtttattgcaagagtatgcatgtgtatgtatatattgcatttgtgtggcagtagggtggtctcattatcgcatatatactacatgggattattgtcacaggtttaaatggaaaccaatgaaaccttcaattttagtttagttctaattaaacagagtcgatatattaaatgatttaactactgtaacaaaaagatatattattttatcattcatcttgg

SEQ ID NO: 58925 - DNA, 1236 bp, Arabidopsis thaliana landsberg
  unsure (1)..(1236): unsure at all n locations
ggcaaatgagggacaaggtagtatttaattacaatacccagacgacaaaaccaagtttttttttttttcaaatttacaaacccttgcttacttctatacctaatttgacccatttttttatttagagactttttttttctactggggagaaacagtgaataaggtatattcactcactcgccagcagactcacctgcattcattcttcgccatcatcatcagtagacagaaatgtcgacgcttatgcctcccatggaaagatttttcccagaaagcttttggtcctcacgcaagcccagccacagacacgatatcctcgccatcgcagcctgccccaccactttcaccctgtacaccatactcagatctgcagctgccgcccatagctcattcccattaactttcactgacctccgtgaccgtgagtcatcatcattatagccctctagatccgagtgggtgactacaaccattgacccatcatcaaacaccactacattcccagaacaaacctgcttcacatttcttgggatcaaagctgaagttgcatcagttaagcaactctgagtattcagcaccttgacatggtagtactcaacaacggcctgcaaatacatcaacaatcagaagaagaagaataaatgactaaactctggttcatcggtaatgaagaatgggacccctgtcagataccttccattgggctgctgctaaaagaaccctgggcatgattgatctcacgtaggaatatgctgcttcaggtgtcatgtttttgtgttgaacctgtgttgaaaaggtatgatcagagaaaaggagaaaaagtgtctctgatcaaaatgtttttctgggatttattgcaatacaaaccaagtagcatatgacaatagttgtgctgcgaccccgacccgctttgcagtgaacataagtcgtctttccaagcgaagcatttccttcaaggagacaaaatagaatttgagatcaaatgaacgcgggttcggacaacagtaagctttttaataatggtcagtggcaaaaaacgtaaaagaataaaatgagaaggtacacttactatggataaattctacagcttggcatattgcttccatggaaggagcaaaacaataatctcttgtagcaatcaccaggtggtcaatgcagtaagacttccataagagtaagaaaattaaatgggccgggtcagtacatagaagaaaccgaaagacaggncgaccccat

SEQ ID NO: 58926 - DNA, 2040 bp, Arabidopsis thaliana landsberg
taacttcacacgtctataaattaaatttgttcataggatctacaataacacaattaacatcacttgtgtttttaagttattcaagcagaggcatagtaattgataaaaatagacaacaagaaagcatttgaaacaaaattactgttgtaaacaaagctttttcacggtaatggaattccgaaataaaaatatataaaaaagaaagtgacagaggaaatgtgtgagagaggcaaaggaaatgcaatatttgcaggaagaaaaaaagcatgagaaaaaagtaggtgtggatttagacacatgactgacaaattatatttttctagtttctcctctatatggtggtttctgcgtttatcatgtttaaatatatttaaacctttcattagtcacatcacatcccaaaaatgtgtacgataataaaaagattgtttgtataccaaaattaattggtttactcaatcatctttttaattttggtcatttgatacgatcaatcatagggtgtcctaacgttaagttcgatgacgctgctacctcttttgagcgtaccattcagggtcctactcggctactcctacataatgaatttagcaaatagcagtttaaaaacaaattacgttagttgattaagataaataaattagcttaacacaaatttgaaatggttagttgaaactcaattaacattaatttttctaggtcttcaatttagttgcatggttagacttgaatcaggttgtgtcgttttatcagactcactgcaaactctttgtccaaactgctcccttatttttgtttgttacactctatttatgtaaattttataaacagatttactagaaatttaattcttacccaatagaaaacaaaaacgtcgtttcatttcatttgttattttctcttttgtatacaaacacatatttatacacacggctatgaagttgttcacgaccattatggatgactcgaaataattttattaacaatcatataaaaatctgaaaatactagtattattattaaactaaaaaaaaaacacaacattaacgtacattgctttaataggaaactaatacacatcaaaatcgactctattaatttatttccctagaaatcatcggtctactttgggaacaaacacaattcttctctctattttagggatctgataaatatttaattctctgtctgttgtgtctttatctcactcttagagaacccatcgttgatgtaaacctagaaacagagcaaacggaaacagagcattggcgaagaagcaagatctgtaataccgagaagcttgagatttcttcttcgatgaatgcaccgataaacctccaccactactaacgttcttcccgcatacatcaaccccggtcttgacaacactaaactcatcctccggattcagacacaatcctctgttcccgctcaaatccaagttcttacccaaccgtcttaagaaacttgaatcaaacggaacaacgccgatcagtaagttcctgctgagattcagatggaaaacgtgtggcagagactcaaaccctgatgggatttcgccggttaatctgttgttagcaagagacaacgagctaaggttcgtcaatttggtgtaactctccgggattacgccggaatatccagaattctcgagctggagctcttgaagtttaagaagaaaccctaattcaacggggagagcaacgaacattgggttattatccattatgaagtactgcaaactctgaaggttcgagattccttttggaaaagctccctttactttgttgttgctcaacgccatgaaagacaacgaacgaagcttttctacaccttccgggattcttgcgaatagagaattttagctcatgtcgcgtttctgaagcatacccaatttatagatcgttggagggattgtacctgttcaagaattgtttcttaaatctaacccaacaaggttatttacattccctaattgcatatggattttacctgtaagcttgttgtagcatacatcgatgtgtacgatgcttttcaatg

SEQ ID NO: 58927 - DNA, 104 bp, Arabidopsis thaliana landsberg
accctgagcccataatgcgtgatcgccctcatccggcccggactgggcatcctgacacggggccactaatgcatataactcatggaacagggttacatggtcgg

SEQ ID NO: 58928 - DNA, 194 bp, Arabidopsis thaliana landsberg
cgattgcggttggcttgtgaagcgagtagattcctgctatgcgatggataagcaatcatggatatggtaggtatattatacaagcaggacagcaaacgacgatgatcttgcacatagtacatgcactactacatggatccatgaccatagtacaccacgtgtttagtatacaagcggtaccattgatttcacat

SEQ ID NO: 58929 - DNA, 166 bp, Arabidopsis thaliana landsberg
cgcactccaaacagatgaagggtttaagaaaacaaaccaggcaccccccctgaaacaacaaatcagccaaccgacgacgaaaggccaggaacccacaaaaaagcccaacactggctgaccccatatgcacccccccccatacgaccagcacgaaaaaccacgctca

SEQ ID NO: 58930 - DNA, 105 bp, Arabidopsis thaliana landsberg
cgcacacccaacagtttgttggtttatgaaaagaatcgaggcaccccccccgaactaacctaagccataaggctccagcacccgccatcaacggactaaaagccg

SEQ ID NO: 58931 - DNA, 1336 bp, Arabidopsis thaliana landsberg
gatatacacgatggatccaataatataacatgtgaattctttttagcaaaactattttgtagatttgggtaggatattcgaaaactttagaccaatccttttaaaggagactatattactaatgaatctattgtaggctttaataatagggaggccataaaatgtacttctttcattttcttttaatatttgattttaaagtttttgcataccaattaacgaattatttttgatcattgtgggttgaagtattaaattgttgcacataatattgtagtatttggtaattttgactcttatgttacgtaataatagtactacagagtaatgaatctccttgtaattcttattttcacatctcattaagctttatgacaaagataacgtaataaatcatatgaaatgtcattgacggtggctcgtgagtggtcgttgtgtttgaaagagaaaaaagaaaaaaagaaagaaagaaaaacttgtagtgtttcggttatacaaatgtttcattttatattcatgacgttctctattttgtttcactcaagtatttacataaacatttagcatataaaatgttttcaaaaagaaaagctaatagtctacttagtgaacaaacaattatatatttctaagactatatgatatcaataaaatttacgatatatttacaagcggtaaaactaatggtaaggtagcaatacgataaataaaaacatgatgataccacccgtctatactaccatttagaagaagtagtatacgttatacttatacaagatggtaaaacatcatcagtgaaaaaatgcagtttggccatcctaaatttcctaaagagaccgattacgtttcatcattcaaaactttacttgtagttagaaaaatggattattgttttgtttatgttaggtatcacatagatatctagaccaattaatataaaacacatactcatgaaaatgactcaaaggccatatatcatatatgtgatctttttatttgcctaccaattagcaaatccttctctttcgggtttagctttccaattatttcagaaaaagatcacatgacattagctccaccatcgaataggtcgccaaatctctagcctctctgtttttttgctaagaaattatgaatttaaacatgaattgcacatatttggttttttgtgcacaacttgcttatataaattaagttggtgttacaaaagtacacttaaaacacaaaacattttgtcagaaaatccgttttatatggttagaaagaaatacaagataactattatccttctcataattcaaagagatctgctctcggatcatcagtttccaagtct

SEQ ID NO: 58932 - DNA, 135 bp, Arabidopsis thaliana landsberg
tgaacactcagcagtttgtatttttacaaaaacaatgggggccccccccccgatctacaataggccataagacaccagcatccgctatgaactgcactaaaagccgggacactatgaataccccatatcaaccga

SEQ ID NO: 58933 - DNA, 133 bp, Arabidopsis thaliana landsberg
tacacagtctgaagtttgtttgttttttaaacaaatggtgcatccacccaagaatcaccctaatcctttaagcaacagtcaccgctacaaacggactaaaaaccgacaagcctcaaaatccccagatcaggcg

SEQ ID NO: 58934 - DNA, 1105 bp, Arabidopsis thaliana landsberg
aactctgtaacaccatcatgggttattgttgatgtacataaatatatattacaaatctgtatactattggttcaaattgttacaacatttgtttgaagcacacctgcagctataatacacaggatgcaaaacgaagagcgaaactatatgacgccaacgatagacataaacagttacagtcatcatgaaaacagaattatatggtacagcaaaaattacactaagaggcaagagtctcaccgacgacgatgagagagtttacggttagacctctttccaccggttgatttcgatgtggaagaagtcgaatctgtcagggacgaatttcctaattccaaattgtcctcactaaaggccttctttagtgtatcttgtatttccatgtacctttgcttcttttgtagtcgtttctcagcagtgtcgtcttctccgcaagccagttgagtcaagtcctcacagttcataatctggtcgagcactgccgaacagcgcggaaagtgttttttcccgagttccactgatgatatgaaaacaaggtcagacagcacgtgacaaaaccatttttaaagacatatttagatttgttctctgtgataagcagtccatgaagtgtgtgagaatccataccggttttagaaagcgcttttagtctactttgatgctcttctaggattctgaaaggtgctatctttacacccggtgatgttctcttcgtaccagtgagacggtcaggctcgaggctagtcactatgaactcacatgttcccttcatttcggcgatctccattgcagcttgtgcttccgttggaaagagacgttgagcgagtgcaactaaacagtggacgacacaaagtatagttatcattacttcactcagtttcctaatagagagcacattaaatttaattcaaacatgtaagaaataagacttgatagatacctctattttccagatcgagcagcgtcatcttcaattcatcggcagccactgcaaaagagggaggaacatctctaggaattggttctcgtttgtcttcttgctctagtatttcgacacataatcggcctttgagagaatgcttgcattgctccgaatattattaca

SEQ ID NO: 58935 - DNA, 1124 bp, Arabidopsis thaliana landsberg
  unsure (1)..(1124): unsure at all n locations
ttgggttggtcttactaaactaaatgcttttttcgttaagatttaaatccattttataatccacattcgggttttcagcaaaaaaggaaatctctgtttggttttaagtaatcatgtgatttaccttgattttaagacaaaaaaaatcactgaggttcactgtggactacatctagttcgttttgtgtttgattaaatccaacctagatggttctgattaaatctttagcttcctttgtcctttttactatgataactcttctaatatctgtcaaaaaggaacaaaaattattagtttcttaggctattggaaactttgagatgatgattgatggaggtgaggaatataaattcacttggcttctaagctaagtgtccttgaggtgttttcgtacagttgatcaatttgtaaagatgagacatcgttgtctttacttttgtccaatggatttttgatgttacttagaaaacaatatagaacaaaactgacatttattaaaattaatactgaacaatgtgagatcaaacaaaatcttaattatcggtctataattttatttttttatatagtaactatcaggagagagttcaagatgaaatgaatagtggaattagttgagaaattgttgggctttcaagctcaagttgttggctctcacttttcctctttgtacacactcttcgtccaacaaaacaaaacactaagccaatgtttctttagatgctacaatactcaaaattgtacaaagagatgctttcaagaagcttcattggcaactactgtatattatgacgactggaccggccagtttgaccggtttggctcagctagaccagtttctaaatcggctcaaatttaaccgagatcactaaaagaacaatctggttcgtggatttttggtcaattgcaacatctctatcctaaacattgatcactcgcctatcagaaaactcaccgaaagaaaagagatatccacttatccaacgccaagcgaatgcaaaatgtgctaaaacatcaacacatcggttaccattactcanaatcagcatcaagaaactgaaacaatctccaaagagcaaacacacgaaatgggaaaggctgcagattgcaatggcttgacatt

SEQ ID NO: 58936 - DNA, 116 bp, Arabidopsis thaliana landsberg
tacacaggctgaacgttgtttatttttaaaacaaacggggcatccccccaagactaacactaatccattagccaacagacacagacacacacggactgaaagccgccaagccaagg

SEQ ID NO: 58937 - DNA, 279 bp, Arabidopsis thaliana landsberg
tatataggctgagatgggttttttaaaaaaacgaccggctcctctccttagatcccactggaatccgttagtaaacagtcgtatagacacctggtaacattgacgccatgtaaaggactttcaagatcaaacagatagatcagggccgatagctagctgtccactgagacctgaagcttgtagactttgatcagctgaatagggcatttgactatatagaatcaacttcctgcagctgataagcaacttcctgccgctggccgctctatcttgctcgat

SEQ ID NO: 58938 - DNA, 166 bp, Arabidopsis thaliana landsberg
taaacacccagggatgtgtttttataaaaaacgaacggttcccccccccaagacacacaccaagccattagccatcagtcaccgacacacacggaccaaaagccgacacacctcggacatccaagaccaaacaaaccctacagggacagcacctgaacaaccctca

SEQ ID NO: 58939 - DNA, 1041 bp, Arabidopsis thaliana landsberg
tatgcaaagcgtaactaacaaaacctcggcaaaaacttttaatattttcggaagatgctggttattggggcctgaaagggctacatcttgcctgcaagtttatcatcaatcaaagctgttttacatagtcataaggaatgaaaacgacagtaaaattagaatctaaacgcaattgcttacctttcaaccattgagcagagctgatcatgaaccactttggcttcaaggacatcattgcttataggcaaacagttcaaccacgcaggaagtacctaataaaaccaaaacaaggtaacttgtgaatcatcaaaaccaaccacatgtatgggtacgatggcgaaaccaaaataactattataatctacctgagaagaatcaatactatcacggtgaaattggcagatctttcccacggctgatacagcattatcatatgccatggcattttcagattgccgagcatttggcagctgtatcacaacatttaatcttgacagagcctctgttgacataaaatcatgtgttacttaactgtcaagtatggatcaaagcccaaaaacctaccagtgggcaaaggtatgtcatacctccaataagaggcttgaatacagagccgccaaactcagcacaaacgccaagcccataaacagcagcctgtcgaacctctgggctctcgtcattgcaagcttccagtacaaatggaagataggtatcataatatctgccaaacaaatataaggtgtcttatcagaactctaaaactggaaacctacaaatgtaaaatgatccagtggatgcgtatccttacttaaaggcagcttcacggcattgttctgctacatcatcaaaaatgcatatagcaatccttctctcttccgctgttttatctcttccctgaattcatcgaatacacataaggtgaacgaagactaatattgtaccagagacatggtaacagccacagaatttagaaactacattcacctgaaccagagtgccataattttctacactttttcactaacactacatcacttcagt

SEQ ID NO: 58940 - DNA, 113 bp, Arabidopsis thaliana landsberg
  unsure (1)..(113): unsure at all n locations
cacacagccatnagtttgtttaattaagaaaagaagggttcccccacccaggaaaaaaaaagagcgatgaaggacaagaagcggccacacaccgaacaaaagacgggacgccg

SEQ ID NO: 58941 - DNA, 267 bp, Arabidopsis thaliana landsberg
tacacccccaagaagttgtttttttatcaaacaaacagctcacccccccaaaataaaacaaaatacattaacaactaaaaacctctaaacactcaacaaaagacgggacctataatatatcccatacctaacctacaccatagtaacaccacctatatccaccctcaaacacttgcgatgacaccaaaactacactataatgcctcaactctaaactaactacaagaacatcctgcagatgatctataacatccccatagattaact

SEQ ID NO: 58942 - DNA, 132 bp, Arabidopsis thaliana landsberg
caaacatccatgttgttgtttttttaaaaaaacaaccgttcccccccccaagataaaaaataatccattaacaaacaaaatcctttataaactcaacaaaaaacgggaacttaaattaaccccatacgaaac

SEQ ID NO: 58943 - DNA, 316 bp, Arabidopsis thaliana landsberg
tcccaaaccagggagtgttaatctaagaaaaaaaccctacaaacccgtaaaacgaaacaaaacacaatcaggacaaaaaacagccaaaaactcgacaacagaatggaaccacaagacacacccacaccaaacagacacgatggatgacaccctaaatacactccgaccacaccacgatcacaacaaaaaacgacactaaagccacaggtgtaaacaccgaacaagaccataaaaaaaccagactacaacacctgcaaactccaacaatgacactacagaacagaccctcccgacaaccggagacgcaaacgtctaa

SEQ ID NO: 58944 - DNA, 1280 bp, Arabidopsis thaliana landsberg
gataatagatattgggaggagaagatagtgagagcggtttctgggtttcgtgtatctttgcggtttaaatgatgaagaagaagaacgggttttgggggttcttttgtctttacggaaacccgtgcagagtgagattttgaatctgacgaacctctaacggctagttctttccacgtttcttttgaggggcttttatttttagcttatttcaaaagctctccccacgttttaatttcttctagaaatcacctttacctcaattttttccatggataattttctcatttactgtttctgcaaattttctctatagattttttttttttctgtcaattatcatttcatctttaattattacttcggtattttgttttttttcttagctgccaattttgatgtattttgtcttcttgtaattattattggcccttaacacaaaacggtcatttattgttattttctttttcatcctctacaattttaatttatttgcagatcaagcgggaaatagtaactactaaccaatttggcgtataaaaatagtaaactacgtttacaccctcattatacttcactaggcagaacctcccctctattgcagcaagtgggattggaatattattatacgagtctttgaggtgtggagtcaaggtcttcggcatgagattttgaaatatctgcaagcctgtatatttcgtttttttatagcaactttagttgaatatgtgtatacaaatattaagaaaacaacataaatggataaataaactcaaaagataacacatgtattctcattttccttggtcaaaaattcaaacttcaaaaaaaaaaaacaatcaattctccatctctttgctatttattcaatggtgtgtttttgattggatcacaagtctatcattcagttgacttcataataaagtatatcaaaaccatgttcactcagattttgatgcaattatatgctattggacaatttcaccagtctgcaatttcttttacaaaattatgattgaagtccttagtgaggtttaatgaaatactaacataaattttcacataatactcttttgtaattcgattaacgttttttttctttttgtgtataatcatcagttctcttcattcctttatatatataatgttttcttatattcatcaattttataagtttgcagtcctgttatatattggaagcataaaatcgcagtggaattttcaagaaaaattgttgacatacttaaaaatgttcttttgggtcaaagaattaaaatgtttat

SEQ ID NO: 58945 - DNA, 601 bp, Arabidopsis thaliana landsberg
  unsure (1)..(601): unsure at all n locations
acaaaattataccagttgtatatcttcgcgcgatacccttctcactgttaaacttgacatgggtgaaatatctgtagaagcgatcctgttcctgtcagaagaagtacgcatctaactcctgtcagaataacaaactcaaaaatgtacttaactgataaagcatacaattaagacacaaaaataccaagcatttaacatactaatctcctattaaactgagcttcaaattagaagccataacccataagacatcaatattcaacatatttaatacaacattgaatatatattttttttgcgataaagagaataacaagagctaacaaaatcgaattagtcgacatagaccaaaaaaaaaagaatccaacagaggaagatggatttaagagcaggagcttataaaattcgaaacccataaacttttccaagaattcgtaattaatttcttgtttaacgaaagctggatcaaatcaaatcctattaaccaaccatcaactcaaataaaattcgattaaaccccacaaaggggacaggaaacccaccgatatacagaaaccggaaccaggaaaaagaattttaggaaaaatccaacaaanaaaaa

SEQ ID NO: 58946 - DNA, 1137 bp, Arabidopsis thaliana landsberg
atagtgtgaagttagaattatgaaagacgaaatcgtattaaaaattcacaagaataaacaactccatagattttcaaaaaaacagtcacgagaaaaaaaccacagtccgtttgtctgctcttctaggttttattatttttctattaatagttttttgttatttcgagaataaaatttggacgatgtccgaaccacaaaagccgagccgataaatcctaagccgtgcctaactttagccgtaaccatcagtcacggctcccgggctaattcatttgaaccgaatcataatcaacggtttagatcaaactcaaaacaatctaacggcaacatagacgcgtcggtgagctaaaaagagtgtgaaagccaggtcaccatagcattgtctctcccagattttttatttgggaaataatagaagaaatagaaaaaaataaaagagtgagaaaaatcgtagagctatatattcgcacatgtactcgtttcgctttccttagtgttagctgctgccgctgttgtttctcctccatttctctatctttctctctcgctgcttctcgaatcttctgtatcatcttcttcttcttcaaggtgagtctctagatccgtgttcgcttgattttgctgctcgttagtcgttattattgattctctatgccgatttcgctagatctgtttagcatgcgttgtggttttatgagaaaatctttgttttgggggttgcttgttatgtgattcgatccgtgcttgttggatcgatctgagctaattcttaaggtttatgtgttagatctatggagtttgaggattcttctcgcttctgtcgatctctcgctgttatttttgtttttttcagtgaagtgaagttgtttagttcgaaatgacttcgtgtatgctcgattgatctggttttaatcttcgatctgttaggtgttgatgtttacaagtgaattctagtgttttctctttgagatctgtgaagtttgaacctagttttctcaataatcaacatatgaagcgatgtttgagtttcaataaacgctgctaatcttcgaaactaagttgtgatctgattcgtgtttacttcatgagcttatccaattcatttcggtttcattttacttttttttagtgaaaaat

SEQ ID NO: 58947 - DNA, 765 bp, Arabidopsis thaliana landsberg
atactggagtgggaccctccatagcatcgggtgaccaagtatgcgatcctatctgcgcggatttcccaacagcaccaataagaagtaaaatacaaataagacttatggcattcaatctcatattgcaagaaatccaagaatttctgggggcactagcacgagcaaaaatggttgaaaagtctactgtttgaaagagagtaaaacgacccgaaatcccaagagctaatccaaaatcacctactcgattgacaagcatagcttttgtagctgctttatctgcctgaagtcgtgtaaaccaaaaatgaattaacaaatatgaagcaagacctactccctcccatcccaggaataattgaagagagttatctccagtcaccaacattggcataaaaaaagtaagaatggataaataacacataaatcgagggctatgcggatcctcggacatatatgaaatggaataaagatggaccaagctacttatggatgtaaccacaattaacatcactacggtcgggctatcgaacacagagtcagaagtgaattacgagtcggacctatttgcgaatcgagcgagctccccttgcatgcaatgatgtggtggtgaacctctcattctaattcagtgctctccgaaccgtgcgggaaggttttccatcacacggctcaccaacttgatcttccggcgggaaccgtatgtccaaacaggcctagaaaaacaggtaccaattgccactaaagtgtacgaaaaaatccgtgcttagg

SEQ ID NO: 58948 - DNA, 1501 bp, Arabidopsis thaliana landsberg
actttaaacttatatgagttttttgactaaaaaagaaactaaagagatcggggagatgaatgatgagggagaaacatacaactctaaagaaagtaaaggagcagcgatgaaatcggttgtccgcaaacaacggatagatctgtcgatgttcgtttttggaactccgcgttgaatcagcgtcgatgtttctcgtaagtttgcataatccaaaaactcgttttcgaattataaatttcatcaaatccccgcttattttgggtaaattcaggcaaaaagggtttttgcgttcttcgatattatctcttattactattaggctattatcatcgccttattggggaaaaagcttcaaacttttatataaagtctcttcctttttctttctttctcggtggaatttgcagcaatggaagataaaccattagggattctcagggttcatgtcaaaagagggattaatcttgctattcgtgatgccaccaccagtgatccttatgttgttatcacattggctaatcaggtttggttcatgtcctttttgattagattatgcatcgttttgggtttgattctttggtgatcacaaatggaatgtggattatgaaatcttattagagttatagtcacatggtggaggtacaatgtgagggactgatcattaccatgtgatggtttttgtggccacccatgtgagaaagatctcaatttgatctttgctttgtgtttctttggctaaaaaacaaaactttataagacatcctatgcaaaatcttgtcatgttctgaaattacaaattcttgtattagtcttgtgttgcgaaacatatatttctttttcaatataaaattttgttgaagggtattagtctttttacgattagtctctatgcataatcttgttgaagagtcatctcccaaaactaatgagcatgtataggctcttgttgaagggtcatttcccaaagctggcaaatcataattacataatcttgttgaatggtcatctcaggatcacagtttgtcaaatagaaacaatgtcatctgggttaagaaagttgaaagtggacatgattgacttggcttagatgattgtgtctctatggttgtactttgtgaagccttctttatcattatttgtactatgtaaccttttgtttgtgtatttctttttcatatcttcttgacccgtttttatctcgttcattcagaaactgaagacgcgtgtgattaataataactgtaatccagtgtggaacgaacaactgaccctttccatcaaagatgtgaatgatcctatccgtctggtaagctatcgtgtctattacaatttacgacggtcttctaaagaaaccgattgttggctcatattatggtctgtttatgcagacggtgtttgataaagatagattctcgggagatgacaaaatgggtgatgcagaaatagactttaggccgttcctagaagcgcatcaaatggagttagaatttcagaagctccccaa

SEQ ID NO: 58949 - DNA, 1322 bp, Arabidopsis thaliana landsberg
cttataataatgcggccattaatcagagaacaatgagatactattagtgacacgatactaagttttagtgatttaatgtacgggccatataatattgtgagtttggtggacctaaaaataattctcattgggcacttcattaaggtctcaaagcccaaacacttgtacacatgggttcgtaactgtttccgtgtgtgatattactagcataaaacgtttcctagctatgtgactcctcaaaaaaaaaaaaaactaccatttgattagaggtagattttcatcaaacatattgtattcttatgaagacgccagacggcatatttcatcaaattataattcttgatgcctcgttaattaacgtgtaggtaacgatcatgttgttttttttggtgtaaaaaatgaccatgttttattgtttatcaatgactttgaatgtaactttgctcatttgattttctttaatagttactacttactactaggccactagcggtgttaccttgtaaattcatcaccgtgaaagaaagaaaaaatcatcaccatacgtacctgacttgtcaccaacgaaatatatatatatgtcccaaaacccccaacaacatgcattttaacataaattaaaaccctttttacaaaagaaaaaaaaaaagaaaacaatccacaaaaacggaatcacacgtaaatataattaattaattaggaacaaactcatattccatgaaagctggagaagtccttgtagcagaagcaacgaaagccctagaatgccccaccattgacactactctaaaagcttcttcttcataagcttttctctccatttcttccctttttgcccttcttctccttttctttgccgtcactacagcagccgccaccaccagccctaaaagcaccacccccaccgtcacagacccaacaagccctccaacaaccttcctccaccgtccgatcttctccttcttcatctccttttctcctccaccattcgattttggatcatccgtcaccactaaaccaaaatgtccattggttttaacggcgcacacaaacggcttcacttcggcggcaagcgttacttttccatcaagttcaaaagtagcgcacattggcttattcaagaacgttctctctaccaccgacggtccagaaacgttcccaaaatcaacgttggatggatctttagtacgggctagcaggacacttatctgataagagctactcacgttattccctaaaacaacatcgtttaatgcgttataagctaagagccctagaaccggagacacaagtctataaccggagagatcatagtttttgta

SEQ ID NO: 58950 - DNA, 2104 bp, Arabidopsis thaliana landsberg
atttacagtgatttactgtattagtgatctattaatatattattcatttatcgtgacccgtctagaaggaggagggttggttatttttcaatttagtttaagataatactttagactatgcaatcacaatactatatacacaatggacggtcctatttgtaattaagcttattaatttacatatatttacattttttcaaaaactcaaatatgtaatttaatgattttacgctatatctagcatagtatatataagttatttcagtaaaagtttaaggcgtggtaaatacattgcatttgtatattaaaaaatcaaaatcaaaattaagcaaaaaaaattttgaagatggaattgtataaattaaatataaatactacactagtttagaattgtatagtgagactgtgagagtaacctgtactatttatactttttttgtcttctgaattttatttggaaatatacatgatttttaaaatatttatactaagtaattacaaataatttgggtgagaaaacaaaaaagaaatagaaaaagggttactaacgccaaaaaaccaaacccttgtctgcgttcttcatcagcgccgcgttctcaaagttgctgtcacaatctccgatctccaattttatgtaagtcctttctctcattccgatttcaagtttcgtatcgatctctaagtagattcgtattaagctataagagattgatgaacctagttgctcccgtactcgagaggcttagatttggaatcgaaattgtgatgatgtttaggtaacgaaacccagtaactaaatccttgcgttgagcttatcaaaccctaattttagaggatttagatccatttgcatttctgcttagtgattcaataattagtctccaaagactcttcttttaacaacatttcaactaatctgcttttgatttgtaagaaatgttgtgtcaatttcattctcactatctatgatctctctttggattcaaagtttgtatctttttgcttctatgcatcaccaaatctcttttgggattcaaagtttgtatctttttgcttctatgcgtcactatcatataataccttccttcaattgatctcctctgcttttagctagcaagtttataggtttcttaacttattgtgagctaattggattacaatgagatattatcatctttaaagaattgtggttttgggcatatgcagaagttatggctggaaaagctgcagaagctgtggcaaagacagtgacagggtttcaacatccatggagggcgaaactcgataagtacagaaccgagttgacgaaaggtgtgtggggttattgggagatgggagcatggaaaccgttagggataagtgcacgaaggagggctatgctgaggaaagaagtgttgactaatggagaagattggccttatgatccagagaggaaagctatgaggacaaagaggaaagggcataaatgtgatagaatttcagctgagaaaagagagaacactgcgaagcttatgttgaagatgcctcagatgttgcttgattataagaagagaaggtgggaaaagaagatgaaggaagaagagaaagctaaagaagacaagtaattgatttgttgagatcatgattactatagacttggttgatgaataagaataatttagtttgttgatcttatgaaatcttggaaggtttaagatcacaagtttgcttctgatatacttttgtatgatgtttttttatgtttgtttttaacagaacccgaaaagtgtttgtggttaggatcggaatttgtttttcaaccaagactaattttgactgtaaaatatggtttatgaaatatcggttcgtgcaatttctagaagaaatgaagagatcgataggttttgtagataaattgataagttaaactaaatgatagaatcgtaacaaacgaaaaataatctcagtgaaagaaaatctcaactgtttttatttagttaattctataaatatgatcgttttttcggatttttaaggaaagaatacacgagaaagtatttatctaaaattaataatcaaacatatcaccatgtttatattttacaaattagattgatggattatt

SEQ ID NO: 58951 - DNA, 1471 bp, Arabidopsis thaliana landsberg
tacgaccttgggtttgaaaaattgaaacgatgagaagctcagtttgaagtttgaactttgaagcatctgtactatgtagtggattctgctttcagtggttcataacacaaaagaagtattaaaatcttagttagcagagctctcaaaccaaaagaatagtaacaagtggttgtgacacccttttaactacttctcactagtaacgtagcaaagacaagattctttattcttctttcatgtgtttatatccatgaaatttgaaaaatagtaataatgtaccttggttacaacttacaagcaacatcaccaaatacaatgcaaaacaaaagaagagagaagatctacatgatttcaacattaaaaactaagctcttattcttccctgaaactggttttgatgttcaaacttagaatcaatctcatcactcagtagtttacatcattacttcttaggatactctctcgccccgaaaatagtagatcctattctcacatttgtgcttcccagttcaatctgcaactcaccaaaccgtaaagaaaactctttaacattttgaacagaaagaatttttcactcgaatcaacaatcacaacaacttactgctagttcaaagtcaccagacatccccatagatagctcacattgctcctccggtattccaagctccttacacacttcacttctgcatttcgcaagcaactacacttacaataagaaacgaaagtgagctcttttaagcatctcacgatattaccaaacattataggttcaaaccagattatataaaccttgaaattctctggggttgaagtgtaatcagccatccctattgtcatcaaaccagaaaactcaagattcgagcaagcttccttcacgtgtttcgccagtcctacgcatcccgagggttccacgccgaatttagctgaaagttttggtgaatacgatcatgtaagatagctttaagaaaagtgaaagtaggaaaacatttgagataaatgttgaagaagaaattccagattcttacagtcttcaccactggtattcacttggacaaataccttcaagggcttccttccgatattaccaaccacacgatcaagcaaatttgcaatctataaagcatatgcaaataaacaaaaccggtggaccgttacacgtatattccttaggtggtttgaccacttattaaactcttcaatccatctttaatatcactacccacaaaagttcaacaatagagtccactatctggataattgtagtattcttacccaaagatcatgatgttttcgttatctaacacctcgaaagagctctagaacatttaacaaaccaatttctctttaaatatacaaaagagaaacttttaccttttcatcatcaacacttttccacggtcacaaggttaggaacaccagctgatcaaaccaaagaattaagaatagtacttaagtgtggagctttacaccc

SEQ ID NO: 58952 - DNA, 428 bp, Arabidopsis thaliana landsberg
tatgaatattatatatatatagtatatgtatttagagccctaggctctatttagctacaagaagccccagccaaatacgaacacacgtacactcacagccgaccggactttgcagattgcatatatattagagtgctgccggcttagcttctctttgttctcccggggtgcgtttttgtcaaatggcccacaacacgccgagaatatcgggctcctccgcgtgcatatcggtttctatcgcgactacgcactgttcgacgactccgctcacatcgtcgctcgcagtcgacccaggcgcaatcggtgatagagcggcgcctccttgtcgaccccaatccgagctcctctatcctcgctgctgcaacttgagacgagagaccagaccggagaataccccagtttctccaccgacacgactgctttcacgt

SEQ ID NO: 58953 - DNA, 1174 bp, Arabidopsis thaliana landsberg
cagacacaccttccttcacatgcttctgtatctttagatatatatacacacgcaaaatacatccctctctctaaaacatcataatgggaggttcgtggcgtttcttctttagcttcttcggcagtttcaaagcgtggtggcgacggagacagagatcgaaccaggcaggaacggacgatgagatgtatggtgaagatagtgaagccaacttctataattggtacctcgttgaaccagctattaaccggagatccactgatttcatcaaaaggttccacgagactcgtgactgattccatcaccttcttattcttctcttcagctcttggagtacgtagtagtttggaagaaaatttgtttgtttttttcggtttcgtctctgtagtacgtgttttctatgtgatttcaataaatataatcctcattggtcaagtctatcgagttgaatattatgtgtgtttttctctacgtaccttattaatgcatacgacaatgataaatcaatcgttggtttgtgttatatatcaaagaaacacaaaaacagtggatatttcttgtaaaaagttaaataattatggttttacattacttcaccttattccaaaatgaatctcaaacaaagaaatgcataatcaatgagtctccacagaaaaaagggaagaagcttactccttaaaaaaaaatttagcaagtataatttttcacatgggcttgcataaagttgcttatgagaagattgattgtgatgcctgtataagtatcgtagaagaattagtccgcatatgattggtcaaatcttaaaccaaaagtgtgtatatatttagataaggataatcgttttcttcaaataaaagtgtcttggaaggcgagaagattgttctccaggttaaacccaaacatgggatatgatttttctgttgtctatatcaattactctcgttcatgttgttgttatgaactaattacatttactatgaatccttttggataatttattacttcactagagaaagttgaggaggtgtctaatcataagtttgccaaataatcagtcatgtacgttcttattattatagggcgatatgctccaaataatcgaaaccaaaactcaaaatctttatacaaagcttttggaaaagaaaaacgaatatatgttagaaagaagaagctttct

SEQ ID NO: 58954 - DNA, 569 bp, Arabidopsis thaliana landsberg
cgttgttgtgcactgtaccacgttcctgcgaaatgcgctgcctggcaaagtgcggcgccatataccataaactgctttcgtgtcactggcatgcagcatcgtatcttgcctcgtccttgcttgcgtccggcatggttggttgtgtacagcagctcgtggttggttgtttgctgtatgggcaagttccggtgtaagtgcggctatactagtagcctactcgatttcgccatcccgtcatccgtcagccgtcagccgttgagcactcaccaagcgtactccgtacacccttggatttgttcgaagtctgtggaccaagcgcgtttcatgtctttgctgcagctcgttgcagtgtaggattctgcagcacccactcgagcgccttgctgctgctgcggtggcgttatcggccaccgtccgcgtcgtctcgtccttggtgacgtcgatgttgcttttggagcgactgggcggtcgcattatgcgtggttgtgctacttgcgcggtcgcatcaacctctcccgcaacttaactgggatgcagcttgaacacgcaacccctgccacatccctgca

SEQ ID NO: 58955 - DNA, 1154 bp, Arabidopsis thaliana landsberg
aaagattgttgtaatctttctgtcaaatgatcttcttcttttgatctttttctgtcttcaggaactggttgcagattatccagtgtattacaacagttggtcagctggagaatatcagttgcttcaggaaaattatccttagtaatgtcttcagtttcccacacaatctcggaatcttctgcacaaaaattgatgatggacaaacaaccggggtaatcaatagcaagtatttctggagcttctatcttcacaatctccaaaccagttacactcatatctaagttagcctttatatcattgctttcctcatcctctttatcttcttcttcgcacccagagcttgtgtaagcagaaatgaagttctttacacaaccaatgttctcatattctgaatgttgtggattaacatccaattccatctcctctctagacacactagagtacaaaacaatttgcttattctgaaaatcagcatcgctaaactcttctgatgcatcttcaaaagcttcctcaatggctaccactccgggaaaatttggctctgcactgcagtatggaaccagcctcatgtcactggacgaatcaagcattatttcttccaccaacactgtatttgtaggagattctgacttttcactacaatccatggcttcagaaactgaatagctatcatcccaaacttcaggcttgacatgaaagagcaccaacggcaaatcaaccttttccacagatggaggagaggaagtagaagtaccacactttgcttttttacgctcctgcttcttcttccttctcttggagaatttcgtatcccaactgctaagaggctcctcaatatcacatccttcatcttgggtcacatactcttttttaacttcaacgttcgagaatgtctcagtagtagtatctctgcagtttctaagtttccttttcctttctttgcattgtttctgaatcatctccaatgttgtcatgctaaaatcttcagactcagaaccttgtgtaaaatcagaaccattgtccaaatccctgactactcttggaattgactcaacaccttgactgtcttcaagattgtattatatccaccaactgtctaaatttgagctttggctttcttctgccatccatattcatcactattttgatagatc

SEQ ID NO: 58956 - DNA, 745 bp, Arabidopsis thaliana landsberg
atggagccttgacgtacactttctggaaattttcttcttctttaggaagcttttctccttttaacagcttccctaaagcacagcaaaatacaagttttaagtacacttacaaaacaagatttgtaaaatattctttttctttaggaagctattcgacagttacataagtcattgttttctcttaccaaacgtatcccatcttgtagcatttgaaattatcgtcttagcgaaaaattctcttccatctgctagccttacaccaacctgaaaattaaggtccagaaaataaaacgattttcataaccaaaaaggaatttcaaagggttaatgaaaaaaataaaacttcaacaagactcatacagaaacttactgcctttccatgatcaagtattatactttttacattagccttgtattgtatttcactgccttgatcaacaagcccttctgccaaagacttggcaatcccaccaactccaccaaccgggtagttaattcctccatagtgcctgtcacataaaacctgtccttgaagacataagaaaaaataaaataaagggtaacacgagtagacaccaaatgcaaaaacaagaatcctaccatacttgcattgatcattggcgtctgcaaagcattgactgtgctcacaatgaaacactgcaggcaaatatgaagggtgatatccatgctatattctggatataaaattgagtgaaaaaaattgtgcaagttaagaaaaaaatat

SEQ ID NO: 58957 - DNA, 1683 bp, Arabidopsis thaliana landsberg
  unsure (1)..(1683): unsure at all n locations
gtattccaatggtaagagatccaaagtactttcttttgtctgtactgctgggatgttttaggtcgatttggtattcaaaaatttccatctgcaaacttcacgatgcttgataaactgttgttgtctctctcttccctggttcagttcgaagttgatgaataacaaatacatgtgtcttattagaagcagaaagtctcacataagcagatgttatactatgngatctttttctctctcttgtatttngactaaagctgttatcattggatgcccatgtggtgaagtgatccatcgtgcttttagaaagggaatgaatttgtactataagggtttggggggggctcactcttcactagtgcaatagaaatcgagcacagtagaataatataatgagtttttttaattgttctcttgcttttctctagtgggtcatctttacttgtaattgaagcaacttgctatcatatcttctcagttctcacggtaaccgatctttcttcatgaatccctttgattgtgtagaagatttgatgtattattaaatttgtagatcgtatgactagtgaaactgtgtcagtgtaccttccttttgatatacttctaagtgatagtcaataaactcaatggccaaacccctctagtaggatcttcattgagctatggatcaatcaatttggtgagcttagttttgctatagtggtaagttttctttggaggaaggggtagtattgtcaaaatagtcattgaagacttttcattgttggtgtccaccgaaatcttgtttagggatttgtgaaacatgagagtttgtgaaagtatggacaacacacggggacaaatgcatagagactagagttatagaatggtgtgtggtcatgtgaattattaatctttcaatactgtttctttaagacaacagttgaaagtgtagaagaagcaatggatttagccgaaccttttgtttttgatatctttatatagttttgacttttgatcatcttcctcttgttttgttgcttttgtttagccatgtacactagtaagagaaacatctatttgtcctgaacagcaacatgagtttggtaaataatcttatctgatcattaggtgtgaatgataggtttttgggtttgtgatttgtgttgtgaaagttgacaaatacatttatataaacaagccgatccaaattcttactctactccacagacttttgtctggtcccactaactagcttcacattatcaaattcttcgatgaattttggtaaatgtaactaaaatatcaaattcttcgatgaattttggtaaatgtaactaaaatatagtttggtttagaactttagattgtggagctagtaacattaacaaaatatatagtttgttaaatttcaacacaattttccaactaaatccttcgaaatttcatatttccaagatttatagttaaagtgtaatgaaacactttttaattgcataaagtttgcaagcaaattatgcctgtcaccaacagttgctaaagtgcaaaacttttgccaactcttctccattcattgcttcttcacctttattctccaatcccaantttacatctatcaattacatcaaaacccaaacaagcaaagccgacaataatctcttttgtaccacaaccatttgttttttccttatagaanaatcaccaata

SEQ ID NO: 58958 - DNA, 1222 bp, Arabidopsis thaliana landsberg
gttgttccatactatttttgtaattagatatgtataggattatgatttaagctttataatatgtgtggaaattaattaatatataagcaccaacctttttacagtttcggaattcatcaacagcagcaagatgagcaagaatttggttgtgagcaactatgtatggctcctcggatgaatctcctgtgggacattttggggcttgccatttagagcaccgtcctggtgctttcttacctttagagtaaccagcaacgctgtataccgatggctcgttaaacgtcgcccaattcttcaccctatctccaaattccttgaagcaaaagtttgcaaactcacggaaatcctctctacattaatttgttagcgacaaaaaaattatttaagaaaatcagatagttgaatagttttcttaattatactagaagaagaaatcttgagaagtttttatcaacaaaattacttacactatcctttcgtttaggaaacctccgtactccatttctagagcaagtggagattcccagtgaaagagagtaaccgaaggctgaattcctggcaattagtattacaaacgattaaaaacaaaagctggtataatatacacaagttggaaataacaattaagattgaataatataagagacattaagttataagatgtttaaccattagctaaaagttcatttataagatcgttgtagaacttcaccccctcctcgtttacaccttttttaatagttccatctgcaaattatatataaattttcatgagttataaaagtaaaaagaatcattacgtcattgcaatatagatttaagttagagataatatgtgtggtctggtaaattaactgtaaggacaatgagattgacttacaaggcaagatcctggtccatgagattgaaaatctgaagccattcgtgttcaactccttcattaattttatatcatcctataacatcacatcacgagcaatcgtttcaatttaattataggataaaaaaaagactatcatttactatatatgaaatcatatacacccataataaataatgacgtaccttgtaacgggtatagaagtcgactccctcatctccatcgccattttgttgaaccttctctgaaagatgccacaatattggtgatacattttcttttaagaaaagcttttggtaaaataaaatacaattcataatcacttggtaatttaagccagga

SEQ ID NO: 58959 - DNA, 552 bp, Arabidopsis thaliana landsberg
acactactcgtcagatagtacatgccactaccgaacgaggccaacatcgctgcgtctcacatacattcgcatgaccatggcttcttcaccgatcaccacatgacagcgaacatgggtatcatctatatatttctttttctctcctccgacaatgtaggtcactaagctctgcatatccacactattttatttacaccatcgatgtctaatactatggagatccggttgctgatgctccactacatacacacgccagaagccttattacctcttcttcactaaaacatatataacactatcacatgctgttataatgagatcataattacatatgaacataccactatacatatagtaagttatgaatatggtatgaatttattttgtttgtttttggcaacatcaaatataggtttgttataaattttgcataaaatttccaggcaagccattccttctgttttaaaaacaattggtatataatatttattttcgccacagaaaatatgttgcatataattagcaaacacaatcccctaatttaaatattat

SEQ ID NO: 58960 - DNA, 1753 bp, Arabidopsis thaliana landsberg
aaactttgtctcatgaatataatggtcgtctttttgtaatgctatgttacaaaaaatgatccattaattattcaaaaaaataaattatagaattctatttatatatgtaaaattgttgtaagaataaatttttatatttaatcttttatataacttctgtttaaattttaattaataattcttttattttttggtcaaaaataataattcctttttcaagaacatataatatgcaaatttgaacagtgacacatcaagaaacatgtggtgaaaactgagaaacatttatatagataacaatttatgaaaaatgtggtgaaaactgagaaacatgtgtctggtcaattttaaaccattaataaacttccttaatttttttgtaagtcaaacaatttctgaattgggacaaaggtataatgtttatgtatggtttgaaatgtaagcaaacacttgaaaaataaaaagtattagtaaatgctttaagaaaatactataattaagagttatgatgaacacccattattggatatataaccacaaaaaatattagcttatatttcagaaattttagtaaaagaaatagtttcaacaaaatctttaaagtttacaagagatctttacagtactagttattcataggagtcgagtgtaataactaccaactaatattaaatatatacacttctctcttaaaacaaacaaatctatgtttatatgaatgttgtaaaccgtggtagtcaaacactccaatttatactacacagtgtttgtgaggtgttaaatcatttaggcgcccaacagcgacaaagacgtttacttaaaatttacattatttttgtaatttatgtgactaaaactgtttattgtaaataatatttattttgaactttttagagattatgaaattttatctatctaaaataataatgttaagacattatatattattacatgtatacatttttgtgaaattatgtttttcactattatttattatttgaaatcaattctatatgtattcgggagaacatgtctagtataatgtgcttcaggtgaaaacatacatatgactctagatacgttgcatctctgtgtataccaatttgtgggcttgcattagacatttacttaatccctcgttcaaataattatatatctttctctgttttgtgcacataattggtaaaactatatcaatatatcacatatatggccacaactctctgtagtactaccaagactccttttataactacaagtacttgaattcaccacataaccgatgatacttttcaaacaacatcggttttaaagtctcagaataaacgaaaaaatatcaaacaaaaactactagactcaaaagtgtttacaggacgctcttacttatgcacattattcacttttttgccaatcgtttcaatatagctatcaatatcatcattgaatactatgtatgagtttcagaccctttttgttgttttaccttggggtcatctaagcagcttgaaggaggacttgggattgaaaccagggtcaggtcatgtgatcagcttgagggatgacttgggtttgaaaccagcagcaacgagcttctcctgctcagatagtgagtggcggaagtggcaacggtgaccataaggacagttatcaccagcaagaaccattctgcaaacctcagtcttgtaacggggatggcggatcactggacggagtccttatctgcgtacgaactggaatggtcacatatggcatg

SEQ ID NO: 58961 - DNA, 181 bp, Arabidopsis thaliana landsberg
ctaaagaatagggcggccgcgagctcgggccaccacacgtgcggaacagagctagcccaggctagtgattttggtcgacgaagacagaataccacagaaagctgtcgaagagagaaacacaaggaagaaatagcagtaagcaaagcacataaagcgagcacgaagcctaaacacagaaaat

SEQ ID NO: 58962 - DNA, 1467 bp, Arabidopsis thaliana landsberg
taaccccctccaagcttatacttggttatagagaatgaagcagtgcacaaagtcttctaagtgtgtgtgtctatatatataggtcgattatgtatatgtgtgtgaataaatactactaatattttgattagtattttcatattttatgatagtataagttattatggaaagggttcttgggttgtgaaatagggagacaaaggaagagcatagcacgcgtgaaatagtaacaaaaaaggtgtgagtgtgagctttaggttttcttctctgccccaaatcatatcgctctcactcccttccaattactttctattttatttgccaacaaatataatttaagttaggcatcaaatttataaaccgataaatggttaattgataatgataatagaagcagtccctactataaagcaaactaatatgaaaatacggatttatgcaaagctttcgtgaacccttcacttttttagttcaaatatcttatcatgttttaatatactttagtaatgaaataattgagaaatctcatttaggaaaataacaaaaatcgagaaacctataaactacattatctttttggtttattaaattaaatgcaatttcttggaggcatgattcatgaatcatgatgaaataatttgataaagaaaattatatatcaaagatcgtttcgagtaactaaattttccgataatacaatgaactttttgaataaccattaaaggtttttttgatacatgatgaggattcggtttagaatttgaatttcgatacttgactttcattgatagtagtattatatgaaattaatcaacttttttgtgaatattattgtgaaaatgtaaaagcaagagcgtatagtcagatttttgatgtgaagttgtgattaaggtagggacatggatattttcttaagcatgagctttaattcaaaaatgtcaaagaggacactcctaaaaagatttgttaatccatcataattggtattagctgctttttcctcatcattctgtttccatttgattaagaagaatcaagacgatgatattttcaaatgacgagtacatattcctaaatatatgagacctataatgatccattaactttgaaattggtaacgaatattctcacacaaaaatgattattgtgatatattaagcttccgcaccacgaaagcctaaaccctttattgaacagtgaactccgaccaagacagctctatatatgcaaatgtcatgtcgtaaccaaatcgtcgaaactatatgatatagtagaactaatcacttaaaaaaagggataaacaaaaagggtccattttctctaaatcacatgtgtgctttattgtggtccaaatcaatgctcggtttgttagttgttgtcacttttaaaactgaatttaaacatgaacctaaccggaaaagaagatcatgattactgatgtccctatgtcaattatttgattgggtc

SEQ ID NO: 58963 - DNA, 1659 bp, Arabidopsis thaliana landsberg
tcctgcttcagtgcagcagtttctgataagtacttcgagtctgagcaaggtggaacactacaactatgcatagttattttcagtatttataggtgggagttcactgttgttatatataggttatgattggggatttcctgggccaacgcgaggagtttcctcttgctgtcatgcatgcatatgttgattcaatgtaattttcagaaatgtagtttcattcggctattcgtgaatttctcaaaggtcttagacttcctggagaggcccatccaattgttcgtattatggaatagttcgcagaaaggtaagggcgccatgtattattctctgagatcattatatgaatctagtacaaatattaagcttggtagttatttgtggattaggtgaatggaaaatctatatttggttcttatcattttcccagttaataactaacatattatgttccactgttgccttgagtagatattgcgcagacaatccgggtcttttcaagaatgcagatacagcctacgttctagcctatgcagttatcatgttaaatacagatgcgcataatcctatggttttgcctaagatgtcaaaatcagatttcacacgtatgaatgccactaatgatcctgaagattgtgctccaactgaacttctggaagagatctatgattctattgtacaagaagaaattaaactaaaagacgatgacaccatgaagaagctcagtagtcaaaggccaggaggagaagaaagaggtggacttgtcagcattcttaatctgggtttgccaaagagaatatcaacagctgacgctaaatctgagactgaggacattgttaggaaaacacaggaaattttccgaaagcatggagtgaaaagaggagtctttcacacggttgagcaagtggacattataaggcccatggtgcaagctgttgggtggactttgcttgctgctttctccgttacaatgaaagtaggtgataccaacccaaggattcttctctgcatggagggatttaaagctggaatacatattgcttatgttcttggaatggatacaatgcgatatgcatttctaacatcgcttgtcaggtagactcgtaaaacttatttcacactcccttttatgtttagtgttgaatatatatttaggttgcattgtatattggcagtttgtgtagaatattgtgccattgctgcgcaatgcatgttgactatttttctttgaattgtccataggttcactttcttgcatgctccaaaagaaatgcggagcaaaaatgttgaagcattgaggatattactggggttgtgtgactcagaacctgacacccttcaagatacttggaatgcagttttagaatgtgtttctaggctggaattcattatttctactcccggaattgctgcaacagtaatgcatggatcaaaccagatctccagggatggggttgttcaatcattgaaggagttagccgggagacctgctgaacaagtttttgtaaacagtgtcaagctgcccagtgaatctgttgtggagttttttactgcgctatgtggtgtttcagctgaagaattgaagcagtctcctgcccgtgttttcagcttgcagaagctagttgagatcagttattacaatatagcacgtatccgaatggt

SEQ ID NO: 58964 - DNA, 498 bp, Arabidopsis thaliana landsberg
tattatcacgtagctagtatctaagggatcgaatatgtatagaaaaatgtatcgaacaaggaggccatgttgctcatgactcattgatcgatcaggcggacccaatctaatatcgcatatgtattatatacaagtcttactttgcgtcgacaatcgagactattagactgaatatatcaatttataaaaaaaacaaaggtatggtgactcattgatgatcatatcatgaatgcatactctgtttgatcaatctatgtaaaaaaatcattgaccacacaaaaaatgaaagtttagtagatgtcgaagactagtttggaatttgactaacgttatatttggaaatctgctcaaaaagtttgtgtttaagaaatactagtattcaaactacaaaggataacttttttagtcatattgaatttctgtttgaaaaatcatataacagaagaagtgttactatgagattaatgtgtaccaatatttactttaaggccatcatct

SEQ ID NO: 58965 - DNA, 1212 bp, Arabidopsis thaliana landsberg
catttcaaatctctcgtttactttgatgccgttggaaaaatcaacgtacactgcacttaaattcaatatgttacataaatagtcttatttatgaaaagattaaatttattatcaagagatttaatgtaacacaaaccatagttatatacaataaaaaacatttccgaactttattagtatgtgggaaaaaaataaacttatgagttgcgaaatatctaacacaactcaaggataaacattgtaatttctttcatatagcatcatcactagttcaagtgtaaatcgatctaattttgcatagaactgaaaggagtgaacaatgtactaggtaaagaagaacaatgtttttgtttgcatgtgtattaagctctaatttaattcaaagtgtgatatactgatatgattaggctagttcctcatctgggtagacataattataagaattttcgaaacctcatcttaccaaaaacatatataatctctaccatttgtttctctcaatatgccctaccattaatggaccctactttgtacttatgcaataattcttcctgtttttacaatagccattaggtaggtttctttagaaattcggatgacttgtgtatccatcaatttattcgccgttgataacaggttcatgcacaaatttcttaagattgtttcttcttgccttaactttatttttttatcaaaaaaaattagatctagctcacaaatcaaatttgtcacaagatacgaagttatttgtttcaaatttagtcctcgttagtcatttaatgtggttttgttattttgaatcgtttggttagaggaaaataaaatgttatttcaaatcaaattcagatttggacacattggcaacaaaatgtgttaactctcacttgatgatggtatcaagtcattccaaccattggtttaaaaatgatgactaatttagtaagcaaatgtgtgtcttcttcataaagaaatacaacaagaagtgaggaagaaacaatgtggtcgactatgattaatgtgatctattgggaacaatgtgattaggcgatgatgaataggtcgtattaaatcgtttactaaaatgatagatcagtaacattagcacacaccagtatgtatatgtatatactaatgcatgatcttctaaaatattcttaaaatccatctaactagctccgaattcgaatgacagcaataaacactgactattta

SEQ ID NO: 58966 - DNA, 119 bp, Arabidopsis thaliana landsberg
tgcttcagattttggttttaggttgaggcaattgagtagtcatgtggagtctctagtgccccttacgccaaaggagcaagaaggaggtgggtcggtctccggtagatctgtgcatctgt

SEQ ID NO: 58967 - DNA, 1357 bp, Arabidopsis thaliana landsberg
agatagaattaaaatatgtcgctaaaaatgtttgttatgcacaccaatcttaattaactttttggaaagcaaattgtttgcttgtaaaaaattgttctgtaaataacatgttcaggatgacggaacatagcacccaagtgaaagtacacgtaccaagtttctcgatcaaaagatttatgacagttaaaatgtgctcatttggaattccatcacatgagtttaggacactctcaaagacagagcatacacatcttgctgcatttatattgtctccactggttacgttatcctcgtcttgattagacaagcttccctcggtcagaagtttctttttatcgatgtggctactgatcaagtcttttaatatagttgacgctttggatgcaatgtcgtccgtggaagtcagaaggcctaaagcatatgaatggaaagttggaattcatcatgacagatatattgaaaaatcgaatcccacaatgaagacgaaaagaactacatgctgaaagctagggagggaactaacaaacctgccaatgacgaacaaactagtggaagtttacttagacataatgtcggttcgactgagtaggctttctccaaagcatcctttaacagggtggtcacatgcacgatagtgtcagcaggattcttgtcgtgtaaagataaataactagtcaaagtagttacaagtccttctatctcaggaacaacaattttatcttccgaattcttgaagatagtatcaatccctttgagaatttgcctcgtcagcggcgaaaactgagaagccataagcccgcaaagttctgaaaaaactctcgaactaactttggcagatagaaatggaattgcagcactgaggacatttagcacatgagcagcctctgcattctcggatttcaacgtcgagtcaaccttagaaccttcctcaatcttcgtcgagcttaagtcagataagacaggcttatattctttaagtaaagcatatactgtattactagcttccttgataacagtagatgatcggagagaaccaaataacttctctagacactcttgagcacatcttctaacctaacagaagcaaaaacacaaaaaccacgattccttgttactataatataatacttcttcattaaaatcaaagaaatgggaaactaccttgggacgtttatcaatggcgaatttaagaagtaaagcaaaaccaatttgaagagattcccaatcattcaaatcacagaaaccaataagcaaagtcccagtgcacttcacaccagctctcaaactcgcaactcctagtttagttccttcttcttcaattggttttactaaaacagccacagcatctcgagccata

SEQ ID NO: 58968 - DNA, 1146 bp, Arabidopsis thaliana landsberg
ctaagtgtatctttgttatgcacattatgatacacacacccgaataacaagttcatccacgaatatataaaagcagtaattacaaactcaatcggatttcttctaccttaaccacttataccggtgtagattacaatcaaaccaagcaatggcaaatgcagtttagtaatctcaacctgatcattcaaaatctcaccagctctttctatatatctccggtgggcataatcttcaatagcttgaccagatcatatgacttgaaatctcttccaaagcacagagccaagtccaaagctaatttcccatcctgaaaagacagcaagaaaccaaaaccaaattgatctgttatcgaacaaaaacaaactaactattcatatactctcagtttttctctacacatattttcgccattaacacctttgttcgtcttgttttatcagcaccattggtcaacaatatctttgtaatgtctcgatttcggctttgtacagctatatgtaacggagtccatccttcctgtaaaacaaagaaagtttcatcgaatcaaaatcagaaaatttttaatggcttgagataagcttctagttgctactaagtactaacattatctgcaacattgacgtctacattgtacttgaatagtagttttacagtctgcaaggctccaacttgaactgcataatgaatcggagctgcaccgtcctgtatgtttgaacaatctggttaataaagtatgaaccttttccaaatgggttctacgtaaatggaaccagataagttctcacccgatcttgaagatgcggattagctcctttcctcaaaagatgactaatcaccgcttcttttttaccaatgattgctttgtgaagagcggtttggttgtcctgtttttgtagattcagtcagtgacatgataaacaatagaaaccagatttggtatgtttaaaagcaaaccttgtcaacatcatcaatgtctagtccgttttcaataagattatccattaactgaatctgcattgacagagcaagtgtctgaagtggcttccaactcttctgcagattccatatttacacaataagtatacaaaccaagtgaatcaaaaccactacactcgtagcaatatgatcacagattgatatgcatat

SEQ ID NO: 58969 - DNA, 428 bp, Arabidopsis thaliana landsberg
atgtttgggggggggggggaactatttttattcctttttttttattgaagaaaactttcggcgactccaaaataccagtaatcacttcatcgatatgtgttttcttggttttgttgtgcttaatccagattttggtctccatagttcctttcaaaacctctacattgattgaatatattttcatatattgctatgaacaagtaaaatgttgttttatctttcgaaatcgcttgtgattgcgtatacttatattctcgattatcatcaacagatataaattagataggcaaaaacattgaatcagcgtgcataagattttctgtttttttttaacatctttttgttaaaagtggctcctatctattgactaattaactgtatttttttttcattccctttcattttaggtcagaggcggattttgtcaa

SEQ ID NO: 58970 - DNA, 473 bp, Arabidopsis thaliana landsberg
aacattagtaaaaaatcaagttttttacttctgaccagaagtgagagcaacacattgttttagagtgactggtggtatatttttctgtatatgtcgtttgctttgacatctcctttaatctcttttcttctgatttctacaatattaatgttttctcaggaattcctggatctgctaaatctgcactttgcaaggagttattgaacgccccaggaggctttggagatgataggccagtgcatactctgatgggtgatcttgtcaaaggtattttagaatgtaggttttttttgggtcaaaactgctctggtctctcaatttgctatgccatctcatgcaatattctacatacgggacaggaaaatattggccaaaggttgctgatgaacgtcgtaaaaaaccacaataaattatgttggctgacaaaaatgccccaaatgaagatgtctggagacaggtaattaatcgtacgt

SEQ ID NO: 58971 - DNA, 773 bp, Arabidopsis thaliana landsberg
ctgctccaggaatggctcagcttcacttaagtattttgatgaagatagctgatcattcccacactttcttcttatgtaagcagccctgcacgtagtgaagagaagagaagatgagatgctaatccagattcaaaaagatgaaaaattatctaggcagtaggttacacatttgctcaggaaataagtttccacaaaattgtataagcttagtctacatgtgtagagtagtgtgattttggtaccattcatcaagcatcttgcaaagttctttctgctttccatctgacgtaccccagattttcatttgcctggatgcagaaacaacaatgatattagaaaaaaatcaaattaaagcttgaccacgtcagctcctacataatcaaaacataatgagtatgcaacaactagtctccacgttttgttttacaatgcaatgcaaaacatcactataacatttgacacatcactctatatgtatatattcatagggagaaagcagctcacctaaggtagtaagttttgtaagctgctgccccgtctttaaatagaattgataggccattacggatcaaaaaggttctcaactgtaaaaaaaatgaagacatgtccaacatcaggatgataatgcaacgaaagagccaggaaattgcaacaaattacaaatccctctagccagaagaccttccatcctaaaaataccttgtatgtgagaaacttcattttaatcattaagttagcatcatcatcagccaaaccatccttttctcccgact

SEQ ID NO: 58972 - DNA, 763 bp, Arabidopsis thaliana landsberg
gacaccaagcatagaggagttagaaagctgtcatgtggtgtgtcatttttctgagagttataagcttatggcgattaatgaggaaacattgtcagttgtcaagaagttgtgtgctagatcaaaatcagatatacagaaagagcttgatagaaacgagttagtgttatggcctgcatatggtgacgaacagcgaattggcgatgtggaagtacaaagaagcccttacctgatcctaatttgcggttattgcaaaaaccagaagtcaatctctaagcagatgaaatactgtatgtcatttcatcttgaggacaagatgatactctcaaaggcgggtaagagtaagtgtggaggactgatctgtgataaacaaaagaagaagttaaggtgtttctcagaaggtgtttcggttataaggttaagattcataaatttagaggagtggtgtcttaagcacagtgaagtaaaaagagaagatcaagtgctagcttttggaatgggatggacaattgataacagggtgctgccacatgtgtttgtgaccttttctggtgacaagcgacctttcgatccaggaggagctgattgtgtgtatgagctgggtagagtatggagcctattcgagaagcctcagggaacaagtgatatggtcataacgttttcttcagtgtggcaggatagacaacaaagacctcaatatatcaagatagatggcactagagctttaaagggaaaaagaactaagaatatgaagccaagaatcaat

SEQ ID NO: 58973 - DNA, 1163 bp, Arabidopsis thaliana landsberg
agtttaacttcattccaacgggtaagttgcctcacaaatcaaaaaccagcaatgaagggttattcattctcaatgtggtgtgtttaaggcttttaagctttccaagattgattttgccctcttttgtacaggcgggttcagaatagtgacagtttttgactacgctgcgattgctatgatcctgattctacgcttagtagggatatatcggaggagacgcctagctcagcaggttagacatctagcagctgcagcaattgagccggaattagagcaaagggaattgtaacagacacgtgaatctattaagtcttgtgcagtttgatccttgtggataagtttggtagtagatcatagaaacctcgagagtcgtgtgcagttttacagacaatgatattgcagactttaaaagtatatacatatctccttttctaacagtggaaataaaatattgattggaaaagatctctctggaaaaggatcttaatctttgattagatgatcaaagggttgaacaaatgttcgaagagtagaagtggatattcttaaagacgagtgatgagtgatttaaagattcaaaaatttcataattatctgaaataaaatgatggtagaagaaagaaacagtgcctgtggtctcgaaacagtgaaacgacaccgttttaatttcaaaaagacaccgtttctgttttaattaattgctttcaaatcagtagaagaagaaacatcgattgagctttctacttgaaaaccatcttttccgatctatcgaatcggagcggcgaaggaaggagaatgggtgtccgtacaatatctcaggaggcattcgacgatctggttagggaaaatgttgaagatcttggtatggatccctccgaagctctcgaagacgctctctacactctcaagctccaaggcgtcgatctctctggtccgtttacattctctcctctctttttactttctccagaaattggccttcctctcgaactggcgttagttcaatttgtgtgtttgtttatggtacagggatcattacatgtgttcctggagaaagtagcgttaaggacaatccggtgattgcttgtttagatagactaaaagaattcgacagtgtttcaatagacggacctcttcgagatgaggatttcgatgagatatcg

SEQ ID NO: 58974 - DNA, 1278 bp, Arabidopsis thaliana landsberg
caattagtatgatagttccaatttagtattcaatggttgattaataaatgtgaataaatttattgtttttgtgggttaattggagataaatattattctatttttatttttgaaaaattggttgttaaaaatgagaccttatttttatatatacatgattaaactattttgaacttgaatccatttgttttggatttactcacttttccaatgttacttatagtttcgccagtggaatataaggttagaaaatatgagagtaaaaatcaggaattaggacatgtaaaatccagaaatatctgaggacggatctcacgattgattataagattcgcattacattttctcttcatttttttcagataagaaaattggattctatcaatttgtcgtcctattgttcttttcttgtttgatatacaaatacgagtcactgattttttttagttgattggtagagtcttaaaggaaacatcaaattcagacagtccttttacaaccatttcatccatgtcggctcattatttcgcaccacagaagaataacccaaaattattagaaaacttggaccactataagcacttgaactgtggtcgtgcactgactaatgtgagcccgttttggtaattctcagctgtgtgcgtaattgatgtcggcgtcaccttcagaaacttcgaaattatgtgtgatacaccgtgtttcataaattcatacacgtcattttagatacaaaattagatattttcatttgataaaaccgaaagaaataataaactttttctttcttgttctcattttaagtctctctttatatcactttctatatatattgaatcatgcaaggaatacacataaaatacttgtgttcttgtacttgtttggtgactcaagcaagactcccaagctatggcggagaaggtactttaccaagatctgaattttcatattacttctcttttattgatcatatccataattaccctctaatagagttactaattaaggtaataatgatcatgaaattatatgatatgcacaaacaggtagtgatgatgaaattgaaagtggatctaaactgttccaaatgctacaaaaaggtcaagagacgctatccggaaatttcctcgtgagtctctttctttaatatgagtttctttgatcatttgaataatcgcggggtgagaagactgtgaagcctgataaacggattacaatcttgtggtatgcgatgctttgcctaataaattacaaataacatacgaattgtttgatgagaag

SEQ ID NO: 58975 - DNA, 583 bp, Arabidopsis thaliana landsberg
aaattactctggaaacagatgtatgtaaagctcatatagtgaggggacaaaaattatctgaggtataaaatagattgcgatctcatggtcaatccgtttcggtggatatattagctacggtccatgcgtgactcagtccaaaattgattacaagcttgaacatacctttttcaacatagcattaatatatacttttgtcagtttgtcacaaaaatacatcaaatgtgtaataaggaatcactaaaacgttggaattaatccaaagctcaattttactcgtctgacataatctaatttttattttctcgaccattctttgaccccatagcccatttaaatttcacctaattcacttttcttggaattctttatgtccgtctacaaattttatcaaccttagttattcatgtgttacaatgtccccttgtacgataatgtttaattttgttacacgtttggtcaggtttgtgttttactcgaaagaaaagttcgctttcaaatagactcttttctgacgtggcatccatctatatgtaatatgttatgtgattagtgatcttagactaagaataaaaagcaaaga

SEQ ID NO: 58976 - DNA, 966 bp, Arabidopsis thaliana landsberg
actccctcataccatttaacaaaacaccaacattaaacagtcctacttctgaagatgcaactcaggtaaactagagaggatatagaactcactttatctcttccagcactgaataaagtcaatccatcctctgatagagcaattgaagtcacagctgaaaagtgcttctccataatggcaagacatttcttctcagtattctttgcattaagatcccagacacgaacggttgcatcatcacttcccgagataagctacaccacaccatcaagaacacactcttatcatcaaacaaaagtggaatatagctttacaagaataacatatctctttataatcgagaaactctatccctttataacacaaatactactcccagataatttgacccatagacggaattgttacatacaatgtttttgtttgaatcaggatggaagaggatacttgacacaacccctttatggcctctgaaataatgagtgcagaaaccaccatcaacatcccaaacaagaactttcctatcagctccagcagtagctagcaatcctccagatgcgtggcaagccattcccatcacaggtccttcgtgtccctgctcatcattaagcacaaattatagactaaaacaccacaaggacaacaataatcatatttagaaatcaaattttttaaaaaagagaaacctaattcaatatcagttagtacaatatatatataccttccaagagcgaatgcatttcaaggtttccaaatcccaaactcggatttgtctactatgtccagcagagaaaaggagcttatcatcaggactaagagctaaagcagtgagcgtatccgactcgccttcaatcgtggatttcactgatgaatccgtagaatcaacgatgttaatgacgtcaccacaggcgcaggcgatgaaaaaaccatcagatgaaacaatgaaaggaccaccgccgtagaact

SEQ ID NO: 58977 - DNA, 320 bp, Arabidopsis thaliana landsberg
gggcaatacacggaaaatggggatagcgaatgaaatagcattgcatcaaatggccttaaatatgccaggaaccatggaaagggcgggatgaaggcgtttgtgcataggcagcggccctctgacgagcattagcaaaaatggacgctaaaatagacgtggcaagcctccgctggcactatatagataccaggcgaggggcgctggaatataacttgtgcgcatgacagtaccgacactgccgcttaccgaatacctgaccgcctttctcactagaataagcgtgtcactgtatgatatgtcacgcagtctgatatgcacgt

SEQ ID NO: 58978 - DNA, 584 bp, Arabidopsis thaliana landsberg
aaagaccaagtctccacttttttttctctttattatatacatttaaattatttaatatacgccaactacatacatatccagtgtaatttctcgttacgtcacacccctttcgtaatcgtctaatttcagaaaaatatccagaggtttaaatacatattcccatcattaaatctagacataaacacatcatactcacaaaatttggcagcaaacatttactacagacccataaatgaaaaaacgtattcacttgttttcaattttcacataaccacttccctgagtttggtctcaatttgattgccccgccgaggcattactacgccaagtgcgattaaggtcccatacagtgtaacgggacccactataagacagcgaccgaccaattgcgtgttaggagagtttcaccaaccccggaccggtttttaccggatataacagaaccggtacgaaccggtctcattatcttccatcctctttatatagacctcatgccatgtgtgtgactcaccaagaaaaacacaatcgtttaatctcacccaagaagacaaaaacccacagagagaaagagagagaaatggcga

SEQ ID NO: 58979 - DNA, 1450 bp, Arabidopsis thaliana landsberg
atcaacatttaaatccaaagttctaaaacacgtcgagatccaaagtttgtcatacaagattagacgcatacacgatcagttaatagattttaagtgccttttaatatttacatatagttgcagcttcgattagatcatgtccaccaaacactcacaattagagacaagcaaaactataaacattgatcataaaatcattacaacatgtccataaattaattatggattacaaaaataaaaacttacaaaagatctataatgtgataaattaatgtgtagctataattaaacaaaattacattttttactatagttactacttgagataatgatctcaaaaagaagcttcatacgcttaaagtctaatttgatactgtcctttatctaaattactgtttagtatatggacatgagagaaatatgagcagaggctgaaggcttaaaccttcttccctctgttctctcacacagccgcaagtattggcttcatcactcagttttctcttttctttatatttgttttctaatctgttttttagtctcagttcatgattttgcattttctaacgaagatgtcggaggaatttacgtatctataccaaagagatcgtacctcagggttactgatctctagccacggttttgctggaccgctgaaatgtaaaaccgaagcagatttcagaatctcttgaggggattttacggatcgagaacctagtccagcgacgtgccatgatggttcaagagactgtgtaagtcctttgaaagcaagtaatgtcggtggtaaagcccctggttgccataattgtagtcctgacctaacactctgcattaaaattaaacatcagaatttgtgtaactagttagagtacggaatacataacgcaaaaactgagatcgttctatatttacactcacgagtcttagccatgtagagtaagcttcagtaatattggtttgtctccaggctttgagatcaaagacattcataccagaaagccaagcacagtcttcttgaactaagtttgatgagatcaaaggatgtgagaagttgaaatagtctttgtattttcttccggggcaacagttgtctccgcaccacgaatcaacgacagcaccaacaactttaccgttgagatccgtttcccataaagacgaaagatcgctctgtactactacatcatcatccaacaacactatcttgttgagatctggaaaaagctgcgcggtccaacaaaaagaagattcgaaatgataaatggaatggtttttaagctcagagaagagttgagaggagagaaactttaccttgggaatgtaaatgcgaagatggttcaaaagggcaaggcagctaggatttagagcttgcaaggactgctcatgagtaccctcaacaaaactaaaatcagagtctttcaaatttttgtaatgtcgtctccaaatttagcgg

SEQ ID NO: 58980 - DNA, 1384 bp, Arabidopsis thaliana landsberg
ttacatttaagactgaggtcggtttattgtccaagtcattgcctttgtcggtgtttgaagacgttcatggtgatgatcatgatctcaaggagaagccaaaaaaagaactaaaactcaacaaaaccaaaatctatttgtactaaaagcaacagaagaaatcaactctatactactttatatgatgttatcctagaaagattataaaaccttgaacaaatttcataagccctaaaggatccgagagctgaaaataaaccaaaaaaaataaaagagtagagaaggcaacattaacatgttaattacagggtactatggtgctgcgaaaggcgtgagcagagaaccacaaaggcagagaagagcttccttttacagaaaacatctctttccataacttacttcgtctttgatacaccaaaacctgtttatgagtagccaagaaaacatactcaccggtctgacaaatcgggaagattccaggtaccaagcctttaatacaccttaaacttatgctatcaacaacactccaagtttcagtctcatactcactcatcttccaaatcttcatccatacatctgataactgaatcaccgacaaaaacccatcggattccaagagataaacccgattaccaccaccattcccaattctaatctcatcgggcaaagaaatctttctccacacatcatgttcaacatcaagcgcaagtatataacacaaaccactcatcaaccaatgaagcatcccattaacaaacaccacttggttcttactcatgtgtgtgaaactacattcttctaacaccgaaacaaacttcctccatttgttactctcagaatcaaacaccaagcaaatgaaactcccatcaggtctctgaccaaaagacctatggtaaccagccaacaccacattaaacttgttcttactcaaatcacaagccaaaccaacaagagtagcctcaccatcagggtaaaaccgagtaacaggtctttctcgactcttaggcaatttcctatactctctagtcgacggattacaaacatagtaaacacccttttcaggaatgcttgaacaacacaacaaaccattagaagaaaccctaatcctcaccctatctctaacaaaatccaatgataactcagaaacacctctcagattatcaacacagatcaaactagaagaatctgatacttcagccacaagcaattgctcttttacagagagttgattgaacaaggaagtgaaatatttgtcagaaggtaatctgtaccatgatttgcaaacggatttgaacctgaagagagatttaacaggtaatctagcaagaatctggagaataacctcatcgggaaagagagcacctttttggttatccattaacagatc

SEQ ID NO: 58981 - DNA, 1311 bp, Arabidopsis thaliana landsberg
ctttgctgacatattacgaacacttagctcgcagtttcttttcactcaagaaattcaccatggaacactatttcaagtccttctcatgaagaagacgtgccgtaatgtactactaaaagagagagaataagatcaagaaaatgagcttcttcctctcttttgataattgtgaccaaacagaaaaagagaactcaaattctccaaacaaagaaaaccataaactacccttaccaccaaaagcaatgaacaagacagaacagggtagttatgtcattctaatggagagtacaagatagggagtcagtctaaggagggagtgtgtgtggtaatggattggtttaaaaattgagaagagtccaagtagatcagacacacatctttgtaccaaactaataattccaaattataaaaaagagagtattgattcctctccacaaatgtatatatcccttacaaatattagctataaattggtttagtggtaagaagaagagaaggaaggagtatataagtaagctgcagaatcttggttttgtgacagaacatgaatgatgggatatttgtccctacagagagtcttatcatctttttttctgataattgaagtcactatatgcctcaacattttgattgagactctactcaatcttgcaataaattgtgtctcttgaataatataagacgtcctcaacgaaaaattcaaaattttcaaataattgcaaacaataaaaacagaggatgatacatgaatctgagttcttacctctagttgcttttcatggcttggtcagctaaatgagtaaagacgacagaatcttccctcgagttctcaacattggaatcaaaaatcagtattgttaaccaatacaaccccttcaagatcaatagctttttgcagccttccacactatacattgagcctctcatccatcaaatgcctcaactactaaaacaaccatagcgtaatcttcgcgtgtatcaaccaattagctgttacatttgtcggagaacccattgatagtgataggagtctgaacaatctttaaatggctttgtcgcagcctgcttgatgaatcgtggggacacaaatagaaagtttccacctttttcttgcccattattgcagactttctcgagacttatctccattatcactgatcgaatcctcgcttaatgcaaattcgaaatttcaaaaacttcccaaaaataagaaccctaacatgtatattagccgggtggactattagggtccaaatatattgggccataaataaagcccattatactatgtcaggcctctatggcaaattt

SEQ ID NO: 58982 - DNA, 1301 bp, Arabidopsis thaliana landsberg
attattgataacagtacggatataacagtctttttcattacattttaaaattctcaatcggaagggtaacatcgtaaaattcgatctatttggaattttcgtaattggctaatcccgtgtgtttaagaatgtaacgcattcagatttgtcaaaaaagcatttttacataaaatgcaaaaataaaaaagaagaaagtcaacctggagtgcaaaaatttcagtaactgaaatatagtagtgatctctggtacaataatctgaatgattgttctaccaatatggcaatatgaataaatttcttattattaatgttataagctagttagttgctaatacgtggtatgctaatatagatataatataattgaacttttgatgcagttttgactcttaagtttcttcagttttacaagaaaatgttatattgttccaattctttcaatgtaaaaacaccattgtcttttattgagacaaattaaagaaaactaatttttaaacaatttaacagagtgacaaaactgagccatgacaagaaaatctacttaacatctttacaaggtacatgggagattggcctgtgaaatacttttgatttttttggcacattttatactcctaaacccttcattaaataatcacacgaagacatataaaacgacaacttcatcaaaacaaaacgactagtaatttaataagtatttcagttatttaaatgcttaatcaggcatcttaaagtacatcaataaaattatatatagaaactaagagcataaaatgaaagagattgaccgacacacattaacgttaatttgcttttcttatacatatagtaccaagcaatatttacgaaacgaaaatttaatcaagcgatttagttattactgtattattattgttcacgcgctttttcgaattagttaattttgttttaaccaaatatctcggtcaaaaaataaacagctcatagctctctcatcactactctctcttctctctctctagctctgccattttttcgtctgcaataagagagaaaaaaatccagagagaacgacaaaattaggaagagatcatagacgaaacagtaaccaaaacgaagaagaaaccctaataagctttttctctttcttcttaatcccgaaaatggagtatgagaaatctcccactgctactactttgtctaggaagattagtaataatcgtagccatagtcttagctttagtgcaaatgccgtatacgacggatttttttcttcttcggagaatacgaaatctcctttagttgattacggtgagattttc

SEQ ID NO: 58983 - DNA, 665 bp, Arabidopsis thaliana landsberg
cggccgactgaccggtacagacgatcagcaggccgagcacgccgagcgcgcagaagccggcgctgcgccagcgttcgcgtggcgtgccggtgttccaggccaggcgtgccgccaggcccgactgcagcgcgtagtaggcggcgaacgcgcgcgacgcccaggcgatgatgccgaatacgtcgacgacccaggtcagggcgatgccgacgactgcgatcaggacataggcggcgcggtcgtgcaagcgctgccggctgacttcctcggcgagaccgccgcagccgagcgtgtcggcgacggcggcgctgaactgcgccgccagcgcggcggcgaccagcagcggcggcagccagttcgagaccaccgcgctcatctggatcaccgccgtttccgagtggccgagctcgcgggccggaatgctcgccgcagcgaagccgacgtaggcgacgtagatcagcgtcgagatccactgcgcgtagcgcatcgtgcggactcgcgtcggtgcgtcgtaggcggcaccgagatagcgcgaggtctcgaagccctgcacggtgatgatcaaaccgaacgccagcgtcagctgcgaccagcgatcgaaatgtgcggcgtcgctgaccaggccatgcgccggcaccgtctgcccggcatacttgcgccaggccgaa

SEQ ID NO: 58984 - DNA, 511 bp, Arabidopsis thaliana landsberg
  unsure (1)..(511): unsure at all n locations
agttaaagtaatttcctcaagtcatttggctaataagtaatttccttaatcactttttccttgggccacaaataaaaaagaaaagcatgagactgagaccatgtaatctggactcgagctaacattagacccatagttctcttgatatttagtgccaaaggcccaacacctagttttcttaaaatgatagtgttaaccttaattcccttatttcttagggattttgatgagttaatgtttaatgaagaactttcttccgttttatattttgtacaatatttatgaaaatgattttttatttgaacaaactaaaaaatatgaagagttttcactttcacgtataaaagcaaacataaaataaaataaaaaaattggacagataaaaacaaaaattggtgtctgaaataattgaacactaatgaagaaattatttgtctataatactctgcccctataattatcagcacttttagtttntagccataaggtttcaacttttatcaaagaccca

SEQ ID NO: 58985 - DNA, 527 bp, Arabidopsis thaliana landsberg
atcataccaactcttctccttgtccagctgcttcgatataaccaagaggtcagatttattactaggaccaaacgcttcatcatcttgtgtcatagtatcaaagtttaggcttttcttcgcagagcttccccaatcgtaatgtttctcagaggcgatcacgtgcttcaattgaatgtaggcgcctctctttttcagattcaagcgaaaaggtctttctctgatgagagcgggagaagaaactccttgttgtactgcgaatgaacagatcaaaggatcagagaccgccaattgcgagaaccgcccttgtactatacccacagaatgagcagctgcagcaggagatcagtactgggtcatgcagcgggtcaccgctcttactttgtgatgaggatggcttgagattatggttctccatagtgttattacatccgtcatttgcgacctgaatacttaaagggagggaactcgcggactggaaaagggttcttaatctctgaaagtctcataagattcttccgtgttccggg

SEQ ID NO: 58986 - DNA, 1297 bp, Arabidopsis thaliana landsberg
tctaaaggatgccgattccctgggcggtggtcgtcgtcatcgtcactaattaattactgtgattaagaaaaaaatgctaaattgagtttcgtcgtcttctgcttctgcttctgcttctgcttaagctttttaatcatttagctccagaggcggagctttcttctctctctgtggacgaccatggcggcggacgacggcgaccttactaaattcgctgcaatctacgactcatcctctccgtcacaccctcttctctctaaaccctccacgtccgctctcgattctccgcgtcgaagtgatcccgaatccgacccaactcagtttcttcagatctcctacaattttggcccaagaactttcaaggacatccctttcctacttctcttcgatcttctcgtactctccacctttggttttggaatcttctccatttttcatagaaataacgattacgggaactcctcttccttcacctacgatttcacctctagctcctgcgtcaaaaattctacctttacgaaaatttcggatgggtactactgggcttcttcgagtgtcatgtacggcatggtttcttcgtctgatccagtctttgagaaggatttgatctggacacttgttgtaacgcttattttaagcgtgcccttctgttttagcgtcctgcttttgctcaaacactacactaagcagattgtttatgcttgtttacctctctttgtcctttttcccatctttttcaatgtctattggtttgtcgcctgtactcttagctcttcttgtagcgatgccctccctctagcttacagaatacttgtcctagtctttgttttcttgatcatcgggatcattgtctggatcatagtagctaattggcacagaattgagcttactatccaaatcatcagtgttgcatctgatgccttgtccaaaaatttgaaactttttgttgtgctgccgctgctgactctcgggttagtggtgtactatgcgccgattgtggtgttcttggtgtttgcaaggttgaggggggggtttgtgccgcgagagttggatggtcagtacttttgtgagtggaaagaagattcttgggttcctgcgtattacgctcttgccattttaacgatgatctggtctcttgctgtaatggtggaaatgcaagtgtatgtgataagtggagctattgctcagtggtatttctccaaggaagactcaatccctaaaaaatgcatccggagttctttgaggtgactcgctgccacatctttctctattttattcttgatatcaatgaatttgc

SEQ ID NO: 58987 - DNA, 379 bp, Arabidopsis thaliana landsberg
  unsure (1)..(379): unsure at all n locations
ccccctttttcccccccccccccccctttttttttcctcccctcccccccccccctttnnnccccccccccctttctttcctcctccccccccctttcccccccccccntncccctcttttgctagtattcgccccccccccccccccccaaccaccaacccccccccccttctttcccccccccccccccttctccccccccccttttccctttcccccttcccctcttccccccccccccccccccttttttcccccccccccccccttttccccctttctcccccccccccctccccccccccttcccccctcccttccccccccccttccccctttcctccccccctccctttccccccccccccccccttcccc

SEQ ID NO: 58988 - DNA, 449 bp, Arabidopsis thaliana landsberg
attctacaactgtttaaaccaatttcccaaatcatccaaaacaactgttacaccaattgcaactgtttgatgaacagttggtttctaaccacgttcgtaaatcatagtaacattgtaaataaattaaaaagttgaatgagaaaaaaatcgtactacaagaaatgatggatggagaagaaagagtggtatgagactagatgtgccgatggacagatcagaaaaaaggtttgattagactaaaacattttatcttcttaaagttgtgacacaggtttattttttttgcaagtaatatcctttattactattattttcacttttggtctccaccgagaatcggatgtgatgatattccccctctttttatgagaaaattataatttatatattttaataataattcgtaattacgtctgtagggtagtggccatacaggttggggcaagtat

SEQ ID NO: 58989 - DNA, 1079 bp, Arabidopsis thaliana landsberg
aatatagctagttaagaaggatttgtttgtatttattttggtggtaatgtacgtagcaataatctctgataatcaaacgtttaaagttgaactgattttgcttatattttatcaagatttacataggggaactcataataatattattttcatcacttttctcttttgctaaaaaagacatctagtcagacccatattgcgtcaataaggcccagcttatcaataagattacacccaactataatcttaatttgtccattgcaaaatagagaatgaaaataaagtacaagacagcgatcacatataaattttgttttttttctctttacaaaagaaattgaagtttttgaaaggggaactcttctttttttcatgctgcaagccatgaacacgacgactcatattttatatatcatacttgaatctctaaatgtaatactatttatagttagtttcatactgattttatttctcgcatattcatatcaatccatcatctagagcatattgtaatgagtcatgcaaagatgtttgactccggttttacgccgttctttgagcttgatcctgcatggagttaaaaaaaaaaaatattaccaacatacaactttcctttagatcttagacattttcttatatatataccatgcataatttctaaaatcaccagctagcccattccggataagttagcattcttcttctcttctccgatcaagtatattttgggagagatgagtcgaccaaagaaacacatatacatagatcagaggagagaatgctgacttacccctaaccggtctagttggttagaattgcaaaccatacatatatacaacttttggaaaacatctttgatccttaaccggccaagaggggttaattagtcaaataggtcaataatgaattaataatacatcaatattccaaaatcattagcaagaagataacgagtttttctctcacgcacccacatgcatattcttctttactaccatgtttttattttacctaaaaccatacatgtgttgtttttgaagcaagtagcgaagggctgaaattgcaccaaacgttttact

SEQ ID NO: 58990 - DNA, 429 bp, Arabidopsis thaliana landsberg
aataaatacaattcaaaatatacaagtgacatattcaaaatcatttttataaataaaataatgaatagattaataaaaatatattcaaatattcgtatcgaagttttgactgagcatgtatttgaaatttgaaacttgaattctgtttgaatttggaatttaaaatagaaaacagtaaaagacaaacaaaagaaaaggaggaacccccaactgggccaaatcccctttgcttcggcccattcaccccttggatccgcacgtccaggcgttgtctgggcgggccctcgcgccagattcctttcgcgcgcacacaccagccagaagccgcgcctgcgcactctctcagacttcagggacccacgtgtcatatttatcctcaacctcgccgtgaacttcgctgatggctgcatctaaccccacgcgcgagct

SEQ ID NO: 58991 - DNA, 114 bp, Arabidopsis thaliana landsberg
atcatggccgcctcaaaggcctccccagattcaaactctggatggcagggacataacttctgctatagctatatcctgctagaactcgactactgcactgtggatccctcgagt

SEQ ID NO: 58992 - DNA, 1446 bp, Arabidopsis thaliana landsberg
aagatgaaaagataaagaaaaaaagaattgtaagttaaaattaattttcacgtgtttttcataagaatgtaaatatttaattcgtaatgaaaattggagttaacaaaattaaactttatgcataaccatatacgtgatcccatgctaaaaagttataaaaaacatgaaagcatatcacattcttgcaccaaatcatcaaattctagtcattaaatgataatggttgaagacgatttggtacaagataaaaatgaacccctgaagtgaatataataccaaaccagtatagaaaatacaaagaagcaaagcgattgatcaaatagcgagaaggcagtctatctctacaaaattttgtggtccatactcccgaggacatgatcaagaatcatgtgtcggtgatgaggttacaactgaggaatgcagttctcgtataatacctatgatcactccgatacacatattacatatatatgtgaattaaaacgtgttatagtgaagacgtcacatgagaccttcacttggtccattggaaatgattggtgtatccagctactttgagacttatgtgttagacttgttgtaatgtcttgatttcattgtagtcagagtactctaccgccatagcgaaaatgccttgatgcaatcttggctaacataagcctataatcaaccgaagttgaattatctctcttgacatcccttggagagacaacaaattttaaccagctgaaatagtacaaatagaactgagtaatttaactaatactaagaacacgtaccggtgaaaagaaagaaaatgaagacaatgaggacacgggcaactctcaatcaacttatctccaatttgtcaaaacacaaacaataacaaaaaggaattaggaagagtaaaagggattctacgtttaacttaagaaaagtttgaaaaagaaaccatctattatggacacgaaggcattcgacaaaaagaatggagacaaccattgtgtagcaacagaggaatgaagcgtacactatcttacgatttaaaatgaattatagcttgtgaaactcattcatcggatggattcttaacggagacgaactctgtgaagcaacaaaggaatgaagcatagactatcttactgcttaaaaagaatgatagcttttgaaaccgattcattgcgtggttacttaacggagacgacctctcgctttctataattattgaatcattaaaacttaacataatggaactaaaagagttttgtacttttgtgaaactcaaaggatggatggagccatggaagagatgtcataagtgacatgcgctgatatattattgggagcgcgtactcgtacgcacctatagagattatgtacctgcttgctaacatattagaattatatatgctgaagtatgaaactccttttaaagtaatatgatgtgcatttgttaaaagagtgtta

SEQ ID NO: 58993 - DNA, 570 bp, Arabidopsis thaliana landsberg
tatctggacattatcgtctacatagcttatatcaaagatcatcgttgtctgattctaatgcaattatcgattgagcatcagagttctgtacttattgtgacataaaccaataacccaaatgtgttgcatgatgaagagctgaaattggaagagaagatccgccattcagcttcgaaagagctttctgatgtgaagcgagcatgtaattaagtcatggagaaacacaatcgactcagtcgatcagaattgtaattttccagaactatgaaaagatatgtaattttacaaattgtggatcaattacaattaaaatagttagtaatcatttctttatgtagatgattaatcggtcggatgaggattctgatgtgaagcgagcaggtaactgttttcggtttccgaatgagcttcttattaagatttatacttatcctcactgaccgcagtttgtatatcgactttggtattattagccggtcagagtaaaggccacagagaagtctgtctaactgacctgtacagttcaactttcatctttgaacgaaaggtgatcatacatggcttgtgtca

SEQ ID NO: 58994 - DNA, 535 bp, Arabidopsis thaliana landsberg
ttgattattctctataaaagtgaaagtagatttaaatttgttttccaatcttctatgtttgtccattgctagcaagagttttgggaattaaagtctttttaggtgagaccaagaagggtaaaatatgagttttatgggtctagaatttataagttaaatagtttattctcatttctaattattgctgaccaaaaaaaaaaaaaactgtttggttttgaggtttaattacttattgtatatgtacactctcaatcataatgttttggatatactgtatagtaaatttttaatcaatcgtgtttattagtatatatgttacaagttacaccattcgtcgtctcagtattactctaatatcattctggcggatttactacacacaattatgcaattgtaaataactaaatacaaataattttccttcagacaaagaatctacgagcaaagatctttcttctcaggtgacgtagcaagtccgtttgtagtaatttagagagacagctaaaaaacgttaaaaaggtaaaaaaaaaaaaaa

SEQ ID NO: 58995 - DNA, 397 bp, Arabidopsis thaliana landsberg
  unsure (1)..(397): unsure at all n locations
cactatagaatacagagctcgggagctcacacccgcacacgtgaggtctacagctagcctaagcttttgaagtttgaccacgaatgcagatctggtgctaggcggnnnnnnnnnnnnnnnnnnnnnnnnnnnnnnnnnnnnnnnnnnnnnnnnnnnnnnnnnnnnnnnnnnnnnnnnnnnnnnnnnnnnnnnnnnnnnnnnnnnnnnnnnnnnnnnnnnnnnnnnnnnnnnnnnnnnnnnnnnnnnnnnnnnnnnnnnnnnnnnnnnnnnnnnnnnnnnnnnnnnnnnnnnnnnnnnnnnnnnnnnnnnnnnnnnnnnnnnnnnnnnnnnnnnnnnnnnnnnnnnnnnnnnnnnnnnnnnnnnnnnnnnnnnnnnnnnnnnnnnnnnnnnnnnnnnn

SEQ ID NO: 58996 - DNA, 1127 bp, Arabidopsis thaliana landsberg
  unsure (1)..(1127): unsure at all n locations
gttctggtaaggttttcattgcttcttttaagatatatagatatagataattaatcaaatattggagattagattgatattagtgcatgagaatatgaccaatatcattacaagaaaaaaagctatgaaaataattttgtggtgacgattatagattcaagagtggatgaaaagaaagtgatagaggagagggataatgaattggtgttggatggaggttttgtggttccanaatcaaaggaaactgatgcattcgatgctcctgatatgaatttcttgggccattccttcaggtttgtttaatggattgatccatatatttatggacataaatgttgttttggatcaaaactaattacagtctctcttttcttttggggattatgagaatggtgaaagcgagagacaacaaggtgttgaggaattttacaggatgcaacacattcaccagacctatgactttgtaagcgaaacaaacatactttcactatggtctagttaattaaattataagtaaataatgtttattgaaaatcgatcttcaaacaattggacaggtgaagaagatgaggaaagagtatggaaaacttaacaagatggaaatgagtatatgggaatgttgtgagttattgaacaatgttgttgatgaaagcgatccggatcttgatgagcctcaaattcaacaccttctccaaaccgctgaagccattcgaagggactatcccgacgaagattggctccatctcactgccctaatccatggtacatgtcttattctgctatatcataaaaaatatacaccacttttgaaaaatctaccatttatagtgttcaacaaagcatcctgactatgtattctttagtctttttttcttcttatggtttatattgagaaatttcaaaatgataagagcaaacgatttgttatgttgaacaattttgaaagttcatatagcttcttatattggttatgttactattcaacatattaaatatcttaatgcatacatgtaaactaatcaacatatctaagctacctattcttttaatgctttgcgttagattacgtgtgcaagataatttatttcaaattacaatttcattttcagatcttggcaaggttctcc

SEQ ID NO: 58997 - DNA, 328 bp, Arabidopsis thaliana landsberg
ccgtgagcagcctgaaatggcagaggctgatcacgacgagcacctcggcagctgggtcgatgcccaggtcctctggagacaccgcctctcgcttggccgcgatgccccggaactcgaacggcacgcccagctggcgtgcgcaatcgctgaggcggcgcccggtgtcctcgatctgctgtgcggggcgaaagccaggctgcggcaggtcaatgccggtgatcctgaccagctccggcggtccgccctccctggcggcgaggccgcgcagcagcccgggccactggaagccgtagccgaggccgtagtcgacgatgtgcagcccgcggcg

SEQ ID NO: 58998 - DNA, 350 bp, Arabidopsis thaliana landsberg
ctgttcacgctctacctgcgctgccgcacgcatccttctgctggctgcttacccagccaccgtggccacgccggcccagccctgctcgcccacgcctgcccgtccctgcgccgcgtcggcgcgccgccgctacgaagtgtccgcggcgcccctgctcggcacgaattgtggccgcccgttgaagtcccgctgttggtttggtcgcgccgccccggccccactgtggtcgctcgtcggacctctgtggtcgcttgtcggacctctgtgtccgcttgactgtgccgcctcagctcagcgaacaacaattcggtctccatcaaccttgaccacgcgcgcttggatccaacgca

SEQ ID NO: 58999 - DNA, 327 bp, Arabidopsis thaliana landsberg
gcgtggtgcagtccccgggctcgctgccgtcgtcgatgatgggctggtcggcacagtcggtctcgatgctcacgtggagcaggtcgaggccgaggaaccggatacagacgcgcatgtcgtgctgcagccctgaaccgccgcgcggtcccttcggcgccgtggtcccacgcaagcggcaggggtgtcgccgcttcacgtacccgtgggccaagcggcggaagagcacacgagcccccggtcgactccgactgagcggctgaccctggcagcatggtctcgataccggggcgctcgtggcggtcagggtcccgagacatgcaaaacgcc

SEQ ID NO: 59000 - DNA, 612 bp, Arabidopsis thaliana landsberg
  unsure (1)..(612): unsure at all n locations
caaatccactattgattatttggacaagagacatgacctttaccttctcctcacgcaaccggcatttgttgaagtctcccattgtccctcctttgggccctacctttaatgccaaactaacccattgaatttggtattctacataaaagttgtacactaatgtacgatacgattcaactacattaaccgtatgttaaattatatagtattaacttgttgataaataaattatgtttgaacacaacaaaacttagtttctatatccgctgctgttttgttatagtcgtcattcgtacgagtaattctttatgttccgcactaatcacgcttctttcgtaccacttagtatgtgattttctcattcgtggtctttgaattgtattagaggcaatttagtcttttgtgagattaggaggtgtgtacggaaaagtgtgtgagacaaatgaagttaatgtggaggagatctatagtgggacaaagcaattgaaagtcgctttagaagcaactaaatgccctcttgacttctccattcttcttgcgatttacgcatttacctaattgcatcttttacttgtttagcttgttaagntcttctacaacaataccactttt

SEQ ID NO: 59001 - DNA, 119 bp, Arabidopsis thaliana landsberg
  unsure (1)..(119): unsure at all n locations
ctataanaanacaggcggcacgggagcggcgggctccccacacgtggtggtactagatgctagcactagtgctctgtttattgtcttgtcgacagaatatcatgagtgaatgtggcgaa

SEQ ID NO: 59002 - DNA, 497 bp, Arabidopsis thaliana landsberg
tcaagtattatgtatatgtcttactaaaacacaatattttagtttgtttatttattttatataactatttacttcttctgcgttttccttaaagattacttcataaattaaatattatatcttaagaaaattttgaggacatactatatttaatcattaaacacaaacatatataaacttgtttttgccaaccacacatccattttaaaacaaactctatgattggtaacagtccggaaaaacaaaatttacatcggaaacaatacatcaagatatcttattatatagttagatgtttaacaatatgccttatcattaaagaacataatcatatttacaaatttggttaaatatatgttaacctccattctgcactttcaattttgattatataatcccttttttttttatcatatgtaggtatgatattctcgtcttcattatatggaagttatgattttcctatctaaataaggctttttccttgccttttattt

SEQ ID NO: 59003 - DNA, 234 bp, Arabidopsis thaliana landsberg
  unsure (1)..(234): unsure at all n locations
atcgacgcccatcattttggagaactcgctacaaccgggacggcagcggaaagaagactataaatgactagggaaaaaaggttaaacgatacgataagcacaggcaagagcatcttttatattcagaaaagannnnnnnnnnnnnnnnnaaaaccactgttgaactggcatatacctctgaattacaaaccgccacttatatagatatggccaagaataaagacacttacgcaa

SEQ ID NO: 59004 - DNA, 376 bp, Arabidopsis thaliana landsberg
  unsure (1)..(376): unsure at all n locations
actatagactacagcggaacagcggtcgaaagctagggcccccacacgagaggactaaagctagccaaagtttgagattttatgaagacgaacttagaacatactaagacgctcannnnnnnnnnnnnnnnnnnnnnnnnnnnnnnnnnnnnnnnnnnnnnnnnnnnnnnnnnnnnnnnnnnnnnnnnnnnnnnnnnnnnnnnnnnnnnnnnnnnnnnnnnnnnnnnnnnnnnnnnnnnnnnnnnnnnnnnnnnnnnnnnnnnnnnnnnnnnnnnnnnnnnnnnnnnnnnnnnnnnnnnnnnnnnnnnnnnnnnnnnnnnnnnnnnnnnnnnnnnnnnnnnnnnnnnnnnnnnnnnnnnnnnnnnnnnnnnnnnnn

SEQ ID NO: 59005 - DNA, 566 bp, Arabidopsis thaliana landsberg
cgagatctggcccaacatcattgctgcggcgcgccgcatgaacattcccatcatgctggccagcgcgcggttgtccgacaactcgctgcgccaaagcctgcgcgccggccgcgtgatgcgcgaggcctacgaaagcctgcagatggtttacgcgcagtcgtggctggacgcccagaggctggaacaggcgggcgcccccgccgtgcgcgtgtcgggcaatttcaagttcgacgtatccattcccatggaccaggtcgagcgcggccgcgcctttgccgccgccctgcaccgcaaggtcgtcgccatcgccagcacgcgcgagggcgaggacgagctcttcatccaggcgatctccaggcacctgaagcgcgccagcgcgcaaagcaacgagctcgacccggaaatcctgttcctgctgattccccgccatccgcagcgtttcgacgaagtggccggcctgctggccaaatcgggcctgcctttcgcgcgccgctcggaactggccgccgaccactgcggcaccacatcgtccagcgtgcgcgtgtgcaatcacgtggccgtgctgt

SEQ ID NO: 59006 - DNA, 215 bp, Arabidopsis thaliana landsberg
tcccttgacctcacacggccatcgtgatcaagtccctattttttttgaggcacatacccgacatacggatacaaacgactcatgggcttgaccacaagccttgccaatagatgctcggccaacacctgaagatgctgatgcttgctctccaaaatgatgcatatgattaccaaattacaccaagaacagtcgttctaaatgaatcacatgtgcag

SEQ ID NO: 59007 - DNA, 1378 bp, Arabidopsis thaliana landsberg
tagaacataaggagacaaatggcatggatgcaaaatcttcaagagatcgtccagaggatgggagaagggctgacgagaagaatggtgtaaaagaaaggagaaggtagagttctcttaatgcctatgatttcatagctactctctactcatcgctgtattccttgtgtactttattaatgattgagttcatccttctagtctactcataactttgtacgtggattttctctataagaactcgtgggcatgagttgttcaagtatttctataaatgactgttctgggtcttctagtcttttagcatttttaggtatgctcctggtactttgcatgtgcatttggtttgctggtggtccaggaatttgtttgtggccaagattattatgtaagtgggttctgacattacctccttgatgcagggatctgatacctccacgtcgcagagatgcatcccgctcaccccttaggtgactcttcaatagttttgttttttctaatacaatttgcatatatgtacaagtatatattgattggttgctttacagagggtcacgttctaggtcaatcagcaaaacaaattcaggctcgaaaagctattctgggtatgtagccttctgcaattgtttttcttcatccaaagaaattgtatcctgtgatgtgtagctagctagttctgtatctattattttgggtaaatcctagtgcagtttttgctaatgctgtcttcttttatagcagcgaacggaaatccaggagcacatctcaatcatcagatgcctccatctcacctagaaagcgaagattgtcgaattcaagacgtagatccagatcacgttccgtgcgtaggtctctgtctcctcggcgacgtaggatacactctcctttcagaagcaggtcgcggtcacctattagacgtcacaggcggcctacgcatgagggacgccgtcaatcgccagccccttcaagacgtcgccgttctccatccccacctgctagacggcgcagtcaccatccccacctgctagacggcgcaggtcaccatcaccacctgctagacggcacaggtctccaacacacacctgcaaggcagcgcaggtcaccatcgccccctgctaggcgtcaccgttctccactgccctttaggcggcgtaggtctccttcaccgccagctaggcggcgcaggtctccatctccactctacaggcgtaacaggtctccatctccactctataggcgtaacaggtcacggtcaccgctggctaagcggggaaggtctgactcacaagggaggtctccgtcaccagtggctaggctcagggatcccactggggcaagattgccttcaccatccattgagcaaagattgccttcaccaccc

SEQ ID NO: 59008 - DNA, 213 bp, Arabidopsis thaliana landsberg
taccgttattgagatatacccgacttgtcccacacccgttatgaatgcgatattcgcttagcttagtgttattatgtgaacatatatatgtgagacatgtgtacagatgaatggttagggcatagtcaaatggttctcaatttcagttcggaaaatatggattgatttgactcctgactgattgcacaccctcaatattcttccttttaaggg

SEQ ID NO: 59009 - DNA, 925 bp, Arabidopsis thaliana landsberg
tttgatacttttatgaaacattcttcatggcttttttgttttttttttcttcattatttgttttgtttacaatatctctacaaattttgaaccaagatatggtataatgtacttatttaacagtactatgttaatttttgttttaatttgaagtaaaacttataacgaatttttatttgaatatcaaaaaacgaccatattttaatattttctttagttgttttggcctctaaaatattagaaacggctttgattagagatatctttatttttacaaaaataataataataagtatggttcaccaaacaatgcgcaaacccgacaaaacattcaacggttacaaatgactaaaccaatcagaaaattctttatttagcaacaaatcttcactatataatagcgcaaatgtttattgggaataagaagtaaaaagtaaaaaagtttatcaataaggaaaaatgggtatatccaagaaaacagttgtacaatcatttgctcttataattattatatctatcgtcatgagcacaacggaggcaaacagtataggcgctccagctatgcgagaagatttacccaaaggttgtgctcctggatcttcagctggttgcaagatgcaaccggctaatccgtataaaccaggttgcgaagctagccaaagatgtcgtgggggttgatactatgagatataatttttcttgaaaaaagaagaaaagataaaattacataaataaaacttaatttttcaactaaattagtaaaactataaaatacaaaatttttgtaactaattctatgagaataatgtttttttaagtagcagcaagctgagactggtacgtgtatggtaagctagtattgtctaacttagcaaaagataattgtatattaccagacatttgttatattgttggatatttatgc

SEQ ID NO: 59010 - DNA, 504 bp, Arabidopsis thaliana landsberg
tgaatttcgggcttttataatttcgggcagcccgaaatgagcccgacacgtttaagcaattacgggccgggccggcactgcccgaaattcaaacggcccagcccggcccgaaattcaaacaatacgagccttttcgggcttgggccgggcggcccgaatgtacacctataactgtaactcagacatcgcctccattagatcggctcgggtacgggtctgagccctaaaccctagcctcggctctctgctcggtcaaagatgcaaatacagggaccgagtgtccgcctcctggttcaactcaactgcaagtactaaggccatgccggctataggggctcagactcgtctcccttcccatatacgacaaaccgtggcgctcataggagccctccttgaggctataaaaggagcccagggcttcattcaaagaggagaacacttcaccggcttttaccctccacaacgatattaacacttgcctcaatcaccaggaacatgggatca

SEQ ID NO: 59011 - DNA, 514 bp, Arabidopsis thaliana landsberg
gatccttgatatcggcacccttgccggtggtggtcttgatggtaccgctggcgacgtacgccagtttctcgccgatcttttcgatgacgccgaacccggtcagtctaagaccggggtcgatgccgagaatacgcgtagtcaaaggctgcatatcatccgacaggctggcgaacggcacgccaggcaagctttggcgctcgacggaaactcagtgtccttgaacagcaggccccaggggccgctttgatgcgcacaaaggtggaaggcgaagtaattttggggattactcctcgatcaccgctgtggtgtagacatcctggacatcgtccaggtcttccagtgcgtccagcaacttctgcatcttggcggcatcgtcgcccgtgaacacggtctcgttcatcggcttcatcgtgacttcggccagcaccggcttgaggcctgccttttccagcgcttccttcacgctactgaaatcggatggcgcggtgatgacttcgatgctgccgtcctatcg

SEQ ID NO: 59012 - DNA, 516 bp, Arabidopsis thaliana landsberg
ctattgcggaaactctgcagtcaatgcgtgcagacgcatgtcatggccaaacgttcttgaatggaaggatcatctgcgaaattatgcccataggtcagcaggcacagggaaggagacgtagattgcaaagccaggcaaccgagttgcgtatcatggagattctacttcgaaatgcaaacttatcgggtgcacttgccataaggactgttgaggattctttaccctctctgagagtattggatttgtcaaatgacggtccagttgatgaaaacaatattgtttacataggggagggcagttgtctccctctgtcatcatgttcaagtggagctatgcaatgcaacctttcgcccttcctccctccactatgtgcctctgttttaggtcagcagcagtcctcagcgacaatccctatgtttggctatgtagggataggcgttggcgtggccggactgttcttggatgcattcttgcttctgttgcacactcgtggcggagagcgtaagagatctatgc

SEQ ID NO: 59013 - DNA, 535 bp, Arabidopsis thaliana landsberg
  unsure (1)..(535): unsure at all n locations
attacagaaaaacttattttccatacgagaaaacccaagaaaacctaacaatggagtgatacaaaatgttataatgaaagggagacaaaaaatggcttgtttgtgagagaaaaaaatctctactgaaaacatcagacccttggtctttacgcgaatcatggtgaagttatgatctaccccatgaaatcacttgaacttgtttaaaccaaagctacacctcaatccacgaatgaactttaacacctatgcaccttgctctcataacgagatttcaagaagactttagatattttctgcatcaagtatacggtgagattagttaattagaacatcaaccatagttattataattatgttggaaaacacatgaacaaaaatacaccatatcgaacattgctaatattagtcttccattgatgaactagaaacatgtgaaattctagtggttatatatgactntcacattagttctaaacttctaagtatatataagttcatgaacaagacattaataattgggagcacanacatatga

SEQ ID NO: 59014 - DNA, 511 bp, Arabidopsis thaliana landsberg
  unsure (1)..(511): unsure at all n locations
ttatttataacacaaaagttcaaatatgtataaaatcatagttggatcaaactttaaaatggataaaatagggtaagttgatgacttgcagcccattatagcacacattactttaaactttttctatgttatatacatatggacacacatacaaattctccggttaacgtaaaaagactgatcaatcatcttttctagacccaacaatgttctcgctccgtacccttgttggtctacttctcttcactttgatagctattgttgggtccatcaatggtattattcttaccacacttaaatatacatctacaacaaaatatatgcacttttaccttattatatgtggtatataactgaaatgggttcacttgattataaattaaattactaggggaaccggggtgtggtggttcatctcccacctgngaagacttgtccgacgaacaagcgcgacanaatttggacaatgcagataagtttggtaggatcactcttgattgtgaaactactg

SEQ ID NO: 59015 - DNA, 125 bp, Arabidopsis thaliana landsberg
ccgggctgcagggggggggaaagccacatttttttttaacatctctgatgttacatttcacaggttaaaaatattttatcatgggcaattaaactttttgcttacatatacatatttacaatggg

SEQ ID NO: 59016 - DNA, 343 bp, Arabidopsis thaliana landsberg
  unsure (1)..(343): unsure at all n locations
gcttggctagagacagctgtctccacaacatcagagtggattgaagtactctgaaccccaacctcaggtaccccgatgccgatccttcatagtctcnnnnnnnnnnnnnnnnnnnnnnnnnnnnnnnnnnnnnnnnnnnnnnnnnnnnnnnnnacccaagtcaagaatccgatatcttctttcagctgtcacagtctcaggaacatcagtttggctctgaaagtgaccggaagcccattctacctcgccggccgaagtacatgattagcacatggatgtaacaacaaggcgtctcagactgactataaagggcgaattgcttgatgcaagaacagctgctaca

SEQ ID NO: 59017 - DNA, 493 bp, Arabidopsis thaliana landsberg
  unsure (1)..(493): unsure at all n locations
cgcaatccaatcaaacatagaaggatgtcgaaatacataaacctcaacctccacaaagtaggcacttagaagtaaattcttaggatattaatatgagagaaaaaacaaagattttgctaaaagactaaaaattattaaatattccttaagttcttttttatttgttgcgttttagttaaaaataaactagcagacaacaaatagaggtagtactcaagaaaagcaaaggaatttaaacacgactagcaggaaaaaatataaatttgagaaaaaaagaggcacatgattttctgtaataataaagtggaaaagggtccaatagtctggaaaccccttaacaaacaaactgacccnnnnnnnnnnnnnnnnnnnnnnnnnnnnnnnnnnnnnnnaaatgcgtaattatgaaacatagaagctgacgattctgattgcaccatgcagtcatgcactcatgcngctttaacagaaacaaaaagaaaagagaacagcc

SEQ ID NO: 59018 - DNA, 919 bp, Arabidopsis thaliana landsberg
tgacgttttagcttttttttatagagttccttattaattttagtcaacatagtatacttaattataaaatacaaactcaataaaatcatgtgcataaaaaaataaaaaaaataacttttgaaatctgaggaatattattcaatggtacgttgtccattgaaatttgcaatgggattattattcaatttgcaaacttaggaatattatctcttagctaatttgcaaacttgtccattgattaaagattgaataatttctagctgataagaacttaaaaggctaaatgacgtttagttctaattaacatcctctcaatttgtcgtgcccacaggatggagactctacggctgggatcgaacgaagggagggccaagctagtggggacgctgcttggtgcatgtggagccctcgtgtttgtattctacaaaggtattgagattcatatctggtcaacacacgttgacttactcaaaggctcgcatactggtcgagccactacgaaccaccacgtctcaatcttaggggttcttatggttcttggcagtaacgtttccacctcactttggttactattgcaggcaagtgtcactttttttgtttaataaatgaagcatttttgttttgatcgttgataaaaatgttgcaagacaacgcaaaatgttggtttacaggcaaaaataggcaaggaacttggaggactttattggaacacaagtttgatgaatggggtgggaagtttggtgtgcgtgattattgctctctgttcggatcatgactgggagcaatggcaattacgatgggatattaacctcttagctacgctttattcggtaaaacaatctaccacacctaaatgtgtgtaatagacgcttttatttatattgtccgttatgtgtaggggaatcgtggtttcgggaat

SEQ ID NO: 59019 - DNA, 155 bp, Arabidopsis thaliana landsberg
gtgacacattgcgaccatagcaacactaagggggcgtttgactgctactaagcttctgttcgctggtattacgcctattttgggacataaaacgtataagtgctgtctaaaacctccatattgatcttcagccttagtaatcattcatacacaat

SEQ ID NO: 59020 - DNA, 305 bp, Arabidopsis thaliana landsberg
tacctgggacggtagaggctggtgcgggtttccctgtcgaaaaagagacaaatctgttcttgattgaccgagcgtgactaggtgccctgcctgccaagcgtatatctgctccattcgttgtgtctgctcgtacagaccgtatcagtggacggatatgatagatacaagccggacgccagtcggtacgggacatccagtccgaccgtaatttgggatggatcgtaattggaagccaaacaaacacaaagctaattgctttcagccacacgcaatggttgcctatggatgccatcgttcctcaaata

SEQ ID NO: 59021 - DNA, 295 bp, Arabidopsis thaliana landsberg
tgcaatgccggccccccagctagccctgctctctatatataggggcggtggacgtgcgctttgctatgagccagccagtgctagcgcatcgagaccagcaagtgtgcaccaagctgcgtgctacgtgtaagagctatagctagagagtagtgtgatcacgcagacacacacgcacacgcaaatatcttacatgcgttacgtagctgccactccgaccatgccgtcccttgtcgcggagagcgccagcgaaccgcctctggtggacagctacctggagctgctccggcgcggcggc

SEQ ID NO: 59022 - DNA, 930 bp, Arabidopsis thaliana landsberg
aagaagagaggctcgcatagaagattattagagttgagttggtcaaacccaaagcgccgagtgaacccctccaaggaggatccccaacgaaagatccttctcactttcccactttttttgccttttcttcttcttttttttttattattattattatctgtgttttttttacctttgttttgttgttatacatttctgagaattttaactgtcatttcacgaagtcaagaataatgaatttgtattttggtgtgaaagcgaagaccactgactgaccacccctgtgggatgtgggaagctccatgtttgggcccgacaccatcccccggtaagactcaattcgattcaacttcagagtttgccattatcattatttattgccactaaattattatggactctgtgtctctcatttattactttctaacaaactccatattttagtagagcctcctcctactagcctggatcttttgtgtattttgtactagtattcaagtccctgtcttcaatccctactcaaactgagattactttaaccttagattattggtctactaaattgacttggtcttttcaaacaagatttccatttttctaaaacgtctatatatatttagtaatgtttataatacaatctaaggcgtatacgttttcttttttcttttctactggttcgacttcttagaattgaattttgcccagaggaaagtaacaaattatctcttttgcaaatccggtcactgacggtgcactgcatcacattcacgtgccattccaacgcacaaccgtattccgatacttttttccttcttctacccgtacgctgttattataagtaagggctcaaattatattttaatcatgtatggtataagaagaagaaattgtttgaattttttttaatgggaaaaccaaagtgttttttac

SEQ ID NO: 59023 - DNA, 571 bp, Arabidopsis thaliana landsberg
acccatatgaagggaaaacaggaggacgaggagaaatatctttgactttaatgtcgaagatgtcattatatgggaaggggttctgttacttatgactaatcaccaatgtgacctactatactctttgtatgggactgaatctggtataaaaataactgtagcttacctaatcaactatctctacgtaatcactgtgtgactcacgtgtatgtatttatagagaatagagaggagagaggtgaaacatatggtagagacttaagcggttaagccacaccaaaaaaaaacagaagaagatggttgaggtaagaaagagagagctgaaactatggacgactttagtttgtcacttgtgggttttgggttttagtggtcttcgcactacacaccatgtttcattaatactcggaagtggatttcattccattgtaatacgccggtcagtatactcggtcaaaagaaaataaaactttatataacaaaaaatattataaaataacgaaaatgggaaagttattattaggaaagtaaacaaattcctttaacaaacaaaaaagaaagtaaaacaaat

SEQ ID NO: 59024 - DNA, 769 bp, Arabidopsis thaliana landsberg
aatatatcattaaaataccaaatgcgtgacactcaaaattgaattctgaatggtatgggtggtgcagaattatgatctaagatgaggactaatttgaaaggcaatgactacaaaaactctaaaatggcgtttctaccgagccggtcaccaccctaacaacgatttatgttaagagtatttattactcttgacttgtctctttgattctctctttgtatcgtgtatatgtactcctttgtaatcccttcgttttaatcaattaacaagagattctatacactaaaaggttaaaaaaaaaacatggtgaccaattaaggagcctactccttcacctgtataaagtacgtcttgagatattcaaacagattcaaattctgaaaatattactaaatcacttcaaaatgaataggtcaatataaacgaattttcttcttctatagtagtatagaaacgaattgtttccacgaagataacaacaacagcatcgttttctctagtagagacagtgccagccttgagccaatgccaaacatattggaacttttctatggaaaattcaacgttcctaaaggttcactactttctagatacagtatatggcagtatgttcgagtcttggtcttttgtatctatctcactattattaacgtacgtctctctatttttctttcctatattgtttgttttttagtgtcactttctttaaacttttcttctcaaactattttacatttgtaaagatctagaaatttgtttactttcttttttg

SEQ ID NO: 59025 - DNA, 1725 bp, Arabidopsis thaliana landsberg
  unsure (1)..(1725): unsure at all n locations
ggagctaagaactattgccttttctgggtatgtggtctccctgaaatgctcagaattatacttgtcaatagttttcttgttgctaattcataatattcttgttttgtagcctgtccagtttgaaggaatctaatgttgtagatcccatcatcaacttctgggaggtagtttccctttcctattactcttatttttatttcctttcaatttctgtaactctgaaagtaatacatgctttgaagtttataatatagaagcttgaatatgcccttagtgttttgtagtgtctccatttaccaacatgaacacgaccacacagatcaaggttttgtgctgttggaaaacgatttgcttgctttactttttagtgtaaccttttaaaacttggctccataccatctctctcttttccatgctctctcgtcaggcacaaactgttctgagctttatagttataatcataactataaaatcagccaacccaatgatacatgatactttataattgtacagtattatatgttttttgcatcagtagattcaatgtagtttctttgctgcagtggttcaacaggttgcatactgggagaacgcttactgtcagagatctcctctcctgggttgcatttgtcaacatggcaactgagagtttaggaccagcatatgctattcttcatggagcatttctcgtgttacttgacggtttaagtctcggtatgtttttccgtaattctaatctttctgtctaggtttgaagtgttattgctatactcacttattcaactcttattcttcccttctgtaaccattttttatctgcactggggagctttctgtttatttgattgcattctggtatgaacaatgtggttttttgaacttctcgatgtccaaaaacatggtaataaaattagtcgtgtatatctgtggccgggtgtttcactgtagcttatgctctagtgattccctcacatccctatgaaaagatgctctttgcctggtggtccagtaaaacatattcgttaggttctctagctgcttcttagattgattgcttttataaatgcctttgtcatctacagtcttacattttttgactggtctgtctttgacgtaatgatataagtacactggaatatatcaaacatctaaaagtttgaataggtctaccttgatcgtttgttatataaattcatgcaaatatcttttcatgtaatttgttgaattgggtattcgaatataatggtattccatcttcactagctgaatctacaacttgtgttatgtagtttctgtcgttggatttactgagtttaggatatccaactttattggtatttcatcttcattagctgagtttgagtggtattgctttcatatatctttacccagcgtgtatgattgattaacctcttttttttttatgttttgcaaggaactggtttctctggaagggatggtcaagatctgagagaaaaatgcttcgctttcctgttacaacaacttgaggtaatttcaatcttgatgatacaatatatctctttatctnnnnnnnnnnnnnnnnnnnnnnnnnnnncaagttttctctagtggcatatgttgaatgttattccagtaaatcagatcggtttgctatagaacaaacacgttttcgtagcatctttaaattcttaactgtgtgacttatatcgtctttagtcctcaacacatagtgatgctcgttgt

SEQ ID NO: 59026 - DNA, 335 bp, Arabidopsis thaliana landsberg
ttctgacttttaattcagatatgtagcgctggacgtaacattcactgcggaatgtgttacaacaggtgcttgtgtgggaatgagggagtggtgaactctggtttaatgctcctcagccttgtggttgtctgaccctccgctttcattggccaaggggtgtccctacatatggacttgcctgaatggagggtacagaactattatctatggcggagccgctagcgatagcactactgtggtcggtctctggttagtgcgcggtcacccgctcaatttggttgagtgcccccactgactccttcgggggtcattgcagcaactctagggctgagttt

SEQ ID NO: 59027 - DNA, 285 bp, Arabidopsis thaliana landsberg
aaaccccggacgcgagcccgggcccccacacgcggggcccaaagcgagccgaggcacgaaatgcacgcccacgaagccagacggcgagcccacaggccgaagcccggagcgcgcagacgccggggcacgccgacaggcgcgagcagaacaccacgagcacggcagcaaccgcaccacaagcgcaccaaaagcccgggcaaaggacgccacccagagccgagcgggcgcaggccacaaaacgaccggcggaccggacggcaacgcaccgcaaccgaccaccacgcg

SEQ ID NO: 59028 - DNA, 1063 bp, Arabidopsis thaliana landsberg
ctcaatctctttagcctgtactataatggttttcatggtgatattgtcattatggtatagataataacccaaaatatttggaactcttatgaagaggaacatgagaaagttgagacatatctttgtgttcttttttgttgagtcatattctctttcttataccacaaaagaatgtaatagttgatgattcgggggatcttaccttactccaccatcgaaagattggatcaaagcttgtactcttaaagaaaccacaccgggaaacactcgttgatctctaaccatttttctggatgttagtgttactgtttatatatttttaaggattagagtagattctttttcattaaatctcaaacctgttcttaaattttcaaatactagcatgttttagcttaaaccagctgcttcttttgtggtataatgaccttttcgtttgccttagagtctctccaacacagccattttctcttgatcatgacaaccattttcaaatatctacgttacatcaaatagatcattaatattgtttataagttcacatcttattatagagggcctttagcaatgaattacttgatgtgcttaggagtctttcttttttgtataggttaaatgttgataacccaatttttcatacaatattatgttttcaaattatatattttttatagaaaaaaacctccataagtttttattaaatattttataaatgatagcatgtcaacaaaacatcattctataattaacaatcatcttgtgtaatgaacaattgtaaattcattgttgaaagttgaaacctatgaataaaaacaaaatttattcacaaatcacaaatgctttagtattagagagatcctctgtccctgtcaaaaggtttcatagtccaagtatattatatttacaatgtagagtaataaaatacttgaattaacaaagaccccatgtgtattaaaacacttagttgttagaaagacttattacaacttagctggcaaggagttaatactaatcacttgtttaaattttgtcaataaacaatcagattccaattactttattc

SEQ ID NO: 59029 - DNA, 777 bp, Arabidopsis thaliana landsberg
aaaaaaaacttgagtagtatttaggggatatgagataatttacccactaccaattgattttgagttggaacccatgaaacttaacatttatcgcaccaaaatcatcgaatccatcatcttttattaaacaaaattccgagatgtttggtagcctataaattcaactgttatgcatcataaatgaataaggatttgttaaaattatcaaagagaagctagaataaaatctcttcgtagtgggatttacgccttgttctagtgaaagataccaaaagccgcagtgcaaaatctacatttcgtagtatttatggtaagtaaactatagttatgaccaaccaatagccaataaggcatgacatgccaacttcgctttggcaaaacacgctcccccaaccgaaataacataaaccaatttcaacgagactgcgctcgccctcgagccctggctaggtcgaccgggtactaaaataaccatatcacgttgcaccagccaaaatcaatattcagttggttttcttgcttgacaattagtgacatccgacccaattacacaaaaaaattggtcgatagagcctagtcatacattattattttttctacaaatatattttgatatggtcccaaagaaaaatgagatattttagaaagaagaaaaagacgaaggcgcaatttcctaataaaacaaacatgttattagactagttcatagaaaataacatacacacatggttataagagcgagagatgcggaaaaggattatggtcatgacttgcact

SEQ ID NO: 59030 - DNA, 491 bp, Arabidopsis thaliana landsberg
ttgtgccctcagggtttgtctatcgaagggccctggtgaacatactaagcgtgctcctcccgctgattgaccttgcctgctataacataggattcctcggcttgtccgagtgtcagaaatgtaagtataaagagttggccgtaacgcctcctgctcctctagagttattaccggaggatgggaaccgatctacagcaatcacggtctcagctatatctacactagatctctcttcgaagacaattgcttatacctgacgctacactcacttaactctgcagctactttacttgatcatcacttctcatgattcaattactgcatttagcttattagacaacatcataaggctatcgtatgaacatgctagagctgattggaattctaccgtcaactgctaactacgatctattatttgacggactaagctgaatgcaatgcgaactatgtcaatgacacttacctttaattacggctgaggcgtttactaa

SEQ ID NO: 59031 - DNA, 493 bp, Arabidopsis thaliana landsberg
atgacgaaacggttctctacgctctccagcaacgtcctctaaacggtcctctaaatttagaggacgctgttggattctctatatatagagtttcttaaacagtcctctatacatttaaatactttactaggaaagccattgccaggccccaggtgatgtgcacgtccagatggcagtgcatgagccacacacctgggttgtcggcgacgaactggatgaccgcccacccgttgacgggcaccgccacggtgttccgctgcggcgggtcgacgtagttgaacttgtcgacgtccttcttggggtcgaagttgccaaagccctcagcgaggatgaagaaatcgtagccatggatgtggatggggtggttctcgggcgtgacgatgctggtgtcctgcaggacgaacggcaccacggagccgaacctgagcgggtacagcttggtcgcggggaccggctgccacagggcctggctgacgttctgcgccgtgtagtc

SEQ ID NO: 59032 - DNA, 621 bp, Arabidopsis thaliana landsberg
cttctttttttgaccaaaacaatgctaatttcatttgattttcacctgtagctgaacagtatctagataaagagcattaatagtatatagtaccaaatatacttaccctctatggatttcaaatgtaggtacgtatatggcttaactaaatctagaaataaatcaatagatttttagttcaatataatcggcttaatatatgctaatcaataagaacttgaaaactaacgagattttgtcttttactttagcaacaacacgcttaaaatagtttcatatccattattattaggttgttgctttatttcttaatttgttttctcgaataggcaatggttcgactcatatatcctccaccgttgatttcatatattaaaattcatatttttataaataataaattaatataaaagtacatgatgtactagtttatatgaactcaaatgtgtccaaaaacttaggaataatatattaaaacagtaacaacttacaagacgggagagggcatgaagcataggacaagagagaactcccatccaccaactggctcaaagtttcgagaccacctaataagacctactatcaaactctaacttatcaccactcgaaagacaaaaaaga

SEQ ID NO: 59033 - DNA, 1219 bp, Arabidopsis thaliana landsberg
ccagtattaaaagaaaaattcacgaagagattttgacggtcttcgaagaaagtctgataagagaatggtcaaaggccaactagccgtattaaagcccaaatcatcgcatgcaagagtaatagtcctaactcctaaggagcgtgactgcatcacaagggcagatacgtctgttaacttgggcccacttctcacttgtaaagctaaatctttgaaatcttttgagagttttaactttaaagatatgaaatttagctaaattcgtaaaaatttatatccaaatgttgagaacaacgtaatctaaaaatgcatagaccataatattggtttccctttgtatcaactaacaaaattaatttttaaaattttggtggttctttagttatgctaattggttccttttgtattgttttccaaatatttgagttctataaaataagaaattaaaaacattagtacaaaatcttgtaaatttaaatttcgaatcaaactaaatatgttaattcaaaatctctaacttttaattatatattttataataaagtaaaaaactatattcaatatttttattatcagatatatccatctcctatagaaaacaaatctggatcgtagcgtgagtttgcattttgcaggcgtgagagttttttgcacgcacacacacacacacaaacacaaaacaagcaaatggtaagatttaggtaagaaacttgtaaccaaagcatgcatcaacccgtggtactctaataggctagtatctatataaaagcacaacttcacatgacaaaaaaaaccacttcgcatataacaacatcatcacgtgaactcactcaataggttcagtgtttctgacatattgttccctctctgaatgaaactctcccaaatagagaatggcctaaccacctatccaaccgcatcaaggcacttggtttcatccccttgatttctctctttttttcttttcctatcgcaggattttgtgttcttgttttgaatatgaaatgttcgtcgatgtgttgtttgatcctcttggccctttctctcctcaccgccttcactcttgcttcttcgtcaaatggtacacacaagtatattatagcataccatagtatataacatacatgtatacagaattttaacttgatatatgatgtttttactcttcaggtatagatggacctttctacgactctactgcctacacagaggtttttaaagc

SEQ ID NO: 59034 - DNA, 535 bp, Arabidopsis thaliana landsberg
atatttttgcagctatgtctcacgcttccatcatatgcaaagtccttaaccaaatagttgggatgcagataaataaatttaaaccaaccattctgtagattgtaggcatataagtttctgaagttcaagaaacatagcctttgagtacttattatcttcccagtttgtaaaagctcccagatactcttcagctttaccatattcaccaagcttcatcacttccgcccgataatttaagttgaagaacacttttgtttcttgctctagtcttcagaaagaaaaaatttcaacaataagtaaacaacaatatatccaagatcacatttatctctacaaaacttacttatgcagagtgttcttgtacttcgcttcatagagaaattgaaggattaagcaaatgagatcttcctacaagaaacgcactgatcagaaacaaaagaacccgagaagccaaaatcttcggttcctacaatataaggatataagaaaatatgtaaaaaattaccttcaaacttccttttttcttactacaatt

SEQ ID NO: 59035 - DNA, 532 bp, Arabidopsis thaliana landsberg
gggatcatactagcacaagggcattcgaacaacttgtagtaatttgtctgtgtatgtggaaattatttttgtcgtagaagaacttacacgattatttgtatatttaatcgtctttttttttgttgttgtaaaagttgtatatttaatcttcttgtgtataaaagcaattatatcttagatgagatctactttaattattcgattggtgagtagattataccaaaagactaaaaactaattaaagtcactaaaggcaaccaatctagctactgggtcccaaattgtaattgtgataagaaatactgtactaactaacaccgtatgtatgcaacattctgtcataataccacatattattaggtactctattgaaacattaggtagtacacagtaatcaacgaatgtatggttaggttttttccctgaggaaaaactctatgtataacgactcatgctgagacgtgctatagactatggttttagcaataataattggtgcacacccaattcaatctactccattgttattttc

SEQ ID NO: 59036 - DNA, 887 bp, Arabidopsis thaliana landsberg
cattgcatccactgaagctcccttgaacccgtcaccactagcaatgagtgttgcgccgcggctgatgtcccggcgaaaaccacgtatgccgccgtctattttaacaacatgtattatcacacacatatagtgtcatcaacgataatctataaatgaagagagttctgcatacctgatccaagaggtaagagaaccatttgggattggaggtcttttgttcaacattgtaccaaccaagccctagttgaaccaaattatacgcagcaaccacaacatctatgtataactcagccctgtcatatatacacatcttttaattaataatcatacataacacaaaaacataattataaaatgaaaacttatatccaacttttttgtgggaggatatttgaagagttgttaaaccaaaaacaaaaaagagtagcagtccccactgaacaaaatgtcattttcatgtagacttaaccaaaacagaaatttttactaaaataataaacaagatccttcaaaaaactgtgaaatcattaccctctttttcagagctcataaaaactcaaatcattaaatagaatctttatcagacttattatttcagcgagttttaaagacattgatggccagtttcaagtttttttttaacacaataatgatctcatcatgagatcaatactgtataaagagatgagattaatagttacattacacatagatgtatacaattgacaaaaaataaaggaaaatggacttactcgagagctaacaaatatctgaaactgacgttcttgtggatataagcaatctctttggtctgagaatccacaccgatcaaacaagaagtgaggagaagaaaaagacgatgcagagtcttaagatcacttctgttt

SEQ ID NO: 59037 - DNA, 572 bp, Arabidopsis thaliana landsberg
agcataaacatctttgaaatgaaatttaatgcgcttccttgagatacaatggtgacactgttggtgctgaggatgattagcgctataacaaggaaaactcctgttaaaaccctaagtaaaaggagtaaaaccttcaacgaaacagctggtggcgaaggaggtggtggtgccataaaattgatcagtacgttgaatgaaatttaatgatcttcttaaattggtaatcggagaggaagatgaagataaaagtctgagattaatttataaccaaaacttgctgccagagggataagagttgacttttgctctatggcatgggaccaagtaatgacggtaaatgtcaaacaaacaaaataaagatacttatgaaatataccaaagtttattgttgaagtcgtgctcaaactggatcaccaccgtctagcttatccaaataaatgggatacatattatttttcctataatattttaaatctcaaacttaaaaaacacaccaagcttaaattaagtgcaaattaaaattaaggtaaaggctattataaagaagcttgtgaagattagttagttatcta

SEQ ID NO: 59038 - DNA, 1157 bp, Arabidopsis thaliana landsberg
caacactattaaccatgtggatgaatcgcttgtgtgaagaagggaaaatggaggtcgctgttgggtttttggttgtagcatcaaagaaagggttgattccaaacaatttaagctatgcccctctgatacaagcctattgcaaaagtaaagagtatgatattgcttctaagttgcttctacagatggctgaaagaggatgcaaaccagatatagttacgtatggaattcttatccatggtcttgttgtttcaggccatatggatgatgcagttaatatgaaagttaaattgatagatagaggagtttcaccggatgccgccatctacaatatgttgatgagtggattgtgcaagaccggtaggtttttacctgccaaactcctcttctcggagatgcttgaccggaatatcttaccagatgcttatgtttatgccacgctcatagatggattcatcagaagtggtgattttgatgaggcaaggaaagttttcagtctctcagtcgaaaagggtgtgaaggttgatgtcgtgcaccacaatgctatgataaaagggttttgcagatctggaatgttggatgaggcattggcgtgcatgaataggatgaatgaagaacaccttgtacccgataagtttacttattccacaattattgacggatatgtaaagcaacaggatatggctactgccataaagatttttcgatacatggagaagaataaatgtaagccaaacgttgtaacatacacatcacttatcaatggtttttgttgccaaggagacttcaaaatggctgaagagactttcaaagagatgcaattgcgggaccttgtgcctaacgttgtcacctacacaacacttattcgaagtcttgctaaagagagtagtacccttgaaaaagcagtttactattgggagctaatgatgacaaacaaatgtgttcctaatgaagttaccttcaattgtctacttcagggatttgtgaagaaaacatctggaaaagttcttgctgaaccggatggttctaatcatggacaaagttctctgttttctgagtttttccatagaatgaaatcagatgggtggtcggaccacgctgctgctgacaattctgcccttgtttgtctctgtgtacatggaatggtgaagaccgcatgc

SEQ ID NO: 59039 - DNA, 524 bp, Arabidopsis thaliana landsberg
  unsure (1)..(524): unsure at all n locations
caaacttagtctgtgcaagagggccttctccagcatcaacaactaatatagctccttcaaccataccaacgactcgttcaacctataattcaaatacacaaaatagtcacaaagatagcacctatgttctacagtaaggagtatcctaatgtcaacataccatgagtaggtattgagaacttctaattaatttatcttttgtccactaatatgcatttctactaaaaacgagcatgagaatcaaataatacgctaaaagtaagatcagtatcatacctcaccaccaaaatctgcgtgaccaggtgtgtctaccatgttaagttcgttgtccttccaaaatattgatgtcacctgtcggaaaatttgacataaactttaaatgtcgtgtaacgtggtgataaataacaaaatctcagggaatcggtaaaagaacacatcaggttacagacataacagaacaaactgagaaaaaaaaagaacagaacataaatannnnnnnnnnnnnnnnnnnnnnnnnnnnnaaa

SEQ ID NO: 59040 - DNA, 458 bp, Arabidopsis thaliana landsberg
  unsure (1)..(458): unsure at all n locations
taaaatctgatggcataccaggaattttctcctctttttgcttccttcccctcgtcccgtctctggttgcaggcagagcacgaacgacggacgggcgccgccaaaccgagtgatcggtcgagtcaagacgtccagtactccagtccagcgggctagcgcgtcctgcccgcagcggagcgcggactcgccggctgaccccgggccggttcttcgcggttgcggcgcgcgacgcggggtgcggtgcggttaggccaagcggccgcccccgtgccgtattggcggcgaggcgacccgagtcgccgtatagggaagagggaggggaccagccacgaggggacgacgacgacgtacttggcgcggtcaaaggctggtcgtggtcgtgtatagtgctaaccgagctcatcgtgcttcgtgtcaaatcaattcagactagaaaagtcaaaanaaacttttggatc

SEQ ID NO: 59041 - DNA, 494 bp, Arabidopsis thaliana landsberg
gtgtgctttttgcactgcgctgcgccagaaatcccttagctttgatcttatctccgctttgtaatggcaaactggctttttcaccaatcagcactgccggtaactggcactgcactttacgattcaggcctgcttcctgctgctccgaatcatgttgcaactgcaaacgcaacaagggtaacccggccggtgtatagcgtatcggttcaatcgcttgtaccgtcgctgcaatcaccagcgtattcacaacgattaggcggctgcctcagttgtggctgcaggtgcatcacctacgatggttttggatttttcctctttcatcatcgggcttggtgcagtcactgctgtcttggtggaaatcgtcaggtgacgtaatacagcatcgttaaatttgaagccgtgctccagctcttccagcacttcctggctcacttcgatgttcatcaacacgtagtgggctttgtgtactttctgaattgggtaagcgagttgac

SEQ ID NO: 59042 - DNA, 1592 bp, Arabidopsis thaliana landsberg
tgacagagtaaagaagaaattagtttggtgaataaaaaacggttttaagtcttgtggaatatacattcccatgggggtgattgaggatattatggacaacgttattatcattgcttggttaaattaggtaattactagattaccacaaacttcaattagcagtactggttcaaaattctaccacagctcaatctaaactaattgttagatgaatgttaacatcaaaaaagaccagactatcgaccatgttcatgtggtttcaacctcaaataaaaatttgaaaccgatatcaagagaatgaactataccgctgctaaatatttaccattacataacattattgaacattgagaaacacaccaaagaccgtgagaaacatagcaaagactagacttttctacaaagacaattccatcaagagtcacatctaattgaatcctctagtgtgtcgatgatgttatgttcaaacagatgaataaaacgatcagattgtcttggacgttataaagcataagaacatttattgagacaacaaatatggttcaaaagaggacgaacgaccaaacctttgttgcattaatgtcctcaacgttttttccaatccaattggagacttctttctctctcaggttttttaccaaaatatgtcttcccccacctgaaaacaagtactgaaaaagagaagtcttctatagtgtccgtttctcacccaaaatccataagaccacaaccttgttttttttactaaaacattgaatcataggaattgtcagtaagttgggagtttttcaatacataaatacgtatccaggacgtgtacctactaatacatggtctctagtacaaaactatacgcagagtcacatgcatactttactcatgtaggtcacaagttgcttctaaaaggtagacccctcacataaatcactgacacaaccacgtgtgaccaagaattaacaatatcaggacattatacgattgtaatacattcagatgcaatgtcacgaacacaaaaaagtatatatcatctggttggtgtcttagggacagacagatgagggctggagagaaagtgacagtacctacaagattgagaagagcttcttcttttcttcttcttttgtgtcttcagtgggagtttgatggcaatttccagagagatttggttgcgataagaatcttctctcttccatgggattcaggttctttctcgtgtatggaagaagaccatcttacagcatgagccattcgtgcgactttatctagcacctcaggagagtctcggatcacaacctttccttctggacgtaatattctgtccatctctaccattagatctactaggctacacctgtatgcatatcagacaattcagtttaggttaagtatataagacagagacctgtgttagaaatcaagaatggttttacgttagttatacctcgatttgcttgagtcttgtcgttttatcagtgattcaattcctgatacatggatgaaatcatacgtgcggggatatgttgaaatggttcacacctgcaacaaacaaataataaggttttgactattaaggaattgtgacatatttcgat

SEQ ID NO: 59043 - DNA, 137 bp, Arabidopsis thaliana landsberg
cgcttagcctggattcgaatgcagactaatggcagtgctgggacggcctaaggaacacgagctatcctcaaagctaagataaatgcatattttggcacataaccgagggataacttgatcatgtaatgaactaccct

SEQ ID NO: 59044 - DNA, 1468 bp, Arabidopsis thaliana landsberg
ttgggcgcaagtgctatcaactcggtcccatagagataccgctttctgactgacatcaactctacagctttttgcgaccaagagctctgaataaaaaaaggtatgtcaaaatcaacctaggttttggagataaaccatgtgcaaaataaaacttcaaaatgaactagaaattttcacccagtttatcactgaatagatctaagttaaacatcattgagttctacaattggttagttaagcgcttccaccatttataagcatctgagtgcacatgcgaagttcgatcatccgacccctatcatttgtggttaagaaatttttaaaaggatagcttctcgggtgtatatttagattatcggtattgcacattcgtcttacctgagcgccactcccatcactacttccatcactagcattcaggccaatgctcccattttcattctcatcactgcttcctgaatcttgatcagattttttaatacttttcgatttcacagacttttgagtttgatgcgttccgctctcacttccactaccactagactgaacaagaaacaaggaaaaccatgagaaaccaaaaagtaagataccaatcatgtggaaaaaaaagaagaagataccaatccacaattagaccatgaatttctagtttactacttatcaccagttgtaccaacaggttttcagattaatcatatatgagcaaggacatacactttggcatcttctccaaacatgctgccaaaggatcttaagctcattttttcttattggcttaacaagaaagtcaacagctcctttcgataagcacttaaagaccagccccattgagtcatgagatgacatcactgcaacacaaatctcacaggggaatgtagttaaaagcatctactttccaacatacgctagagaagactcaacaaatcgtgtaacttcaaaagaaagagctcaatgtaaaacgaccaaggaaaaagatctcactgatgacagggatgttccgacgagatttgtggttcaaaatcttgcacaagagaccgataccagataagtaaggcatgatcacctctgttagcacaatatcaatatgattgtttagatcttctaacaccttccaagcttgtatcccatttgacgcctcaacaactgccatgacagagttaataataatcaatcaacaaacagaaccgaaacgggtacatatatgcgctatagattaaagttgggtcataggcttcaaaactgaccttcatagctacaattgcgaagaagtgcagtaacgatataacgagtgcaatcgtcattttcgacaagcagaactctaatggttctcacatgaagaaacctttcccaacaaacagttgccgctgattgttgcgacaatggaatttgcagtccacctgaactcccatttctacatccatagtaattcattaagttttctcttcttcactatgcttctctgtccgac

SEQ ID NO: 59045 - DNA, 654 bp, Arabidopsis thaliana landsberg
  unsure (1)..(654): unsure at all n locations
cgaacctggttggatcaactcacaaaagacactacacgaaactacaataccaatatttcttagaagaaactacaggaaacaaaaccgataccaaactagacgatacaaacatccccaaagctacaaattaatcactatttccatattgcaattcaaataatgaaaagtagtaaaatgaagatggataaacataagaaacgcatacctattcttcttggagagaagcttattctcattgattttacgaccaccaccttcagttacattacgagcaccatccttccacttatcaggaactatcactttcgataacttcttctcacctaaaattaaaagataaaaacaaattgagtcaaaaggttcatactttggactaaattagagatcctacaactagggtttcgatctaagaaaccaaaatcgaatcagagatcattaaatttcttcctgaaacatgtaatcgattaagctagaaacgaaacgaatcacaaatcctaacgccaatagtatagattcaattagaattaaaaccgatccaagtatagattgattcaattagaatatggaattcaaagaggagattattgatgganctacacttatcgcaaaccatcttcttcttccgagagagatatatgaagaaaccctaacgcc

SEQ ID NO: 59046 - DNA, 1295 bp, Arabidopsis thaliana landsberg
ctatgtatatcttgtacttgtgaaaaaatataagtaggtcatttcaccaattaattttaaattataagatcattagacatcacataggattagtcgttcctcttgttggccttcacaagggtgttatgtcatatatgttaagttagtgaaaaccgtagttactacaaatgagttaaatatctcgtcgctataattgtatttaaatgacatacttagtgtcgctataattgtattgaaatgacatacttagtggcacacaatctatttaacatggaattaccataattaaaatacaacatcaatcatgaatcatcagatctacaaaatctagggtttatgcaaaagccgagacacgcacattgttcttcttgagtaaaaaagtaagtactaagaaacataaagtggagaatttacggaactgtttttttttccctacaattatgctgtaagagaacatatcactcacaactcacaagtaaacctatgaaacctactttaacatgaaaaagaaatgattttagagatgaaaaaacatacgacagcatatttactgaagcatgccacgtatgcatgtgaatattggtgagtgggaacgaatgcagtaaatctttggggaatttggactttggagcattgaaatttttcatgaatttaaaatagttagtgcaatcactgtcaactactataagaccactgttagttcactgtcacttttagaaaacgaccactgttttgcatcaaaagaagaaaatcaataatactattttagcttctagtatcatcatcatactccataaatcgatttaaagtaaacctaagacctctctgttttagaaaaaagaagaccaatataactatgatgatgatagtaatgatacatagatactcatatatataaatatgtacacattaatacatgtgaatttctcttttattagatataaataaaattgaaaaccctaccttcctccccccagcatacactagtaactaaaactgaaccacataacctaaaattaaaatcaacatataagaaagagaccaattcacatttcagattacataaaatactccatttctcttaattatataattacttacttctcaaactttaattgagtagtagaactagtacccggtagcatttgaaattgctggtggctagctacggcggaggaagaagaagtcgacgacgaaggaagaggacgctttcgcttcttcttctcgtagctaacacctctagctgtactctgcatatctctaacttcccttagataaagcctaacggcacgagc

SEQ ID NO: 59047 - DNA, 575 bp, Arabidopsis thaliana landsberg
aagctggtgcgtcggcacatcctggcattggcggggctctcgccggaccgctgggaatctcccattcactcctttaccgaagccgaacgcctggcgatgcgccatgccgtgctgcgtgcaatctcgacctacgaaagagccctcaatgcagtatagaaaagtcgatgcgaagacgcgacgccagcacaaggcttttctcgaatcgccccagtttgccagcgagttggaacgcatcccactgaaatggcgtggccgtgttgttagtcaggcgcttgagctcatgtcggtatggcactggcgccggatcttcgagccagtcgccgtcgatttcgtgcggggcttcgccgcgcactacgtgccagccggaattgatctttcgcaggatgatgccgaaatctgcgccactgccgagaaggccgccgagaacgtcaagaagatgctttggaaggcgatttccgacacgcacgcccgcgacatcatcgagcaggaatgcggcgattacggcattgacgtgccagaggtcgacgacgatgacctgcgcgccatcatcgcgcgagtagtggacccgcgctggt

SEQ ID NO: 59048 - DNA, 125 bp, Arabidopsis thaliana landsberg
ctttatccttattttgctgaaggagccgtcccaagtgctacctgaaagcgggcatgggacccagaatgtccaacaatagggggcggattatatccaacgactggaggtctatgggtaaccgatat

SEQ ID NO: 59049 - DNA, 959 bp, Arabidopsis thaliana landsberg
tgacgagtaggatatgaaattcttgttggaactcgtcgtgccttgttttggttcacaacagttccaagaatccgccgcaagtactgcggatgattcggtttctgacgaaacacaaacgctgatgaaacaacggaggcgacggaaacgcgttagagtggctggtcaacctggacaagtggcagagtggagaccgtctcttagcgttatctccgagaacaagccggcgataacgaagatatcagaaaagaacgaagaaaagaagaaagtccgtcggaaaagtgaaggcaacggcggcggagacgcatcatcacggtccggtggtggtcatattcgtttccgtagtgacgatttcgggtaatttatatgatacgtttgtgttaattaaggttagggttatagggtagtcaattaaaaattttcttttttacaaagcttaataatatgtttagtatctagttgtagtattaaaaaattattctaacctcgtcaatgtaatttataaagataagtatggagactatgaaaaataagaagaagataatgatatggtagttaagatgcaattttgtggataaagattcgatatagttgagaagtcaacatcagtatgtcttattgtttatttgcgtaaatagaagaagacgtaaatcgcaaggtaaccgtaataatgaaaattgatgtttacaaaatggcagaagaacatgtagctagtggcttatatatataacgcatactaatgtttttgacgtttttaaaattgttttttgggttttgcaggagaaatgctttcgaaccggtgattccggcattctcgccgactccgttcatgttttgagtttaagtttctggtgaagtttatgtgtataatatattgataaatatgttattgctaatggaaagatgtagcattaatgcatatacttctttgattttacccccactgaaaacttatgcttatg

SEQ ID NO: 59050 - DNA, 1199 bp, Arabidopsis thaliana landsberg
  unsure (1)..(1199): unsure at all n locations
aggtttagctactcttacgttcaattcttcaaatcttatcctcatcaatcatatggcggagaagtagtcttgtaccattagttctgtcatttcaataacgattttgttcagcttcgtctgtggagcttttggcctatcacttatatgttcgcatagttctactaggaaatcaatttgtttgagaatgcaatccattgtgtaagacgagactcgctgagtctccaaacgcttatcttcgtttttttcttttatgtttggagtaatacctaaaacctccgcaatagataagtaacaatctagatattgtttgtacctattcaaaaccaaattttgatgaatcataaaaatttcgattaaattgtgatttaacgttaaatcaaaaacaaaaatatataataaagaataatcgacttatcgattgtgctcatctatatcctaatcaatccaacagtatatagaaatcttaccattgaacccatggagtcaactctctagtaaaacgagatgaatttacattaagatcattcaatttaagattactccctccttgagtataaatcaaagtaagatgattaatattgttccgaagactatcttctccattatacccactttctgatttaaccattttatggagaagaatgagacatttagcagccacacatacgtccgtcgtcacacgcagcctatgcaagatcgcatcaacagtatcaggaccgtaacacgtgtcaatagttgattggagaaaagtgacgtatttgtctgaaggcgggttgtgtgaggtatgagacgtggctttcaagagagctaaatcaatggttttggcattcacggagctacacaaatgaaccacattgagtttcatctgtgaggcttcgtctnnnnnnnnnnnnnnnnnnnnnnnnnattttcccatttgaaatatagttgttctattccaatgttttgaaactttagcaatgtggctttgctttaataatgtttataggtttcacaatgtgtttttggtttgatttgattgtaaggtatcaaatatatatgttgcataatagtcatctattgaacatgtgtattagatggaattttcatgccaggatttaattagatattcagctttgaaaattaaatacacatggattgtattgcaataactatttaaggtattattattttatctatttataaactaaatttaatgg

SEQ ID NO: 59051 - DNA, 1140 bp, Arabidopsis thaliana landsberg
gggatttaatcgcacgatagtctatactatagaggaagggaatgatttttcttatactcctaaaataagatgtttattcttcatccaattcataggtataaactttaagttgataaatatgtaggaaatataaaattgtaagaaaagattaattttaattgtttatgggaaactttggagcatgtcccaaattcctgtttattaatataaataaaatataatatgaatttcgccttatacatctttattcaataatatttttgagatagttctttaaaaaattatcaaatataaaccaaaataaaaattaaaaaaaaaaaacaaaaaaagaaagtaacgataaaagtaataacacttcaaaaaaagtatagataactataatcatctgacatgtaaacatatagcaaataaaagaattagattaagaactatctaactatgacttgtataaaaagaaacaaataaacatcaacagtaacatatatatttactgatgagttacccgatcttcacctgcaaatgaacaggcctactagtcataactaatgggctttctaaaccacaatattcttacggcccaattaaatttaaattagtattattattcgcagtttcgcgaggcttttgtttttttttatcacggcctagtttagttaagctctcgccggtgatttagcggagatgggaagtgaccgcgacggtgctccgccggagaacacaaaacgagaggttgaagatagagatatcagaagaaaatcatcccgggagaaaccgagtggttctggaaaggattccggcgaagagaaagatgtgagtcgccgccgtgaatcgaagaggagaacaaaagacggcaacgattccggctctgaatctggtttggaaagtggaagcgaatcggagaaggaagagagacgtagaagtagaaaggatagagggaagaggaaatcagatcggaaatcatctaggagtaggagaagacgtcgtgattattcgagtagtagctcagattccgaatcagaatcggagtcggaatattctgattctgaggagagtgagagtgaagatgagagaagcaggaggaagaggacgagaaggagagggcagaggcagagatagagagggagagaaggagaagagaga

SEQ ID NO: 59052 - DNA, 1033 bp, Arabidopsis thaliana landsberg
ctgcaagcattggccgaattgtcagcttcaatgcttccagcaaatttgatggagtcaggtgagttttgtgtggttttgcttgtaacttcaatatacctgaaacttatgttttttttcttctagatattctcattatatagattgggttaattctgcagtgttcactgttcgcattagggcctttacctgtctgtatttgttaaatttaactaaattgcattgggtccagaattatctgctcagttgaaggaagaaagaacagaatacgacatggacgagaaatctagcacaccagaagctacttccacaagcagtcatggggaaaaagcaaatgtagagccagatgatagtctccttcatgcaatttcttctgttgagaatgctaacaagagaaagtcaaaaccttcaaggctggtatccactgattgtgatgatgttcccacagggaagctacaaccacaaactagtggcagtttaagaaaacgtaaaccaaaggttagcaagatagttctcttaatctgtgctctttcttctaggcatcttttagctgtaaatgttaattgtgctctattttcaggtactaggggatgaagctccagcagagtttagtcagaacaaatccataaacaagaaggtagtctgtgtgtatgttgaattagttgaaacccgttgcaagtcctatattgcttccttgtacataaattttttgaccttagttgaactccgtgatctctgttttctatcctttgaaacaagttcgagatctttattaaaaatgcatattgagtattcaaatttggagattctgaagaaaacattacctcatatgatggggtttattatgttgcaggaattgcctcaagatgagaataatatgaagtctttggttaaaacaaaacgcgctggtcaagttccggctcagtcaaaacagatgaaaactgttaaggcgttggaggaatctgctataacaagtgataagaaaagacctgggatggatatagtagcgtcacctaaacaagtttctgactcgggt

SEQ ID NO: 59053 - DNA, 1718 bp, Arabidopsis thaliana landsberg
caagacactcaccatgaatcttgacgttccagagccatggctggttgaaccagttattgccatgtatgtattttcccctggaaaagaaaatgggattatgctgttctttttggctcaaatttgtcatggcatttgcttgtttagttcacttatttttgcttatgcctgaccttctgcttttttgtttcctctctgctggatgtctttgtccagtcatgatcttgataatatattgcttgagaatctaggagataccactacactgcaggcagtttttgaggttgaatctcttgttcttacaggttagcttttctaaacttattcttcaagggtggatggatttgttcatgttattattaacataacccttgcacaggtcattgcgcggaaaaagatcatgaggctcctcgtggccttcagctgattctgggaaccaaaaatagaccgcatttggttgatacccttgtaatggccaatttgggttattggcagatgaaagtatccccaggggtttggtatttgcaacttgctccgggtagaagttctgagctatacgctttgaaaggaggaaatgatgggagtcaagatcaatcctcgctgaaacgtataactatcgatgatctgcgtggtaaagttgttcatctagaagtagttaagagaaagggtaaggagcatgaaaagttgctagttccttcagacggtgatgatgctgtgcaacaaaacaaggaagtgagtgctactttactcgaatagaagatttacaataaaactattggtccttaaaagtgttggttatatattctctaatgacgctcttttgttttagcagggaagctggaactcaaatttcttgaaatgggcgtctggttttgttggtggtcgtcaacaatcaatgaagggaggtcctgacaaagtgagtagcttttgtaatatggactaacttttatgattgttgtaaacctgttgcatctcaattctgcatgattctaacatgtgggctacctttgcaacaattttaatcaagttatttctatttatcatcttttcaggagcatgagaagggtgggcgacaagggaaaacgataaatatattctccattgcttcagggcatttgtaagcgctatcatttttctaacctgcttgaccgcacacattgacttaatataattacgtgcgttgaaccattttagaaaatctgaattactttaagtgcatcaatcatatgaaaagaaaatcatatttggtatttctacgtctatatgtagattggatattcgtgtgcataagagttttaagtgtattatgtgaacaaaaaaagtttaatatatgatttgctggtatcaattcatttctgacgctgaggcactgcttatgacagatacgagcgtttccttaagattatgattctcagtgtcctgaagaacaccaatcgtcctgtaaaattctggtttattaagaattatctctctcctcaatttaaggttggctccttgtttctttgcttccacatatgccttttgtgtttggatctatatatgtcttcttatctctagatgtgaacttatcttctagccacattaacttaatgtgtatcgcattctaatcttgcaggatgtgattccacatatggcacaaagaatacaactttgagtatgagctgattacatacaaatggccggcctggttgcataaacagaaagaaaagcaacgaattatt

SEQ ID NO: 59054 - DNA, 126 bp, Arabidopsis thaliana landsberg
cccccgggcctgcagggggtggggaagagccacgtgagcgtctcaaaatctctcgatgttacatatgcacacagataaataatatctcagtgatgacacaatagacactcgtctgcatatacataa

SEQ ID NO: 59055 - DNA, 1345 bp, Arabidopsis thaliana landsberg
actctctacttgttcctctctcaaattaggggtgttttggttcgttcctagaaaatatccagtattttctatgggtaaagctcttcactttccataaagattgaatctttattgtgattttggttcagattaatatttagagcatggtttgatttaagggtgaaatttctcaaaaagtcaattcttgactatgttattacagatttagcaataacttcagaagaagagagaaactttcagtttaatagtgttgttctatgtttaaactgcattaagtttttagtttgcagaagaaatttcgattatccatgcttgtttattcttctttgtcgattggcatgatcctatctatgtcttttgtttgcttgtcatgaactggatttttccttggtatcgtttagtctgaatcttatttgtaaactgttgctgactctttgtagataagaggctcgatcccgttaaggtcacgggtgtgaagatctcccctgaccctgttgtgagtggtgcagccgcaacatttaagatttttggttctactggtaaatgatacttcctgcttccttaataagtttcagcactagataataataacattctttaccttcttgacatttcttgataacattattgcgtgtggtgtgtgtactaggcgaagacatctctggaggaaaagtagtgatcagggtttcatactttgggatacctgtccataccgaaacttcatgacctctgcgatgagacggcatgtccggttgcacctggcagctttgtgctttctcattctcaaacactcccttcaattacaccatctgtaagatttcttagcacttattatctacaaatctatatgctggtagtattcatgaataatggtttgagactcatttttcatttggtaatcttcaaatgcattatcctatgagagtggcggcttctctggtctaacaatacgtctctttgaaacagggtacttacacgctaaagatgacaatcaacgacaagaatggcggaagactaacgtgtatcagcttcaaattcaagatcacagtaggttctgcggtctttgctagttaagttttatggtgtaaattgtgtctttgtgaatctctctctcgtttacttttgtggtgtccaaataaagaatgctctttagagacttgagttgatctacatgaaacaaagagtcacaaaccaatctgtctaacgtttccactgcgcaaggtagcagtcatcaagataacatactaatcaagttagaagcaatctatgataatctcttccttcaaaagcatttatcatccccggaataaccaaataaagatgctgaaggaagtgtacagtgctg

SEQ ID NO: 59056 - DNA, 1711 bp, Arabidopsis thaliana landsberg
cgggaggagtaaacaaggaccctgacaatgtgttttgagtctagaaggcaacctgacatccttggttatttgggtccagtttctctacggttgcatcaaacacttgaagttgaagaagaggtggtatagtcatctggcagcatttgtaaccaacacaactcgtgttagctcctttgtaagaccgtatctcatttccacatgtcgtctcacatcccacgatttgtaaccctgtgacattcatgaacgccttgttgttgcatccaacagctgtgaacttattgttttctgatatgaagaatgggctgcccttcaaattcaaagacgatgatgaataaccatctctgttgggacaacctgaatgtttcaatggactctggatgtagaatttgttgtacaccgatatggagaaagggtctccaaggttgaaggaagtaactgctcgtcggatccttggcaacaaaagtatcggttgttggtctgatgagcttttgcagacaatctcgaaccatttgttcttgtaacaacctttgcctatcccaaaagggtaaggaacactaacatttccgcaatggtcactgcaattacgaagtgcaagaggaaaagtagaagcagctgcgtattcacagattcgcaacagaagcataacaacaaggaaacgtttcacatcaacacccatttgctcactctctctctctctttctttcaggagccagaagttctgttcaggctcaggcacacctctctctctctctcgctaacacagataagtcaagagtcaaccttttcacttttatattaattttgcatgatacatcaacgaagaccttgacccatatgaattgaggctataacatattttcgtagatacagcagaaaccacgaaaaaaagaggataatgtttggaattaaatgtcttaagattttctttatcaaaacaaaacgaaaaatgccaaagatattcatgttgagcctcttaaacgaaacacaagaggttttagtttttactgtgagacgaagtttttcattaagcagaacgttttaaaatggatatgccggtacttgagattttttcagtaaaatatagatcactatttgggtgacaattaatgaaacaaaggagcccatagtcatggtcctttaatttcaaaatgggcccaaaattagtcatggtccttttatcctttaatttaaaaatgggcctaaaattcgatatcgaaccaatcaatacccaaccaaaataaaacatttcatatggttacatttacttgtagcggctaaaaatcccagagcatattgaaatgaaatttccgaaactgaattcaatgcaaattgaaatggaatcagattaatggaattcagaaaatgacaattcgtgtgggggaaaaaaaaaacattacgtaaggaaatataaagagagaaactttataacgaaaatgagattgaaagtatccatacgcacgttcttctaatttccattaaatttcatttaggatctgatgatattgagagtcccatttaatgcaaaccgtataacataagctacggagagagacttgttgattccatgcttctcacttactccttcacccccaaaatcttattcttctttcatctccgccgtctatttttcatcaacatcgatagatgtacggttctcgtttcttctggttataaagcaaccgagtcgcacggacacgaaccattttgattt

SEQ ID NO: 59057 - DNA, 1546 bp, Arabidopsis thaliana landsberg
  unsure (1)..(1546): unsure at all n locations
ttcttcttcttcttcttaatctcagattcttgtctgaaaactttctctttcattttctctcaatttaacactttcaagatgccgatcaacaaagacccatcaacacctcctcctgttatcggaaaaatcggtccttacactgtctttatgactcctcctgcgactcctaaaccacctgaatctccctccgctgtgtctcagaagcctgtgatggcaccaccggttcttcctccgccgcagcagtttaaatcggtggcttcttctgaccaggacggctcagttttggggttctttaaaaacgccgtcacaaaggttcaaaatggtgagaaatctgataaacaattaactgattttcagctcaaagtttcctcatttttagatcttgaatttgagattgatttttccgataccctttgattgattgattaggaaattgaactcaaaaatgatataaatcgttgtaaagtttctatctttgtgaagtgattggaaagtactaatgttacatgaattctagcttttcatactgtttatgtgatttggtcctaaaagcaattagattgtgaatttgacattcatgttgtgtgtgtgtgttctaatccatttgactacagcacattcaagtgtggatgatcatttggtgaggtggtttgggttaaaccaatctaagtatcagtgggctttggatgagtactacgaaagcaaagaatcagtaagtttttttttgagtctctatatgtttcctttgagtctctatatgtttagtttcttgttcttgcgggtcctgtatcgttctttgtactagtttctatcgataatcgattcctttagtccgattgattcatcagctttttgtttcatgtacattttgcgtaagcttagaagtaaagctagtttaagtgtttttttgctctttgcttctaggctaatgaacataacaatatacaaccaatgaaattgatacaacatatttgaagcttgatattcactcaatatcagttgtaaaaattgttcattggtatttggtagtcaaaaatgtcattgattggttttagagttactactctctttagtcattgatttgcttatgttcctcaagtaaatcttgtagttaacacatatcttttgaatcgaacgcaggatatgaagaccgtgaaagcaaaggagatgccggggaaagtacagagtgtataagcaaccatgtataaactcatttcccctttggccaattctaaaatctgtttttctgagagagttcaaaaaagcttgagtcttgaggaaagttctcttcagatgatatttaatcttagagatttcttttggtatatttcaaaacctatgtagtagctctttctagtttcatctaacaatggtgaaatcttcaaagcaaaatggagagatgtcattggtcatttggtttgttgtaagtttaatcacattatttactttttaaattgaatcggntataatctatatatntgcctcaattcaaaacaagtttgctcaggggttttcttttgattgtggcatacatgaaaacctttgc

SEQ ID NO: 59058 - DNA, 1266 bp, Arabidopsis thaliana landsberg
gcctatccggcagattcgtatcacattagcaacactagggatttctgttttagttgcaagagaagataaaacgttataaagcccaaaagacccaattggtgaagcaagcccgcataagaaaaaacccaaatgttgaaccaaaaagatgaggatgcaaacttttcacgctagtgtcgtactaacggaaaacttcatatttggagacatcgagtagattttttttatctatgaaaaaaataattcatctagaattttattgaggatatgagtataagataataatgaaagaaactattaattgtgtacgtctttatcgttcatatgttttgttcaatggacatatatatacattctacacacaaactactataccacgattttttttatgctaacattacctctagctacagacagaagtagaaagaaaaccaaaaccatcaggtattacatttgaagttttgaattgtggaattctcaacgaggttcgaggaacatgaatttggttgctaactaaagcaacttgcttgtgcctgtgtgcataactggactgaggaaaaaataatccttacatgtccatttcatcataatttcattttgtagtatatgcatcattgtatcattatttccacttgtatcactaattccacttgaaatgtcacacaatatagggtcccctgacacgtgtgtactatgtagtttcacacgtaccggttaatatcgagattccaagtaaaaaagtgaccaattctaaattaagaatctctctaatctcttcccaaagaagaatcatcactgaggaagaataaaacatttggggagtttcttcgctaatccttcaaggtgtgacctgagaatcacaacacaaaacaatctcactcgaaattcctttgactcatcatcatcaccatgtggagaagaatcgtctcctctcagctcaaaaccctagccgccgatgtcgtcgctgcttctcctcgtcgatcgatagccgccaccaccagacctgtcggtttctatctcgccgccaatcgatcagccatttccgcatcttctttcgttatccctcgtcgtttcagctccgattcaggtgattcatcgttgctatagtttacgcattttcagatctcggctcaggactcttacctgcgctggaattagattcgattcactatgttttcttcatcgcatattagaggatagacttaaatctgtgttggtctcttagataggtgttgctgcatttttgttttcatcttgtcaatggggaag

SEQ ID NO: 59059 - DNA, 863 bp, Arabidopsis thaliana landsberg
agatcaatgatacacgattcatttcttccatattgaaactaaaatcccttcttgtgttatgttacctcatgtctagctttcaatttaccgccaacatccattacagatgcaatgtttgaaatgctgaaaggaggcttattgtcgttgaggcgtaatgagaacattgttgcggtggagccacttccataagagaacataaccacccgctttcccgcctaaatcaaccatacacatgtgtaacaaacttcaaaccaaatgtaaatggagttcaatatagccagaagaagtaaagtttgttttcttttattaccaaatcattgtgtttattgtggatgagggaagcaaatgcagcgtagagagaagcagtgtacatgttaccgacttcctttggtattaaagtcgttggttgcactttagcatcataaaacggtttcgaaatttgttgtgacacctgcaaaagagacaacagattgagctataaatcggttttctctcagtatcaaaagcaaaagaaaagagaaatgatgagaaccttttcaagatcacggctttggtaactctcgtcaagggtcaaagatgaataaggggtgaacttttctttggcagcctcgtcaatggagctgcaatagagaaaagaaaatgttcactcacatttaacaagtaaagaactttcaatctgaaaacgtagttaataagcaagaaccttgcgtttctaagaagtcgttgtacaagagaccagcaaagcttttctgtacaagctgcaatatcatagaggagatgactggtaagagacaatccaactagaacaaaaactattgtggggattagaaattacttattgattgagaatgaaacatgaatca

SEQ ID NO: 59060 - DNA, 268 bp, Arabidopsis thaliana landsberg
  unsure (1)..(268): unsure at all n locations
agttgggctgagctgcacatctctntgtgacttctctgctgatcttcgctattttagttcttatatggacttctctcaattcttgcaccaaaagacatcattgctaactggatataaggggatataccactcttttaaaacattgacatctttaagtgccgctcttcttgtaaagctgagtatagaaaccacattcatagtatgtctaattcgattttttgtcactagattgcacatgcattaagtttcttatcgaataacaactttt

SEQ ID NO: 59061 - DNA, 531 bp, Arabidopsis thaliana landsberg
attctttagataataatcaacgttgtgaattatgagctgaataaaccaaacttaaaataaccaacttattacccatgccataaatacaaattttctcttcttattttgttgacctatttaacaataatgaattctactaagttggagattatgttactactagcaatgatcatgttcatgttttcggtattaaaaaaaaacgttttggtgcacttttacaaagttgctgtaactcccacacgagttcatgcacttttaaaaatcgtcgatgacgtcaaataaagaagcttagaacaacaaactgatttattacaataaaaaactacaaacgaatgcgaaattacgacaaaaggaagaaccgaaagagtacaactagaacaatagaactcaacaatagaataaagaacacctaaaactcaacacaaaaacgcacttaatcttaagcaaacatcagaaaggtaaaagtcgcacttaatagtgtagacataaccgaagtaacaactaaaccacttgctgagtttgtcctgggac

SEQ ID NO: 59062 - DNA, 1071 bp, Arabidopsis thaliana landsberg
ccatttttgtaaatttcagagattgtctttgattgttcgtaatctcataagttcctatatattcatttcatttcttgactcattccacagcacacacacataagacaaaacacacaaaccctagttttcagatctccgaaaaccatgtgggcgatcatgaaaagtctctgattctccttccttatcctcgcttcatttgcaactttcttctccgctgctgatgcatggaggtttaacgtcggaggtaacggcgcttgggtcacaaatcctcaagaaaactacaatacttgggctgaaagaaaccgtttccaagtcaatgactctctctgtaagcttctccattttgttagggctgtaactaggccgctaggactatgcttctaaccaaagaaacatacaatctttatgcagattagtagtacgcgaagggatcagactctgttcaacaagtgatgaatgcttattttgatggatgcaacgttaggaatccgatcaagaacttcgacaatggtgaatctgtggttactcttgatcgatctggtgctttttatttcatcagtggtaatcaagagcactgtcaaaagggacagaagttgatcgtcgtagtcctcgctgtcagaaatcaaccttcggctccgtctcattcccctgttccttcagtttctccgactcaacctcctaaatctcattcccctgtttctcccgttgctccagcgactgctccttcgaaatctcagcctcctagatcctctgtttctccagtacaaccacctaaatcttcttctcctgtttctcacacaccagctctctcaccgtcgcatgctccatctcactctccagctactccatctccgtcaccaaaatctcccacccctgcttctcactcaccatctcactctccggcacatgccccatctcactcaccggcacatgctccatctcactctccggcacatgccccatctcactctccggcgcatgctccatctcactccccggcgcaagccccatctcactctccggcgcatgctccatctcactccccggcgcattctcatattaattccggcg

SEQ ID NO: 59063 - DNA, 1333 bp, Arabidopsis thaliana landsberg
ctctcagtatctaaatttcaaaaaataatgatgaattataaacttcaaaatgaattctacgctttgattccttattaatccaaattttagaaaacttttgctgcaagaaaaaaattctatgcattttcattagtaattgatgatgaattttaaagttaagaaaaagttatgaaattgttaattataaaatatagggaatgtatttataatcaatttgttttttaattatatttgaaattttttaaaattggattaattaaaaacaaggagagtattatcaaaattatggaaaatgttatcacaaaaatgttttttgatgtgtgtaagaaatcaattagtaatttataatgatttttgacagttcgttaatatcaaaatgttcgatttaacttgaaaaaggcgcttcccatggcggttaaaagctgttaaatttttggacgtattagtttatttaattaatatttttttaaaaagcatctaaaattctactgttgctttttattttattttccagtctccatcataagaaagaagaactctctctgttttacactttttgtttctttctctgtgtttctattattcacatgaaacaatggaaccacatgaccaaactcacggcggcgacggaggagaaggagagaactgttcagtttccggattcgattcagctgaaaaagtcatcatccgatgggacgcgacggcgtcagaagaagcaagagagaagatgatcttcaacgatccacaagaagttaacctttacctcaacgccgtcgatgaaatccagaaatatgtatcttccggtggagagattgagaatcgagctaattcagctatccagatagctatggctcgtcttgaagacgagttcaggaatattctcgtttctcatagttctccgatcaactctgattcgttaatgctgtcttcttcatcttcttctcaccttgaggttgatgaagatggaagtagtagtaataatggtaacgaagaagatgatcaacaagaggaagaagaaacggatcttctgaaacgatccggttcaagtgcaagtaccggttcagcgacggttcgattaccaaccggaagaggtagttacagtagatccaccagtagtatacgcgagatcgagctgattccgatcgaatcggtgattcatctgagctggattgctcggcgaatggtctccgctggttatctccgtgaatgtattcaagtgtacggaagcgttcgcaaatccgccgttgattccagtttccgacggttagggatcgagaaactcagcatcggagatgttcagaggctaaattgggaagcgcttgagcagaagatc

SEQ ID NO: 59064 - DNA, 423 bp, Arabidopsis thaliana landsberg
  unsure (1)..(423): unsure at all n locations
acgccgaccaagacaaaaccgcacaaggggcgtaactcgccccaacccagacacaaccggggggggtgagcgagcncgaggaacgccccaaaccgaaacaaaaagcagaggaggcacccgagaaccggcaaaccaccaaaaaggagacaccaagagcaccgaagagaaagaagcgccagcnaagaaaacgacagggaggaggcccaaaaaagaaagaaaaagggcaaaagaaaacgagaggcgcggaccaccggaacacggacaagccacaaccaaccgcnagacagagcgggccaaaagaaaccagagaggaaacgccacgggggaaccaacccacacccgcgaggagaccccccagaacagacccgaaacaccaacagacgcggggcacgcaccagccaaaccaaggccgagagcccagga

SEQ ID NO: 59065 - DNA, 439 bp, Arabidopsis thaliana landsberg
  unsure (1)..(439): unsure at all n locations
ggcagcaacgacacagacaagaaacccgctaaataaaaagcaaacacacaacagggacagggggcaaaagcaagagnnagagagcgcccccgagagccagcagaaaacaaggaagcgagancaagggcgacgcaggaagggaaaggggagggaaacacgngaagacgcaaagcccaagaggacagaaccagaggaaagggcggcacgcgcaaagaaagggcacgagcccaaaacagaagcgaagagaaccaacagacgcaaagcgaggganaaagaacccgaaggcaccggcaaacccaaacaccgcccagggcaaacaacgngnaaagcacgagcccggaaacaaggaagncggngcagngaccaacggcagacaaagaacacaaggccacgaaaggggacagaagaaaggacgcaccagggcaggccgaaaaaaccg

SEQ ID NO: 59066 - DNA, 527 bp, Arabidopsis thaliana landsberg
tttagtaaaaacatttaccttttttttttttgggcaacgtttaaaaacatttacatgttttgttttttttaccaaaaaaatagatatgaagattttattttaacatttaccaactataaactatataatcttaattaatattatttatttttaaaaataattaattatttatatagtatcttcataagaaaattattataagaaaaaacttgtgtttactatctataattgagattgcatttcacaactatgacaaactaattaattaatttttttcattggtaaattaattttaaattagaattttaattctcatcaaggatctttcatgtcatgaaagctatgatttcttcaatttttttggtatatattctggatcatgtaatctactacgaaaattagaagtttaatttcaatagttagaaaattctttagaagatcattttttgtctcaactgcactattcatttcttcgccaccaaattgcatatttttcacatattggttttttaacttcaatttatggg

SEQ ID NO: 59067 - DNA, 1140 bp, Arabidopsis thaliana landsberg
ctagatgctatgcgatttgtaaatgatgtagtcttaaataatttgtttcttctgtttggttaaatcaaaaaatttgttctgtcgaattttctgccatgatagtgcgagatctttagatagttttttaagggaatgtattttcttaaatcagattcaaatttgacaagggttaaataataattgtgttgtaatggaactgaaagaatgtatggtataaccgaccggtctatcccgtggcttcagctagcagttatacaattgtgggcctaagcttcggttacaagcacgattggttctatatctccacagagattactagataacgacaacagacaaactatcaaagcacattgtttatagatattttgcagctaatcttgctgcggtttacgggctataggtcggtgaaacaatcttctgcgttttgctccccaagatacaaccaaacagtttggttctttcctctttgtcccaagataaccttgacagttttcagaaccacaattgcactttacttcaggaccaaactgcacaaatctgccattacacaaagagagaagctaatatatcagaatctcagattacttaggctaattataagcacataaaagaaacaaatggtcaagaacttgacctgtagtcatatgtaagtggctctcctgcttctatttgacgagctgcaaagacacccacacgggtctcaccttcaacttgcctgttagaacaaaataatcaaactgactcatgctctcttactcgagcatcatcgacatatttatatgaaataatgtatgctttaccacttttccaatacacagtttgggttgcaactgtggttcagaaaccgagaggcgttccctttgaaggtagcatcaatcgtgaagtctttttgaatctcacacatgtaaaagtctttcatgcctttgtgtttcatatcccaaagcctttgctcacattgagcatcactaatcactgtggatagagtgaaaacaaatcactaaaaactctatcgctttgcaccacaaacataaggctcaaagaccaaatcaagatagtttaccttcaccaatgtattcgacaatgaagtcctctttgttgattgattctgctgcctcaactccccaaccgcaatgttcagtc

SEQ ID NO: 59068 - DNA, 164 bp, Arabidopsis thaliana landsberg
  unsure (1)..(164): unsure at all n locations
gggagaacggggggtgaccnctaaccaccacaaataactacccaacgcaaacacaacaaggggggggacgagagagagcgaggagacccccaagaaccggacgaagaaagagcgacaaggcgaaggggcaaagcaggacaaacgcagagagagcacggaccaca

SEQ ID NO: 59069 - DNA, 432 bp, Arabidopsis thaliana landsberg
tgttgtcaacaaatagtgaaacttagcatggagtcataatttggtcctagatacttgagataaatagatcatgaggttatgcaaaagtgtcaatataggtgcttcacaaatggacacatctatctctaagtttcatgacattcaactataacatgagtgcttgagctatatttcttacgtttgtcattgtttttgcttcaaaagtgcgccattagttcatctaactgttacaaacttacttcatgtaaagatgccacttttttattgtctactagtttatatgctttaaatgccttttcaagctaaaaataaataaataaataccaaatgttgtcagaaaatagtgaaactatgcatggagtcataatctggtcctagctgcttgagataaatagagcatgaggttatacacaagtatcaatatagacttgc

SEQ ID NO: 59070 - DNA, 1858 bp, Arabidopsis thaliana landsberg
atataatttatatcgtttatattaacacgatgtgtgtgcattattttagaattattaacgtcataattcccatgctcgttgattatacacctttctctatgtatacccatgcatggtaagaacgtatcacatacattatactaaaataaatccaataatgtagaccgacacaaaatgcagcgatatggaccatatggttattacgcatgttacatagacttgtgtatttttctgtataacgaaaaattcctggttattttgtatatcagcaatgtatatgtctcaattaattatagacatatataatctatgtttcatccaacgaaaacacttcagaaataaatgatcaagctgaaatctataaccatcaaaagtttttagttctaacttcaatctataaatttgtttatagacattgtttttaaaacacatttttctttgattttcagcagaaaatgaaatatatattcttggtattttttgggtatccgaaaattcacaaatattgacgtataaatacaggttcctgcttggtgatgagtttcatagatccagagattgtaaatcgtacgtgagtcttcaaacatagcaccagactaattaagttcttagctaccttatacggataatggacctatatattttttttttgataattctccttgtatcttttgattcataatcaaataattttggtaatatcattagcaaaattaaatgccttcaatttttgcaacggctataaattgaacgtatccaaaccaccatgcgcataaacctactggcattaatatggcatcatatctacaatgcatcccctcgtcaacacacttataattaaccaaaacaatcacacttaatgctttgacctatatgattttgttactatatatatctacattatcttagcatagtcaccaatagaccagtcaggaagaagatgttaatcatgcaaagaaattaacatattaaaagagatagctagaacctgaataattgctcacaatgcataagatgtagcttcttcgagacaatgtaaccatgaacgaagtggaagataataatttggcatgcgaaataatttattgataatccgtactgaattaatatacatatataaaaattgttcaaaaaccctaatcaagtattagaaaactctcacactcaatagtaatgaggaaaacatttcacaagacaactacttcaagcaaaaatctctagaataataaaaccaaagccttgcatgcaaaaaccacaaactaaaacatatcgattatcaggttcttaattacttactcaatacattaatcagaaaaataaacaagatgaaatccgtagaatattagaatttagaaataaataaaaatatatgaaaaagaagcaatgcaaaaaaaacacgcttgttaagaacaaacaaacaaacgaaaggacaaaaaaagaaaaataaatctcacagaatatatttgtttgtgtatgtttgcctaggaatgatgactggtgcttccatcttcttgatggttgtgatgatgatctccgtcacggttttgctggttgttgttatggttccccgtctccgccaccggtcggtaagcagcattcaacgccgctaaaactccataatggctatgttctccaccgccacctcctcctcctccataaccagaagccaaaggctgtccagaaaacaaagcaataggagctgcaaaattcatctaaatgaactcgactaccgacgccactaccaccactgttggggattgtaacatctccggcgacaacaccgggatgatgaggattaatattaaaagccaatagattctgagtgttgtcccactactccaaaacggtgccgttgcag

SEQ ID NO: 59071 - DNA, 327 bp, Arabidopsis thaliana landsberg
  unsure (1)..(327): unsure at all n locations
ccgacccgganagggcgggagagctaagaaagcaccgcgacccggaccccacgaagacgagaccacgagacagagggcaagcccgggggcaaaccccaccggacgaagcaacacnagaagaacagcgacgnagacccgaaccggagggacggaggggcagaaagacaaaagaaacgggaacaaacncngaggacacgacacagggagcgcngaaaacccaccggagaagccgaggacaagcccgaacactacacaaaccttagacccggcaacgggcgccgaggaccgaagcaccacgcgacgacctaacaccgacgccgcgaaaac

SEQ ID NO: 59072 - DNA, 1270 bp, Arabidopsis thaliana landsberg
agactcacggtttctcgccaaactgtgtgacccattcttcgttttcattgtaaaggaacttgaaaattcccatcagtaagtgcaacactatcctcgacatccatttccaaccactttctgtcttctggagtcatgtaatctctcttgataatccttccttccgcacgcatcttagcttcaagcctacatagacagaaagaacaatatcctagtcaaacgactatgttataaaatcccgtgggaagattaataggaatgagaatcatacttggaacctggtatgggctcaatgtcaggaatatcaacgtcgataaccccatgaccttccatgtcattctgaagccattcaccctcatacctaacgattcaaattcagagccaacaccaaaaaaattcttgggtaattgaaaaccaattgttagacattaacaagagaaacaaaaaacaagcaaatctccaaaacagaaatatcacctcacaagcccattttcagcaatataaacacctttgccttgagccaagtcatcccaaactgtgccttcgtacctttagcccaaaacaaaagagagagaaaatagtgagatacgaagctactgaatctagacgaaagtattcatcactaagcaacccaaacagatgacgaagatcataaaacttagtcacaagaaagtttctaatgccctatcatccaacctgcattgccatttccttcatttccataattcaaactctatttagaatacaaagtttcaacccaaacttcatggaaaattcaatctgcagcttatagaacacaacaaactaagaaagtcactagatttagaaagcatctcacggtaacaaaacaccaaagcctgtaaacccaaaacctaaaaatcacaacttgcaaacaccaaactcacagaaacaagacaccaaaaccaaagagaagaaaaaagggaaatgtgaggcattacgagcttccatcaggaaaaatatagctgacccactgaagaaactcttcaatcctatcaagctcttcaacaacacctttagcattctcaatatcataatgattatctggaatagctggataaggtttcctatacggaacataaaaaggttgaatcccaggatctcgaccttcttgaatctcatcgttaacaacatcccaatcatcttcatcagcccaagcagggatcccaaccaggttttcgtcatctccaatggaccatcagcccaaatctctcttaaatcttgctccttccaaacgtctgggtctctagggaaa

SEQ ID NO: 59073 - DNA, 903 bp, Arabidopsis thaliana landsberg
gtaaacataaacaaatatatatttttcacagttgatcgagatttttgagtgtttactaacgcattttcaataattgtatgtgtatagggtggaagcatggagaatgtttcagagataagtgcctgctgatattagaacattcaaaatgacaatacatcactgatcaattagcaactagcaaaccaatgccctcatttattaattattaggttattatagttcttgtagtagcttcctttaagattttctgcttgtctcactggatactgtaaaaaaaaagaaaaagaaaaaggaattagtggtttagatttttctacaagatcagtaatcacaaagagagagagtgagatgtactctttacctgtcgcagtcagtggaagggctgaacttgtaagggagatcgacaccacatttagaaggcaattccaaagcattttggatggttctaggagagagagtgagtcctccaatagcagatttgatgcaacgacagaccccctgacggtccacagaagtttgagcctgactcttgagtgttgtgagaccgttgcagcagagggttgggaccggtccgccctgagtcacgtaggataagcaagggtaaagatccgcaatcaccgtgttgcaagacacggctgcttcaccgcagtgtaaagcaagaaccaggcacacggctaataagagagatctcatgttactttctgtttttttttttttggtgtatttgtgttatggttagggttagaaaatagagaggttatttatagatggaaagagtttgagattggtagttgaggaagagtgattgctaggacacgagtgttactgttagttagttgtggaagaatttaatgtttaccttcagccaattaagacccaaccctccgattacattagttaacg

SEQ ID NO: 59074 - DNA, 506 bp, Arabidopsis thaliana landsberg
taaaagttgatttttaccatctttaccctctcattaataatctgcacgcccacctgtattttgcttcaggcaacgtgcccatgctggtagtaaataagggtaatgcggtcattttgtgtagtaattaatgttctttagttaagtttagtcacctaaactaaatatggtattttagtgactaaactttagtcaggtgattgaaggagctaaacgggaccttaatatagggtaggacaggcgcctttctggtccacttagcagttgtaacccctctcccttgtagccatgtgtggagaaagagaacacaagtaagcaagtacagtttactcgaaccaattcatgaacagttgaagcgcacacggtgttccaaaaattggctctgaatttggaggcaaaagctttccaaatgcatcgaatttacaaaaatcatgttacactaggactaaggcactgactgtggcacgcaggccaagcctcgtgcaaccagagcaactccgatggagatc

SEQ ID NO: 59075 - DNA, 519 bp, Arabidopsis thaliana landsberg
tgttaagtaggatcagtcatttgcttagatccaatatttaatcgacattcaaataaatgtatagtttttaggttcgaaaacttggaatgatgatatatagtggagcttgcagtcgaacactacagttagtgcagtgtagtaaaaactaaaaacgtaaaatattaagatgattgcaatttgcaacagtgttatttacggtgtgaattatttgtgatgggtgcacgacacttaagtgagtatattaaacttttcatcattcaattactagctttttataaataagttttgaagaaagagttgcaaatgctaattaagtttgaatcgtccaattaattaacttttataagtaataaacgcaccacactccaataaaagtttcttaaatggaaacattatagaagacatattgagtgagatgttgcagtctactcctataactctgaatctcaaatataagctatattgccaatgccatcaatcctttttattttagttttttcttccacaaatcgagtaaat

SEQ ID NO: 59076 - DNA, 180 bp, Arabidopsis thaliana landsberg
ggatctccacgataggagacgggacttgttatcatgatctgggatcccagacatataaacatgatcttgataaaccaggcgaggctcaaggacaagcattggttccatacccaatgcgtaaggggagtgatccaccgacggtctgccacctggtcgtaaaactagccctggaggcccgga

SEQ ID NO: 59077 - DNA, 369 bp, Arabidopsis thaliana landsberg
  unsure (1)..(369): unsure at all n locations
gggagtccggctgttcgattgccggccaagggtgatgatcgtataatgtgaacccttgtctcgcactaggtttggatgggacgtgcttcgttggcaacagcatgagatccgcctaggnnctgtcccgagatgtgagccgaggctgtnngagtgtcgcccatgggcnatcgacanccttgtcggcttaggaatctggaatcgagatcggtgtatgcaaagaatcttcgaggtagcactttcatatctacnncgtgggtttgtttataacccctatcctagttattgtgtgagtgtatatctccgaagaaaattagcagataccgtaaccgtaagatgtttcttgggcacaccagtctttttgaatgggag

SEQ ID NO: 59078 - DNA, 786 bp, Arabidopsis thaliana landsberg
acgacttttcatggaaaagccaaaccattttcgaaaagcttagtatccaacagctgaatttgtttaacaagtggcattcttaatcttcgcacaaaagctttataagaaatggaggagcttaccaggtctatcaaccaaaattgaaagaacaaggcaatgtcccagtatcaatctttccctctgaacaacagctcttcgttcaacaagagcacctcttgagtcaataaggtatcgctcgcataagggcccacccagtccagtaggatcctcccgattgagttcctaacaccaaagaatttgctatcaatacaataattacatagtaatgccaaagaaaaacaaaaaatatcaagtcacaagatcgtctgaaaggacttttacatctaatattttctactagattcaagaatggacacctatgaggatgtaacttataaagaacccaagtggttaatacctttataagagtaatcaaccgttgtctgagcccagcttcaatcagttcttctaagagtccctgaatgtcagctataagatcaggttcaagcccctcgtccagaacaactgcctatccaaccagaaaaatggtaatgtgcgatgacgttaagaacactagaagaagaaaaaaagtcagaaatataatgagagagtaagctaccctcaggagtgtgtatagcgttgatgtaagatctcttctccctgtataccatagtccagttgcaagccgttgaatctcaagagggtctcgtcccattaagccccactaaacataggataaaaaatata

SEQ ID NO: 59079 - DNA, 2489 bp, Arabidopsis thaliana landsberg
ctattgaactggtttataccagtgtacaataaccaaatgaacctagacactatgcaagacatataccttatgaatggctatcgaccaagtcgttagatattcaaagatgaaattatctagagaattaagatatattactacggtttttcaaaagaatataagaatttggttttatgcgagttttattcagttggagttgattcatataaagttttaaaatttgttttcgctatctctttctcaatttcaattcttttcgacgaatccacaatgatttgagcagaacacctgaacgatgctgtgtgtgttacaaaaaaaaaatgatgctatgtgtgtttcagctgccaaaaatacaaaaagtgcgtctcagctcccgttaataaaatagactaaattagctactttgtagaagcctctaagaataagataagcccattataaccttctggcccaatattgtgtatataatgtattatacaattcttttcagaaattaaaacccaggaacctggagtctacagccttctgatggattactgtaaatgggctaaagaaatgtaagaccctggagtctggactaatcatatgattcaaacattttttaaaaagcttatattagttacaaataacgacgaaggtaacagcaacagcatcacataaatagggccgccctgatcacagcccagtgaaacaattgctgtggcctcaaaaaacattctgaaattatactagccaaaatggtccaaaattaattattttttatttttttagcccaaattttctaaaacttcatttaaaagtctttggcccaaaattattcagagtcgaccctgcacataaactagtttgttgttacgttaggatataggaatgtgtaatgtatgtgtgtaggcgtgcacatgggagcaaggattgttcctcgaattcaaagccgcatttgtatttatttgttagtttataaaaagattctaattcactatagttttaagagacagataagataactctattttagtaaatccttagggttttagtaagtcggagtatgttttcacgtgcaacaaacgaccaatgttttaaacgcgacaaaaggaattaccgtcactcaaacatatgatataaaaatagtttatgggattgtggtgataatgtatacgtgtaaagccggtcttcaaatcttaaaatatatatttttaatggttgaatccttttatcttcgatgaaaaaaacgttacttttttttcattatgtatacgtcttttcagtttaatattcaaatttgttgttgacctatttggtcacgacagaggaaaatattggccgtatttttagaaatgaaaaaaaaaatcgatggagcagtgtaatgacaaatcatgtgtcgacttccaatatcttattaaataattcggtgaagataaagccgtaaataatgatactataaattagtttttccaatatattgtatagtattgtatatcgcagaaaaaagcaaagcaattatgtttttattggtcgtcatatcgtatctattttcccgtacaaaagaaaaggaaaatcttctttttttctcacaatctcttcgggcgaaaaaaaatgtaacaaaagcaaaatacaatcacattttgaagaaaaaaaaacagaatcaatagtaaaataaataaataaaaatccaaaaaataatgaaaaagacaaatgacaaaaagctctcaatactctgtctgggcgacggccgacccaacaccgtctagtggcaggcagagacactaacatctgcaactatgacctgacgaaattacgtttatacccttatacttttttacgtcatcctttgcatttaaattttttttaaaatttcactaaaaatcttaagtaaatacgaaatcttttccgtgacgagattaacttctttatgagtccgacaaaaaaaaatcttctttatgagaaaacctcgatcctttcaaatatctcatgtaatatcaaaatctcatcggtccaaaattaaaggctttagactaaatgatagttatatcatatgcatggtttatcaaatttctgaaatattagattttcacgtatatttttcaataaatggtgaagaccattgattgagagcagagaatgaacacagaattagaagcttctgagaaatgttggtgttgtagtaggaaagcgaagtgacacggcgtcttcttcttctctcttgtctcattcttctttttattcctcacccactacttttgtttttttattttatgaatttgaacaatgtgaattgcaggcttaaatatttacaaatcgagctataataatagttttattaattggaaacattgaaaatttgaagaatgcaacggcggctacagccgtctcatgcagaataaaatgatggtttttttttacgtgagggtgaggcgtgccataaatttagggtcgctttctttaactattttcctcattctaattattacgccttcctataaaaattacta

SEQ ID NO: 59080 - DNA, 575 bp, Arabidopsis thaliana landsberg
ctcttagtgataagtagttccgacaaagcccatgcattttttcagagggtataaactctcggtccaagatctcatgctagatcaaccattactgtaacttatacgaactggtagaatcaaccaatcaaaaagatgcatttttcggagggtataaactctcggtccaagatctcatgctagatcaaccattactgtaacttctacgagctgttagaatcaaccaatcaaaaagatgttaatcattacaactgaaagcttaacaacttgaaagagatttgagtgtcaacttacttggtcacatactttatcagcctatctcataccggtgtcccaagggatgacatgagcatatgtaccatgtcatttctccatcatatctttatcttctctaccctaatgacttagagaataagcttcgactacgaaaagaaaaactcattatatatcatagctgaattcactttttttttctaacaaacaaagaccattagctgcatactaaagcctctagtgatgagaacctgatgaagagatactctctattgactaataaattatttagattctcagttcga

SEQ ID NO: 59081 - DNA, 1302 bp, Arabidopsis thaliana landsberg
caccttgtctgcagtttttgagccattcaaggataacaaagtggatctacttatgccgaaattagtgttccttgccctaaaccttggagggctagctttgggtgtctggaaggtaagaaacttttttttcgtttcctcattgtatcctctttcctttttccgtatggcaacactggcttagattacaagtgtaaagaactgtttccttatacaaacgattttcactttctcagcttaacactttggggcttcttccaacacatgcatcagattgggtttcatctctaccccctcctcaggttggtattttctgtctgaagctaaatcttaggcctatgtgttttaaatacatccgtgaaagcaagaatctggcattttgacgaatcatctctaagctgcacatcttgtttcctcctcttactttttcaggaagttgattactcgggcggaggatttgttttccactgatgaatcagcgtctcttgtattttaaaataatccgctaaaaccgcgcgacaacgacaacacttttgtgagataactgcaacagttacttaagtgatatgaacctccctcatcttatgatattcttgtagcattttcaaaactcagaaaccatagtttttacactttttagtatgatgctcattgttcatcataactatgaatgtattattggcactgaagggaccttatctcccagctttttgtttctcatctttttagacaggaatggataaaatatttcagataaaagctttactctctttattgcttccactcaatgattctgagttaacaatcaatcaatgcttgatatcattttgccatgactgagaccttctagttgattcagaagttacaagagagtggactagtaaggcgcaatgagaaactaggtcaagtttgggaagcagaagacgacgtggaacaaagtgcagtcttttagaatcatgtaagtcggtctactctaaaaaatctctggacgacaaaaatgtttactttaatgattataagatttgcaagaaataaaagatttacaggaaagaaaaaaacacccaaaaaagaaagtagaaaaaaagagaaatagatatttccccattaatcttgtaaaattttcctttgcataatcctccgatcttttagtaaaaatttgataaaaacgaacagagagatgatgactcttaacacgctaacctgatccgaaattttctttcttttttgtttttcatcacagaaaaaaagaggattgattctttgatctcaaacaaaaactctacttttggtcatgtgattttttga

SEQ ID NO: 59082 - DNA, 726 bp, Arabidopsis thaliana landsberg
aaaaaaattaaaaaaaaaaaaaaaaaaaaaaaaaaaaaaaaaaataaaaaaaaataaaataaaaaataaaataaaaaggatatagcaacaaaaattaaagaaaaaaaaaaaaaaaaaaaaaaaaaaataataaaaaaaataaaaaaaataattttttaaacaaaaaaaaaaaaaaaaagaaagaaaaaaaaaaaaaaaaaaaaataaaaaaaaaaaaatataaaaaaaaaaaaaaaaaaaaaaaaaaaaaaaacaaaaaaaaaaaaaaaaaaaataaaaaaaaaaaaaaaataaaaaataaaaaaaaaaaaaaaaaaaaaaaaaaaaaaaaaaagaataaaaaaaataaaaaaaaaaaaaaataaaaaaaaaaataaaaaaaaacataaaaaacaaaaataaaaaaaaaaaaaaaaaaaaaaaaaaataaaaataattaaaaataataagaaaaaaaaataataataaaaaataaaaaaaaaaataaataaatttaaaaaaaaaaaaaaaaaaataataaataaaaaataaaaaaaaaaaacaaaaaaaaaaaagaaaaaaaaaaaaaaaaattataaaaaaaaaaaataaaaagaatatataaataaaaaaaaaaaaaaaaaataaaaaaaaaaagaaataaaaaaaaataaaaagaaaaaaaaaaaaaaataaagaaaaaaaaaaaaataaaaaataaaaaaaaaaaaaaaaaaaaaaaaaaaa

SEQ ID NO: 59083 - DNA, 499 bp, Arabidopsis thaliana landsberg
ccacatccagaaccagaagccagcaatgagcatatatgcatacatgcatatgccctttgatgggcagcagaggcaggcagagaggcaagcaagcaagctaccctcttgcccttgcttgctgcctttgataaagcctatcgagctatctatcgtgtctactacactgcacaacagcgagcacacgcacgcacgccccaatgtctctcccgcccgtctccttttgcgctagctttgttcctggatcgacgctagtcttatctcttattattctttacttctagcctctctcttttcatttgctcaactccctctccgtccctacgaccatatatacatgcatgcgtatatatatgcaccatcagatcataattaaatatggctggtcgttacaatgcaagcaaatcaatctatatatgcagctagctagctcgatctagcctgtcgatctcttatccgcatgcatggtccagcttcatcgatcaactcatccatatgtaga

SEQ ID NO: 59084 - DNA, 1661 bp, Arabidopsis thaliana landsberg
atattaaactacatgaaaacacaaaaataataaaattgctaaacaataaatgttatctaagaaaactataattgtatacaaaagctagctattacacttagcaccatataaataaacttcttatccatcaatgtttaatatatatttgtatagtaaaataaaactagtttgcatctgaaaaagtataatcaaataaaactctttagatagcaatatgtacattaaaaaaagacttattttcatacgtattaagctggaaaaaataatgattaagatttggggtaaagagaaaccaaagtttaagacggaaacgaaacaaaagatgataatcatcgattcatcatcacgatataatatgggttgctaaccacaatagaaaaacaaaagttcttttaagggtttaataatatatcaccaaaaatgataattaaaacctaaaattaaaataatatatctacaagactacaacaattctgctttataataaagctataaacctcaacatttttcaacctcttcccaaaaaaaagtgtagaagcagaagaaacccatcatcatcatgatgaactcttctcttctaactccttcttcttcatcttcttcccatatccaaactccatcaacaactttcgaccacgaagacttcctcgatcaaatcttttcctcggccccgtggccctccgtcgtcgatgatgctcatcctcttccctccgatggcttccacggccacgatgtcgactcaaggaatcagccgatcatgatgatgcctttgaatgatggctcctccgtccacgctctttataatggcttctccgtcgccggatctcttcctaactttcaaatccctcaggtataatctctttctcttttctaagtttttctcttcttgaaaacgagacttatggtgaaatatagggatcgggaggaggattgatgaaccaacaaggacaaacgcaaacgcaaacgcaacctcaggcgagcgcgtctacagctactggtggtacggtggcggctccgccgcagagtaggactaaaatccgagctaggagaggtcaagcaactgatcctcatagtatcgccgaaagggttagttgtttttgttttttattttactttgttcgatgcattaatttgtatcagttaccgagaaaggtgtcgaaattgaattttttttagctttttgaagaaaagatttgagtattttctggaaaaaatgtttttatgggacagttacgaagagagagaattgcggaaagaatgaaagctcttcaagaactcgttcctaacggcaataaggtaaatttttattcaattcattttcagtttagtttccaaaaattaagattagttaaaatattaaatggatcattatgaaaataaacttcactttccatcattttattcatcatccactcttgattcgtgcgatccataattccatctaatttacaatttaaactccatcgtctatttctagttctcatcttctagacctaaaattgaaaaaatacaaaataaataatgaaaataagtgtcgaaatgatcaggaactttcttggagctagttgttcaagagatacctttcggctgtcaactagaactttcaggagtaaacaagaaaatttatattttttgttttactcatataattggtggttgtg

SEQ ID NO: 59085 - DNA, 1132 bp, Arabidopsis thaliana landsberg
  unsure (1)..(1132): unsure at all n locations
aattgtatgatattaacaaggaactaataaaattgatttattttctttcatattcaggaacccgtttgatcagcagtattacctatgttacactatctatccgtattaaaagcaatctcaatctgagacatgggatcatcttgttctgttggattctcatagtcaactaggttttagtttgtctgaattttatatcattgtttctgttgaggttttcgtttgtctgacttttatatcattgtttctgttatagcagagtatctatgctctactttacgtaggttctatctaattcggaaaattaaagatttaaataaattgtttattggttactattaaggtttccgcaaaaaaagggaaataattaacgtaatctatgtttgcaagaacatcaactgtaatattctttattcgagtcttaatgaatccatgaaccgaaccttcttaattctctctgcatcctcgtatttgttgaaaaaacatagaaactaggaaaaagggctttacttaattcttcccaaaagtagagtgaagatacaaaaaaaaaaaaaaaaagttaatggatttcaagaaatacacacaaaacatggaccacccaacagactcaaatctttatgtgtagagctctaaaaagatacaagcaccatgaattatttaagagaagagggaaagtaatcaggtgaaacattgctcctgtctattttcctgttcttcgcctttttatcctctgcttttaactagggatatgctttgttattttacaactatatcattcaatataaactgttcaatgtaactttacaagaagtactaattaccagcccacaaacgtcgacagaaagaacaattgcgcataagtgaaaaaaactatagtgtatatgtggttgattattctatatagtctcatatagttgtagagcaacgagtcccttgtaatgaagctaagggaggagtggtcatgttcattccaaaagccacaattgcaagacaattcacattaaaccggtatgcacccgagacccatgtcccgatcttccaccgtagtttcccgtccatcttcataccgatgattattntaccagttgaccgttcacgactgatttgaaaccaaaggactgngcacgggtagctc

SEQ ID NO: 59086 - DNA, 643 bp, Arabidopsis thaliana landsberg
aagattcatgtccaacactagccaacacgcccccagactggagggggcaaccgattgcaccatttggggcgttgggggtgctcactggagcagtactagaagactgttgctgatcatctgaaagagcttctgtaggtcgcaactgactgctcgaaccaccaatgggatcagccgaactctgatcaactgacgagtttacaagacgccaagacgctgcatctgccctatcaacagatagggggtcggaacctggacggtccctccttagcacccaattttgccaattatcgcgcttccttatcaagacaccctgagaagaagaaaaaagtatgtccaattaaataaaggtaaaagttttccaagcacacactgaggtaacacgaagattattttttcagttccaccagttatgataagctatctctcagaataatcacaatcaaatacctaacagaaaggtttaagttcaatcacacactaccatactactagcatggaaagacgatggaattcaatagtttacacattaaaggacacataatacaaaaaatacctgcacttcaacatgaggtgaattttgaacagcctccactatctgctggatattatctgaagttctgcaacctgaagtggagagagaaaa

SEQ ID NO: 59087 - DNA, 459 bp, Arabidopsis thaliana landsberg
aattttgttcgagagctctctccgactatatatgccttgagtgtgttatccttctcgctgtgtgaacgatgtgggactaaaaccaatatatgcacaatttacgcgctctcttaagacacaaagaatatgggcttttattactggtccgcactctccatgcacggtattaaacaaaattgctaatatgggctttcgaaactttgccccacttttcgtaattgagaggccactttgatctaaatttagaatatggggactagggaccatagagaaattttaatactgccatagaaagtggggaaattctgttagtacaaaactcgccgtggacctttcagaaaagtacagggatgatgactccttttcttaataatcaagcatgcagtacacatgtccgaagtaatttcttgtactatcccaaacatactgaatgccgcataagttgctcgtgtactacac

SEQ ID NO: 59088 - DNA, 578 bp, Arabidopsis thaliana landsberg
gcccagaccaggtctcagccgaaaaacggatttggccctcggtgagtgaagcgatcttcaggaatgcctcttttcagcttttgggaaagaaaaacggcataaagccctcgatgatgaacacgagggccagcgctgaaagcagagtctcactcacgacgagcaaaagccagagtgagtactctttacgggacagtgaacgcgcacaagcccgccttattttccttccgcacttcgcatgaagcggaagaaatctgaggcagggtcgatcaccatgacatcagacttggacgcaaaggattgcttgtatgcgtccaggctgcggtaaaaagagaaaaactctggattcttgccaaaagcagcattataaatcgaagcggccttggcatcaccctgccccttgatagtttgtgcatccttgtaggcttcggccagtatcacttccctctggcggtcagcgtcagcgcgaattttttctgattcggccgcaccggtggcacgtagatcattggccacacgcttgcgttcagcttccatccgacgatagacggaatcactgaccctcggcaacaaatcaactc

SEQ ID NO: 59089 - DNA, 513 bp, Arabidopsis thaliana landsberg
agaagaagttttccgggtatattctcggtttaaaactatatattatggtcagaatgtttggctattgtcatctcaattttgcctttcttcctggtattttcagtctttcaagcagatgatcgccagttgtctagttaaagacccttccaaacgcccgtctgcaaaaaagttgttaaagcactcctttttcaagcaagcaagatcaagcgattacattgcacgaaaacttctggatgggttaccagatcttgttaatcgtgttcaggcaataaaggttagatatgtagatctaagtagatagccagtagctataatgttgaatattatcaatcagcatctcatggggaaatctgatgggaatattctttctgcatgcagagaaaggaaagaagatatgcttgcacaagagaaaatggcagatggagaaaaggaagaaattgtcccagtttggtgttccaagttccacttttagctttattatctttggtttggagtctttacttttgggtttta

SEQ ID NO: 59090 - DNA, 912 bp, Arabidopsis thaliana landsberg
ctctcgaatgtgtattttaattacaatcctataattagcttggctttgattcaaacaaatataggttaagtagagtccccaaaaaaaaaactattattcttttttggtgtgtgtaataggattatccaattcttttatttctcccattattcgatatttctatgcgtttgattccctagtttagtcgcgatctatatttcttaatgactaattttgagaaatcaaactaaattcttcaaagagcaagatttctaaattgtaaaagtaactcccgctcatcattatagtcctcgaacggttcgcgtgctcctttaaccaccaccacgatcgaccagagaactttgtcctttttacgatagtaataacataacatgagaaaataaacaaataacgcagtgtgatgtttacactttctgataacgttgtaaattaaataatagaagcttgaggagcgaggccgatataccaacagacagatcagtgttcttttgatagctatttgatacaaaaaatagagtttattgtactaactaaaagaattggtatattgttaatcttttatattccgcctttttttcattaacaagatatataacataaaaaaaatagatatgtatataacataactattggctgtttttgtttactcaattgggcatagtggtatatcttagcatgtaagcattgtaaatagctaaggaaacaaaagtgaaaaagaaaacactttcttgaccactaaactctacgcgttctaaaaaaaaacacttgcggaaacaagacaaagtgaacacttttcagtattttcttgataatcatcattattcccgcctaatttgcttctgcttttctttttagtgtaaaagaaaagagaaacaagcttttgtcttaggtgcactactttaataaagttta

SEQ ID NO: 59091 - DNA, 1196 bp, Arabidopsis thaliana landsberg
aaacaaagatacaaagatgaaaagtgaactcaatttacagttacaacctttgtatgattcatatgaaaagttgaagtaacaaagcaaacatagtatccttctcttagtagttaccaaaaaccattgagccaataaggcgtctcctctaggtaggccctttcactccgggtaagatagcattgtgatgagtgactcgtgttgcggaaaccttgataagagatcagagcgtttcgcgagctcaaagtcctcgaactggaaagcaggagcgcaggtgcagccaacaagagagaaatggttctcagagtctctagcctcagctttaagcagagccccgtcttgagaaaaatgaacatcctttgtaggaaacgaaccaaaccagacgtttggagggaccgtgtactgaggcttctgatcaccttcaaacaagtcaggaccaagacatgtgaatttcaacttcccatcatcgtagagttccactacctgatcaaggcaagaagaagaagccatattcaagaacatggattatattcttcttctcattatacagttttgttcactcactgtaaagacaagagctttgaacttacagtaaggggttcacccaaataaaagtgccaggtttcagccattggtatgcgatgaagacgagaaacgctcccagatggaagcaagaagtagatacttgtgctcacagctctgtccaccttaactgcagagattcagaaaaatatataaaaaaggatcaaacttgcgagatgatctgcaataacccaaatccaaagtttaagcattgataataagatttgtgaatagaagatccaagcaaattcacaagacaagcatttggatgatcttggtaacaggaaagacaagaattctacggaagccgtgacttatgtctgatcagatttcggaggatcataccgctgaaatctcaaaatgcaaaatcggaaactaatgaagacactatatcaacaagattccaaatcaaaggaagacatagatagatgcaaataaacgaggaagagagctacaggttggagggagctgagaggtggagaggaaaacagaagaatctctgaaagtttcagcgaaaaagcctccttcttggtgtgccctgagattaagttttccgacgatttctgaagacttcaccatctttgacgacatcgatctctctcaagctttgtcgaaac

SEQ ID NO: 59092 - DNA, 529 bp, Arabidopsis thaliana landsberg
tgattggttggtcaatagaatatgtataaagccaacaaaaaagctacaatccctattgtacctttgctattttcttcacagcctaaacaatatttttgttattattttggttgtaagtacaattttttagaatacaatgttatggtatttaggtgggatagaccatttttttcttcctctttccactgtttttttttttagacaatgattatagtttcatccatatatactatgaaaatttatttttgtggatataagtaatcatgcaaaaaaacttctttatgaaatatatatatatatatataactctttttattgggttatatatatatatatatggaggcatgatcggtttttaaatacagaatatatatgcaatgaatatcataatttataaaatcgatatttgagaataatattatatgatacataactgttttttaccaattatattgtcgcttaaaaagacatgcatactaacccaatttttattgtttaatacaatttacttatataagaaattttatat

SEQ ID NO: 59093 - DNA, 355 bp, Arabidopsis thaliana landsberg
gactctggaatacatttgtcaattagtggatcggggggagaccatgctgtcttgtggtttcacaaaatggcgcgtgtgggccttaaccaagggaatatgccgatatatatgtgacataaacgggcgaggaaactcatagcaactcttgatgggagacgggaaaaagaaggtactacagcacctttggagactagaagagctttgtcgcaagagcaagagaggagaccctctcatattgacttgagcccaatttgtgtaccctcccacgtgaaagaaaagaatatcgttgattccacccttgtgttataggacaggccgagccatatactctttatgaaaacccgtcttgattaaa

SEQ ID NO: 59094 - DNA, 1163 bp, Arabidopsis thaliana landsberg
cctaaaagcgaagaaatatcccacatccaaaatatgagaagggacttgagtcgtatataaaggacatgggccaattcaataattgccaattgctttttgagttcaaagcacaacaaacttaaatgaccaaaacaaactcaactaacgaatcaccctacaaagatacacaatccaaccaagtaacatggttaaagagcttgagaaaacttaagtctaagatttaactcggtcaagtcttcttgaatccgccaagatagtgctatttatgagtaaaaacgaagaaaaaacaggaacctacttgagataagcactgatgattccgggaagacatttagcttcaagagcttcttcttcaggattcttcttgcggcttattttctcctcatctacttccctcgaattccctatccgttcagtttcagttgccatggctgttacaaattccggagccgtctccgtcgccatcatctctgacgatgaattcattatggttcctcgtatacacgaagactaaaaagacttctgttatttaaggatatatttttgacgtaagattatttctgaaaggtacgttttattatttctcctactatgaaaatggggtaagtttggcctactaaggaacatgaggtccaaatttgaaaatataacaatagcaatttgaaaatgttatattactaacatagatataaatgttatattatttctcctacaatgaaaatggggtaagttaggtaggttttaaatgttgtaatgccagacattcagaatttagaaataccatatataaaactgttaattacttcctacagtagaaaaaaaacttcggtaggatttagaaaatacaccaagatataaatcgcaagggattcgtttatcaaataatatgtatcatggtggtgggagataaaattataaacagcatatcactaacgaaactatattataaaatcccaatcaaactttaaaaaattcggttgaaacttataaaaatgtacacatattgaaatcatagtcatcataaataatattatttgattgcgtattcacatttggtggtcacatgggatgaatattgtccacaccactattatttatattccatatgcattatcaacattttaacgccacctgtacaatccaaccactagacgttaaaaatg

SEQ ID NO: 59095 - DNA, 1780 bp, Arabidopsis thaliana landsberg
aatcgacagtcaatgatcaacatatgatcatcagagctaatacaaacaatattaacagaatcgaatctctgataataaaggcgaaacaatacaacatcctatttttaacacttgagaagataaaacagagctttggctcatgttctgttccaaacctaaccgcgtcctagtgctcgttggcttttgttctccgagatttgaatctttcatccacagactgacgactcttaagatttgattcgtggttaacttatagttttgtttacgagtgtctagacgcgtactcatgcaactgcgtagtcctcacattaggatcatcctgcacagaaatcaccatgaactaagatgaccaattgatacaaacaggaaaaagaaagatcttttattacaactgcaatagttacccggatgtcttaagaaaaattggcaggcctgaagaaatctactccctagaaagaacaaagtaagattttactttattggcagtcttgttacaagattgacaaaacttatgaaagcatcgagaataggtatgtaggtacctgtccatggatgccttgctgaggaccgtagtaactgtcgtagcttggtgctatcgagttcaactgtcgctacagaaaaccagccggaattgtttttttatccaaagttaatgaaatagaaaacagcagaagctacttatacacatgtcatggtcgatttcataccaatccttgcattgtttgttgattcccatagaaattatcgcgagttggccccattaagttcagctggacctgtaaaaacacatatcaaaacagattacatacgtatctagataataatatgaacgtatgttgtgcttaattaccattccttgtacgctctgctgtgttccataatagctttcaatgccaaccgtccttgggctcagcttatcctgcaattacaaaattcagatatgacatacttaggcgacttgtgtttaaaagaggcttgccacgacatgtcaacaaagacagaccatctgttgcaagctttctggcgctgcaactggcataacatcctgctctgggttcacctgaaattagtatttggtatcatcaaatttgcaaagcataaaagcgcaaagcgaacaaaatccataagctgtctgcacagagagatcgtaaacaagtaagttacttttcttttcttagttggattctttttcttgctggttttgcctgcacttctgctatggttgtcctcctccacagaaatcagaccttgagttggtgacgttacaacatctggaagacttctgccggaagtattaataccagcacagtttcctatagctccttcaatagcaaggaatgcaatattgtaactctcttgagagagggatgcctcttcattcagctttaatgctcgttcgcacaaatcgttataccgcagcagcctagtctgcaactgctgaggttctcctgaaaaatgccggctttttgcatcttttgtccaccgcttcaatatgtactgcgaggggatggaagaaagatgacaacactgaagaacattaagagtgtgtctgcagagataccctttatactcaaataaccgacagatgcaagagacttcagcctttgtttggttccatgttaccatgaagtcttggttgttttcaaaatcctgcactctaaaagtagaacatgtggcatctcggttctcctccctaggagtacacgcaattacacccaaaaactccaatctggaactttttgaaaactgcaggagtatagacttcagaaacactcttctc

SEQ ID NO: 59096 - DNA, 790 bp, Arabidopsis thaliana landsberg
gggtaattggtttgttggcaatcagctgaatttagttgcaattatattgcgaatgagaatttgaattctagcttagggtattgtgttgtgatttttggtttcctctgttggtcatgtaaaggtttaacctttttttcattgacttctgaaatagccttttccaggttaatgttaatttggtctattgcgatgtttgtgttttagctttttcatttgaaatgatttgtgttggctgttgggtgcagagcatccatcatattctccaattatccttccgttcacagatttgttgtgttttgacttttgacttagtattttggttgggaattattttttggttgggaataccatgatgtgtattggctttttggatagcatggaaatcgatttatcttgctgtgcatttagctatactactctgtttctaactaggtgtctcctgtgctataggctggttctggtattggtggcttgcttagtgccgtccatgctttcaatacaggtatcacatgattctcttgtcgtcaaatacttatcatttctacagtggatcttatctctttgggttttcagggatcccctatcttcaaaatcggttttccgggtcaaagcggctttcctttcttgtgggggtatgtattttctcttgccttacctactagttctggaattcttcctgtttcctcttttctgttgacattaccttgtatgaattttatggacttctcaattattgcttttccttataggttccattgcttctagtatattcaggtgtaggggctgcttt

SEQ ID NO: 59097 - DNA, 1246 bp, Arabidopsis thaliana landsberg
aaacaaattaatatgataaatatcgatagtagttttaaagtaatatttcatattgaatatggatatgggtccgagaagttactattgcatgaacaacgatagaaattggaccaaactaggaattatgctaggtatcgaattatactttccctacataaataataatcagaagttaaaagctccaaatgattaaaaaccattactgtagagtctgtacttataatcagtactcagtagctacataatgttttcaataaataaagaaattccttaaagagtttttgacacttagttagtaaagttgcacaaataaaaaggtttagaataagtagcaatacttatgcaaacaaaaactgtatataagaacatacacttatacgtatttttgtagatgcgtacaaacctgataactaacttgagaaacaggtatctaattattaatcgcgtaaaacaataaactagaaacaaataaatgaaaatatacatgcatatgcattaaattaagtgagccaacacaataacgatacaacgtacacgtataacgaatacgacacaatcgacagcaacactcacagacacgccatgaactgatactgatacaagtctccgtcgacaagccacgtggcatcatctccggcaacaaaaggctccggcgaccacccacctccactcatcataagctcaggcagctcaatgccttcccagaaatcatctccgtcgtctattcctgccacgtcatcatctcccattttgatgatcttcacggcgttggctgctttggccgctgcgacttggatatctctgggagtacacgtggacggtcgaggtagatcctcgatttcttcagggaaattcagctgagcttttctaccttttagacaaaacgctgccacgtcgtaggctttagcagccatctccggcaccggaaaagatccgagccaaatccgagactttttccggggctctctgatctcagaaacccattttccccatcggcgtttgcgaactccgtggtacactggatgcctcgtggtcgatgagctggtttctttacctcctccgccgcaagatttaacggcagaagcggtggcggttggttcgttgttggtaactggtggtgatgatagcttcattctctgtggtgacattaaagagtttgttatgtggttaagtcacactgttatctacatttataatctcatccaatcccattttctaaccaaaagcgttactgtttattatctga

SEQ ID NO: 59098 - DNA, 543 bp, Arabidopsis thaliana landsberg
  unsure (1)..(543): unsure at all n locations
cgtgtaatataaaagggcaggtgctccatctgctgttgccatagttgcagttgccatgatcaatctatccctaaaatcatcaatgaaacaaattcgctcaatccaagacgaaactcaatctaataagaatacaaaatttatagacaaaatcgattgaaactacattggatgccacaatttcaatctccagatgcgttcttaagtatctcagacttattccagaaatctccaaaaacatgtaaagctggaaaattggatataatttcgtacaaagaacattcttttcaccaattaaccccaaagaattcgggatacaaaaaaaagaagccattaatagaaaactctcactttcctgaaacttctcgaataccacaacaaaccctactcctgataactatcgcgtcttttaaccgatgcaaatcataaaattgaatgtgatttagcttaaaattgaacaggatccgtgaactatagaaacaaaaccctaaatcctaccccaagatagcnnnnnnnnnnnnnnnnnnnnnnnnnnnnnnnnngaaa

SEQ ID NO: 59099 - DNA, 438 bp, Arabidopsis thaliana landsberg
  unsure (1)..(438): unsure at all n locations
taaaactctgtttggttgtggaaatatagaatatgtctttctactttattaatcaacntataattattagaattttcacatatcaaataaaataaaattttggatatgaatggttacgatagttggagtggacgaatacgtttatggattgaacctctagtataatttacagtagtacatgtcgaaaagtagaagaaatccgattcggattaactatgaaccattggtacataaaaataaatttggtatacaatgcattgttatctatcccaaaaatataatggtctaattcgataacagtttagtctgttccgcccgctagattcatttaaaccttttatttatatatacatagggggagtcgattcattttatcatttgattttaagttaatatttaagttttatgagatttataatgggtcatctgttctattta

SEQ ID NO: 59100 - DNA, 146 bp, Arabidopsis thaliana landsberg
tacacatcctattacgggggcggttattttaaaaacaccatcccccataaccccaaaaacaatgtttccaactaaaaaatacctcctatcttcaaatcaaccttttatcaattttacaaccaccttaaattttctcattcccacat

SEQ ID NO: 59101 - DNA, 1450 bp, Arabidopsis thaliana landsberg
acttttaactatcacgagtctccaatttgggaaaaagcatattattttgtgtgtttgcttattttgacaactttataatttacataaaagtagaaaatctcgtggtccatctaaaaatgtcgtgataagcatgggaaccacccaaattagggtacaaatggtgactcgtacctactttttctccatattcaatccctttcataattttctgtaactcacttacgaattttatagttgcgtttatatatatacaagagttatagactatggtatcaaaatactaactacgaaatatccaaatcaggaaagatgatgttgatcatttcgtattatacagttgttactttacgttttatactttatacaattttcttataaatagcaacccaatcaaaagaaaataatatcaacttagagaaatcttgttttaaattaagtaacgcaacttttgtaacaattttaagtattatctgtacctacgcaacagtggttcatgattatttatgtttaacgtattttatgagaatttattgcgaaatcatagatctcaggattgcaattgctaatctatggatgataagtcaaatctaggcttattcccaagaaattgtgtctgcgcttttgtggatttgtatagtttgatttcatcacgttattgaagaaaacaattcaataaaatgacaggacttatggtagaccgtgataattaaagcgaagtctcagctttttcgtttttgtgagaagaaaaccttaaaaccttttcaattaataagagaaaatgacttgtcatcgtttgaacaaaatgggcctattagttaaggcccactttgtttaaacatgttaaccctacacaatgttatgaacgtagtctgtgaaaagtattttaagtttactatatccatttaaaagcccatttgtaaaatcttgttttctccttgaatgttctgatagttgttggacctagcccataacagctttggacagtttttaatgaaaatgttaccaaattagatatttacatttttaaactttgtgtgattgatatttttttctttctggtttgctttatgagttcgttattcatatcttttagtagtaagaagattcttctgacaaaactaaaaattcttccactgtctcaagtacgcgtgtgaccaacgcgcatagaacttgagcgtagaacacagagagtcaaagtgataggattgttgtacttcgcgaaaagaagaagaagatttttatagagtgcgtatcgaaactaaagtacaacaacaactcagctttatttagaccgtccgatcattactaaactttgtaccaatcaactaatgaattaacgacacgtgtgttttatactcttcttgggaatactctaaaaggacgatgtcacaccagatcctagcaccttcccaccatcttcttctcaatctctcgtgagtttcccaccgtc

SEQ ID NO: 59102 - DNA, 1691 bp, Arabidopsis thaliana landsberg
atgttatagatgatatatgaacaattgctcttgggtggcagaattgtaaattttggcctaaaagtatatatagtaagtcttggtaaatagattttttttattgctttacattttcgacttaattatcactaatccctatttttatatttctttaaaatcaaacaaatgaaaacatcaaatcaccaatacatattaagattttacctgaaaactattactttcttgcttaagattattatttctgcttcttgatgactaatgttttaagatatatttttctttttgacggtcaaaaaatatgtttcattttcatgttttgaccttttaggtataattgttctaatcgacaaacttaattcgttttagaaaagttctaacaaacacgacaagttgttgtctcaactacggtggcggttgttcctctaggtgagtggggactaatctcatttttattgattcgtaaaagaagcactaactaccaaattgcggcaattgctaatgaccattcaagtcttaattacacaaaacacaattaagaaataagagcagttcactttcttagtttataatttccttgagaccttgtgggcttttattttataatacaaaaaaaaacaaaaattgagatgacttttatctttttcttttgttttcttcttgtttctatgtgttgtctattcttctggactctggtaaaattcctaccattgtagcagctttttcaaaaaaaaaactcttttattttctttgtaccttacggtttacgatatcatcagaataatggcaaataaatgcatactccatataatttaatttaatttcccgtcgtccatactatgtatttattcacacgtcaagtgacttttattcaaggtgatgtaaaaaaaaaagcgacttgtattcgaggtataagaaacaaataaaataaaagggaccacaagaatatttttcaaattattcaattattttgaaaaaatataattaatgaaaatggtaaattatttaatatgtatttttttctgtgtccttaattatataatttttgaaaatatttgatttaatctacgatatttaattatatgccgcatacgtgattgagataaacagttttcacgaacaagattttatggtacaactctccctataatattatccgttttttacatggatcaaatttaatttctgtttcggcatgtaagaagttcatatatttcaatcgaaataaataaatagatagtatattatccttatgaaaagttctaattatatatcgcataattacgtacgtatcattgttgatgagtgtaggatgaaaaatggttttgctctttgggatttcgattggtttgggatggatgtttgattcttttgaagttctagctaatcataaccatttttcttataaactgaatatggtatttttttttaaaaataaaatattttgaattaatattggtttggattttgaggcttacgatatttgtagacaatgatgttttccatcatggtcaaagtaaaaactaaaatattaaacactttaatcaagaaaaataaatttatatatagtctttacgttttattttatatatctttttaaaaaaactaatacatactacgaaaactattaaaatttataccatttctcttattaataaagtactttattttatctctctaattattatagaagt

SEQ ID NO: 59103 - DNA, 1494 bp, Arabidopsis thaliana landsberg
gagtgttggttttaatgagggcagtattacccatctcatacaacatcgggaaaaacggcatgaaaaaactttgggtcgccagaagctattatgacctgataaatattatcaaaatactcatagatccactaaccgaaatgctgtgtaagaactgcattattagcagttttagatatcatgatcgatctcaaaatttttgcataggaagccacaactagtcttttacttaccttctccagacaagaaaaggctgactcgcgatatttcttgagtttctttttgcatgcagaacagataagactcaagatggtagtcggagttgttgggtcctccttagttattgcctcgtggcaagcgactgaaagagcacctagggcatccaaaagagcatcctttccctgcaatcagaagtattgacttgaaaaactagtgcaacaaaaatgcatttatacacacaccagctctatccatccacagggacaagtaaagcagagctgcagctcttagtcgagcaacaaagataattctctcgaaattcaattaatctgctgctacagtatctcaattaactttttctgaaccttcaaggaaaaggaaaataaatattaattggaatgaaagaacttgtcccacctcccataaacgtccaggaatttcattgacaagacattgtagcaatctcttgtggtgtggcgataatgattcacccaagacttcagttagtttgcaaattgccttaccagactgaaagaaagtttaaatcttctatgagtaaaacagcaaaatatcaataagtacaacgaagagagaaaactggcacgagaaagataaaaaagttgccttcttcttgcttgcccacgaggatgatgtgatgctctcgcagatatgattcacaatttcttgcagaaacaactgtagtgtgaccctttcaccacttgtgatgtcttcccacacctcctcaaagagactcgaaatctgtttttcatcctcaaatctgaaatttatagccaccgtaagcttctcatgtattgtcaaatagaaggaaagaattttgattctataaggaatttctgagtctagggaaatgttttaaaaatggtagcaaaaaatctgccaaatatttacaagagaaaaaatataccatgtgaccttactcggggacagtagttgaacatgggaggtatgaatttacagccataattttcttgatctttttccaaaactgattagttattttgaggtttcaagttccttatgcaaaatacctcacatgcatcagattcaacagtatgcagttacaatggtttacctggaaataaatatagctggaacaatagccgactgatgactgctcataatatcagcagctgtagatgagaagcttttgaacagactcgcacatgcgatctgggagcttttatcaccagagtgcagagctgcagtttcttcgattaagcttgagcttgagaggggctagaatactttaatacaatg

SEQ ID NO: 59104 - DNA, 1272 bp, Arabidopsis thaliana landsberg
  unsure (1)..(1272): unsure at all n locations
ttatcttcttctctctctttccctcatctcattaatggcgagctctacatctttagcgatagttcttcattatatcttcctatcatgacgaactcttcatgaagcaaactcttcaattctcagaaactctcaaggtaggtttgatcgttctctctatctctttctctcctgaaagatagattgatcaataggaaattgtgattttttgtcttcattcaagattcatcttctgttctgttttggtgttttaaggatttaaagaatctgcggaaacagttatactcagcagctgagtacttcgaaacatcttatggcaaagaagaacacaaagaaacgtaaattttacttgtctttcttgatactaacgatactattttacaagtccatgtgttttttgtggcgagtgaatttgatgaatgattgcagagtgatagagacgttgaaagaatatgcagcaaaggcagtagtgaacacagtggatcatcttggttctgtctctgacaaattcaactcttttctctctgataactcaacccatttctccaccactcaccttcgtttatcttctcttgaacaagtacacactcgaatcttgaatcttgaatactcttgaaactgtctcacatttggtgtgtgttggttgttgttgtagaggatgagactatgcagagattacatggggaagagtggcactcatcagcatttgcttctatttcaatatcctcgccatcataagcgttacttcttccctcgtatacctttttaacctcttttccccctcacacaattgatccgttcaatcataatccgcccttatatcgatggttttttttcacagaacaaggaagaggcacaagtttctctgcaggnnnnnnnnnnnnnnnnntcacgagtggtaactaaatccgtttatctatatctgattgtttagtttgcttctgtttatacgatatctgaatctttctcctgatctgctgcttgaaagctgttcgatcaacaatactagaaaacctcccaaatactgcaaggtataatcttgattctcttcttcttcttcttgtttcttgttttgttgtttgtaatacgattggtttgtgaaatgcaggaaagctaacaagacaggaagcttctcttttgcacctatcgtacacaacaacatcaacaacagaacaccaagtacttactactacaataactaagccgccatctttctttacttgactttaatcagaataagttcaatcaattaagtgtgtgtgtgtgtaatggtgc

SEQ ID NO: 59105 - DNA, 139 bp, Arabidopsis thaliana landsberg
atatttagacaaatagtaactaaaaagaaaaaattaaattctattgtttcagatgggggctaaagaaaataaatatatattaaatctaaattataaaatgtgtatacacatattttttcctagtaaaaactaaaaaaaa

SEQ ID NO: 59106 - DNA, 525 bp, Arabidopsis thaliana landsberg
cgacgtggctaatgagggggactagaccagctcacgccgatggatccaagaagcacggggtctgataacggctctcctttggattggattactgcttgtttgtctccccaaatttttaggatgaatcacagaagccacatgaccagatccagaaaaagaacaattcgccaactagaacgcacaacaagatccaaccaaaaccagcaaggaaaggcgcccactttcgccccggaatctttggattccacgggaagattcaacatcaaggacccgaattagacgacgggaaagaggggtgactttatcggacgtaataaaacatggcccgataaaggctgtgtttgaatccacactagctttttaaaacctggtttttagatttggtttctagaaactggctcttagaagaaaaaaagaggaggtgtttggatcctcctagtttcttagaaactagttttagctggggagaccaacttcttagtttttaagaaactgagaaacttattttagaaaccgattaaaaaa

SEQ ID NO: 59107 - DNA, 1401 bp, Arabidopsis thaliana landsberg
ctgtgtatattcatatcattaataatttttgttctcaatctgatcatgtaggcgtagcctgtaggcaggtgtagcgctgctaattactgaatatatatttatggcaattagaaactatgaatcaaaggatctagatgccaatttccttttcagaatttcagtgtttgagtttcagcatcaagtatatagtaaattataataagaaaaagatgtaaatgtcatcctattatttaaatttatattttgggaagtaaacttattacccacaacacttttatttgccttgctttgtgtagtgatgttgttgtatgaagagacacttgttcttttcttctcgtttttttgaaaccattttattaatgaaattcaaatatacaatattagtgtaagtgtgtaactaatatggattgcgctttacaatcttgtttactgaattatgactcgaattgacaagaaaaagaagctatactttattacatactatatataatctaaataaattacacgtacattgatgttactatagaaataaaatcaatcttggggcttgtatgtttatgcatatatttgataggcagaggagttaggtaaaaaaaataaaaagtcattttcaagtattgttacactttgtcctttcccatttggctactctctctttctctcttttgcctttttccgtttgtggtaactttgttttccttataacattatttcattaagtttccattttcggtttttctccgaattacgtcatgcatggcagatcaaagaaactaatgttcgatattttttactaaaaggatcttcttcgctaaagatattaccaatcactgccactacatgtcttgtctaataaaatttcgtatttaagttattatttgaatgttttgtagcttaacttgtcttttgtgttttttagtttgaaaattgagtataagacatctttggtaactgactcaaaatttaaacgagttatttttttatatttaagataacctcaaaagaaaaaatgcaaagtgaactaaaatatattttaagaaaattattactactttttaaaaattctctatgaaataaaaataaagagaacataaatatatagagaaattaaacatgcaaattaatgcgcactaagtgtataatactgaaagtaaattatgaccactatacgtataataacatttaattgaaaccctaataaacactgatattattaaataggtaaagccattttcactgcctaatttacagaagacaaaaaaaccttatacaagaaagcagaagaaagagaaaatgaaattagaaaatggtgagctgaaacaacacgccacacacagaattatacagaaactagaaagtgtaattaagcatattcttacccattaatctctcacctttatt

SEQ ID NO: 59108 - DNA, 219 bp, Arabidopsis thaliana landsberg
tcctgggagacgtgtactcatctctggcgccagaagtgtcctatgtgttatgccgctcaaggacacgtctggtctgccgagaatatctaacgaatgggcataacaggccacatttttgaactaacaaacagagagaacaagtctcgactcttgaaagatgactgacggcactttacctcgctagtagctagactcatttgcgctagacgagaatgcaat

SEQ ID NO: 59109 - DNA, 529 bp, Arabidopsis thaliana landsberg
gcacactgaaacttctctaatggatctcgcctttgaaaagcagtatcttggacatacgagactctaccaaactggacaagggagacatccaatacttcatacgcccatacttccaaaggacacagcatgcataggctcttaccgagctagtgacaccatcttcatctagatggcaacaaatcacaccactagatgagttcgattgcacatcgcctacttaggaaccccaatcacgataagggagactggcaaaccgaccgatgatggcaccctgctagcctgacgtgctaggggctctcaaaataaaacatcgatgtccgacatgatacctatataaaaaactcggcctacactcaatattatctgtagcggtctcaggaaccttaagatgctgcatcgctcacttatcaacacgagtaggtagtgagcagcggcagcacacaagacaataatccgcggatagatggcttacctgcagagtcatctatgcgcacaagacgagaacatcaacatcaccattgtagtgacg

SEQ ID NO: 59110 - DNA, 767 bp, Arabidopsis thaliana landsberg
ttattaatcactcatcaacacacacaacataaagcttagtccacaagcaatcttttttttacaatgtgatggattctgcttgaatactgaagtaacgaaccagtgtccggttttatcacaccaaaatttgaatggcataaaccggtgacattgttattagtccactttataaggttttgtcgtggcctgctctatcagatttcattagtcagaaagtaaatcgaaaaatcttatcacctacttgatataccctacggacactattttcaaaccaagttgttggttagagatcttatgtatatatatattacatacatgcacatatatagaccacataagatactctagggaatcacaataagtcaataatgattatataagtcagacacaaagatatttacatttttgcagacaataatgggtactttggtcaacggtactattccggcgatgaagtgtcccaagaatgtggcgatgatgaagacaacgtctaacggagtgttcgatggagagagtccattagatttcgcttttcctcttgtcattcttcagatttgccttgttgtcgccgtcactcgctctttggccttccttctccgtcccatgagacaaccacgtgttgtcgccgagatcattgtaagtcctccatcaaccggtttaggtcagtcttatagtttccggtttaataaatatcctaccagactgaaatattgagtataccgggattccgttcagcttatgtatgtggtttcttggttagaaaaaat

SEQ ID NO: 59111 - DNA, 906 bp, Arabidopsis thaliana landsberg
ttcgtttcttcaatgtacgaagtctagtgataaactgataatatttgtgaatcgtgattgtttatgaaactgaaaggagaccatatattaggctctcattagtcttggaacaagtggctacattaatacatcaatcgtttgcattatgttgtaaacaattttcaaacatggtctattaatcacaattattaagaagagaaaaggagctacgattaagtccaatatcgatcttatcatcttataattaaggaagtcgggcctctctataataatcaatgtcattgttaatcccccatgtggtagctcagtatagtaacgacgtaaattcattatagtctttgttatattccatcgtctgcaacacactatgattaaaccacttggtcactaaggtttcatgatggaaattttgtccgtggtggattttcggaaaactctttaccaaaaattctgcgcattctaaaaaaaatacagggtgtttcacgaacccatatatccgattttaaacatttatatgaattaattagggttaatttgatcaacaatacacgtagatgcatagaaagaattaacaaattgatactaatatagacattttgacccatgcatggatgtctctttgacaaataaaaagacatattacgtctttttcttggctgagttgttccctcgattgatccctttctctttctcacattcatagtgataattacaaaaatgattatgacattacgattatgtgagtgtgcacgtgtgctatgtcaatgcctatatctctagtccccaatacaataatcttccgttatctcggggactcatgtgcatgctccaatacgattgtgtcatataatagacatatcacatttgtttatacatacatgcatatgtagagcatatcacacaatc

SEQ ID NO: 59112 - DNA, 120 bp, Arabidopsis thaliana landsberg
ttctggcacatcggaaacaaacaccatgttggggaactttttgccctaacgagacaacacgaaccctgggagcggaatttctaaaaccactaacggaggccaaaaaagccaagccacaag

SEQ ID NO: 59113 - DNA, 653 bp, Arabidopsis thaliana landsberg
aaaaaagaaaaaaaaaaaaaaaaaaaaaaaaaaaaaaaaaaaataaaaaaaaaataaaaataaaaaaaaaaaaaaaaaaaaaaaaggaagagcaacaaaagaaaaaaaaaaaaaaaaaaaaaaaaaaaaaaaaaaaaaaataaaaaaaaaaaaaaaaaaaagaaaaaaaaaaaaaaaaaaaaaaaaaaaaaaaaaaaaaaaataaaaaaaaaaaaaaaaaaaaaaaaagaaaaaaaaaaaaaaaaaaaaaaaaaaaaaaaaaaaaaaaaaaaaaaaaaaaaaaaaaaaaaaaaaaaaaaaaaaaaaaaaaaaaaaaaaaaaaaaaaaaaaaaaaaaaaaaaaaaaaaaaaaaaaaaaaaaaaaaaaaaaaaaaaaaaaaaaaaaaaaaaaaaaaaaaaaaaaaaaagaaaaaaaaaaaaaaaaaaaaagaaaaaaaaaaaaaaaaaaaaaaaaaaaaaaaaaaaaaaaaaaaaaaaaaaaaaataaaaaaaaaaaaaaaaaaaaaaaaaaaaaaataaaaaaaaaaaaaaaaaaaaaaaaaaaaaaaaaaaaaaaaaaaaaaaaaaaaaaaaaaaaaaaaaaaaaaaaaaaaaaaaaaaaaaaagaaaaaaaaaaaaaaaaaaaaacaaaaaaaagaaaaaaaaaaaagaaaa

SEQ ID NO: 59114 - DNA, 1258 bp, Arabidopsis thaliana landsberg
tattttggacatgccacgtagaaaagcatgtgattatgatatatactgtatatagagtagatctgggtaagtgagtcagtggtaatatctaactaaaaaagtacagaaatggaaagatctatatgatctctctcgcaggatctcaatctctggcccttttttttgtcaacccttcttcctctcttattatgttcttctctctcttttcttttggttactgtaatttgtttttttgtttattgacattgacacgttttcttgcttcgatttttacggaaagagagatatgtatatgaggaattaggataagtcgatgtaattttgtaaggccacgaaaccatacgatcacaatcaaacaatctgtagcatttagaatccatcaattataatcgatgttgaagtttcggtggtccaatatacttacggttgttaaaactttggccaaaacgaatcgtctaaaagcaataccagatttaaatggaatgtaaatggaaaaggaatcgagaaataagaacaactgatcttaaagtctcacaatgtcctacaaattaaaaatgcacttgtaataatagtaataataattaattatattaaaaaaactccttgcaataaaatcataatttatgtaattcaaaatagatcttgtctgaattagtttcaacatatttcctagaaatgcaaagattaatgaacaaaagcaggacatatataataaatcacattagagaacttctagatctagttctattacttagtcaatcgattaaaagttctatacactcagaaaaaaaaggatatatattcataatatagacagtttaacaacttgagttgaaggaaagattctcacatatattttcgaggcataagacacgatggccctaccattacaggatgataacaaggaacgaacattgtagacacaagaatcactgttacaggttggtaacaaagaaaacgaacctaaattgataagaatgaacgtgtcttttttttttttttttttggcaatccaaattttgttgcatatgcataggattccaaatcatttctgtttgttcttttgtttcgaccgtgtttttttgttaccttgtaaattatataagttagatgcataaaattagtacacacccatatagaagaagacaaataatcatgtgtctatcacatgaaattaaactgtttgagtatatatattagaccggaatttaatatgtaattttactaattaaaaaatgctttcaaattcgtaataagt

SEQ ID NO: 59115 - DNA, 462 bp, Arabidopsis thaliana landsberg
tctcaaaagtgaagctggtaacaagattcaaattcaaagttgaaattcaaatgaggaaataataataaaaaaaaggaaagcaattccctaccgaatgggcctcttttccctcccgcggcccaactctctttcatctagccggcccactcccctaactcgttccagcctccccaccgctctgtgtgtgcacctaggcgctggggcagtcgctgacagcacgggcccgctcgtgcagtgacccattcgcctagcaaccatccccgccgcaccacgtgcattcctgcctgactcgcttacatgcggacccgggttgtcaggcccatcttacccaaacggtctgccgatcccgacggagcctccactgcgcgatgtggccaccggcggatgcgggatcaccatcccccataagacccgggatgtggtgcgccctttactggtcataccgctagagccgtccagaaa

SEQ ID NO: 59116 - DNA, 458 bp, Arabidopsis thaliana landsberg
ggtaaatggaggtgcccttttttttttttttttttcatacctcgatatatgtcacactacgtttctggtcaaataagaacatgttttttctttcttttttgtatgaatttgtttatcagaagtcagaatgattcagttttaagaaatttttagttaacgtttaacaacaataacctgtaggagctttttcttaattgaataagtttaagctttctattttgatctgatgatgctaatatgaaagcattctccgaagaaccaaaccacatgagactttttgatttcaatgtccattcgtaactagtaacggaaaagatcagacagaaaaaatgtaccaatcattccatatttgtagttttacatgatatagtaatattctctaggtgtttaagttgtatatttcatgatttttacacattttaaaacctgattaaggcctgtttttaactttttatttc

SEQ ID NO: 59117 - DNA, 301 bp, Arabidopsis thaliana landsberg
tgatgatgagtgatgatgatcctgatgaggacgatgaggatgatgatccatctactgactatcgtgatcaatgtgaacatacatggcctttgcgcccgtttgccgcatggaaatagctatcttctcgattgaaatctggaacgaactggaccttgtcatatctctccagcggatactgaccatccgtggaggggacctgcttgccgataggcgcaactgaagagtctgcggcatgatgatgatactgcacctgtgcaccaatggacgatcatggtggacacctccctgactggttgatcct

SEQ ID NO: 59118 - DNA, 1802 bp, Arabidopsis thaliana landsberg
aagctggggaccagcaaagccctttgacaaactcaagcagtggtctttgtagtaatccatctttaccagaagatgaatctaataatgtcaataaaagctgcagcaaaggaaatggtgacaaggacaacactgaacactgtagtgcaggagaagtagaatctgagcttgaagaagagaggcttgtaaagaggaaagcaaacaagatagatggaagagacttgcttgtaacaccctgcaagagagatatttataaaggaaagcaaggagggaataaaagattcaaatcaagaacagtatccttgaacgagaaacctgagatcaataatgccgcaaatggagtaggagataaagacttgggtcatattgttaagacgattagatgtttagaggaagaaggacatatagacaagagttttagggaaaggttcttgacatggtatagcttaagagctactcaccgagaagtaagagttgtgaagatctttgttgagacgtttatggaggatctgtcttctttgggacaacagcttgtggatacattctcagaaagtatactgagtaagagatcatcgacaaatggtgtagtacctgctgggatctgcctcaagctttggcattaaaagcttttgaaatcggtctatttattaactcgcttgatattgtaaaccataacgataattttggaatgaaattatgtaagtacgcatttccaatttctttctgatgcttagtgaaaaactcaaaaatgaataagcctgatttcaaatgaaccatagtctgacagttagagccgggagattacacacaaacattaacatttttaaatctcgaaaaagaaataactcacgagttgtttccaaccaaattcagagagtacaagtttgttctctataagacatcagaacagagtctggggaagaattggagtaactagtaactactatctgggaaatgcagctctagccctcatctttttgactagtgttcaagacagcgttagagggacctgcaagatatattcaaaggttggtgagcagaaatcgatcaatgcgaaaacaaaaactggatgcagagacacgaaagattctagttaataatcagaaaaaccgaaactgcttaatctcatcagagtaaatgatccaagggcaagtaaattctaaattcagctgttgagagttgagacctattggtaaataccagcacataggtggaatgatcggttttacgcagtaactcgcacaacttgatcttgtaagatgcagattcaaatgtgccaaggcaagaaaactaaaaaacacaagactggttccatttcctctggattaactaaaatagttcttcatgcagataacaaaactaaccgagtgaactatctgtatatagagcttgtgaggatatcacctgaaacaaagatctctggtatagatctaactaaacaaccaccagtgaactagattgagaagcaaaacaagtgagtaatatagagaaagcaaaatgctgaacctgatgagtacttagaatccattatctgaaaagatgctgatgagttcattttctaatgcagccaacaagtctaagaactaagtcctatctaatttaatcatactacacataggagctaaacctatcttccaattgatagaacaaaaacttgggaagcttagtggaaagcctaaccttgagaagactagcgattacgctcggccggtagaggacggttaaatccaccgcgacggttcatgtactgtcttggctgacgcttagttacagctctaataccactaacatcagcaccagcaact

SEQ ID NO: 59119 - DNA, 615 bp, Arabidopsis thaliana landsberg
gccatggacgactatctaatcccaggtcaaacttatttcgtcttaccgatcgaacgttttcaatacaaaatcttaaccacttcgtgtctctcaatcttcaactctaatcttgaaaacgttcggtcaaacactccaccgttgaatttcactgcgccgtcgagtccaccaccgtttgagtattctcagggaccaaacggaaagattctgataaaagtttctccggagtttatcattagtcttatatgtaaaaacagaaacatcggagaagaagaagccacaagttgtggtgaaaacagtgcgatttgtaattctcccgagttaaagaagcagtatgatcagcttgttggaacgagagagcacatgtggtcaccgaatttgcagacgatctccgagcataagattagggtttctccattaaggttcttcggtctaaatcggaagcaagatgaagtgaattgattggtgttggggaaaaaaaaaaggtgcatgaacaagttgtatttgttttgtgaaaaaaatgtggaaaaattaaaaaacagtaaattagagtgggtagtttgtttggttacgatttagtcttgcatgatcaagttgacaaattgaatgttttgggag

SEQ ID NO: 59120 - DNA, 552 bp, Arabidopsis thaliana landsberg
  unsure (1)..(552): unsure at all n locations
aatatttgtatgcacttttgtgaaattatgttgttcaaatagtaatcaacaaaaatgtagtttaaaggtcaaggtcaattatcaatctattataaatgcaggattatctagtgtacatttccaaaataaattggtactactgattatcattattattttcttacttttttatggaaagaatgattctacttgttggtgcatgatatgatttgcgtttattacgtttcaaaaagaatagaaaatgttttagacagttgttacatcagccagatttgtgtagtcaccaccaccatattcttggtgcggtcgattaaacacatcttacattaatcattgtctacttcttttactggaacaaccgaatacatatatatctgtaaaacacagtcttgcaatcaatgttctcccaaaatttatggttaatggcttaaaaagcaatggtaaaattagacatgggtatttggataattcngattcngataattctgataggggagtttattatcccgttggatgatantgactttcgtttcgttttcggttcgatgatgt

SEQ ID NO: 59121 - DNA, 163 bp, Arabidopsis thaliana landsberg
cgaacaccaaaccatagtaaaaatgggtgaccgttctcgtgttaaattaccttttatttgttttaaggggcgtttttcgggtactttgtgcggaggaaggatgtccagtgccgtgggcgagccgagcacggaggtgtgggcataagaggaaggaggacgcagg

SEQ ID NO: 59122 - DNA, 1655 bp, Arabidopsis thaliana landsberg
cgtgtaaagaaagtcccgagagtatgaccgaccaagtggatctataagacaccgtacaactaactgcactcacggcggtgcattccacaatctgctgacacgtgtctgcttatcactctctctttttctgctcttcttaccacacctggttgactcactcaaccacgattcgtccctaagcagcacatgacgacgccgtgccggaccattaacgctaatgctatcgccgcaccgtcgccttcgggattgatctttaacgggtttcgtgatttcgtcccgattgataagaggcttgttatatcaagctttcgtggcttgaaactaccgtccaggacgacaaagacgattacgagctctgcttggagtttgagttataggtctccgagaagattgccttcttcgcgctctgcttctacgtctgcgtctgcggctgttacatcgagttcgacgaatagatttgaagctttagaagaggggattgagaaggtaaatgggttgatttcagatttacaaaatctttgtaaatctgacttttttagagatttgaatggttctgtttcattgtataaagctgagatttttaagggttaggtaaaagagttggtttcaatgatcatgatattgattgatattagacaaaatcttggagaagctgagttttttagatttttaggggtatgaatagctcagtgaattatagaaactgactcaaaaattatttactgaaattttcaggtcatttatagttgtcgatttatgacgtttcttggaacattaggatctttgctcggatcggttctctgtttcattaaggtaaagccactttctgattacctccttgctctttctggtttaagctacaattagatagaacagtgtggaatatgcataaggtagtttcctgtcttgtaatagcagatactgtcctaaatgttttgcaactcaccgaagaaacacattatactacttttgctgtctcttttaacgtttttttggtgcagggatgtatgtatgttgtagactcgtttttgcagtattcggtgaatcgtgggaaagtgatattccttttggttgaggccataggtgagagagtttatctatgtttcagattaagaacattatatgctcacaactttactgaggtgatactgatgatatatacgactatttgtagatatatatctcctaggaactgtgatgttagtctttggattgggactttacgagttgttcatcagcaatctcgatacttcagagtcgcgcactcacgatattgtttccaataggtcgagtctctttggcatgttcaccttaaaggttgctccttttgataactttctccatctgtatagttgatcaagatttcattttggtttatactaagacttttccaactgtttattttccctccaggagcgacctcaatggttagaggtgaaatcggtaagcgagctgaaaacgaagttgggacatgtaatagtgatgctactattgattggtttgtttgacaagagcaagaaagtagtcataacttctgtcacggatttgctatgtatctctgtttctatctttttttcttctgctggtctcttcttgctctctaggctcaatggttcacattgaggagttaatgggtgttgtcccaaaacaaaaga

SEQ ID NO: 59123 - DNA, 609 bp, Arabidopsis thaliana landsberg
tgccattataatatctaagattctgaatttagctattagagtttcttacacgcaatcataagctaaaataatagcccgtcatggacacctagactcaaagatacgtaatacgtaagtaaattgataattttgttggataatcttaaattatgggttctgttgaggctacactaagatataatcttaaatctaataaacaaagatatgattacaaaaagtgcgacgtaacagataccatctgtcaacggtcaaatggccaacgaatcattttcactaaaatttattaatcacaattatttttgccatcttggaccaaaatagttttctttatgaatgcaaaaagatatcgagtcagaatgctcgatcacacaattatacaaaacactgaataaaattcaaagattcactagaaacctcggtttacaaacactttaatcacacaattatacaaaatcaacgaaatttaaataatacaacacttacagaactaagacacatacaagtcaacttcgacagattataccaaataaaaaaacaaaaacatcatcaatttgtattaccttgagagaaacaacgaaacaaagagagtgactcaacggattttcttgt

SEQ ID NO: 59124 - DNA, 188 bp, Arabidopsis thaliana landsberg
caggctcggggatacgatcgaggaactacgtggctcattgcagcctaaagaaaataagattgagacattgcaacagtcacttcttgataaggaccaggtttgatctctttcattttctgtaatactagtctgcaataaatagaaaaatagagagacaaaagagacagagagagagagagagagggtgg

SEQ ID NO: 59125 - DNA, 175 bp, Arabidopsis thaliana landsberg
gatgtgaatgactcggactgctgcgaatgatacaggctctaccctttgtgacactactacctaacacagatacttgttgtacttatataggaatgactcatttacaaaattacgtaccgtccttaacaggattcggtataatactaacaactgcaaagattctcttttttttata

SEQ ID NO: 59126 - DNA, 496 bp, Arabidopsis thaliana landsberg
  unsure (1)..(496): unsure at all n locations
aaaaaaaaaaaaaaaaaatagaaaaaaaaaaaaggaaaaggttatagcaaacaaaataaatgaaanaaaaaaaaaaaaaaaagaaaaaaaaaaaaaaaaaaaagattatttataaaaaaaaaaaaaaaaaaggaaagaaaaaaaaaaaaaaaaaaaaaaaaaaaaaaagaaaaaaaaaaaaaaaaagaaaaaaaaaaaaaaaaaaaaaaaaaaaaaaaataaaagaaaataaaaagaaaaaaaattaaaaaaaaaaaaaaaaaaaaaaaaagaaaataaaaaaaaagaaaagaataaaaataaagaaaaaaaaaaagggaaaaaagaaaaaaaaaaaaataaaaaaaaataaaaaaaattaataataaaaaaaataaataaaagaaaagaagaaaaaaaaaaaagaaagaataaaaaaataaataaatgataaaaattaataaaagaatagaaggaaagaataataaaaaaatagaaaaaaaaaaagaaaaataaa

SEQ ID NO: 59127 - DNA, 1103 bp, Arabidopsis thaliana landsberg
agatcggggttgaagattcgtgtctatggtagtctgagctctctgccatagatgtctttctgcaaccacatgagattcatgatggtgagcaatcactcaatgatagaacattttcaatttatgaatatgatgtttatattcataccttcccctcttgtgaagtggtttcctggagctctcaagaacaggagaagagtcctgaggagatgagttattggattgatcgtcttggtggtcattagtatcgatcaagatggagagcgcatctgagaaacaatggaggacggacttggccaaatcctccctttccatggacgagtctgactcggtctggtccatgatgagcagctggttggcgcacccatgcccgtgaagcaacttctccatagccttttgttggcaagagttcatctttttttgtttttttttgagtaaatacttatagttattgctctgtgggtttattaagtttagagatgtgatccattgtgtctctctctctttagatatatatacgaataggtcgagaagacgagataatggtcttgttacgaagtttcgtacgtgtgagagagtttagtcaattactatacactccttcgttaacctctctatcggatgtactattacgtaattcgtattagcaatgtgcggattaataagtggcccctcgagaatataaagacaaaaaacaaacaaacaagtaggagtattactagttgacttacccaacaactcttctaattataaagttagttaatgaattatgtgtaaactcttatctaacaaccatgacttcttagatctctagtctctactacttaattaggttcgcatctccaaataatcagtaataagtactcctagaattaggaaaaaaccatcaaacaagattccatatatctatttgatgtcgtcgcgtaaaatcaactgaataaaaagtccgttttgttgtaaaattgagtaaactctcacaacggtggcggtgaacgtatataagtcatgtgacacggcacctgagaagatggaacggcgaataaacggccgtagaaaaaggagcgggcagccactttgaaaagcggagagagagcttcatcaagagt

SEQ ID NO: 59128 - DNA, 1440 bp, Arabidopsis thaliana landsberg
cacccgccaaattaccagcaacagcaagtcataactgatcgaaagacctatctccttttagccatcactcgattctacatgtacaaaaatagccagacttagttatagtcactggtggctaaaatatctttaggacttgattaacaaaacaaatattgaccgaatgacctgcttggtcggaccagtgaaaactcgacctgaccttgtgaatcggaccggtggaccaaaaaccaggaccacactagggaagtattcgtacttgaactaacgtcttttggctttacgtcatgatgagtggaccaatctaggtggtggatgaatttacctcctcgtgagctctctctattctgtaattgcaaggacactcattcttcatgttttgcagtttttgtaactctgacaaactataaggttatatgaataaaccaaaatttataaatactatcattcacgtataaagaaagacctccccatgttgaattcagctttgtacgtcagtgtttcagaaagaaagtgaataattacaaaattagaaagtatcaaaccaaaagaaagaaaaacgctaaaaaagtaaatatctgatattcagattcactcgaaagtacaataccctttagggaatatatgttttgtaaacgtttcatcaatatagatgaaaattaaggatcctaataactgcatttagtcaatagtaacaagtaccattactttgttttgcaagtcgcaacacaagtgcatgtggtgattggtgaacacatagtcaacattgagactctcggtagctacataacgattcttgaaaatgagataaatcagaaaattgatagtaattcacttattcatttataaaaaaaaaatttttggcaacattagtatatagaaatttgtaaattacataagtacccttttataaacgtaatgagacatttgtgtatatatatgttacaaaataagccaacatatccatttgctcgagacatttattctcttaattcttctctctctctctctcttaaaaatgccaaaaatcttgtggaaaagcctccatctttgcttcccgtcaaatctcaccaaatgctattcttcgccgtgtattcctccgtcctccgccgatcccgacggtatcatccaacctaaccgtccctccatcgttcttctcaataacttcaacctcctttaccacaatgacaaccaccaccacccccatcgtgtcattgacttaccttcttcctccaccacaaccactccggccgccacctcctcctcatccacgtcatcatatgaatctgatatctctcctgatgtatccgccgcttttgcttcccgtcgcttcttcttctcttcccctggtcggtccaatgcaatcaccgactcaccagaaccccggtcaagagaattctctgataattacgatgaggggatcctctagagtcgacctgc

SEQ ID NO: 59129 - DNA, 273 bp, Arabidopsis thaliana landsberg
tcgaaactctgactttaagagcaaatggttccggtcccaaggctcgcttttgctgggcgactccctcggtggacattgagcggtgaacacgctggtttaagcagtacctctcgtgcatgttcgcagaagggccctatgatgaacccaccgatctctggtaccggagagctacctcattggggattgctacaagcggaaactgttgctgcagatctaaacgccccgcatgttttcggtagacaccatttataccttctgccttcgaagctagtt

SEQ ID NO: 59130 - DNA, 369 bp, Arabidopsis thaliana landsberg
ctttttagctcaatctgaatcctcatgaacatgttagagtttaattactgtattttgaaagattctcttaaaatgtggttgatgggtgcttaaaaggaagctatccttaccacaatacagtgctttataaagtaaagccagggttacggtggataattaaagatttcttatcacagacttattgagagaagcctgtgtccttatttctcctttaagtaaccttttgaaatcttctttctagatttgcataatacagggtacttgtttaagcagattatgaaacacttgcaaccaatatccattgaagctttttgaatatctaaataatcttactgttctaatgtgttttgttttttgacctttattttc

SEQ ID NO: 59131 - DNA, 449 bp, Arabidopsis thaliana landsberg
tgatttaaagacaaataaattttgatttttttggaaaattttggatgatataaatacaatatttattaagctattggaataatgaaggattaattttgtcatttttttcttttgtctctctgtcagtatctaatttctttcaaatctttcattttatttaattgcccattgaaagatgaaagtgattcctcaacttactgattaatacttgttgttctatttatttccaatgatttagatcagataaaaaccatacccactattgaaaacaaaatattaaaagtaaaatgaagcatcaaaatagaaaattgatgaaaacgagaaaacactaacaagaagtaaagcagcagctctttctagtgaaatccagtttcagtcgttttcattgggaaagagtgaagctttactggtatctcactttggaagcttggagttagtgagattcacag

SEQ ID NO: 59132 - DNA, 474 bp, Arabidopsis thaliana landsberg
taatgccggggatgggaagacatatggattagtgtgtggcaggatatggaaaagatttatatagaaagaacaaaaaggaaggtaggaacaattaagtaatggtgcggtgtacgaatggtccaacgttgcacatggtaattgcatagatcgtatatatgaactgcattattgtctttgattctttgttcgtggtttggtaagcctagagttagctagttttgttagttctaatctatcttagcaaactttacgtccaaactatcaaaaatcaagctggtttattagaagaacaaaaaaatgatcaatgtattagaccaccatccacaattccacatgcatgcgtcgcttttaatccaactttttagttttaaacattcaatcgcttgtattgttttgggttggttttttggtattttttatgtttacccgaacgattaaaaattttggatctacgattatttacgataactgata

SEQ ID NO: 59133 - DNA, 506 bp, Arabidopsis thaliana landsberg
gcttgtttaatcgcctgataatcgttatgaaatattcttattaacagaataaagtagctaaaagtattcaaccaatttggttttggacacctataactatgaacaatataattcaaactaccatatctaattaatatctatacaattgttttatgcatgtacgtaaactattaaatgatttattaattcttattcttatcgtttagttaattcacatgttaccttatattatatttagtaattgcctgctcgttttactccctctctatttatttttcttcctctaatattgaaggtttatttttctccaccaggattttttttgtttttagaaggataaattcattttcataccacgataacatatatcaaaatttgaacatttatctttctttttggaaatttcaatagttcatataaatattataaaacaaacattaatttagatatattatctaaattgatttgcctaacaaattaactagctaattaacttatgcttaaca

SEQ ID NO: 59134 - DNA, 355 bp, Arabidopsis thaliana landsberg
  unsure (1)..(355): unsure at all n locations
cccttctccggctccctgaccacccttctctgctgattcacagctggtcgcaccatgattcgtgggaggaacacaaccaattggtatccgaccccgatccatgcaacgagtaacttgattcaccactaccaaccccgatccatgcaaggagtaacttgattcaccactaccaaccccgatccatgcaaggaggaacttgactcgccactaccaacacggcagtgtgctgacactgtgccactgtcgcattcagatggaggcatggagccacgtaaatctctgtcagacagtttatgcggggaccttgagcagctagaaacaggctgaagagatggngagttgctttggagcacta

SEQ ID NO: 59135 - DNA, 656 bp, Arabidopsis thaliana landsberg
acatgaggtgaaaagtatacgtctctatacatacgtctttacatatggatgctgccaaagaagaaggaaaagatatacatatgtcatgaaatatctcagtatatgtttgcgtttatgagattcttgtgttggcagttataattccttgttgtacaaattggtgaatataaaagatttgattgattcaagtgttcgagcaataagagtgattccaccaaagctttgtcagtttgttgatcaatagaaaaaaaaaatagaaaaaaaaggagtaaaatcgaacgtaccggaacgaaccgaaccatacaaataccggatctttaatcgcgccctaccgtggaaaatgattcgaatttattaaccgagtttagattcggaccgaactcaaacatttgtcagcaaagattcgtttgaagatagttcatctgtattccttcccctagaaccctagaactcccaaaaccctctactactacactttcagatccaaggaaatcaattttgtcattcgatcaacatggaggatgatcgtgttttctcttcggttcactcaacagttttcaaagaatccgaatcattggaaggaaagtgtgataaaatccaaggatacgatttcaatcaaggagtagattacccaaagcttatgcgatccatgctca

SEQ ID NO: 59136 - DNA, 1211 bp, Arabidopsis thaliana landsberg
ctgttattgatgggcttgggatgtgtggaaggtatgatgaggcgtttatgtttaaagaaaagatggtagaaagaggcgtggaaccaactcttatcacttatagtattcttttcaagggtttgaccaaggctaaaaggattggtgatgcttattttgtcttcaaggaaatgacaaagaaaggctttcctcctaatgttattgtatataataatttgattgatagtttcatcgaggctggaaatttgaacaaagctattgagataaaggatctcatggtttccaaagggttgtctctcacatcgtcgacgtataatactctcataaagggatactgcaagagcggtcaagcagataatgcggagcgtctcctgaaggaaatgctgtcgattggttttaatgtaaatcaggggtcctttacatctgtgatttgcttgttgtgcagtcatcttatgtttgattcaacacttcgttttgttggagagatgctattacgcaacatgagtcctggtggtggattacttactacattgatttctggtctctgtaagcatgggaaacactcaaaggcagtagaactttggtttaaatttctaaataaaggttttgtagtagacacgaggacttcaaatgctttacttcatggactctgtgaagcagggaagctggaagaagcttttaggattcaaaaggagatattagggcgtggctgtgttatggatagagtttcctataacacgttgatttctggatgttgcggaaagaagaaactagatgaagcttttatgttcatggatgaaatggttaagagaggacttaaacctgacaattatacttatagcatattgatttgcgggctgtttaatatgaataaagttgaggaggccatacagttttgggatgattgtaaacggaatggcatgcttccagatgtttatacatattcggtgatgataggtggatgttgtaaagctgaaagaacagaagagggtcagaaactgtttgatgagatgatgagcaaaaacgtgcagccaaatactgttgtttacaatcatcttatcggagcatactgtagaagcggaaggctatcgattgccttggaactccgtgaagatatgaaacacaaagtaatttcacctaattctgctacatatacttcattaataaaggggatgtcaatcattagccgtgttgaggaggcaaaactccgcctc

SEQ ID NO: 59137 - DNA, 1337 bp, Arabidopsis thaliana landsberg
gctcctttatttttttctcccagtgaaccagaagcccaattcttatagttaaccatagataaatacagtttctattttgaataataataacagaggtgttataggaccatagaacctaaactccaacaaaatctgttgttatttattattgaatttaaaatcttcaagatatgtctaaaaatttgtatcattggttgaaatgtgtaagccatcttaaagagtttaattgatcccattagtagatattttactcaatatgttatgaaaagaatgataggtaattaaatcagaggaattgtataaaatccacttaaaatcaaattacataaggaaactttcgatataaaacaaagtttcctaaaacagtatgatttcatatctatctgtaggtcgggctcttgtatcaaacttaatataaacaaatgggcctcttatcccagtggtgaacaccaaatataatcttctgatgaacaccaaatatttttcactaaattcgatttcattctttgtaaacgaatttgtatttcaacatgttactattttgttctgtagagtttatcaagctaatgttttttttttttatgtagacgcctaatttattaaataaacgttatcttagcatcaacatcctcttattacgtacagctctactcatcctaaatattcattgagatggatgttttccgtatttttaacgatagtttacaaaataagtaatattttagagactttttggaccgttgtggtcggccacaaagtaaacgtgtatgagctttgaacaaaatgcaaagagataccaatgttatattttattaatgcgagcacatgaaatgaatcttgtgattcaccacgagcacgctttgcatccgaaagctttaatgcaatttttcattgaagacgcaaagaaaagtgagaaaacgtaaacactacttaaaagagtctccaaattatgaagtttaagatattctaattaaagttaataatgttaattagaacagggttggttatgtagggtggtttgatgtttgatctcgatccataggtgtgttagaaaacccacatataaaaataacatagtcgtatatgtatcaatccattgattggtttcacatttatctaccaataaaatgtgaaaaaaatattaggaaatcgaaagattagaattcatactactaaggttgaaaaatgaaaatagtaaagcttagattgatcttttcaaaccgcatatcaaaagggttttcaaccaccattaggtaaattacctaatcaatattacataaatcataatatcacattctgatgctttgtggaacatattactaatgtcaaagtgtttt

SEQ ID NO: 59138 - DNA, 327 bp, Arabidopsis thaliana landsberg
atccggcatgtcctatgcactgattatgatcgcaaaagtgactcatagagtgcttactaaacctttgtggcagacaaggagaatcccatgatgatccttacactttcatgaaaactccataaatgatccaccaaacaacgaagatgtttttctcagcccagatacctgagcgagaacaaaatcatgagaatatgaatagactaacatctcatccatcgtgatacctagttcgcgttgataccgatactttacgtgcttgatggactgtgtaacgaccaccggatctggcacaagtttcttctgctctgtggctaggggcgccatcat

SEQ ID NO: 59139 - DNA, 1415 bp, Arabidopsis thaliana landsberg
gttttttttttttttggtttgggtaaatttttaaagctaaattgttggtaaaaaccccaatatttcaaatttccttttttgatttccatgtaatatatataactagatctggcttaggttccatgaatatccccaaatcagtatatattttggccatttttggtccgcatattttccttttctaggcactgaaacaacgttaataagattcaaatttgtttctgaattttgtcggaaaaattctagaaatctgcttctgtagagtccaaattgatgcaattcacaaacaaagatagaaacttttttccatttgttaatatcactgtttcatttgttcttctgtgttcaggcaacatatttgcatttggactcttcgtttcaccaatgtgagttcttcttattcacttattcgttgtatgtattaaacagagtttttctttgtctatggacttgactgttttttcttctttcaggccaacgtttaggaggatcatgaggaacaaatcgacggagcaattctccggtttaccatacatttacgctctcttaaactgcttgatttgcctttggtatggcacacctttcatatcacacagcaatgccatgcttatgactgtgaattccgttggagctacgtttcagctttgctacattatcctcttcatcatgcatacagacaagaagaacaaggtttttggattgtttctacttcttactcacacaaacaaagtattgtttctttttctaactctaaatcaacattttgatcatggcagatgaagatgcttggtttgctttttgtggtgtttgctgtggttggagtgattgtagctggaagtttgcagatacctgaccagctcacacgatggtactttgtcgggttcttgagctgcggttctcttgtttcaatgtttgcctcgcccttgtttgttattgtaagttcccaaaaaatgtcaacaaatcttttcaaaatatatatgtagctttcttgattgcctgacttgtttggtctttgcagaacctagtgattcggactaagagcgttgagtttatgccgttttatctctcgctatcgactttcttgatgagtgcttccttccttctttacgggttattcaacagcgatgcctttgtttatgtaagttactctacaataattgctaatggattaatctgtacgttttctttcattagagtattgacaaaactcgttgtttttttggccactcagacaccaaatggaataggaacgattcttggcattgtgcagctgggctttgtactgttactaccacaggaattctatagaagaagaaacaaaagagcctttgattgtttcttacgtgtgaggttcgcgcaaagaagcaaatttatagtggggaaattaaaagaaaccagaaaatgtggtgacatca

SEQ ID NO: 59140 - DNA, 896 bp, Arabidopsis thaliana landsberg
ctataaataaacattaagggttggaacaagtaaatagataaacagaaaacagatattgcaactacgcataaattagaaggcttggaagacaatatactcagttacatacaagaaatgttccattatggtaagcaaggaagtttaaatgtaatacctaagaatccaaaacagagaacccacataaatattgacttagaccaaatataacattaaggtaaagagaattagcaaaaatataaaccctaaggcttggaaagagggaacccaagcaaaaattgattaagctaaggaaatgtaacaattaaggtaattggagagtaccaccccaaatataaagccttaaggcatggaaactgggaacccaaggaaaaattgattaacgacgtggaatgtaacacttaggtaaggagcttgactacaaatataaaccctaaggcttggaaacagaaacccaaacattgattgtcatagacgcaattttcaaatatatagcgtaatgattggaacatgggaacccaagcaaaaactgcaacaggaccaaaacatagagaatgcttaatcgaattatggtttgcaacttgagaggaacatatatgcaaaggcttcatatggttagagaaaggaaatatattatttgtaaaagaggaacaaataccaaacctgagaggaaatgacctttgctatgaggctgtgaagaaattcgatgggaaagattgcaaacagagaagaataggataattagctggacatatttctaaaaagaaagagcaaataaaaaattcaatgacaaaaactaatatatagaacctgagtgagggggacaaaaccgtttgcgcagtccatatcattaaaaagctttgggtaagtagggcaattgcagagagggaaggggtagc

SEQ ID NO: 59141 - DNA, 1200 bp, Arabidopsis thaliana landsberg
  unsure (1)..(1200): unsure at all n locations
agatattttaccgcaacatgatcagctcgtgaattcctgggattctttcaacatggtgcaaggtacgttagcagaaacgaactatacataggaatctatggggaataagtcctcctaagtactaatctttctcatattgtaaatcacagattacttggctggtggnnnnnnnnnnnnnnnnnnnnnnaagaacaagcaaggctctactctggagaagctactgggtaaagctctcatcttttgctaacaagtcgtcaatttggctctgttaacaacagttttgtttgactcagatacaacaccttctcaccagaggttgtgaagaaaatgccaaagtctgatcttgttgaagaggtaagttacacataagtcatttcctttttaatatctgaaaccaaagcaaaatctttaatctttaaatccctcaccagatatggagacttcaagctgcattgagtgagcaaacagatatcaccagttatagccagcaagagtacgaaaggcttcaaaacgtactccctccactcattttctctgtttagtaacctccacagaagtaacgatttgcttaacccaataaattacaaaattttgaatttcaggagaagattctttgtagagtttgctttgaagatccgatcaacgtggttctactcccatgtagacatcacgtcctctgcaggtaaaccgaagctccttctttgttctctatctcactttaaccgcatagtagaattagcatttggctataattgatattttactgatacatttggttttcagtacatgctgcgagaaatgcaagaaatgtccgatttgtcgtgtcctgatcgaggagcgtatgcctgtatacgatgtgtagatttcagagctccaatccagaaatgaagaatacattacttgcttgtttggttttgttttagtaatgaagcaagcactatatatatatatgttacaacttgcataggaaaaaatctgattcgttttcgagtggatgtaaataatactgtaaaccatcgtatatgtcatgaatcttctttctctcttttttttttttttgatcatacaatttgcaaagattcatacaagtggtaacggttaagaaataaaacatattactgttaaaggattttgaatcgcgggtaggcacccagcatccaaaaaagcttttctgctctctccccgtttaatgcaccccgt

SEQ ID NO: 59142 - DNA, 1462 bp, Arabidopsis thaliana landsberg
ggctgctgttctctatggggctgttgggactgattgctttaggaagtttcacctgtcgcttgctaaagcagccaaggaggtatctctttttacctgagaaatttgtccttcattgttgaaaaaacgtattttgctattggggtagaaatggaaggctttacctcgagcacgaagcatgagtttgagaaatcctcttgtatggggctcaattgtttttctttcactgtcttgataaagcaagtgcatgttctattgtccaggatttcatttcttagtgtctttctgcttttgttgtgtgcattctaatgaagccttggtttcctccagggaaaagttacatatgttgttagaccagtattacctttgggttgtgaagggaaaactagaccctgcggtgccattggagcaagggataatgttagcttagctggttatggtgtggagcttgctttgaagaacatggagtacaaggctatggatgatagtgctataaagaaaggttagagttaagcattcatttattcattttgccacccaaatattgaaagttgaatatttttttattggtttttattccttatcttcattctgttagctatgaatttgctactctttaattgtttctgctatgagtttcaggtatcactcttgaagatcctaggactgaagatcttagtcaagatgttaggggctttatattctcaaaaatcttggtatgtttaactcgaaacataaccagtatataatatataaatatatatagaaccatttctttcaaaaaaaaaatcacttcatttgatctgcaagaatgcatgaatgctcgcaaaatgaaaatgtgtttgttagtggatgtgagatggacgaagataagagaggaatgacagagaatttttttgtagcagctttttcattttctttagagtgatcgttaaggtcaatgctcctcttttgcaggacaggaaacccgagctaagatcagaagtcatggcttttagggattatctcctatcatcaacagtatcagacacgcttgatgtttgggagctgaaaggtactactgcatgtttcgcgtggtttaatagaaattggtatagtgtttcctaatttacctttgttccaacagatttaggacaccaaacagcgcagagaatagtccatgcctctgatcctctgcagtctatgcaagaaattaatcaaaactttcctagtgtagtttcttcattatctcgcatgaaggtatgtcattgtttttttgatgttgtgtttacctgctggttgaattgtttccttgtggttttagatgtgtctggtttatcgtgcagctcaatgaatcaatcaaagacgagatactttcaaaccagagaatggttccccctggccaggctttgttggctctgaatggtgccctgaaaaacatcgaagatattgatctatacatgtaatacctttttgcgcattgtga

SEQ ID NO: 59143 - DNA, 423 bp, Arabidopsis thaliana landsberg
aataaaatggaagttagcttgctgcttttgaattagggagtttgtagtaaccagcatggtgaccaaaatcttgaaccgacggagaaccaccggagccacgacggtcaacagccgccggcaaatcgaatgatctctcgactagtctcggagcctcagaaccgtcttcatcgatgacattgacgtcgcgtgtaggcatcaaattgaatcctttgataagtctctccgccgtgagagtcggcaaactcgccgacggtgagaaagataagggcttttctgtcagagatttggaagttgagggtgaaaaatgagagaaaatgaaaatccagaggagaaatgtgagaaaaggtgtttgggagtccattttttttttgtttttctgtgagagaatttttgggttatggaattgaagaaacgatgatgtta

SEQ ID NO: 59144 - DNA, 910 bp, Arabidopsis thaliana landsberg
tctcttgttttaagcatcgaatctcctgtcaatttcgccaattctaactacctcactgaaaggttagctatgaaactacgatcctttctatatagattttggaagttcggatacattagactttgatctcttaaatgtttatgaaccctgatgtttattagattgtaaccacatttcttaatacattttttttgtcaacaccacatttcttaatagctatgtttcatttactaacattctctgcttttgtgttgcataaattttttgtagaacatctcgttggattgaagaatgcgaagaagaggaagctcaagagaagcattctagcctacagttcttgattcttgaaatgtcaggttagtcttgatagaatctattagaaacccgtataggaaatgtgattagacttaaaggcaaattcactcattgctaattagttttaattttctaatgcaaaaccataaaactcaagaaaaccaatatatttcaactagctaactttgcttttatatatgttaaagccgtgagcggtgtagacacaaacggagtctccttttttaaggaacttaagaaaacaactgcaaagaaggacatcgaggtataaatagttgttttcacaatccgatttttgtcacttatccaaggaaagtaattagattttgatctaaaccggatatttattttatgtgtgaagcttgtgtttgtgaaccctctaagcgaagtggtggagaagcttcaaagagctgacgaacgaaaagagttcatgaggcccgagtttctcttcctaaccgtcgctgaggacgttgcgtcgctctctcttaaagggccatctctcagtaacgtttaactataattttttgtgtcggtccaatattgatatttaaccgatggttaggcattcgatagagac

SEQ ID NO: 59145 - DNA, 198 bp, Arabidopsis thaliana landsberg
agaaacaaaataattatcacaagtaaaatataaaattagtaatatacttgtacttctaatttttggcttatgccttttaatttattttaacactagactcgacgaaactcatcactaacatgaccacaaaaaaaaaagattacaattctaaaacacaaagattaaaagagaaaacataacaaagtaaaattaagacta

SEQ ID NO: 59146 - DNA, 936 bp, Arabidopsis thaliana landsberg
acagggacattccgaggattttcccaacctttctccggtaaaatcagatgaggtgtttgctagaggtttttgtttaaaaatatttttatccgaaaatcacataggtaatttgttataagaaatatagaaggttaattattatataaacatattaactatcgaaagaaatctttaatatttaacgaggatagaaagtaattgtttttaaccacaaagctaaagctgtgatatgaaaacttaaaagcaaagatcggttcgtgaagacaaaatggggttttggaaaaggaaaagaggaaaaagaaaaagaacaaacgtgtgaaaattcgagaaaaatggtaacacaaaaagaaattggacatgatataagttgccaaaaccaaagagaaaaaattgacatgatataccaatcaaatttttgaatcaggtcaattaatcaaattcacaacaatcatccacaatattatttagatttgacgctttcactgtttcacatgaaaattttacatttgacgcgatgacttgtggagtcacgatcattttagtcactcgttttaaacggatgcttcattcaaaaaatgtaacttatattcagaagactcctaacgtccgattcagatttacaaaaaaacaatatcattgaatcggaaaacagaaaagcatagtaatattctaagtatttaattataatcgtgaggaaatagttccgtaataatgggggaaaaatatatatatgataaaaccaaaatgagatttgcatgaagatgccatatgtctgatcaaacactctgagctgttgtgtcgatgaactcaccatatgccaagatacgctattagcgacaacacatttgtattgtcaaatgtcattaattaacatccacaggtccaacaacagagaaacaaaataattatcacaagtaaaatataacaatagtaata

SEQ ID NO: 59147 - DNA, 611 bp, Arabidopsis thaliana landsberg
tttagagtcctgatgaagcctgtcctctccctgttcgccgttgcgctgctcgcccagggcgctgcctcgcgctgggtggagcgcctggcgttctgggcatggagtgatctgaaggaagtgcgtgccagcatcgctgccgtggatgaaaagctcgccgcgctgccggagatggacccggtgaacagctgcatccgcgtgggcctcaagaccggctacaccacggaagaagacgtgcgctggatggagatcacgctgcgcgagacaagccaggtggattccgtggtgctggtgccgccttttgccaaaggggccagcgccgtggtggccggctatggctttccgctgcgcttcaagctggaggtcttcgacgccaaagaccagccgcagacagtcatggaccagacggcgcaggattttcccaatccgggctgctatcccgtggtggcgcgctttgccccgcggcaggtgaaacgtgtgcgcctcacagccacggagccctggtcggcggacggccccgagtcctgccatggcgaaatgctggtgctctccggcacgcgcacctcgccattgatggcagcgtgacgagctccatcacccgaacgcgccggcgc

SEQ ID NO: 59148 - DNA, 658 bp, Arabidopsis thaliana landsberg
taaagtgaccagcgctgaattcaatctgctgagcttgttggttaaacaggcggggcaagtggtcagcaaagaaacgctcagcgaagaaggtttgggtaaaaaactggagcgattcgaccgcagtgtcgacgtgcacctgagcaacatccgaaacaagctgggcatcggtggcgacaccccctcactgctggtgcttcacaccattcgtggcaagggctatcaactcagcttggtgtaggtatggggaagctgttctggaagtttttcttcggattttggctttgcctgattttggcagcaggcgcaaccggtgcagtgttgtatctgcttcgcgaaaaaccacacagcacagacctggctgaagggccgcgcgcgcagttcctgcttgaaaccgcgcaggaaattattgaaggcaaaggccccaaagccctagaacgggtgctggtcaaagggcgaagccgcaccggccaaaccatgcctatttttgcagtgtcgcaggacggcaaagaactgcttgggcggggcattccagacaacatcaacgacagaatcaaaaacctggccaatgaaaagccaaacgaggaaggcatcattcaagtcaccgcgctggatggcagtcagtgggttctgttcattcccaagccaccggtgttccccc

SEQ ID NO: 59149 - DNA, 343 bp, Arabidopsis thaliana landsberg
tattgaacaactttccgaatggctacgatcactgaccatatgattacactaaaatccggtgattgtatctaaattttaagcaatctttaaaatcgatgattctaatgtgatattatttccttttcccagatattggatagaaatcgtgatggatatgcaaataatactagttagtttctgacacaaactctggtggaaaaaataatctagaataatagtttctgtttctacaaagacacgttgtcaattacactaactttcaagtgttcactcttcaccggctgctgtggtcttcccttgtcggttgccggcacagacggtcaatgccacaggcacgtgtccg

SEQ ID NO: 59150 - DNA, 495 bp, Arabidopsis thaliana landsberg
tctatggctactgctgggaagaagggaaaatcaatcagggtccttggtaccagtgaagcagagaaaaaggatgagatggagttggaggaggagttccagtttagtagcggcaagtataaagattcgggtcctggctcggacatgtggttaggagatgcttcctctacgtctccaagaagtcttaggaagactagaacctttgaccgacataatccctatctcgtatcttcttatgctactcctcagccgccaacaacaactacatgctctgtctcttttcccttttacctccctccagcgattcaaaatcaacaacgatgtttacacccgaatgacccttcaggacaaagacagcaacaaatgatctcgtttgatcctcaacaacaggtgcaaccatatgttgcacaacagcagcaacaacaacaacatctattgcagtactggagagacattctgaagttgagtccgagcggaagaatgatgatgatgaacatg

SEQ ID NO: 59151 - DNA, 456 bp, Arabidopsis thaliana landsberg
atgcagacgacactcttctgattttggaagcatgccctaagcaactttttttcctaaaggcaatcctcaactcttttgcctcttctactggtctgaaggttaactacaacaagtcaaatatgttccctattaacgtgtctccggataaaatggtgatcttatcccgtaccttcaattgtaagattggcgagatgccattcacctatcttggcttgcctttgggcctggtgagacctagaaaggaacactacttacctcttattcaaaggattcagaggaggctgtcttgctcttcaaattttttgtcccaggctgggcgcctggaattggttaattcggtcttctcagccttaccaatgttcttcatgtgcacgctcaagattcctaaaaccatcattaaggaaattgatattttcagaaagcactgcctgtggagaggaaatgacatcaactcca

SEQ ID NO: 59152 - DNA, 424 bp, Arabidopsis thaliana landsberg
tcggaatggcgatgaggaagacggccatgaagtacggaatgaaccactggaggccgttgaaattgtagacttttccaggaagtcagcatggggcagtctgcgctcaggcggcggtcaccgtccgtcgcggatccgccgtgtccgcccaacgcacatctccttgccgcgcacactcaccgacggacggatagcgcaagagattgcccatgcctgcgcagcccgacatgctcgccagcacgaagccggcgcgcgacggccacacgtcgcgcccgtcgctgtccttcgcggtcggcggtgccagccggcgcccgacgcggcgcatggcattcatggtgcgggcgtgggcgggagctggatgcgccgggtggagctaacaaagagcttgatgctcgcggagaggaacgagaaaggttggtgctggagg

SEQ ID NO: 59153 - DNA, 403 bp, Arabidopsis thaliana landsberg
gagggacgaggttggtccgtttctcatcgtttgccattagcccacgcgggagatccaaaacactgggctaaactggagttaagacgataaaccaagggtaatatagtaattgcgtttccagacatcatctcttcctttatggataacactggttcgaaatggagccattactctttactaacagagggagaaagagcagagaagagagaagaggaagcttgtagaaatcgatggcgacgatagtgcagtgtctttcttcctgtgcgaccctcgaatcccaattcaaagtcctttcgcttaagggaatctcttgttcgtcaccatcttcttccttctccaatcgtcgtggtgcttcggctaccttatcctcttcccttagcttctctcagagcgtttctcaatg

SEQ ID NO: 59154 - DNA, 1257 bp, Arabidopsis thaliana landsberg
acattgattcaagagacattacatttaatcttgactttatcagtaaatatttacataattacatgcataggttatttatatttacacaaaaaccccgtaagatttttctctctcggcttgttcaacggtccaacgcgtttatcacaatcctgcatacgtacacaaagcatatcataagtacacacataaagagtttgcccacaacaacaaaaaagagaattgattaggaaatgaagtgatagagatgataaccattcataagtagttagacttgcggcatcgtcttcgccagaggaagggattttaccggcagtgaatggtcccaaagcatagcatggtgtcccagctgcataaaaatgtgtttgacccaaatgtgagtcttaattttgttattgttaatttagtttaaagggaagatgagaaatatatacgggttaaaggtgtcccagggttgctgcttgaacaggttggagaatccggatccattttcaatttacggagaccacgaacattgttattccccttggtaaccatgatgcttctggtgacttggtcgcttgagagagaaggaggagaagatcggacggtggataatgaatcgtgctttctcaatttcccgagaccattgtccggcgtcggtccggccaccgtttcatcccacagcttgtgtaggaaccccatccgatcaacaaaaatttatccaaaaatatataacaatattttttcaaattatttcgggtttttattttactgtctctatcttcttttttttcctttgcaatggaaatggttttatagaggtagtagagaggtaaggatgaaagagaagagagaagcattgaatatttttagtgaggttaattataagctttggcttaattaaggagattttaatttaaggataaatatgctgactaatccaatcattagtctctaatctcattggtgaatattctataagctgtgtcttaacttagaatcacaaactactagttcagaactctacttaagaatcacagaggttttcaacaagctattcaagttcaaagctttttaatttgcccatgtttaagacaagaagatggataacaataacaacaacatgatgataatcagagtcataacttctctacatttacacatcccacaaggcagtaacaacaacaataacaacaacaacaacatcaaaacctaaaatccagcttatcatagcaaatatcataggaacatttgtgtgttcaattgtcagctacttac

SEQ ID NO: 59155 - DNA, 202 bp, Arabidopsis thaliana landsberg
gaaccccaccgcaaaagcgattatactactgataccattcaaaccgtaaaaatacatagagggctgtgctaataacatcaacaaccactttacttgcctcatccgtgtatatatagctcctccataaatgcatgcagaagataaacagaatccgtcgcgaaatacaacacccatacaccaaacgttccttccttgaacgaat

SEQ ID NO: 59156 - DNA, 500 bp, Arabidopsis thaliana landsberg
gtgacgactcgttgctctttctttctttattatagattatagttgttcaaacaaatgaaaagtatctgagacgaataattaatgggtggtctgtttctgtactataaagaggtccatgcatgtaccatatcatcttattatgtactattaaacaaatagattaatgattatatatgtttccgattgaaattagtttatgagtcacgaagtaaaatctgaagggcttcaccaaacctaaagttaaaagtctcaaaacagttaaacactcttgtgatatcatccctgtatataatctttaatgaaaacgtagaaaaaaagattatttgcaaccagaaaacatctgaacaaatatccatttctcgtggttttatgttaaaacatttgtcgtgttgggaaataattgaaacttttattttccaacattgaatttttctttatgttaaaagtgatgtgaactttgtataaaatgaaggaaaatttaaaagcactcccctatatgc

SEQ ID NO: 59157 - DNA, 196 bp, Arabidopsis thaliana landsberg
tgcattaggtgtccggtcgcatgattgcccagccagggtcggacaatggctgtctctcatccttaaaaccaacgtccgacctagtggccgcgcaccagggggggaacgctctcccatcctggatctactgtaggtggagcctatagaaccacctgactacttagatggaatgggatgccctctcgtccccttgtga

SEQ ID NO: 59158 - DNA, 1314 bp, Arabidopsis thaliana landsberg
taacactcgaaaacgagtaatcattaacagcgagattctcaaacattgcttctttaaacaaccacaaagcttcctcatttttacccatttgtgcatacccatacatcatcccactccaagtaacaacatttttctgaggcattccgtcgaacatcttcctcgcataaacaatttcttcacatttcgcatacatatcaaccaaagaactccccacaaacacatcagcatcatacccagtcttcatcgatagacaatgaactgatctaccaatatcacaacgactcaaaatcgcacacgactttgtagctgatggaagaacatgatcatcaggtcaaaggtttcccgccatcatttttttaagaaactcgagtgacatccatggaagctcgttctgggcaaaacaagagatgattgaactccaagtcgtcgcactcttttgtgggctatcttcaaaagctcgacgagaatcaaacggaagctgtgatttggagtagaaattaatgaggttgttagcgacgagagggataagagaaaggcctgatttaacgacatagccatgaagctgaagtcctttaatagttgatctggttcgagctgaagaaagaagaagatcacaaatttgattgtaattgtgacatggaacgaagaaagctgaagaattcagagccatgggatggttgaactcagtgagaaaccaggtctcttattgggtaacgtttcacaaggcccattaagtcgttaggcccattagtgactttagtgtcattgcctttgaaaccctaaagtgtcgcctacgttaagtctggaactggaaaccaaaagacacgatctttaaaaaactcgatggaaagggaagacaactcagagaccaggaattatgactttgaaactaattgtctaagcctgattaagtagaaaaacatagagagcttcttcgtaggggattagaagaaagctcttcgaagcatagactggagagcatatacgtgactgagtttaatactagtttcaagattctttgcattggtatggctaagttatattgtgtccactgcgttataattttaccatcattgcccattattagtaacacctttaatgttaggtaaaaccaactatgcatcctataaaagatagttggggacattaatacgttatctcccctaaaaggctaaaatagatagtttcgtccagccttttagttgcctctaacatggcccattaattcattcggcccattaagtgtgaatgaattgcctttgaaccctaggttgtcgtctacgttggaactggaactggaactggaaccaagat

SEQ ID NO: 59159 - DNA, 937 bp, Arabidopsis thaliana landsberg
acatttagcaaatagcaaaaattgatagttatctaggaaagagaaaatttaaatccaagaatatgactggtcactggacgcaattgttttatacaaaaatataatattgtgaatgtaaacaacttttcaaattataatatcaaactaaaatttaaatttaaaaaatgtattactaaaatttatggtaaaaaataattagaatctcattaggaaaataatggagtcttcaaaaatcttgaatggtctacagattaaaagaatcaaatatagaatggttcctagcaaattagttcgagaagaatcattccaaaaataataaaagcacgtcttatattttttcacatccttacatcaatattcgtttatctaatctttgttttggtcttttggtttgtctcggatggatatataaatttataaattcattaaccatgcatagtttgtaaaagaaattcattaagaaataccggataaaaatattcgaattaacagaagtgcttgttacgagcgtgcctttttattgaccaaagtatacttatgtagcctacactacatctcaattggttcgaccatggttgagccttgaacgaccagaattctcttggaagatggggacccttggaccgttagttgcgctatgtctggtaatgtcgtcgacgcctcgacggcgcacggccactctcaattctggatacctccaccaaggtatgttatctataatcttttatcacaaacacatgcttggattaccatatctatgtcataagcttatgctttcttaaggttattgtaccaatccatgaggttgaagagctttaaactttgttctcctttggattgaatgaacaaaaacaagtacgtatgtttgcacagaaaaaaaagcctactagctaggaaaataaaataaaaattgtttggaacgtactcttcaaaattt

SEQ ID NO: 59160 - DNA, 1173 bp, Arabidopsis thaliana landsberg
tctgaaaatatctgaaagtactccacaaacatttcttctatattggcatatgtttttactgtataaccccaatatgatcataattatagagttactccacaaacatatctgctactctggaaatatcagtattctcatagttatatagatattacattttctaaatattttttatttttatttttgtttccttatgtcttccagcataccaccactagctgtagtgggtctcagcgaagaagaagcagtagaacaagcaaccggtgatattctggtcttcacctcaggctttaatccaatgaagaacaccatttctgggtatgcaagcattgaaagttcttttctttttttttttgtctaaagcattgaaagttctaagttttagaaaatccttagaaaagttcttgattttcttcaatatgcttgcacctgatcactctttgaactaatcactattttattttggttatagacgccaggaaaagacattgatgaagctaatagttgatgagaagagtgataaggttattggagcatccatgtgcggtcctgatgcagctgagatcatgcaggcaagttttcctttatagtagcttctaccatttattttacttccctttagctgctctactgagtggtgcataggtgtcaagaataaaaatcatttacagggtagctgaaagatttgggttgattaaagacgattgcatgtctgaatttttcttctaaccatatagaacctgatttgagtttgagaagtatttagtattgtaaatggattagagtttgatccgaagcgtgtcttgattttaagtgattatattgtatggcttaatgcaggggattgcagttgcgctcaagtgtggagcaaccaaagcacaatttgattgcacggtaagtcatacgtctttcaagcacttgggtttcactttcaccagtttgatgtttgctctaactaaagataattaatattgcgaacaaaacacaggttgggatacatccatcttctgcagaggaatttgtgacaatgcgcagtgtgaccagacgcattgcccacatacccatacctaagacatatctatgaaccgcaaaatataaagagctatatagcatgaaaactcggtacacttagtttgatcaaagagtcagacaacgatgagtttaatcatactc

SEQ ID NO: 59161 - DNA, 139 bp, Arabidopsis thaliana landsberg
  unsure (1)..(139): unsure at all n locations
cannnnnnnnnnnnnnnnnnnnnnnnnnnnnnnttaaaaaaancacctccccttacccccctacctttatattaaaaaataacacatataacccataatccattctaaaaccaaacaaactatacccattcaaaaacca

SEQ ID NO: 59162 - DNA, 502 bp, Arabidopsis thaliana landsberg
gagttttgttttattatgtgtgagctgtgacgtgaaactaattggtttttaaaacaagatttttgacatttggttgttctttcttctacgaattgctatgctattaaaaaaagcttcacaaaactattactatagtataatctttttggacagagaccataattgagaaagcagaagaaataataacacttgttttcttgtcttatcgaataaattgggtcgggctttgagatttttatctttttgtttcgtgggttgggtttgttgagagacatctacatgggtttggaactttggaggcttgaggtgaatttttggattttttttttgaaggaccaactatgattatattcattaatattccccaatcaatttgatcattatggattacacgtattaagtcatccttatttaattttgatcatttagtttactttagattttcattctgaattaccatttgattgaattcttcttaccattcgtttcggattcattttga

SEQ ID NO: 59163 - DNA, 878 bp, Arabidopsis thaliana landsberg
tttttcttttttgtgtaaaaaaaccaattttgataaaatatttaatgaccagggtcaccattattagttatggatttgaacaaaaagttgtttataccagattaaagagaaaatattacttggtttactaaaacaaacagtaccaaaattaggaaatagtgagtgtgttctttcgaattgccaatagttttaaatatctcaagatcaaataaaatgatttcttacttggtctacttgtttcgtgtatatttgaaaagtagagcaaaagatgcgataaaagaagaaaaattataaaggagaaaactaaaatcatatacatttctctactcataacttctttatacattgttaactgcttaagttaaaagaaaaacaaaaaaaaagagcggattaaacttaatttccccttaattttccaaagatatgacaaggaaaaaaaaaaacgtaatcaaaggggaaagtaagtcaaaaagtgccctttcgctgctgcaaaatcataggaagcctaaaatcaccaacactgatccgtctcccatctccgggtcgtagcgtaaacccgccccgaccgacccatcgctccggcgtgtacccgtctccgtggtactctaagcgtcgagtcgtaaatcgctcttgtagtcggatccgcaagtgtcgcgtaagctttgtgaatctccatgaaatctcgaccgtccgattccgacgcatctggatgatatactttagctaagctccggtacgccgtcttgatctccgtcaaggacgccgtttcattcactttcagtaattcgtagaggctagaaactctccgacgaacggattccgttacagctggctcggcgttaagcgtctgagctgaagccttaaacgaaggagctccg

SEQ ID NO: 59164 - DNA, 385 bp, Arabidopsis thaliana landsberg
cgggctgggggtgtcctacaaccatctcgacggcagcgtgcccctgcgcggcatattcgccaacactttcgggctcaagatcgcagggaacgcgggactctgcggtggcgtcccggagctcgacctgccccggtgtccagcttgcagggacacacgatggcttctccacatagtggtgcctgtcctaagcatcgctatcttctcggccatactcctcagcatgttccagtggtacagcaaagtggccggacaaacagataaaaaacctgatgacgcaacgccgccggcggatgacggcatcctcggcggcatgatgaactatcagagaatatcgtacgccgggctggacagagctacaaacggcttcgcggacaccaacctgatc

SEQ ID NO: 59165 - DNA, 353 bp, Arabidopsis thaliana landsberg
actttataggggcagtgtaattttataacaaattataccattacccattcattcctagactatgggtatgactttctaagagtacaaggtttaacttacaaaaacttgggcctaccgggaaggatcttagtatataggtggactactggttaatttctaaaataggcagggactctctagaaaatggttctggccgaagcggtatgagaaatttctaaatgctggatcgaagctatgctgccaggattaggtctgcaataaatcgaacatgtattctatatcatctgcacgatcaaatattcctgggatcgtgcatgacgcgccgagggccatggatcctaggactctgatta

SEQ ID NO: 59166 - DNA, 571 bp, Arabidopsis thaliana landsberg
  unsure (1)..(571): unsure at all n locations
ataaaaaaaaaaaaaataagagaaaaaaatgaaaaagaaaagaaaaaaaaaaaaagaaaaaaaagaaaaaaagaaaaagcaaaaaaaagaaaaaacaaaaaaaaaaaaagtaaaaaaaagaaggcgaaacgtaagcaaancnaaaaaaaaaaaaaaaaaaaagaaaaaaaagaaaaaaaaaaaaaaaaaaaaaaaagaaaaaataaataaaaaaaaaaaaaaaaaaaagaaaaaaaagaaaaaaaaaaaaaaaaaaaaaaaaaaaaaaaaaaaaaaaaaaaaaaaaaaaaaagaaaaaaaaaaaaaaaaaaaaaaaaaaaaaaaaaaaaaaaaaaaaaaaaaaaaaaaaaaaaaaaaaaagaaaaaaaaaaagaaaaaaaaaaaaaaaaaaaaagaaaaaagaaaaaaagaaaaaaaaaaaaaaaaaaaaaaaaaaaaaaaaaagaaaaagaaaaaaaaagaaaaaaaaaaaaaaagaaaaaaaaaaaaaaaaaaaaaaaaaaaaaaaaaaagaagaaaaaaaaaaaaaaaagaaaaaaaaaaaaaaaaaagaaaaaaaaaaaaaaaaaaa

SEQ ID NO: 59167 - DNA, 284 bp, Arabidopsis thaliana landsberg
ctgaatcgagaacgcttggtaccaacagtcgaattcaaacaaatgaagagagacggggagtatttcattttcatcttcatcatcaattcatcaaattgtttgatggctccgcttcaaattgggaacacactacactattaatagatttcctttctctcttctcaaattagctcttcttcccttctttcttcaccactaacttaaatattatttttatttctcatgaccaagcttacctccttaagtatcctgtttacaagaaaacttaaatttgccccaaaata

SEQ ID NO: 59168 - DNA, 997 bp, Arabidopsis thaliana landsberg
tatggttggcaaattttttccttcaattccattcaatcatcaccgtttttgaaacaggggttgattcaagaaaacgatcaagagaagtttattcatcggctctgatgaaccctccacctccaaaaccgtcgcaagttattgatataaccgagttgttgcagaaaacgcctaacgtggtttccactggtcttcgattatttcatgatcagtcacagaatcaacaacagtttttttcttctcttcccggagatgttaccggaaagattaaacggcaaagagatgaactagacagattcattcagactcaggtgtcttattaaactcgacctaaaatgtggtttggtttgttttttctttgtgttgataatttgattttgcagggtgaagagttgcggcgtacgttagcggataacagagagagacgctacgtagagctattgtgcgctgcggaggagatagtcggacggaaattgagagaaaaagaagcggagttggagaaagccacgcgccgtcacgctgagctagaagcgcgtgtagctcacatcgtggaagaggcgcgaaactggcagttaagagcggcgacgcgggaagctgaggtgtcctcgttacatgctcatctccaacaagccatagctaaccgcctagatacggcggcgaaacagagtacgttcggagaagacggcggagacgcggaagaagcagaggacgctggatcggtttacgtggatccggagcggatcgaattgatcggaccaagttgtaggatttgccggcggaaatatgcgacggtgatggcattgccgtgtcaacatttgattctttgtaatggatgcgacgtcggagcagtgcgagtctgtccgatttgcctcgccgtgaagacttccggtgtcgaagttttattttgatgatgatgagtatttaattgataggccccgtataggcccatgggtccttccagatctaagcaacaaacaagacaaccagtcagaaaaaggac

SEQ ID NO: 59169 - DNA, 983 bp, Arabidopsis thaliana landsberg
catcacacagaatatcacatatttgaatacttttaattttttgaaatggtataggaaataaaaaatgtaaagcttcttattgaatgataacacacatatgtgatgagaataaaaaagaaaagaatacagaatttatgtgacatatatcttattcacaaccatagtattgatccattgattaacatatcaaggaaagtaaatataaagttaaaggaaaaaaaaagctaaacaaaaaacaaaaaaggaagagacaactaagcgcgtgtagttcacaaaccagaagccgagagtcggttaagaaaccgtcttaagctgttcttggacacgctgaagcaaatttaatcgtgtataaaactatccttcttccaccttctcattatattcatttccatctttctaatttatctttccatttccgagccgttgagaattttttctgagagataatttaacaaatttcttcttcttcttttgtttctgaaccaccaaatctgcctttctcaattagctatgggcgtcgctgttctaaatccccaggattgcttgaaagatccattctctcacatgaaacaacatcgtaatcctagcgcatgtcccaacaggcagaagaagacggtctccaacaaccgtacacgccggagtcctcctcgtagtcaatcctccagatcttcttctcctcctgtagcgccgccgcttcctcctcctcgtgcggctgtctctgctatcgttccaaagggaacccttaagaagagtcttagcaataccgttgccgttagccaggtgagaatccttaagcgcggcgaagaaatccccaaggagacttcagatctggttgtggaaatgtcagatctgggatctactcgtcggattggaccagatccgggtttgattccgagtcacatccgtttatctggccgcaaatcgaaatcagcaccgttttacgccggtcctgtgaccatgacctctccgcctcctagcgatgt

SEQ ID NO: 59170 - DNA, 1267 bp, Arabidopsis thaliana landsberg
ttcattcctgctcatatggttgagttacacttgtgtttggttacttctatatatgggtttattggtggatgacaggagaaggagaagatagttctgcctgaggacaaaacgtggccgtttcttctacggtttccaatcacatcatatgggatgtgtcttggagtaagtagtcaagccatcatgtggaagaccttagcaaccacagaggcagagaagttcttgcacgtgactcaagtgatcaaccacgtgctctggtggatctctctccttctcctcctcgccgtttctatcacttacctcttcaaaaccatcctcttctttgaggcggttcgccgtgagtttcggcatccgatccgagtcaacttcttcttcgctcctcttatatcaatcctcttcttggcacttggaatcccacactctatcatctcacatcttccctctacactttggtacttccttatggctcccatcttgtttcttgagatgaagatttacggacagtggatgtctggtggacaaagacgcctctccaaagtcgccaaccctacaaaccacctttccattgtcggtaactttgcaggagcacttctaggagcatccatggggttgaaagaaggaccaatattcttctttgccatagggttggcttattatttggttttatttgtgactctctatcagagacttcccacgaatgaaaccttacctaaagagcttcaccctgttttcttcctctttgtggctgcaccagccgtcgcttccatggcctggaccaagatctctgcctctttcgatctcggttcgcgtctagcatacttcatctccttgttcttgtacttctctctggtagtttttgttttcattagcacagttctagtgagctagtgctgagtttcttgtggtacaagaaatgtaacagctttacttcttgagattcttgtttcaggtttgtcggattaaccttttccggggattcaagtaagctgtttcttgaactgcaaggatctaatttaccaaaccaaataacatacatgttatctgacataattattcaaaaaatatcagattctcgctagcttggtgggcttacacgtttccaatgacggcagtggccagtgcgacgatcaaatattcagacgaagtcacgggagtggcaacgaagatactatcggttgtgatgtcgggagcagcaactctgacggtgatagctgtgcttgggttgacggtgatgcatgctattgtccaacgtgatctctttccccatgac

SEQ ID NO: 59171 - DNA, 1448 bp, Arabidopsis thaliana landsberg
cacaccaacgtccccaattaattactttttagcatttgggggagacagatagttttgaatttgttgcaatagttttgattgacgcaaaggtttatatatacgaatcataacttagctgtaaccactatataataacaatggaaacagttaacgagtctgttattgttttgttaaaagaaggatttgtgtgttttttctatgttcttttgaccgttagaagtgagaacctcaaagacattcacgtggttcctttaatatgtttaagtttagtttcatcacacgtttcaagctttcaaactatgattaattaatcatcatatatagtggccacttttaattattcacctacgtagcttcattgtaaatttgtaacctatattttagtttcaacattttactccgattaaagatctatcgattgttctgatttgtgcatatatacatatcaattatactaaacacttaaatagcggatatcttaacattctgttaatttaaaaacttataaattgtcatggtttatactagcaagtcaaatcgtttagctatattaaagaactggactagaaaaaggcctttttctcaagtttactctagattttcgttttcctccttcacatttaccctacatatactcgtttatatgatgaattagcaccaataatttactagtgttgtttaaccgtccatttcagccaaaccgtcttcttactctaaatatttatctacaagaaaatatagatcataacaatctcgttaaaacgatgattaccaatcgaacccatttcttgagaattaatacacaacccgattggaaaaagcaaacattaaatcaaagaccatctaattgtaattgtctaccatccataacggtgccactagcaatcccacacttaaacacaaaagtccattgtcaattagtctttatttcaaatacgtttctcacatcattcccacacacacttcttagaattaaatgatgaaacacgaaaatatcatctaccttttttcttttcttgtattcgcgatttgatactcttcgcctaaacttatcaaaaacaatcacaaacttaaaaagttaagacgataacgaactaacgaaccaacgcattttgacaatgatgttcccacttctaaacttagccgcgttaaatccattcactttttgtttttttcccccaaatactaaagagggcaaaatggtcatttaccgataaaatccttttcctctgtagtctcgctctctcgcttcttcactcactcgggtcctttaaaagtatcgtcaaaactctctctctctcttcttctccgctgcgacatcttcctctctcattctccggcgactctgtttattttagggtgtttcgaactctttaatttatttcgggtacgaggtagaagaagacgataggttacatttttgagagtcataaaaaatggaaaagaac

SEQ ID NO: 59172 - DNA, 145 bp, Arabidopsis thaliana landsberg
tattatgggggggtttttgaagatagccgggaaatccccaagaaaagagtgtcttttagtatccgggggagacgattattcgaaggaacggtataataatagtggggtagtggtggtcttgacagtactaaaaatagagcttgtt

SEQ ID NO: 59173 - DNA, 1483 bp, Arabidopsis thaliana landsberg
tttgaatacacctccaatacacaatttatataaatgtattctgataagatattataatttttaaatttttaatcaatgaccataaacgttacgttactaaaaccaacagatttttattttttttaccccttcttataaagctaacagattaaacataaaaagatactacaaaatcctgacgtaaatttccgtatgaaaaatatttcttctactctcctcatttcagtttggttcgatacagttaaactgatcatccactaaaccgaacccatataaatttcactgaaaaattccagttccttctcgcttaaccggaaaccctaatctcatgagtcatgacctcatgaccaaaacgaatattgtctttcagaacaaaaagaagagaaacactaaagtgacattgtcttttggaacaagtgttgttcgtgttgttgttgttgatgatgagacatgagactggtacttcgttgatgacttaacaaagaagttgtctcaacatgtttcaaaagaatcctataaatcttgttcctcactgtaccacaagcctctgtttcagactctgacatcatcatcatcaccatcttttcttcctcatcttcttctcctttaacaatggtgtctaaccaatcacatcactcgctttatctgatacattgtttcccctacttcttcactcctcatctctctccactttgttccattgctgatctcatctaaatacttctcaacacggtttaggtaccaacttcttccttcttccttaagccagtttctgagttcgctcgatgctctgcttaacctctcctttatctctcccaatcttgagttgctttcgcttgcgttaccttcacggttatcactttcttgagcaattagggtaagaccctttctcccggggctctgtgtaggcttgcttgcggataaagaaaccagtttgagatcggtagccaatgctgatttgatccactgagtcgccttttcgcgtctctcatctcctgttttgactatgtttgcgttgcagtgctctgttttttcagttgatagtgattgaatgatgagcctgctcttgcttaactcatcctggaaactcaagaaatcttggattggtggctgttgattttcttgatgttggtttctcctgtctgaaagctcagagtatgacctattatatcatttcagtgagaaacattgcttgagcaagaaggtacaactagttttgtctcaattaaaggaatgtaccttagacatttgagcaatctttcagcagctgaagcctctaacaaagcttgtgaggcagctctaatagccgtatctctctgtctcagaatttcctgccaaaatcgcaaggaagctctctttagaaccaatagaaacccgtttttatgattgatcaaaatctatcagtattattaccattccgagatttacaacttttggaggaagtgaatcccagagaatctctgtctctgtccagcttcgtttc

SEQ ID NO: 59174 - DNA, 408 bp, Arabidopsis thaliana landsberg
  unsure (1)..(408): unsure at all n locations
cccctcnccccccncccccctttttcccccccccctttttttcccccccccccataccnncccccccccccccccttttccccccccccccccaaaaaccctttttgttcctttgttattccccccacccagcggcgcgcccccccaacctcaaacacccccccccccccccccttctcccccccccctccccccccccccccccttccctctccccttgtgcccccctctcccccccccccccccccccctctcctttctctccctccccccccccccctttttctcccctcttcctcccccccccccccctccccccccccctctcccccccccccgtccccccccccccctcccctcctttcccccccccctcccccttcttccccccccccccccccccccccc

SEQ ID NO: 59175 - DNA, 300 bp, Arabidopsis thaliana landsberg
  unsure (1)..(300): unsure at all n locations
ttgctttcagacaaaacaaaagttgcagtgaaacgccttgcggattacttcagtcctggaggaggagctgctttccaaagagagattcanctcataagcgttgcggttcataaaaatctcttacgccttattggcttctgcacaacttcctctgagagaatccttgtttatccatacatggaaaatcttagtgttgcatatcgactaagaggtatatatacttaggtgctctatcacttaaccaaataatagattctataatgtgtgtgtacatatgtgacattgtagatttgaaagcgc

SEQ ID NO: 59176 - DNA, 1077 bp, Arabidopsis thaliana landsberg
gataacatcactatacaatctcactctatccccaaatcttcttcttctcccaaaaaatttcaaaccctagcgtctcgatttctctcctctgctctccaattccatcttcccatggcgatttcggctccagccgcttgttcttcctcctctagaattctctgttcctactcctctccttctccttctctctgtcccgccatttccacctctggtaaactcaaaaccctaactctctcttcctccttcctcccttcttactcattaaccaccacctccgcttctcaatccactcgtcgctccttcaccgtccgcgccgctcgtggaaagttcgagaggaagaagcctcatgtcaacatcggaaccatcggtcatgttgaccatgggaagactactttaaccgcagctctcaccatggctctcgcttcaattggttccagcgtcgctaaaaagtacgacgagattgacgctgcgccggaggagagagctcgtggtatcacaatcaacactgctactgtggagtacgagactgagaatcgtcactacgctcacgttgattgtcctggtcacgctgattacgttaagaatatgattaccggagctgcacagatggacggagctatcctcgttgtttccggcgccgatggtcctatgcctcagactaaagagcatatccttttggctaagcaggttggtgttcctgatatggttgtgtttcttaacaaagaggatcaagtagatgatgcagagttgctagagctcgttgagcttgaggttcgtgagcttctctcgtcttatgaatttaacggtgatgatattccgattatctctggttctgctcttttagctgttgagactcttactgagaatcctaaggttaagagaggtgataacaaatgggtagataagatttatgaacttatggatgctgttgatgattatatccctatccctcagagacaaactgaattgccattcttgttagctgttgaggatgtgttctctatcactgaacgtggtactgtggctacagggcgtgttgagagaggtacggttaaggtaggagagactgtagagtta

SEQ ID NO: 59177 - DNA, 397 bp, Arabidopsis thaliana landsberg
caggggagaaacacttcacctaacaaaagtatctctcgacagcttccctaaaccctttttacgcctctaattctttggattattatccacgtaatccacttcaaactatcaaattattacatcctctaaaatccatctcacaatagctttacaataaagtttcgttgaaaaaagctaacacgaaattgccaaagtgactagaagctttgaatttaacggacacgattaaattcaatattttgacgttgagagaaaactcaaattattcctaaacgcaagtttcaaatcgctaaaaccaacgtttgaacacgcaacgattactctctcagccgcgtgacttttgttccaagtagcgtctgcgtttggcacagtccttcacttacaaagcttccctcct

SEQ ID NO: 59178 - DNA, 188 bp, Arabidopsis thaliana landsberg
aggggggggaggtttaaggcgaatagaggtcacaccccaaaaccctagaacatctaaaaataccaaacgaaacaaaacgataggagacgggacaataacctaagaccccggcccatataatggccatgggcacagatgggcattcggaaccgaaggaggtccaagctgataccaaacacaaacgctac

SEQ ID NO: 59179 - DNA, 166 bp, Arabidopsis thaliana landsberg
tgagggggggtttttcaataaggcgggacttgcccacttaagttggaataatgggggcagacagcggcacgaaaggatcctaaaaacgaatgctaaaagatgatagtgatttctggaacaagtatatctatgagtataaggatttctaatggaagttaagcgaatg

SEQ ID NO: 59180 - DNA, 1117 bp, Arabidopsis thaliana landsberg
acaacaacagttcataatcaaatgtctatccttgcctccatcaaaattatcacagcaatgttcaaatgcagcataaatttcatggaagaaacaagcatatagtggcaattaaaacgatttcttgatactcaaatttagccacagatctcaattccacacgattctaactattgagtaaatgtcagcttaaacaagcaacccagcttatcacaactagtttctatgtttccttcacattaatctgcatcgatagatccaattttcaagctagtcatttccaaatcgaattaagcattgttcttcatagcaaaaatcctttaaaagaccgattacttaaacaaacaatgagccatagagtacacacacgtttcataaaatccagtcaaacagataagaacgatctcaacaatttcaatttcccagtgattagccatgcttgaagaacaaatacgcagaaaccaaatacaagcggaaacaacaaagaggaatcgatcatctcaatcgaagaccaaaaaacattcgctagagagatcgattagactaaaatccaaactactattagctccgatcgatcaaaacgcagagcaacaagctacgattcagagaatcggtaatcaaacaggaaattgtgagcagacgagaggtgatgatgatacctggctcaacaaataggtttatgagtttgtgaaggagctctaatggcggtaagagaagctcaaggagagaagagaacgctccagagagagagagtgttgaaatatgtgtaggtgggggagagagcggagaggagcgggggaagcgactgactgaaaaaggtactgtttgaaattcggatttttttggatataacaaaaaaaaaaaatcggaatttaaaaaatctttctttgctttttttggaaaaatcttcaatttctttggtaaaaaattgtaagaatgatttctataatttggtccaagttactatacaaggaatagtgcaactgtcttttattactacacatatgttggagctgtcaattaacaaaaaaaagtttatatgttatggtaatttgtttgttttttaagaactacactacttcgatagatagacaaattattggtcgagaaatttccgacc

SEQ ID NO: 59181 - DNA, 161 bp, Arabidopsis thaliana landsberg
gtgtggcgcttggaggcatgtgaccccactattgcaagctacacttggaattagacgatgatctgtcaaggttatttcatcagcttgaaaagctctatccaagggtgcccatgattgcacaaaacataaacatcatctttccaggctagtgtggtctagga

SEQ ID NO: 59182 - DNA, 1336 bp, Arabidopsis thaliana landsberg
cattattgtttttttgtttgcacagacgtctaaagaagcttgaaaccattattagagtatttgacaatggaaggagaatccaaaggattaatcgttgggatctcactaggtttggtgattggtgttgtcttagctatctcagctctgttctgctttaggtatcatagaaaaaagtctcagattgtgaatagtggatcacgaagaagtgcaaccattcccatcagagagaatggagctgattcgtgtaatataatgtcggattcgaccattggtccggattcacctgtgaaatcttctaagaatgggaggtctgtttggcttgaagggtttagtaagaggagtaatgtcatctctgcttctggcattttggaatattcttacaggtttgtctccttctctgacaaatcttagtttcctgattaggttattgttttattgtcttaactatactcaggactagacttctcttgttatagtagttactttggttattatttcaaagtttgaaagttcattaaaaaggggaatgctgttgtggatatgagaaggtcttgcattcttggggttatattccgtttttgacatatggtctttggtgattgcttcagggatttgcagaaagcgacgtgtaatttcacgactttgataggccaaggagcatttggacctgtctacaaagctcaaatgtctactggtgagatcgtggctgtgaaagttctagccactgattctaaacagggcgaaaaagagtttcagacagaggtaagatatatctatggattcatttccgaagaacaagttagtgtgtaaaacatgtagcattaggcagacttttaagcattacaataggctttctgaaatctctaatactcaatttattagttgtgtcatctataagacaggctacatgaatgaacaatctatatatcttactctcttagtatctgcttagtttcttgataaactcatccactcgcctcaatcttttcaggttatgttattgggaaggttgcatcaccgtaacctagtgaacttgattggatactgtgcagagaaaggccaacacatgcttatatatgtttacatgagtaaaggaagcttagcttctcatttatacagtaagtaactacctggttatacataccatattaatctgcttgtcactaaatgaactgttaatgcaatgttgagctattcggtatctttgtagaacatttattgagttgatggtttagacttcactaaatgatgagccttggtaaagatttgagatgcactaaaatggtacttttgatacatgcgaaaaacatgaaccgctgagctgggatttgagagt

SEQ ID NO: 59183 - DNA, 1076 bp, Arabidopsis thaliana landsberg
aacgaaagatgattgagaatctaggcgccagtgtcactatcagaagaagaaaaaaaacacttaaaaacaataatgataaaaaaaaagtgtcatattctcctcaaaatccaaaaaacctgacataaaaaatctcgtgtactatttaatcactcactcacaagaaaaatcaaatttaaaatcaagtaaaaaaatcaaaattaaaaagaaaatctcacgtgttttttttttgttttttacttagcaaaaaaaattactacagaaaataaaaaaaattaacggtgaaaacaaaagttttacacagccgccgaacgccgtcaccgctaccgccgtcggcagaaaatcccaccgttaaaatgtttttgtgtgtgtctaatcttgctgatcctcctcatcaccacctccaagtgatccactagcttgagagtcgccggaaacttgccgtccgtactggttcaagccggagagaatattatgatgatgttgttgttgttgttgttgatgatgatgatgtctctgtgtattatgatgatcaccaccaccgtcacttcttcctccttcattattattactatcttcattaatctcatgattactagttgttgctagctgttgttgtccagtaagaaatgccattggcgctgcgaaattcataaaatgtaaaccgctagaaaccgcgccgcttggaacgcccgaaacgccacttctatataacgctgccgctgccgtgttaatggaaggaaacgtccaaacaggctctccaccgccgccaccagtaccaatagaagctgtcataagaccacctgtttggttgttattaccaccaccaccacctgcagccgcagccgccgcaaccatgccagaaatttcccggtatttgttgcgcggcggctgcggtggctgtagatccactgttgctagattgaagtgtatatcctccgatttgatcatgttggtgttgttgttgttgttgatgcaaatccgacgtcgtttggattcttcttttcttctccgagtttaacttttcagaattttgatctccttcttgctttgttggattatgaaagctcaaaaaccga

SEQ ID NO: 59184 - DNA, 143 bp, Arabidopsis thaliana landsberg
aaggggggggtttgataacggattggcataaaccccgccgacctgacgtgaacgacaaaattcgccggtggaatgaaaggaggagaaacccgacaggacaagaaagataccagtggtgatgacgtgaaagatgcttagagagc

SEQ ID NO: 59185 - DNA, 538 bp, Arabidopsis thaliana landsberg
catcgactatccatcgatcgggaccggcactattacagcgttccctaccagctggtggggcaacgagtcgatgtccggctcaccgagcacaccgtcgaggtgttcgcccgcggtcagcgggtggccagccaccggcgcagccatctcaaaggccggcacactaccgaccccgcgcacatgcccgccagccatcgcgcgcatctggcctggaccccctcgcggttgatccgctgggccgaacgcatcggaccggccaccggcgagctggtggcgctcatcctggacagccggccacatcccgagcagggataccgatcatgtctgggcatcttgcggctggcccgccgctacaacgaccagcgcctcgaagcggcgtgccggcgggcgttggtcatcggcgcccgcagctaccgcagtgtcgactcgatcctttcccacggcctggatcgcgcgcccctaccgggtgccggccctagcccagcgcaaggcccgcgcgcgcacgaacacctacgcggcgccagctactaccaataaccca

SEQ ID NO: 59186 - DNA, 657 bp, Arabidopsis thaliana landsberg
tttcaattcgttatgagcatctagaggacagcaggggctttttggcgtgtcctctgtagtccttctagcatctagaggacagcagtcgttttttgactgtcctctgtaggccctttagcatctagaggacaacagacccttttaactgtcctctgtagtcctttagcatctaaaggacaacagtcgcttttgactgtcctctgtagtctctttagcatctagaggacaatcctgttgtgtagtgtgtgtgagaaggtgtggtagtgcagcctctagggctataaatatgggtctccaacccttagatgggtatggcattgtgtagtgtttgaggaaataaacagaaaattgccccaattcatagtgtcatcctcttgatgagagttagagtccctctacttacaatggatagcattgttttgtcttggatccttggtaccgtctccatcgagctgcaggagcgccatggcacggcacgtcaggcttggctcgctcttgaaaaccatttcattagaaatcacgagacgcgtgctctccacctcaacgccaccttccgcaacttcgtccagggcgatctcactgttggtgagtattgtcggaagatgaaaggctttgctgatgctctctctgacctcgacgcccccgtctccgatcgca

SEQ ID NO: 59187 - DNA, 492 bp, Arabidopsis thaliana landsberg
  unsure (1)..(492): unsure at all n locations
gcacgggggttactgtttagaccgtctaaatagtgtttagacagaataaagatagttcagacaacatgacaaagccataatatatacttattcataaaaatacatgttatctaagttctcggtaaaacaataagaaaaggaatagtctgctttcattgtaatggatttttcttgcacctaaggatagcaaatgaatgtcacgctgtatttgacagagcagctaattattggacaaccaccatacatatgattggaaattaaaagcttttgaaagaactcagattgaaatcatcaccaaattaatagatagccgaaggcagatacttagataaccgagctgtgatgaaatctctaaatctaaaactctctaacatgtaaaagtctttgacaaaatcataaacattatagtgcattatagatntacctaggtaataaaaaggagccttatggaaagggtaacagtcctttttaggaacaaacctgtggagagca

SEQ ID NO: 59188 - DNA, 581 bp, Arabidopsis thaliana landsberg
  unsure (1)..(581): unsure at all n locations
taaagaaaaatgaattttcgcataacaagctcaaaacattacaccgatatgtatttgatgataatttgataacaacatatggtattcttcgaaattgacgtgtctttatttctgatttctgttgaagtgatcccaattcaaaaaatttcaatgaaatccatttaaaagactatataaacataaatttaactatgtaaataaaatttggtaacatacaaaataattctaattatgtagtaatatttgataatataaaatatactgcaacttgttagtaaaagaataataaaaatgtgtaaatgggattgagagttttgaagagtgtagaaatgggtaaaacgagaaaaagcctttgggggttgaatttttggctaacttcaccatctgacactctccaactcctcctctctcttcagactaacccaaattcaattcatctctcctctctctctctttctcgagtcgcgtatcttcttctcttttccttgtagacatctccacgattcttcagctgaaagcttctcacttctctctagaagctttgcttcagaactagcgacnaagaagaagagaagaatctg

SEQ ID NO: 59189 - DNA, 258 bp, Arabidopsis thaliana landsberg
  unsure (1)..(258): unsure at all n locations
cccacacgtcttttactgcctaaaccgagcgtcaaactagtattcctcgatcccaggcgagcctcgtccaagttccaatcaagctagtccgacccagaattccctctgcccacgacgacggcgagcagcgaggacggaccgaggtgctcctgatgatctaacnnnnnnnnnnnnnnnnngatgagccgatgagcataacaagcgtaggagggtgttgaaacacggacaagaaggacaaggacagacctatgggtggct

SEQ ID NO: 59190 - DNA, 303 bp, Arabidopsis thaliana landsberg
gataaggggggggattttaagagtaaataaggctaccacagaaggggaataacgattagcgacaccgaagaagattgcaccggctggagagcacccatcagaagcacagaacattaccatagcgggacaggcacggaacctggagatcggaccaatgggtgggtgggttggcccatcttgttgaagatcaacggagtcatcgcggataacatccataacggcagctacagacaaagccgacattctgattgtgactcacctatcatcataatacacaaagaaagatgcgcaaaaatggataaa

SEQ ID NO: 59191 - DNA, 417 bp, Arabidopsis thaliana landsberg
tagattgtaaaagagattatatgatattaattgagtttatgttacttatattgtaagcagaagagtttatgtcaaagatgcaagacgtcttaggacaggcgatatcatcaaagtatataggagtgatattaaatttatttgtacaatgtagcgagtctttttttttttttttttttttttctctttttttttttttactcctcgggcaaatggagggggacttctatggttctcttaagggcgggcgccatttggttttcagatcccgaccaatttaactaacctggggtctaataataataattttaatacaagccttcatgggtctaacgaacaaaaaaacccgcccgcccccggggactaaaagtatgcccagatctgctcggggctattgggtcccccgatccctaaaccccc

SEQ ID NO: 59192 - DNA, 270 bp, Arabidopsis thaliana landsberg
ggctgagaagctggatgagttacatcacacataggcatggaaacccgacaatcttcatcactgaacagggcataccacacacacatcagtgaaactctctatactggagcgagcgttactgactgtcatgatggttgctactgcaggactggacgacccaagcaacatcctgatcacgcaaaatgacactgcctccgatgcatcagcggctcaagtccgatcaagatgacttaaggagccgacaagctgcgataaacgaggactgatgta

SEQ ID NO: 59193 - DNA, 270 bp, Arabidopsis thaliana landsberg
cattgtgggggggaaattgatacgcgcttggatatgtacgagagccggtgtgcgattggtaccctgggggcaccatctttcggaggaacgggacctgactccagtagttctggtggtgttgactgtacatgactagatctggcttgcacggccactgataaggccctactatctatcggccatgctaggattggacacacaccagctttggccggcaccactgcaattgctgtctagatccgacttaatggaaaagcattccaacgacta

SEQ ID NO: 59194 - DNA, 1457 bp, Arabidopsis thaliana landsberg
  unsure (1)..(1457): unsure at all n locations
ttaattattgagtgtgcgacaaactctttcgaaaacctgaccattactggccagttcttcaactaatggtcgtgagcgcggggcggtgtatagaacttgatcggagtccaaaactccttttcactcttccaaattacgatagtatgcgttgtcgaagtcctgaaaaaatccataaagacgaactttttcggtgtcgcaaacatcaggttaattgtcgagttattgaccgttgattncncgnncattcagtggaaaatttttgaacagtgaatccctcccaccgtgtgtgttcgtgtaatttttaatgtaattgataatcaataatcataatgttttttttttcattgttaaaaatttgaatatataattatttttgttgataatattttgtttatgttttgctcattttttgctatattttttactttttcaaactttatgataattctaacgtattaatatagtttagcaactaaaagaagtagtcactaatcattagtgatgataattcattaaaatagttttaagcaaaaatattagattttccaaatttgaaaagagtgtcttttagctgttctaattgttgtcaaaagtagtcggtgaagtcgaacttggttggatcaattaatctctagggcttgtgtgccccttaaagttttttaagttaagccactactagtaaaatggtaacaccataacttgattgacgatttattgatgtattttggatttaagtttaaaatgcttatgccactgtggctctgtctctgtgaatcattatagcctagttttggattcacgcagccaaataggcatcagtatgccactataatctctggataaactacggttacacatgacaaattctcatttttcaaaagcgaaaactaatattgtttccaaaaagggcctgttgccaaagggcctagcagctacaaaagattgttataaggaaaatacaacatgcccaaaagaaagccattgctttccttactttattatggtatgggcctcggtttgggccttatatgttatatcccaagaaagatacaaaaacgttgaaactcggaagttgatattatatgaattagaaactatattttgtgttagttctttttgacaatacgtttgataattttgtaagtaaaatgtaattttgttatatttctcagcacaaagattaattatgtctacttacattcttatgaaataatagatgattgacattttacacaaatataaagtcatgactcatgatccaacttactatacaaagtattgtcattgcccattgggactaatcatgtatattatttcctttttgccactccatatctacaatttagttttgcgatatatagcaaactaaaacccaaaacccgaatttattacattttagctgaaccagcttcatgagacccatcccattcccaaatcccaatacaaatgagtgcaaa

SEQ ID NO: 59195 - DNA, 704 bp, Arabidopsis thaliana landsberg
cggtactcattctcctgttgccttactaattcctgatcaagcccctgcctccatatgtcgagttgagcattatgttccatatcccaggcgcgattgcgcgccacttttccctccagctcgcgcacctcccaatcgatgcgggcggctagttcccgcccacggtagggagacctctcgttctccaggttacgttccatttcctggatccgttgtagatcctccgccaattctatatttccggcgtgtaaggactcagccctttctattcgggagtagaacgaggctatggggggagggggagaaaccgggtccggagagccaggttcggcaggaaagggcacgggatgtgtaagttgcggaggaaagggggcgagggaaacttcccttgccggatcatttgcagcagactcagtccagccgttccccccactaccgctcgcccctgtagcagggtttacgacccaacttgcctcaccaacatcggaatctgatccgatgggcagcaattccccgaaaccataaaacaagaacacccctgccatgaagaagctataaacatcttcaaaagcaaatgagaaaaggatatttatatggattcgggctgcccaaagaaggagaaaggcttttaaacataacaaaaaatagaaagtccaaatgatcggttttttgacgtagcgcgagaaggtacgaaaggtgaaagtcat

SEQ ID NO: 59196 - DNA, 210 bp, Arabidopsis thaliana landsberg
  unsure (1)..(210): unsure at all n locations
caaccgnntgcccggatatgaaaaacacagggaaaccccccaagtgaagagacgaaatatggttccacgagagggaggcaaatgagagcacgagaaacagaagccgcgcgatctgatgctatggcaaataacggcatacaaaaggagcacagagccacggaaggcgcccctaagaccaacagagagtagaagaagggaaacaccagaaca

SEQ ID NO: 59197 - DNA, 453 bp, Arabidopsis thaliana landsberg
  unsure (1)..(453): unsure at all n locations
ttttttcttttaaagtcgaggattttggttttttgattaacgtccaaaaataatgataaaggtgatggctctatacagtagatggctttaatgtctatatagcaattgaacccaaccaaagcccaataatatctctaaaccaatatttacggacccaacgtcttcatgctggtaaaaaaaatccggatcactattttaacagatcattaaaaccataaaagtacaagatgatccaaattaatcaaactgcaaatggctatgaacttcaaaattaggggtgaattacgaattttttggtttaatttcagttcagttttttttaatggtttatcagttctataaaaatgagaccatttcaaaattataagtatctcgatttggntttgttcgggttttttcaggttattacatattcttacaaaaaaaaaaattgcagcataataaaagtaaacg

SEQ ID NO: 59198 - DNA, 1447 bp, Arabidopsis thaliana landsberg
tgtattatttatttctaagtatacataaatattagaaaataacatgattatgatgttgtgaccagagaaaaaaaaaaggttcaagatcacgagtttgaataccaatgacaaaacaataactctttaacatgttttggtcccgagtgtgaattaagaatattgcagcttatgtttttggttaaaagagaaaagaagaaaggtgaatcaagaatattgcggctgtttgtttctcatgtgcaacatgtgtggtacgagattgatgattcttgttacgttagccaacatcgcgtgatgacaactattctaagacgaggtttcacatggccgaaacattaaagcttcgcttaatcatatcaaactccagaatttagtatacttgatcattatttagtatgcaattatgcatgtagttcaaactaatcattggattggatgtattagtctagatttcaaacgtaatttttttccaaggttatgctgatttatatgtttgtgacttatccgaatgtttttaacaaccaatatacaaatattcgaaatttgagaatcatcatatcctattatcctcactaccagttaaaaaatgtcatttgtggaattatatggaaacacaataggtgaaaaaagaagaagttcattacgtgctttgaattttatagttgaatttctatttcagttttataatccagttgtacttgtatgatgcgaatctaatctagtggttcggactatccaagtcagtttcatgaattaaattatgggggaaaaataaaactatttattacaaggataagggcaaagtggccctaagttgattatatatctcttttgcatggtaaaagattatttccacatatgaaaatatgcaaaaatccaaaaaaagattatgtctatatattttgctgtcaacaagaaaattccataagtgtataatgaaatttaggataatacatagaataccactctttttaccagacggcgacatttttcactgagttaaaacttataagttttttactcgttccaacagtagtcaattactcgataagtgttacaagcctagctatatataaggtcaaaaaagggagtcaaaaaacgtagtaacttaatagtagctcgttgataatatagaagattccacccaaaagagagcgattccaaaagatatggtgtcattttagttagatttaaatttgaactaattagatagaaaagattaaagattttaatgggaaatacgaagtgaatagagcatgcatgagtaaaagttagaacaaatagatgatatattcttgggtagtaacgtgttatttgacagaaaatcacatgcatatataaaatcgtgtgaacacttatactgtatgtttatcatgcgcatggactattggactccataaatagcaaggttatggttaaatgtagtaaaatggcaaaaaaaaaacataat

SEQ ID NO: 59199 - DNA, 931 bp, Arabidopsis thaliana landsberg
tggccgatatacaagatgcaataaaaactcacaagtcttggaagtgaacagagaaataaggaaaacatctatatgaccataaactaagtaactaactatataagtctatggttaatgcaaagcttagggagtaaaaacagctgatacaggaaagcatttctaaggtattaaacctcaattctaacaactttctttggttgatacatatttagcttaacaagccctatgaagacaaatgtgaggtaaacttacaggtctgcaagaggaaccatcccggatccatggtaatcatcgatttcgaaagaccgtgaagcaattaaactcttagcagcaagatactctttgattccaaacgaatcagaatcaacattctgaggcagtgaagaggtaagcggcaaaatgttttctttccaatcctcatatataagaacatgatcttccttcaccaactgcctacaaaaaattcaaactgatgagtagtgaattcaactacaatgcaatggtaaatcaaaatttggaaaggaaaccttatgaagctcagttccagataagagagaatctaagtcttcaagagaccaaacaagaggcaaatcttcttgaataggaagaatctgaagataaccagcccaaggagattcttcacctaagcttctctcgtacatgagagccacagagagacctaaacttccatctaaatcagcagattcgatcatctcacgagctccactggttttgatagtgagacaagcagtttttgagatattggcaacaacatctccttccttcaaatcgcagaatgctctcacagagacaccatcgttttcgtcgtcgacgaggttgagagcttcgctgcaatcaacgccgttagcttgcatccatctcttgaatgctcttaatctcctactaacaatgcgagagacgagaaataaac

SEQ ID NO: 59200 - DNA, 995 bp, Arabidopsis thaliana landsberg
tatattgttcttatttcttggatatatgttcataaaaattctctatcacttctctacttttcttgcccaaccatatgtacaagtgttgcgaccatctccacaaacctaattaaaactggtccttctgttataaaaagttgaattacattttgatcatcaaaattaaaatattgaaatagaattttcaactttcctcgaaaagatcatagagtaatccttaatttagataattctttttcaccttaagactcgttcttccttactctttctaaccattccaaaacacttttacccacaaaattttctttcaatttaagaaggtaaatgaaaaaagaaagcaaaagtttaaatgattaaaaggttaaaacacaatcccaaattttctaccacttttttctcatttttctgaattctttcattaagcaaatccaatgttttcgactctctaaattcaatgcacgaggtaacatttcgatgcatggagttaaatgtcagcgttaaagagccgtagtaactcgttagccggactaagtctagacgctgtgcttggcggcgagatccttatagaaccgccatctctaccgtcgccaccacctttaccatcaaaatctcttgtaccgcaccgtccaacaagccaaaccctttttgatatcatacgtgaggaatacgccaaagaagggcacaaagatcggaccacgtggcagattttccgtgagaaactccgtcttaaacgaaccggttctgcttggacctcgtctcttcatatccctgcttcggatatccttatccctaatcccaaacacattggaacagcgttccggtctcactccgccggtttaaacatccgagatctggttcacgctataccgatgtcagatccacctggttcttcaggacgcgctatgttcacgcgcggatcttcaatgcgggtcgggtcgagtaaaaacccggacgattcgcctgacatcagcgttcttgaagatgggccaccgtct

SEQ ID NO: 59201 - DNA, 1803 bp, Arabidopsis thaliana landsberg
  unsure (1)..(1803): unsure at all n locations
gaagtgtgcacaggaagtgcgagtaaccttcgaatgaggaagatgaccaaatattgtgctgcttggtaacacgtctaattctatccttttggttagtgtttggtaaacctttaatttcccttaagttaaaagccttgattattttcaccatcttttctattccatgactggttgagtttagtaaaaacagtagtatatattgattcaaatcaaaaaaaatatgtctgcttatactaattgaactattttcaaatagaaagagacgagataacattgatctcatctcatttgttatccatatgaatttcgttcactttaagtgatataggtatctctcatactcatactcgctatcaatgtcaatttatacgtacaatgatccttggtacatttttacccaagacttgatctcatataagataataagatataacccatcagatatatagatcttacaacgcaagctcttctccaacgccagattacctctttgcgagctttcttgatcagatgaccttctacttacagtttgaatttgtcttgatttgattttatatgttctgacttagcgtcaagattattcaaataaaagggtcaagaagttgtacaatgtatatcatcagtatatgtaattggtcaaaacaaggtttgaaaactctctcacggaagcaggagaatacatccgccgacaatgtcagatgaaaaacaaatgaattgctctcaaatttttttagtaaaaatattctttgacagctttattatatcaaacttaactaactatccaaagttgacattataatccctatgaatattgtaatgtctgattaggatttcaagagattctattaaataaacatataaatagaaagatcttcttcttctttttttcaaaatataatcatattaaaagaagaaaccgagaatgaattgaaccacaaatcataaacataacatcaagttgaatatatacttccaaactttgtaaactagagatagaactccttgaaaaaataaattcgttaaaccaagaaacatgccgaagctgaaatccaacagaaaacatagtgcccaatcttaaacaaatatgtttcaccgacaagcttatattaacataaaagactaaaacatgaggagcacttgtagttaaatacatccttggtattttaatgtgaagatttataatccccctttgtgcctcgcacgtaagttgttagaggtctattcaaatgattatatttttccttcgtctttatatcgaccctccaactccaacatctacaaaccaaacataactaacgagaaacttcaaaagaatacaaagaaaaattagaaaagagggacggaggatacaaatatgtcctctccttacggcaaagtcgacgagcgtgaacatgtaaggctcgaagctcgtcgtaagacgagaaagaacatcgcaatcatcgctgtatcactagtcattcttgccggaatcgtgatcggagctgtgtttggaaccatggctcacaagaagtcaccagagacagtggagactaataacaacggagactcaatctccgtttccgttaaagccgtttgcgacgttacgttgcataaagaaaaatgcttcgaaaccctcggatcagctccaaacgcaagcagtctcaatccagaagagctcttcagatacgcagtcaaaatcacaatcgccgaagtttcaaaagctatcaacgctttctcttcatccttaggcgatgaaaagaacaacatcaccatgaacgctngcgctgagcttcttgacctaacgatagataacctcaacacacg

SEQ ID NO: 59202 - DNA, 1251 bp, Arabidopsis thaliana landsberg
aaatggaatgtgtgcaaccattttttgtccaccctcgctccagttaactgtgcctggaaaccgtttttctgaaacccgtgaaggtcctaacacagaccaacagattcctggttcgttcattagtcctaagtaatcatgtgctcgtctccaaacccttgcatcagatatccgagactttactacctacacatgtacataattgtggaactcagattccagatgtttagtaatcaactaatcattggtaagtgcattaatagattcaattatttcctgtgtacctttcccaaggcgacgcgggctcttggtaataattctcggtgatatgttgcgagctttgcgatagctgtcactacaaaacacagaagtcttgactgtgttgttcttcttgaaccattcccagattcttgcctcaaacctaggcggcttttttggtcgttggaaacaaatagggaaaacattgtaattaccatttatgttttctgtccaagaaagcagattgatgatacacaaacaaaagtttgtaataccttgatgagagattctcatatacaagcaactctaaactttcaaaaagctctcgagcagcttccttgtgagattctcccccaccaccatactctccaattgcccaacatagctgtaaggctaactctctctacggaagaaaatgcttagaggagattatcttacaaagcatccgtctaaatattagaaactgacctttgcaacatcatcgtaagcttccccaagtcgggcagtaataggcttctgtattatttaagaagttgagaatgcatatcttgcaaattactcgagaaaataagcggtaatcataagactatgtatctaataatgcactgtgaaatcttcttatctaaattctaaagctattactcgcacaaaaaaataaaataaaataggcagacattactttcaacagggcaatgaaatttggagacctctgaaatgcagctagtacaaattccagtagcctcctacggatctgtgtacgcaaacaatatctctgtaagataacgtccaatatggcagtgatacaggtctatacactaaaacgtcaaaatagcattggcatttctgaagaaatattaatggacgctacactcatatctagaggagagaaatcaataaacattgtcaattagcctgttctaatgattttctaaggaaagtcttcagaaaacaatacagaagatgcgtgtacctcatgagaaaaaatcctattccgga

SEQ ID NO: 59203 - DNA, 1666 bp, Arabidopsis thaliana landsberg
tgggacttgagcaaactaaactttccccgatttattttggattctcgtttgcttcctatgttttcttccgattcattgaagtgtttgaagggaacaccaccgtcaaatcaatctctgctcatatcagccgttgtgcaggaatactcagtcttggtttcttcgtcggattgatttctcaagagtttgctataggtatcgtcgtctctacccttgtgttactcttgctctacctttgcaagagttggtgcaagagttggttgaccaatccaactgcccaagacttggccgacgaagttcagtcgcttctccaattcgaagatatccctcattccagcggtggtgaaatcgtatagaatggagatatggcgtccaaggttccggcgtaaatacaataccccttcttcggttaaatagtttttgttgggtcaaaacatttaactcctttttttgctcttatgttggattaaggccatattatagtctacgggccggtgaaaatgaaagcccaaatagaaccattaaacaaacagtgattgttactttgcttgtttttttctaacaattttttatccgaaaacccatcattccaaaccgaacaatcctagaccgaaatcatcaaaccaaatccgaagaactaaaatactgcaagactgagtcatataaggttacaacttacaaactgaaactaaagaagaagattaaacagagttgcttaataatagacaaagccattcctctccgtctagtgatttcaattgtttggccagattgcgatctcagagtaaccatcttcgctagcacaagccctgaacattccggtagtgttaaacggcattgtgacttcaccattggcagagacagcaacgagtccacagcttcctctgggaacagattggtcaacaacataagccgctgcctcagtcaaagacaagcctttatattccatgagtgcagccacgtctctagccacggttccacggatgatatcctctcctttacctgtggctgagatggcacaaaggtggttagcgtaagttcctgcgccaatgactggcgtatccccaattctgccaaccattttgttgacataaccgcccgttgatgtagccgaagctagatttccagcactgtccacagctacacatccgaccgttcctatttggctgtcaccgcaattgtccggtactttcggactagggactgtgtaatccaactgtaatcaaggaatttaaagatcgttaagaagcacaaggcaaggggaggattatatcatcatttgatgaacacaaacctcgagaaaaaacttagtacctggactcgattgaattctttggcctgctttagccttgcaatgttttcaggagttatgaaatggctagaatataccgtctcaacaccctataaaaccggaatccatggaaagatctacaatgagcagagtttaataatcaatacaagtcacccaaagaagagagtagaatacactgacatgtgctcttgcaaaagcttcagcaacatcgaatgcaagatatatatgaggagttttttccatgacgaggcgagctaaaaaaatgggattaacaacagtggtcaagccggaaacagcttcacatattttggtttttacccgccataatgggaaactttccatttcaaacagtgccct

SEQ ID NO: 59204 - DNA, 594 bp, Arabidopsis thaliana landsberg
gcgcacaaagaaaaaaaaaaaaaaaactcacaacaaattttgtttatgaaaatcgacgtgtcttggtatcatatctaaacaaggttgaattatactctattttatttcacctcaaatgcctcataaaaggaaaatgaaaactcagaaaagaataaagaaaaaaattagcttatatacttaaatctacgaaaaatctcatactcatcatttggttgcttctcttcttatttcttctcaagattatttagacgtagtataaataattcataagaagatatcacaacacggtccacaccagtgtttcaactttcaagacgtgacaatttgttacagattgggccttcatcatgtttgggccttctccccaatccattaaggctccatgatagataacacgtaaaactaatctttaaagaatacatacatcattgacaacttagacacgtacgcatacataaacccaaataactaatgacacaacaacgacaacttattatggtatgattttgggtctatttcttttttaagaccccaaatcttctgataaatttctctaatttgcctttcttggcctttaatcttcttgcattaaaa

SEQ ID NO: 59205 - DNA, 248 bp, Arabidopsis thaliana landsberg
  unsure (1)..(248): unsure at all n locations
tgaacannaggggggttgttaatgtaccttgaatactaccatggaagattaaaaatttggctttcagagaaggaggctcaatagtaaccttgaaagtaatgcccttatatttctatagaagacaatatccggtgagtagatttagtatacttttttttttagatccgagctgctcttcattgtcggtaagaaggcttttcaaggaagtccatgagtgagccgatgcttgactactaaacttgtggtgt

SEQ ID NO: 59206 - DNA, 190 bp, Arabidopsis thaliana landsberg
ttctgtaacacatcatcagtaacactaaaccaggcacttctttgtctctcttttgggttttggtttggtttatgaagaggtagaggatcaggctatcatcgcagcacatgccatccacggaaacaaatgggctgttatcgcgaagctcctccccggaagaacagataatgctatcaagaaccactggaac

SEQ ID NO: 59207 - DNA, 1146 bp, Arabidopsis thaliana landsberg
cagaaacgaccaattggtgtgtagaggttgatattttagaacagtaacaaaagagtgtgtattcaagttggtgcatttattttgtcagaattgcattattgtggcatacccatttatgagtaagactcaacaataaatttcatgtgtgttcgcagatcgtaattgatatgcatgtcgactataatttacacaaaaatatattgatgtgtcaaactctctgacattgcctttgaatgcaatcagttttattgttagattgtggagccttttttaaaaacagaaaaattactggtggtcctacgagtctacaagattaagggaaaaaaaattaaaattagagcaccgttttgtgtttgctcttaataatctttacactaaagtagatattagaacagaacgagttaaaaattactggtggtcctacgttccgattcaagttatatcagaaaccaataacaacattacttgtcttcctagactaaaagtaatagaaaaagaacataagcatgaatcctccttgcttgtcaatgttgttgtgtaacctataggaatatatctaaaagaacaaagaaaaataattgttgtttcgttttcgatggccatatacaaagaagagacgttgagaagaagacaagcccatggctttttttctccactaatgcatgcatgttacaatttgcttgtaaaaatataccttatcaaataattcctattggtagattaaaatgtaaaaaaccgaagacattttggttgaggacgagacttatcgacgcgctctatgttgcgcgtgatatctacgctcgacgtcgttgaaatgtttttttttttcttttacacatctcgccgccgggaaaaactagaaggaaatatagagatggattgcgaaaccctaattgaatcggcgatcaggattctgaacacatcagacccgcacgaaaaagcacgacttggcgattcgatagccgtgaaatggcttcaaggtgcaatcgccgaaccctacgatcccaccgtcgacttccccgtcccggacagaccggctcgacttccggtgaaactggtgtctccaagtttgatgccgaagctgggaagagctggtagcttacagagcaggcaagccattgttcatagtcttgctcatacctgaaa

SEQ ID NO: 59208 - DNA, 1451 bp, Arabidopsis thaliana landsberg
gaaacttcccctaacaacgtctccttccgccggttgcctccgtccctttcctgtctccgccgaatggacctcttcctctctttccctctctcatctctctcccacgtgtgtttccttctcatccatacacttctcttaattaatttattatcttcctaataaatattcttaatacattttgtttttttcatatgccttaagaaattttatatattattttgacaacttgtcaataatactattcgttacgcggaattattgggtacgtacgtgggtttcattgctctttgtctgatatcaagaaatcaagtcacataaaattaaatacaggaatacgcacaatgcaaaaaaagccactatccataaaaattatacttatactataatacaaaaattctgagttgcaaatgacaaaattaataggaactacaaaaaaaaattagtaaaaacataacacggtggtagaattttgtttcctatcataaattttgataaaattagggcgtacttgaacacataaagggttacgattcaaaggaattaagcaatttgtactaaaaatacataattacaaaaccattctatcattttaggatctttttctttcaatcaaaccaataattcacgtttaaacgtcgtcatgtatctgattatgtacatataaaattgctctaaatatgtaaatatgggtcaagtgcaagacggtccatgcatttagatatttttctgtaaggcatataagtggaggattgcgatgtgtacgtaaatacataatcattaatcaatttatatatgtatatatacctagttatggggttggaaatctgaagttgaatcaatcttatcgtagttttattcattctcgaggcttctttctcacgtacaaaacttcccgcacgggctaaagcttgtttgtcaaataaattgtttagaaactgaggtttcgacgatgtacgaactacacaaagctacaaacaaagaaaataattaagaatttgttttgtacgtaaacatgtagacaaacccatttccacgcgtgtgagctctctgccattcatatacagctaagacttctgaaaacgacgttgattagttaaatgtgtcgtcgtggaaaaaactatgtaaatacgttctctattgactcaaaggataacaatatttctgcatattttttgtttacctgtgatttataatgttttgtaaaaatgtacgtaacgactatcaacaagatattattatttcacatgataacaagcggtcaaagttgttcttaccgagttactggcaaatggcatgctagagcttattctaatatgtattggatatatattatcataggcttaaatcgaattatgtctatgaataatactttctctgcatatatatgtttttttggcaatatatgttatttagtctccatatgtttggctctcttttcaacttacaaaaaa

SEQ ID NO: 59209 - DNA, 457 bp, Arabidopsis thaliana landsberg
  unsure (1)..(457): unsure at all n locations
gatttatatgagtattttactttcaaaacagtaaagaattaacattattttgtcgacaactaatcctagaaagcttaagttattaatctactctagattntcaaaggttaaagatatacatcactagccaacaagaaaatatatatatatatatatatatatataccagnaaaggactttgaaaatggatgtgggatccacagagatggtggctcgggcatttctaaatgaatctagccgagtttagaattataagtgtattcgtattatagaggatgccggtctttatgcacaatatgagtttgtggggttttaaatgcaaaatggaaaaactaaagctacactaacaaaaaaaaaaatcataagatggaagccgtagacaataaaaattttattcaagaaacatatatatatatatatatatatatatatatatatataaggatctaaattaaaa

SEQ ID NO: 59210 - DNA, 241 bp, Arabidopsis thaliana landsberg
  unsure (1)..(241): unsure at all n locations
catctgnngggagttttatataaccccggcggcgctcccatcggagtcccaaacggcttgtgaacgcaacattaaagtacgaggagggctcataaccaacccatctaacccattacgggcgacggtccaaaagaaggatccagaagatcatctcgacttctgcgtacagcaggaatattcacttggcctccgacgaaatctactgcggttctggatagcatgccatccgagttcacaaagc

SEQ ID NO: 59211 - DNA, 428 bp, Arabidopsis thaliana landsberg
  unsure (1)..(428): unsure at all n locations
ctttagtagaaactaacatcacacaagtaagtagttatggaagcaaaagtatcaatgagattaaattacctcttcagaggtgctagaactgtaactgctttcatcttagccggtgtaaatacgtcactttcaaacctgcttagaaaaatagtgaaaggttttaacanccgagaaatcaacgcaacacaagcgagcgtaaatctgggcgatggattttacctctgaaagtgtgggataagcggtgagagctgtctccattttgttgaattccttgacaaattgaactcggaagcaatagaaagtagatcattcaactcaggattgctacttgaagagaacagaacatggccattcgatctcacagagaactctggattatccatcatatccctgacgagatccaaaaccggtttccctaattcttgatt

SEQ ID NO: 59212 - DNA, 453 bp, Arabidopsis thaliana landsberg
agctcttttgtatctgatactccatgactctttaacgggattcctcactgcccctgcctactatccagcgaacccacagccaagggaacgggcttggcagaatcagcggggaaggaccacccgcgtcgagcgattctttactgaaacgttgtgaaatgactggagaggtgtaatgataaagagggcagctgtcggctgcaagatgaagaaaccgactactgaatagacgatatcctgacttactaaaaagattcacgtgctctgctcatgcccttatgtcataggaagctgtatattgtagcggctcgatccgggcggaggacattgtcaggtggagcgtatggctgaggctcacacatctgttcaaagatttcgcaatctgactactgtgcatggcctaaagaggtttggagctcaatattttgtcttgtggaactgcttgttttgactgac

SEQ ID NO: 59213 - DNA, 439 bp, Arabidopsis thaliana landsberg
tatgggtcgccgcattaagggaaagctgcaatgtcatatcgtacattgaaaatctctagttgcacgagggcctcttttttgtccccttttgctctatccttttctttctctctctcgtattattttctttattattgcatttttgagtgattaattacctttgtgacaaaaaaagaaatgaaagagattaaacctttgaattaaaaatattatatatttttgagtgaacagttgagttgattttttatagcataataatgagatttcttattacgaaagagaggaataatcaaataatattaatatgtatattcccatgcgtataatgcatccaaaacctgctgttgattggttggtctctttggttgtgtttcgtgttcatgttcatgcatgttgtgggcatcaaaataagttatcttgtagcccataattttttttt

SEQ ID NO: 59214 - DNA, 415 bp, Arabidopsis thaliana landsberg
  unsure (1)..(415): unsure at all n locations
tttaacaattgcttggggggggatttagttcctaggggagccataggtctgctttttgccaacctctcctaacctcctagatgtgtcagatgtacttctgtttgatgtcgtggctcnnnnnnnnnnnnnnnnnnnnnnnnnnnnnnnnaaggatagtctcccgggacagacctgtatggagttgcccggaggtgatgcctgtcggagcatggcatgaatgtgcacaagtgcatcaatatgatgtagccactaagcccccgagtaatctgttgataattggttgggggtttattcagttcccatgcaatttaggggtggacccttcatgagatggtcgtcacgcactgagcgtgagtctgcttagtgccgaaccgggcgtagtcttgggtggtgatcccttgagtgggtcgtcttc

SEQ ID NO: 59215 - DNA, 1152 bp, Arabidopsis thaliana landsberg
  unsure (1)..(1152): unsure at all n locations
tccattttctgaagaagaatgtcgatttccgttttccaaattcacatcctcagtagctaaatttgaagtttctttctcactgttctcaaccacatccaagcttgatgccattttaccataagaaatatctgcatctgctacttccccgtgatcataatcattcattttgagagtcaccaaatcagaatcagcctctttcgtagttatacattgctcgttaacctcaccatggctctctccaatctccgaataattaacctttaaattttctactcctctctcatttctacttgtttcttccaaatcacacacttcatcattggaagctaaaggaaaatcctcttgcaacacatcggttttgagagattcaggttttagacccacctgcgaaccaattgcttcctcaaagacctcttcttcattatccttcacttcatcagatcccaccaactcactaattctaccatcctctgcaagcttcttctcatccccatataacctggttacaatctcagccccatctcccatttctaggatcacccaaaatcacgaaacactgcaccaaccaaattttgtatcctcgttactttcaaatccacaagacactaaattaaatgggagtgaaactactattttccaaatcgtaggtatattttgctcataggaattcagaaaatacaaagaagaatctattgatattgaggagaaacagtgatggcgagaatctaacctggttagagaaggcaaaagtctggaaagaaaaaaaaacaacttcatgcgctttttttgtatttgtataaatcgccttttactcgcctgcgacagtgcgactacgacgggaaggagaagnnnnnnnnnnnnnnnnnnggacggtttaaatcggtttgggttttaacatcggacggtggaaaatggctcttatattgcaatcgtgaaaaaggaatgtcacgtgatcaatagtaaagtgtgggccaaggcctttttagttgggctgcataatcttgttggccattttatctttacgacaagagagaattgctttatttgttcttttggagctattcaactgtcttttcattgtttgccctatatagatggtatttgatgatcttaatgacttactaaattgttgtagaaatttgattttatata

SEQ ID NO: 59216 - DNA, 657 bp, Arabidopsis thaliana landsberg
agggaccgagcacgcagcgatgatcgaagctgatccgtccgaaccgagggcgtcgctaccgcgccggccggtggtgccagcaatgatcgcctgcagttcttcgaagtgctcggcgccgcggtcgtcagcgccggcgcccatcagtcgcagccgcatacgcaacgcgccgcgctgctggtgtcgatcgaccagttcgcgacgctcgaagagcgcatcggcctgcacgatgccgaacaagccgtcgtccagctcggcgactggctgaagtcacagctgcaggccgacgacaccgtgttccgcttctcgacctcggagctcgctgtcatcgccacgttcaaggacggcggcgcgatcgaaccgtggggcgagaagttcgtcgccgacaccgcgcggcgtatcttcagcaccgccggtcatgaggcgcagctgtcgctgacagtcgtcgcctacccgttctccggcagcgagaaggccagcgccatcacctccgaactggtgtcgacgacgcgcaagctgtcggcgcagggcggcaagcagttcgccaacatcggcgccaccgccgccaactcgctgcaagagcgagagctgcgccgtcaggccgacctcgtgcgcaaggcgctgatcgacgatcggctgaagctcgcctaccatcgatcg

SEQ ID NO: 59217 - DNA, 688 bp, Arabidopsis thaliana landsberg
  unsure (1)..(688): unsure at all n locations
ctccataatcggacaaaaaagaagaattcaatagcaattttcattaataatgcattaacacttctgagtctgacgatcatattttatatgactaaaaggctgcaaacacaccataataggcagaacttttattttaaaaaaggaaaaggaaacttcataatacacatgcctagccgtcgctctacaagttcatttttactcaacaaaatggaaaactaatagtatgataactccaaacaatcaatacaattatatattgtacacttaaacagatacaaactatgtagttaaataagttaaactaataataaagcagagaccttcaattattagcacccttaagttctctgaaacatgcatccacgcaaactacaatcctagtttaggtattgaacccaaggcaataacaatcatcaccatattatatatctaatcataggtatttttaaaataataaaattcaccaatgccactatagaaacatacctttttccgtttcgtaattaaatgaatatatcttgcttaccacagaataccattttatatttcaacgtatattgtaaataagattttaaatatttaatgatatagcattaaataaataaataaaatttatactaaaactgatattttggtatggatattcattcntaatatngaatcattaaaaatactaaaaatgaaacgg

SEQ ID NO: 59218 - DNA, 177 bp, Arabidopsis thaliana landsberg
tatgggagggggtatatctaggtacgctcatatctgtactgggtgattacccgaactctatacactatgatggtgacgtatctaagcatatatctgtcattgatgatgatgctgatcattaaaggacgaacatgagggagggctgtgatgaattggatactgcatgacacatagctg

SEQ ID NO: 59219 - DNA, 744 bp, Arabidopsis thaliana landsberg
aatgacttattttcgagatgttatcttccatttttttcagtatcattgtaatcaatgataattataacaaaatcacgatatgaaaaaaaatattccattaattgatgtaagaaaaaaagtcaaatatcataacattaaaatgtaactttccccttatttactaactaaagctcatgcatagcgtggcgtgatattatctattcaattccttttctaaaaaggttttcctagttctattaggattaggaaacagaggttgctatataaatactagattcgctcgcgtttatctcagtcacaaaatccctacttcttcgtaacaacttactaatatttaggcagctttgagcttattcattggacgacgaactctttttgtttatctctttctgttttctttttctcttcttttgttctgagaataatgggcccaacatacagagctttgccagtaggtatgaggtttcgtccttcagatttggagttggctgtttactttttgatcaagaaagctttaggacttcccatgaacgctcgtacggtacccgaagaatgtaatgatatcttctcaacacatcctcgcgacttgcctggtgagaatactttctccgatccttttgacaaaacagatttgatagagtttttgagtttcttgatttaactttggctacttctttcttgcgtgacaagctttattttgtgaacttgtttttgctctgttctttcaggctatggaagcgaaga

SEQ ID NO: 59220 - DNA, 630 bp, Arabidopsis thaliana landsberg
  unsure (1)..(630): unsure at all n locations
gatagtgtcttttagtcaacgaatttttttgtagtttaatttgtcatttaatttttacttatttttatagaaaatacatggaaacatcttaaatttattatataaacgtaaatgctattccctatatttataaatgatgtattttttataaaaatttcttacaaatgcatcatttacatatttctaaatgatgtattcgtttaaatttattagaaaattaaaaagttaactataaatgcatttttttgtgatttacaatttttaataacttaaacgaatagttttcaaaaaattatattaaagttttaattcatcgataacactaataaatattacataaaaacacaaatagattgatatctcggatccttccaaacgttaatataactacgagattggatacacaaacctatatctcctcgtaagtacaagatcttgacgattttgtaataatctcgcagtagacaaatggagatataagaatgtaagacatggagagaaaattataatattgatctggtggactacttacatttttctagtcgtgtttctcttcaaacgatctaactnttaatncttctgtagtttttttatgttccctttagagccggtttatagtgaagagagctt

SEQ ID NO: 59221 - DNA, 140 bp, Arabidopsis thaliana landsberg
gggggggagggcgacgtttaaagagacaaccgcacatacagaactaacgctcgaacgcccgtgtcatgatcggaaagggagcaacatcacaaggggcggcggagggccaaagttcggctgactgcatgcaaaaaacgcac

SEQ ID NO: 59222 - DNA, 1374 bp, Arabidopsis thaliana landsberg
gaacaaagattaaatgcaacctgggacattcccagtggaagcagtggattctacgaattggtccagttgttggaacggggacttgcccccgaaatatgatgttgacatgtcacttgtgcaagcattcagttgaaatttctgagcattctggtctcttacaagattgttactgttcacctgccatctccaaagaattcagtttaaaggcttaaacatttgtggtccctcaagtagtcaagaatgaacgaagatgctattggaagccaaaagcactaagtgtgagggcaacttatgaaaaaatcacctctgtgtcaaagcacagtgtcttcatacagtctgattccatcttgcaaactagaagcttctcacaatctgattctacgttgcaaattaaggatgtcatgaaaacatctcgttcaccctgtttggttaccaatttttcttgttagatactgaaattactatgaactgttctaaagcaaaacaagaagtctggaaaagaaagtgagggacaacagagagttgaatgaaggtggacttaccatatccttacatttgaatcgtcctgtaggtaaaagaactgatgtctttccagcttttgatgatagtgcaagacggaagcaacggtttctagagtaaacagcagtatccacaaaaagtagggatgccgaatcattagcctctttgtgaacaaacagcttgcgcaacctttcatctgtttccttcgcatttactatccgtgagcatagctggagaaacatgaagatgaaaataagccatattttcaggcaataaaagtgaaatatcaactgaagcatacctctccaataaaagcaccaacgtgtgagttatccttaaaggcaacctttggaatgattacaattacatgacgagagaacttatctgcatatgacattcatattgatataaaaaaaagcttatcagcatatgaacttttctaggaattcttagtcaaaaggaacctaccttctcatacagaaatattaaaggaaaaatagtttacaatatccatgaaacttttttttaacaataactggcatttttttgaaagcactcacagaataaagctgatggaaaaaggacacctcatattcaactagcagctgggagagcatatatattacagtacctttagttgaggaatcaagctctactatccagtcctcttgtccttcgatagcatatttctcatgcacggcttccagaatgactgatatcaagatatcaaccatttcatccacattttttccttcattttctttctgattgaactccaaatcaaagtacatatggcatggcaatccctgagaagccgtgaaattaaacgcagtcaatcaaaagtcagacatgcgt

SEQ ID NO: 59223 - DNA, 1608 bp, Arabidopsis thaliana landsberg
taatctaaaatgatccgacaagattaaaatgttggggttctaaaaccaaaggttaaataatactttcgctaagcttgcaacaagattcagcatgctctttctattataatcccaaatggtgaaaagctgtgtaacatgtgtgaactctattagtatcagcaaactaccttgcgaaggagaaccaattatcacataggaatataagatttgacctctgaggctttaggccacttgttgtcgtttatttccagagtcaattcaaagcatcccccatatatgtaattccagtcttgcatgccaccataaattgggtacctgtagagcgttttgcttaaagcattaaccaagaaactcatttgttgaataagacagagtaaggggacttgatgtgataccaggatgctccattggtgattccttcttcaaattctttgctcaaagacatattacggtgagatttgctatatttacgtgccaagaaccggaatgtctcatcgtcaggacatgcataatagtatttcctgcaagaagagtgcaaaacaactacatgacgtttgcatttgctgaaggaccgagcaaagatattagcctcaaaaccatttgaatagaagtaaataccttttatcctctgtaccatcccatggaaaatttgcgaccagcgcaccctaaaacaaaagctggtttagcaaatatttttttcacattgaatcaagattttccttgacattacattgaaaaccccctcccataatcttgaaagtaaactttcaaattggacatacttaagacgttatagtatgcacaagtctgctacaggaaaattaccccgtgcagagtagccgacgctgtgaatcgtatatctctcagccaagtcataattgccttagtttcaggttgcctcaaattcaagtcgtcattgaaaggaaagaactgcattatcaggtatgagttaagtaagtcaaacgtgactatgaataaaaccaaccgaatctagctaccatcatgaaaatcacagcatcggtgaaaataaaatttatgatcgtcaaaagcgtcatcagacaatcacctgatcagggaagtcgcgatttagatccacattatttgcattattacgtttcctgattgaaaagccatcaggattcaatgatggcattatatgaaggtgaacattttctacaatcatctgggcctgcataccagcataaaaaaatcagtatctgcacataacctttttcttaggcaagtttattgaagatgagtgaacaactttcatggccatggcatggtgcaattacaaaaagcaaaaatcacttaccaatggatccttcttatagttatcacaaatccagtttgcaaggcgtaataagagctcacgccctacaggttcatctccatgtacattcccaatgtactgcatgaccaaatattcaactatttagatccacctaagctatcaccacaatctaatatcccaaagattgcatggataggcacaaattattgagcagtgttaaccttgaatgcaagttcaggctctaattctccaaggccggtgaaatctctatgacccactaaaaaggcgaagcatgaaacaacagaaaaagcttt

SEQ ID NO: 59224 - DNA, 1124 bp, Arabidopsis thaliana landsberg
ttacaatttacaattacatgcaactttttgccaaagtttaaagagaagatcaaagtaaaaacagattgaggtttagttggttcgaatgtgttttcgttgatacttacgtatttcggtatcaagaacacgattactaaaacaaattttgaaagcaatgttaaatactttagaaggagttacgtttttgatttatgagtattctttcatctaatattgcaaaacaaattcgtttaacgaagtcatagaaaaattatttaaaattgatatacaataatcttttatctatttaggtaatattcggaaaattttagatcgaaactcatacatctttttatcggaatatcaacttcgcaacctttagaaaatcctatgaaacacaaatctttaaaaagtcatagaaagctaccattagaccaaaaccacttggttataggtttctactttctaccactaagatatgtaacattattactctttgatcatattcactaatcatttcgattgtcataacatatatcaccaaaactcatttgcgtttttaagtttttaatggaacagaggcacaccaaactcatttgtgtttcgaagtttttgctgttcatgttggaggtagactcaaagttcttcaggacttagctcactagctgactctgcatccccaaaaggtcgctgtatggtttcagaatagacgagccaggtccaacaccaagcattacgttggatgccggttacgagtctcttgagcctcctccctatggacagaaccgcgtccttcatctttctttacaacagctcacatggtgtcactgaaaactggttttctgcagctgcaggagaaccaagtattgatatggagactataaaagcagagccatagtgtctgattaaacgaagcagagccatagtatctgattaaactacaaatctgtatgatcccttggtagttgaaatagtaaaagcgtgaaggaagtgatcaaagacatttatcaaaatgtgtttgtaagaatggttgagaaaaggaaatatatctttgagagcatggttttcggtgatgagaactattggaaatagtaacacaatgcttaaacacacagacaatcaatatataaatacgaccctctagt

SEQ ID NO: 59225 - DNA, 359 bp, Arabidopsis thaliana landsberg
gacgacacggggtatatgttggcacactcctgcgtgcccagcgggctcgatccaacactatgcacagcatgggtaaaacgttaaacgccatatctgtacatatgggggaatgttatgtgtaacgagcgcactggtgtcgggcctgggcttcatcatgcgatgcctgatacatggatctcacgtcaagttcagagaggaaaccggcaccgcttggcattcctcatgcatcattcaatctgacgcgggatcgttgaccatacggaatgattccatggactgcctatgacaaaaactgacaccatgacctgctgtatagatcaccgatctgttacttgaggcagtcataacactatacggaa

SEQ ID NO: 59226 - DNA, 650 bp, Arabidopsis thaliana landsberg
ttcaatgacttgaaaatggagtttttcaattttttctcttttccctctccctacacaaagccgccattgaaaattgagagaaataagggtttttgaatttagtttttggaggtagaaggtataaggaaacaaaaaaagatattatgaaatcaattgtgattttggagatattacattatctgtttttgtaatcaaatatgaaattaagtgagaaaataaagaaagaaataatgtagagaagttgctcaatctttattgttgtcaattaaaaaaaaaaaaaagttgttcaatctctatagaataagaaagcttttacctgcgagtaaattaaagaagcctttctttgaataatggcttctgttgctcagaggggaaataaaagaagatcctctctgctttctttaagctgctatttggggttgcatacaaaaagctgtaaaataagagaaactttgcaattagtagtattaaagatatttggtgagctatatatgcacatacactacacacacacataagtgtatatgtatacttatatatactgatccaaccttcttgtcaactgttgaaagcaaatagaggaaaaaatgagtaacatgaaagtgcttttcgaagtcaaacataaagtatgcatccaaatatataatata

SEQ ID NO: 59227 - DNA, 537 bp, Arabidopsis thaliana landsberg
tgaaagtgtaggatatttatatttaggtttttaattcgttaactaatttcttagatctgatacttttacagatttccaagagcaagtttcttatctatagtcatcctttatttatccttagaatatgaagttatcaaatgaaacatttctatgtacatattataattggatttataatatatatagcgacgaatgtacaattatatcaattaatctcaattttccgaataatatttgctaactaatatacatcatgttttagctagtcaaaatttcacctgggattttatatgttacaattttggtaaaacatttactgactatcatttctaaaacatgaactgtggtcatttggaggattattcttaaacctgaactttgatttatgagtatataaatctaaattaaatcacccttatatcaattaatgaatcattaatatatatgatatatccattacccaaagatatttgtatctttcgcttactttaaaatgttgaagctataaaattttacatatttgaaaaatgagttatt

SEQ ID NO: 59228 - DNA, 105 bp, Arabidopsis thaliana landsberg
tttgggagatggagacaggggaggatggcatatgggaacttgctcaccagtagcaggcaagttttatgggatttgcacacgagcggcactaacaccagcggatca

SEQ ID NO: 59229 - DNA, 982 bp, Arabidopsis thaliana landsberg
ctgcaatttcatccaagagaaaaagtctctaacttgtctccaacctctctgttctttcaaaacaacacacatatctctaaaactcaacttcgctacaaagctactcatcacaaatctcatatcatcactaccttgtcttctctgtgacaaacctctcaccgtcttaatcgcagccaccacatgtttcccatacatttgaccattccgatcatcttccaaatactgaaccatttgctctggagttcgctttatccatttgggagtcattgcttgtgagccttggttccttctcaacgtgcttaagtattgtgctttcttctttatgattcgtcgagcgtcgtcgtctgataacggatgtttcggtctctcgtatctcggttttggtttttccgggttaccgtcgctgagtgaccacgggtcgggtcggactttggaagaagaagatgactttattgagattctaaagtttcttgagggtattttgggattaaatattgaaggattgaagtgtgttgttgaagtgaggaagtcactcttcattgcttcttcctctcgaatttctccggccacaacctcgccgtatctacaaacttcagtgacagtctcattattttagaccttagattatccggttaaatcgatttaagtcggtttaagtcggtttgattcggttaaatagctttatttccggtttatggtttatctcttaaagtttatattcggttatgaagtgatatcagaaacaatctttgtaaatttcgattggtttattcgatgtaatcttaatttttctcttgattttgtttcgtttattttcttgattaaaccataatttggtttaacgtggtttacgtttctcttccatccataattagctttgtttccggtttatgattatttttctgaattttataagtttaatctttcttttttaacttgattatacgtacttaagacttgagagctataataaaggggatcg

SEQ ID NO: 59230 - DNA, 135 bp, Arabidopsis thaliana landsberg
tgcaactggggatagggggtggttgtccaaggtggcgccctaacatacaatcgcccggactggcttattttggagaccggagataaccgacttgggttaacgtatcggatggttaaatttgaaccgtcaattcgt

SEQ ID NO: 59231 - DNA, 353 bp, Arabidopsis thaliana landsberg
  unsure (1)..(353): unsure at all n locations
tatcctggggagcttttacttccaaaaaatataactaagttgacatatttatgcgcaaaactactttcccgaaccctgaatttatttatctgtgcaaagcatgctcaccatgcttggttacgtgttaatggtggctgacagttactatnnnnnnnnnnnnnnnnnnnnnnnnnnnnnnnnnnnnnnnnnnnnnnnnnnnnnnnnnnnnnnnnnnncgagaaatgcagagcatcgacacacatgatccaacaactgtttccatttcctggcatcgtcttattcattcttgattcgtcttcttccatgtgcgaagaaattgctatcaagcgtgtttttgtagctttgcttggatc

SEQ ID NO: 59232 - DNA, 534 bp, Arabidopsis thaliana landsberg
  unsure (1)..(534): unsure at all n locations
ccattggctgggacgtgttatttattagaaagaattgaaaattaattctgcataagaaaattaaaatataaggttatgaatgcaaggtcggcccatttccaaaggtcccaaacgaagttgagtatattccttcttcttttttttaccatcttaaatcacagcaaatgtatttgttataagaaaaaaaaaagataactatggcaaaagtttatgaaaattttcgacaattttaatttttgtatgaaattaattttaatacggaaattctgactttttgtggacgtataatatattaatatggatagatcctaaattgaaatccgtatttgtaaaatatggaataattttgccacgtaaaacgtttaatcaaaaataataaaagatgaaaacttgataaacgatgtttgtatatgaaatatgataatgaaaaaagaaaattgtccagtttgatccattattgggtaagttagataaaagctcgattagagtataattatattggagtngaatatatatatgatatgaatttggtaa

SEQ ID NO: 59233 - DNA, 566 bp, Arabidopsis thaliana landsberg
  unsure (1)..(566): unsure at all n locations
cgtcgttatgcaaagagagacgaaaagttggagaggtagcgggaggagcggcggcggagtgtgcggctgtgtggtgttgttgtccatgcgcggtggtgaatctaatggttttagccgtgtataaagttccggccgcggtttgtaaaaaagcttggaggcgaagcaaacgacgacgttttacgaggaaacgacatggtttgcttgcgtcagcgacggcggaaggaagcgaaagtaccgtacacgctagattgaatgaagaagatctaacggctgagattgtttttgaggaatgtcatgtgagtggtggtgagttaaacgacgtcgtcaggcttgaaaatgaaatgttggatcgtttctatggggnnnnnnnnnnnnnnnnnnnnnnnnnnnnggacacgtcatcaggaagcctatgaattcttcttcttatgagtattttcatattttgggttttttgaaagaattaatagcaatttatgtgttttttattttatttttttgtatgtaagttcaattgttttatgtggggtatgtgaatagaagaacaattgagtatactctataca

SEQ ID NO: 59234 - DNA, 576 bp, Arabidopsis thaliana landsberg
gcgggcccagcgagcaggcagcaaggcccgcggcggcagcgatcaacgttgccaaccgggtcaagtgcgggcgaccggatgagccggacgtggcggtgttctaccggatcgaggtcgagcccgaggtgcgggtcggctactgggagcgagcgagggagacggcggcatgatcaagtgcttcagttgcggcgcggagtgcatgaacgggctcgcgttgtgcgacctgtgccagcgtgccgcgatgacctacgcggagtggattccggtgcattttgcgaatctcgcccgctggcgaccagggcgggccggctcgcgaccagtgccatcgtcgcgcgagccgcagggggcatttggcggcaatcatggcgaccgagtggcgcgctgcctcgacgagaccggcaacgacctcgtgaattgggttcggcggctcgtggacgaccgtggcgtcgaggtgccctatgcggccgacgaggcgaacacggtgcgggtggcttgctggctgctgggcgagcacctgaccagcattgcgacgctcgactggtgcggtgatctggtggccgacctgggcaccatcga

SEQ ID NO: 59235 - DNA, 552 bp, Arabidopsis thaliana landsberg
aggcgccccttggcaatgcgcatgaaactgggttctggagccgcgggttccattcttcggcaacgcgcgatgaggtggacggtgtgccgggcgacagccgttcgctgcacggcgtggtgttggggggcaaccgggatgtgggccatggctggcggctgggcggctactgctgcgagcatcatgcgcagtgggatcgccgtggaaacgacgggcgctgatatggcggtaacgctggaagtcgaggcgaagcgtatgccggccgtgccgacctcttgaggtatgggccgttgaatggcggacgcgcttcggccaccgtgcaaagcacgcatctgggattcgcggcgtcgagggcgtggacgccgttgcgattggcggcggacgtggcgcatacctggcatcgcgtcaaaagccggcgcgacgtggcgtttggaaatttcagcgacgtgttgactagccggtatcgggcgggaagcacgcaggtctttgccgaggcgggctggccgctgcgggtgtccaggttgcagcatccgccttccgtaagcacggaaaaca

SEQ ID NO: 59236 - DNA, 214 bp, Arabidopsis thaliana landsberg
tagcttttaggggaccaagtgagcaactttacaatgatcaaaatggtaatttcttagcttgtgttgagttgatcgctgaatttgatttggttatgcaagatcaccttagacgtattcaaaacaatgagattcattatcactatcttagtcataaaattcagaatgagtttatttctcttttggcttctaacatcactaaatctatcataaacac

SEQ ID NO: 59237 - DNA, 126 bp, Arabidopsis thaliana landsberg
attcagaggggaaacctataccaatacagggggtattataaacggccaacgataataatcacaacagaaaatacaagactacatgtaactaattatacttcagaaaacccccaacttgaaacagat

SEQ ID NO: 59238 - DNA, 191 bp, Arabidopsis thaliana landsberg
ggctgcagggggggggaaagccaccacttgcttcagattttttgctgaaacatcgcacgcgatatatggatattatcacgaacaataaaactgtctgcttacatatacagcaatacaagggccgatatcaaccataaccatcacaaaaccttaaggtccacgccctcattaaactacaacgcctacattga

SEQ ID NO: 59239 - DNA, 673 bp, Arabidopsis thaliana landsberg
cctgatagtatttcaccaaacccgaaagtaaacaaaagatgttagcttaaactccaacaaaaaccagacaaacaaacaaaaaaaattcaaaactttatccaaatgttaccagcggaattgctaaacacggcgatgtcatggccaaaaacggctttacaccgctcaatggaaggacgtaatggtggccaaatcgctagagaataaggagccgtaagagtgttatctttatcaaacactacacctttgaagccctttctcttcagcacttcccaatcaatgtatcttaaatctttcacagaaacatgcggaagaacaaattgacgatctttaacaacaacggagaccgaagaaacgataccctcaatattgattcgttgcccaagagccgctttcagatctgcccaccacatgttcgacgaaattgccaaccctttgttgttgtcttctactctcggcaacaccaattcgcgtggctctccgtcgaattgttccgggatccggttagagaatcctgggtcttcggtgggagagctaaattggtaaagaagaaacgaatcttcaaacgtgggtagacgcagattctgcttttggcttcgatgggttgtcgtcgtttgcagaggagacgaagaagaagacgaaggaggaggaggagagcaaatgggtttggtggagc

SEQ ID NO: 59240 - DNA, 1756 bp, Arabidopsis thaliana landsberg
aatattcgtttaattacaaatccgagtccttcttcttctttttcttctcgatctctgtatctctggatcatttggttctaaaggaagcgtctttgatctgaatcgtcgtgtcgttcgtttctaactgtaagttttctccttttcattcattttgcttcaatctcgatcggaatcaagtaaaaaatcggaacttttacctagatttcctcaggaatcgaaaagttcttgtgatttagcagaacctctattgtttccgatctcttaattcaattacttgacaaaagtgattatactttctctgttgcagttatattgaaagatggaaacagaaacggaacatgatagaactgtctctgtcgatgacaacgacagccttgtacctgagccaagctcaacgaaagaaagcttttttgaagatctctcgcttactgggcaagttatgaatcctcaactttcaagtgcaggcgaagttttgacaaaagttgaattggattttgcttttgtctctgagaaattggtcaatcttagtcttcttactatgcaactcggcacgagggaaaatgattttgagtcttttgtttctaagaaagaagaagatgaagaagagccttcgagtaatgttgatgatgatgatgattctgctgagaaggcattggagtttgatctcttgtcttcaattctcaattcagaggtgaaagaacttgaatcgcttcttggttttctccagaacgagattcaaagcgcccgtgtcatgatatctccgtttcaacatgatggagaagctttcttggatttggaagggaagttgaatgatactgaacaatctttgggtcagttaatggaacaagtagtggaaatgaagaagcaatcttctaactttcagaggttatcttctggtttggatgaacaaggaagctgtaagtgaccaatctagctttctttttaaccttgttgtgatgatcacttggtgagaaaaatttcaggctttaatgaatactatataactttgtttttgcagggtctggagggcaaacttcagtgtctcaaaacgatggtgagttttgtgatctaagcgctaagatcaatatgcagactgctgatcagcaaaggaatgttttaaggatgcttgagaaatctttggctaaggagatggaacttgagaagaaactaagtgaatcaagaaatactgaacgagaactagagatgaaactgtattcttctgagcaggatgttgtctacatggaagaagtaaccgaagatgcgttctccaggtggcttgaggcagataatgctgctgaagtctttaagggaacgtcaaaggagatgtctggaaaactccagattcttcagttcaatctaagtggctcttttaagcgggaagacaacttgaagtctaagcttgttgattcaaaggaacgtttagaagctaaggaatgcgccttgcacaagcttgatagcagcaatgcaagacttgctgactttcttgtggcacaaacagaaggcttaaaagagagtttgcaagaggctgaagaaaaattgattttgttgaacactgagaattccacattaagtgagaaagttagctcccttgaagaacaactgaatgaatatgggattcaaacagaagatgcggatgctacttctggtgctctgataacagatctttgacgtatcaacgaggaactgaaagataaatagccaaactgaagcagggctgaggaaacagaatcagtgcaaattctagaagaagcaaaag

SEQ ID NO: 59241 - DNA, 128 bp, Arabidopsis thaliana landsberg
cgttcctatatttataggtagcgcgaagggtgactcttttgggcagttgctaatgctgttgggtagctagctccatggaaggacaggatctcagctagagatgttgaataagctagcttctaatttat

SEQ ID NO: 59242 - DNA, 227 bp, Arabidopsis thaliana landsberg
gggcagtcatgccttcactgtggtgcctttctttctcacactcatagatactcactacataaaggtcaccagagctgtaaaatccgaacactcttatgagctcaaattgcacacgttttaaaaacaaacaggcacagcatcttatcaatcttgccctgtatctactgaactaaactatatgctccagagggaacccttataaacaatacttggttatcaacaactga

SEQ ID NO: 59243 - DNA, 2284 bp, Arabidopsis thaliana landsberg
  unsure (1)..(2284): unsure at all n locations
ttcatatctggcagctcttgattcagagatgtacattcggcctgagtattgtttgtcaattctttgaatgaaattcaagtatatgaagacaaaggaacaaattgcattgaagataagttcatctacctcaagcaatgccaccttctgttcaaaatctgccactttcgctgtcctttcatcagcaattctctgaaataccagccaattaaaaagtcagatcaacgtagtttttgggaaacaagagtttcacatagaatctttacatctttcatatatgtaggcatatgaaaatacaaagggtttctaaatttccatgctgacaaaaagagaaaacaatttaagaagagaaagccaacactcagaaactaaggcctatttgaaatgtaaagaagtgatagtagtgcctatccaagaattctgtctcacctgaattctaccaagtgctgtggaagcatccacagccctgtgctctagttccctttccctttccatggcagcctgtcttagaaagagaaattcacgtaaaacaaaaaattgatataatgttttcattataaacagttttcgcatcgttcaggcaacaaaccatttttgtggcattatgagcagaacgctcctcttcggctctcctttcagtagtggcaagctcctcccgcaatgcctgtaataagaaaatattgattcaatggtctgaggaccttatctgtttataattgtatatacacggcggtaaattatggttagtcattgatgaaaaaaattatagtaatacctgcatcatcctagtctcagccaattctctgtttctcataatagactccatgtctccctgataaaagtagtaaatgattttactaaaagctggttggttgaaaaagaaaatggcaactgaagacacgaagtaactaggaccattaaagactcatggtgagctatgataggaagcacacaaaaagaaaaatgagcaaatgagaggcctaaaaacctggagagacgacaattttccttcgttcagagcagcctgatttttaagggcatccattgcgctgacaagtgtttctatctctgagtttttagctgctagtgcctcaaccatgcttgactctactttcgtcacttcacttttagcagctgacagatctttttgcaagtgtctaatgctagcttcatatgacttggtaagctcttgctattacaataaaaatgaagaaataaaattaggtgcactgaaaaccttcaagtatcacttttactttttctaatttgggtcaaaagaaactcaaactgtttaagtttacctctgcagtgttatgctcttccaactgtgcattttccgctttaatttcttgaagacgggacgaaagtccagcacaaacctagaggaaaatgaagacaaaaaatggatacatctgaggttgctcagaaccaaccacaggcatgaaagagtactttatcacaaatttgatgcaggaaagtagcaatggatatttgagcttacccttgctaacctggcttcttttgactgcccagtggaaactgtagcttttagcaaaccttgagcctagcattagtggatagattgatcaacagacttttaagaacaacatacatggaaattcaagtggcagacacatccttttctaatttttcttcattttccatagactaactaacctcttcaagttgatcttgaatcttcatggaagtcgtatcagctctacgatcttgctctcttttcagattggttgaggtgacaggaaacttcggttcctgttctttctccagattgattgaagtgccaactttcacctcatcgcccgtgctttgagccacatttccttcattaaccgaaggagcaggggctacagaatccacattctccacgtctctttttgaagaatcatctaactctcgttgtgtgccatttttgggagcattcattaggttctcactgacaacgacctcaatttctttgtcaggtaaagatnnnnnnnnnnnnnnnnnngaatcatttggaatatctccatcagcatgctttgactcagaacgatcaccatccacaatactttcttgagctaccacagcagcatcgtcactttttgtatcagccactgatagtggaagtgatagaacactctggacatctgcatcagtcgggtgaatctctcttgtcagcaagacaggccctgaagaagatgtctcgtcagtggaaacagaacttttagatggaggaacctctgactgtgatacccctgggccagattgatcaccagaagaatctctt

SEQ ID NO: 59244 - DNA, 1539 bp, Arabidopsis thaliana landsberg
ctaaatcaatctaaagaaaaaggaaaactaaattaaatctcttatttcgaacaggctaacttagtattggtttagataaattattgctaattttacatgaaaggaatgcgtcttaaattaagcagtctactatcatgaaaaccgtggttgaagacttgaagtagtctctacctgaatgtgaagtctggtattttgttcgtgtcattgtgcacatagtcgcatgtgtcaaaatttttgaagggtatggcaacagtagaaaaacttgtcgataccttcttagtaaaggtctcatatgggttatatagacaaaagatgatactttgatatgttgataactcttggtcacttgtgactaaatcttcaagatcaaggtattgacctaaattaccaaagctggaataaataaccaatgaaccataagtttctcctctatgaaagatttttaaagagagaaaagaggaaaagcttcggcgtcaagttttttgttttttttcctcctctctagtcaacaattcttatctctttttttcttttcttacaataaaacaatacttgtcctcacattttgtcttgtctcactctctctcccactgatcttcttcctcggctacatctcccgacgcctctctctcgttccggtgagtcctcctctctctgctccgatctgtatttcttctctttcagtttcatgctctctgaggtaaaattaatgatctttcttaatcaagttataaaacttcaaaactagttctaaagatcgatgcttgagaaatcaattttacttacgatttgtatttcatatatatagatatagcatcatctaactatcaacttaatcaattccttaagattcttctttgactaatttaccgagagtttgataaataattagggttttcaatttctgggttaaagtcaacttcagagcttgtttctgggtttaagtctaattcaaagcttggattcatgttgtgatggtgatattatgatttatgagggttttctctgaatttcagattttggtttaatatttgatgggaacatcatctggttcgaatcatcctcaccaaatgttaccaccacgtcaacaacaacgaagtggaggaggacttgaaacagctctttcactagtctcttcagatcaagagccgcgtcgcgagtctccagcggagagtgcgagttctcaagaatcatggccactaggagacactgttgctgggaagaagtcaatgagtcaaaagacagagcctgattctatggaacaaactgtgaatgtgatgcaccatgtttcgaatgcggacaaggtatcggtacgggatatcgctagggaaagagttgagttagttgcagagagaatgcatcgattaccggatgagtttcttgacgagttaaagaacggtcttaagtctatccttgaagggaatgtagcgcagagtgttgatgagttcatgttcttgcagaaggttgttcagagtagcactgatttgagctctgttacacttgttagagctcaccgggtgcagcttgagatacttgtag

SEQ ID NO: 59245 - DNA, 394 bp, Arabidopsis thaliana landsberg
  unsure (1)..(394): unsure at all n locations
ttttgtttaactaattatttccgcgttgtaaccttttttttgcatatttcttttgcgaaaaaacgatagaactcatagagggtggagaatacgttgtcgttttgcgctttaatatttaaattttcttgctagcttggttctttccacttaaaagcattatacactttttctaatttggattttacaaaaagaaatgacatcacaatatatcattgtcccatttctcgcaatatacaacatcctattttgcatttttcagtccttctcattttggtaatttctcctttgaccttttcttttaagatgaccccatcgaatcgctaccaaacatcgacacttttcacatctcattaaacacgccccattaaactacattcctcntaagacactttgt

SEQ ID NO: 59246 - DNA, 1657 bp, Arabidopsis thaliana landsberg
  unsure (1)..(1657): unsure at all n locations
ggttggaggttggggtatagaggagaaagcggcatgtttcgttcaaacctcatgtcatgcctgccgggggtagggaaaggaagtcagccaccggcatattgttgcgagatgctgaaagagcagcagtcttgtctttgtggttacataaagtctccaacgtttggtcactatgtcatccctcaaaatgctcacaaacttctagcggcttgtggtattctttaccctaaatgttgaaactcaaaacattcaatcttagtgaatagtgattgatcatatatatcaaaatcttatgtaataatgatgatgattgggaatttattatctccatgttcagactgattctattatatatccgtttttcttataaatttgttttgggaaaatttagtggataagtaatcaggctaccaatattataagaatcgctagattttagtcaataattttagtaaatgatcacgcttagatgattttaccaacaatgaaatctgcatcaatcaaaataaagataaatcacaaataacgacagatgaatccagatagactgttaaaaattcttcatatgatatcaaattaatatagcatccactaaataagatggtgatgaatgattgatatcgttaaatcgacactaataatatttatacatatatgtaccaattaagttctactcaggaccgatgtacgttaaagaaaactgagtcaaatctgtacacttggctcaaaaactaggaaccaattgtctaaaacctgcctgaagaagttaaaatatctattgaagctctaatcatcttcggattagttagcggagctacttggatcgaatcctttatttgattctgttacagaggcagagaatacaggttcaagagtttcgtttatgctctttgttcgaatctttaccctttttgtcctctgaggagtatcttcaccatttgcttcttcctttgctttctgaggagctctagctttcggatttgaaggggctctggggtgcaaatcaccatacataaccatatgcttttagtatatatactcaagccagaagttatcaatttagcaccaagacaagctccataagtagaccaactcaagttttatttgcagctagctaggccttgtatagtgcatagatcatgaaccgaacgaatattgatacagacttttggtaatgagaaaggtaaaagaaaagagtgagtttgtagcataatatacctttttattactggattttggcttttccggttcttccaaaggttcctgtccgttatcctgtcggtcaacatcttctaactcttccaaagttgcatctccttcagcatctattctgatacgtttcgtctttttcttctgcctgtcctttatctggatgatgtaaagaatttatgagtggcagaattctaagttcgtgaaatattaaatgnnnnnnnnnnnnnnnnnnnnnnnnnnnnnnnnggtctctgaatttctgctccagatgagctgcctccgcatcatccattagcagagataccacatccgcagctccaagaaaatcatcaccctgaacatgccctccagtcataacaagctgttgaactgtatttttctgacttgccctgtgcaaaatattctcttccaccgtctccttacagatgagacgataaacagtaaccta

SEQ ID NO: 59247 - DNA, 100 bp, Arabidopsis thaliana landsberg
caaagttttgttctcactggggggccagtgtttctaaatcggggggaaactcaatacaaaaaggcagccaaagctggtagaaccgatcatgctaatgaac

SEQ ID NO: 59248 - DNA, 186 bp, Arabidopsis thaliana landsberg
caccattttatttcaaaaaggggccggacatattatacaagggggggactcctccaatacatcagtgaagctcccattcggtccaaatcaactaaggacaaggaagacctgttatagaaccaaaatcccaagaacgaagccactcaagtcgctaaacaaaaccgcacgaaaagggatgccttcacg

SEQ ID NO: 59249 - DNA, 204 bp, Arabidopsis thaliana landsberg
gaccactttactaaattaagctcggtgtcctattcttcaaggggggaaatcctcccatacaccagcgatgatctcattgacagagactgatttgactacaaggacggcctgttatagcacccttacctcgagaacgaagccactaaagtcgctatgcaagagcgcacgataaggcatgccggcacggccaagatattaaatgaa

SEQ ID NO: 59250 - DNA, 189 bp, Arabidopsis thaliana landsberg
tttcttgcaacgttatccttcgtaagaaaaaaatatcacattctcaaaaattggggatagaataatactcttatactcatttgaatcatacaatgataagaacataaaagaaaaaccagaagttcgtggcgttggttaattattcttgagtatgattggttgtcgggattagtcaaaacgtcgtaggct

SEQ ID NO: 59251 - DNA, 224 bp, Arabidopsis thaliana landsberg
aaaggtaagctgggtcctaatgaggactactacataattggtgcctcactgaccctttcatcgggaaacctgcggccagtgcttaatgaatggcaacgccgggagaggcggttgcttaggcgctttcgcttctagtatgacttgtgactcggcgtcgctgagctagcggtttagtcactcaaggcgtatacgtatcacaaataggggtacgtatgaaagaacat

SEQ ID NO: 59252 - DNA, 259 bp, Arabidopsis thaliana landsberg
agttgatttgggcgctgtcaaggttattgaactctgcactcttgacattacgagactcatacctatatatggtctatagtacacaaatatatgatctgaattgataaaggatctcatcctgtgcaatgtacatagcaatatgggcgcgtggaggcaacatatcgggggatttctgtcatgcgccatatcatagctaaaggctcgccatatggggtcctggcgggcgatgaaccacttgagctttcgcttatgttgcacc

SEQ ID NO: 59253 - DNA, 833 bp, Arabidopsis thaliana landsberg
tgctcgttcattagacatatgattaattaacatctcactattctaattaattgagtattgcaaacatgttttatcaggacctggctctcaatccaaagtctacaatcttgttttccacccgttaaccggactttgcatgcaacaaagtatcttagatccaaccaaggtcactcttggtctatgtaatgaatctcaaccatggagctacactcctgagaacaccctgacactcaaagacaagtctctatgcttagagagcaccgggccgaatgcgccggttaagctcagtgagacgagttgctcgagccctaatttgtcaaaatgggagatcatctcagcctctaatatgctcttagcttcgaaggaaacaaataaatcgctttgtcttgacgtggatgaaacaaataacttcatggctagtgactgcaagtgtgtgaagggcgaagatagctcgtgtgatcccataagccagtggttcaagattgttaaagttagcaaataatgaggttttctcatacttaaataacgtttaagtaactcattgagctcttataagaatacagaaaagtaactcataagttgtaaactatatatatttattatctgctactgttaaatggaatatgatgttattatggtattcgatgtgtcgaacccagcgttttcacacatgacgggtcacagcccggttaatcgacccggatacttttccaatttaggtttaatattagtatccggcaattttaaagatggaaaaccaataatctgacaacaaaccccgttgaacttgcttggtatcagttaaaaaagaaaagtagttggcctattaaaaa

SEQ ID NO: 59254 - DNA, 1107 bp, Arabidopsis thaliana landsberg
taggttcttaattactcgattatgattaagttagtaagctggaaacaacttggtttgacgtccatcgctaagtcgctatttatggatttaattgtaattcattatacactagtttttccccaaagagtgtatagctttgtgaaacaaaccaaaagtatagcttgatattttgaaaacagaaattagctgcaatagtttatgtaaaaaagatattaaaatatataaacgatgatgtgtgaggaggttgttgtatgtctaagtaggagagttttggtcattgcgagagacacaagatctaattacagaccaaaagtctctatcccttattgctttggtttagttcttaaggaaacagaccaaaacaacgagatacacacacgcacagattaaacatgaaaacaatttattattttatataaaataacaattaaaaatcatttcgctgtctttgactacccattggattgggacattgataagtatacattatataacttatgttcgtaaattttgaggaaaaacaaactccgaagaatacgtattacaagttgcaggggaattaaaaaaaggagttagttcataatcccttattactttaagacaaaataaaacatatattagtttgtataataattatcaaggggaaaattatactttctaccacaattctaatcaagtgaatccaaatttatttgaataaatactattattggtcatcttttagttacaacttacaacaaatgaaaatctaacaattgcgatgataatcaatctaatttttttttttctttctcttttgttcctaatcactttattgataagctccattttgattctcctcaccatgtttgcctttgggctaaagtgcttaccctactggagtattggtggtcctcatgaaagacgttaataagaacccaattattaaatgtcgcttattctgttgagaaaaaaaaaacaaggtttggcccattcaaaattttgaggtcaaaacccaaaacaccttgccacttgccaagcccaatgctacccctccgataaatgtaatcgcataaatattattttgtatgccgatggttaagagatgatattaatgcgttgagaaag

SEQ ID NO: 59255 - DNA, 1359 bp, Arabidopsis thaliana landsberg
ctcggtcctcttttggcagcttctcctctttcttcaacagaaattcaaacccaccgtataaagattggtttccgattataagtgggagagattataaacaaatttatagttgagagaaacaattgtcaatataatttaaaacaaatttataccaataatatcatctgtttagcaaacttatccaagacttttggtaaaaatattaatcagtggaaagcaatcatcaaaagacacaaggaaagttttgtgattttaattaatattaaggataatgacttttcccatcatacaagagaatcaatgaacatatcctttttgtgacaaactaacattgttctacttcttctacttaacttaaggtttgtcctctaaagccaccaacgatctgataacgccaggagaaataccatcagcaagagcccctagttccgatataaacagagctttttccttcactaagctctgtaacttcttcgattcaaactccattttctcttcatcttcacatagtaacaagtaggccgttttctcatgaggaaactgcactagtctctaaatgagagtagcaaataaatgtaaacaaagatgatacctttctctagcattgtatgcacagcatgaaacggaattgcagcaaaaagatcagctcctgggagcatcatccaggtgggttcactagagtcatgggatccacatgtggagcaaacttcttggaccaaaggtttcgttgagctcccatggatatccttcatcatagaatcaaatggagacataacactagtctttgttgtccgagctctcttccttagtgctgtaagagcctctcggtttgcattcctctccttgtcattctccaccatctattacacatattacaagctccattttggttaaaaaaacttattgacctaacaacaatacatatcatataatatctgttttctcacaagacaaaataagttgcagacaacaatagattgaaaaatcttgtgctttcctcaatctgtcaatcacatataaattacgaagtagtgaatatttccaactagatactaccaaagcagattcccgagtacctgatttcgagctaatagaaactcatcagcttcagcttcaattttgtccaatagtgcagcaaacttctttggatccaaatccatctctagtctaacagattccaacaaacaaataggctcagaatcaaataaagcattattggttgaaggggaaaaaggaaaaaatttgataagtggcatagccaatcttcctaatccctgacatctccatgttaaccctaccatcttcatgccccaaatcaaacccaccacgaaagccccgaaaaaaaaaggggaagcccta

SEQ ID NO: 59256 - DNA, 1122 bp, Arabidopsis thaliana landsberg
aaatgatcaccattaaattccacttgtataaaactaactgaagaacctagcagatacaattctaaaaacttcaagaaagtttatcgaattaccaaacaatcctgaaacctaaaagaggaagaaagtggcaacagaatttaaccccttgtagtatcaccacattattcaaagttcaaactctctcttgtagaagaccaatggacttgttcatactctggagttaaagctcttgttccagtttggaatccagagctcaagctagctgaacctgaaaccacaaaacagattatctcaactactattgatctaaaatgtttgaactgaaaactaaattaacctgaaaacaactcagtatgccaaactaacaatatcattaatcaactccctaaatacaataccacgtcaccctatctaccaaagacaaattctcattccattgcatgataccaaatttgtttttttttttttttttgaacaacaagcatgataccaaatttaacactgaaagcaatacgaaagaaagaactcatatttgatagaaagtgtttaccaatgcgcagactccagataatgtcacgccggtggtgcaatgacttactcgatcatcgactgaatctgaatttggtattcatctccgtcgggtttccgcggcgggacgcggcgggacacggcgtagatcgatgtaggggattggtctcgagaaatcggtgactaggcaaatagtgttatgggcttagtttgggctttaataaatgatgggttatctggtaataggcccttatttgaggaatccacgggttttcgggttttaccgacccggacgggatcaatatgtggtgtcatgataatgaaattacttgaagacaacaatatcctataaaacgttaccacgacacctttatttccaaaacaaatgctccttacattgcccagctttttctgctcttattcctgactaatgacaaaagcatgacaccagtttcacaactatatatatttgtgatctctctaagccttcaactatttaaaaccaaaagaagcaaaaatgacagaactcaaatggatatgtatttcattctcactaacactcttgctaagcttagcagttgaagcagcctttaa

SEQ ID NO: 59257 - DNA, 199 bp, Arabidopsis thaliana landsberg
ggataacatcatgggattgcgatcctattgagagggccttatcaagcggcctgatgactaataaggacagtggtaggcaatctgttgctgtagtcagatgtgaaattcttagtcttatgaccggctaacggttgcgacggcctgtgccacggatgttttgacccagtggaaacgatcaactggtggtcgacaaagacta

SEQ ID NO: 59258 - DNA, 526 bp, Arabidopsis thaliana landsberg
taaattaccgatgaaaagaatcgaaaaggttatgccataaaatcaatgagtcttcgtgcagattcattggataagtcttgtagcaagaaattctaactgcactacaaattagagtgtgtatggaacaatttgatattttgatgcatgacccaatgtctccactttcctcactttataacagttccacatattcattatctctattagtcattgtatactaaagatttgtgatcctagctctattaattaatggttggtaaaaaaaaacattcttttatgctattggtttcattctgttgagttaattcaaaatcattttatattctttgccactatagtattaagcaaccaaattcaggttagtgatccactcacgctttgccttccgacattaattaatcacttgtgaaacctatcttattagattacgtaagccattttcttatccctactgtgtttattgtgtacacgtatcgaccgaccgaataaatcttcacatttaaaatataggaatatgtctttctgg

SEQ ID NO: 59259 - DNA, 553 bp, Arabidopsis thaliana landsberg
cagtatccacacatgtgcgggaatatatgaataaataatagtatcattttaccattttttataacaagatcatcttactttagttctaacccctttttgtttctagattgtctacgaatataaaataaaaatatagtattaaaattttatacgtggctaaacttacattttattgtattatatcacgttaaagctaagtgactaacgaattatatatacgatataataataataatttgtggttaattttaaaattttgttaatgaatgttctataaaaattaatatatattgataaatatgaaatttatcaaaaatttcatgggttacgtacaaaaatatataatcaccaattcaccattttggttatatatgttcatattagattttgataggtaataaataaataaatactgatgtaataatttacaaaagttttttaaatgttatatagtacaccttccatttaaaattaagtattcgttaaagtttttttacgagtataacttatacgaaacaaaaaaagtatagaaactatcttttctttcttcttt

SEQ ID NO: 59260 - DNA, 1132 bp, Arabidopsis thaliana landsberg
cactcccactgacttggctagtctgcttcttttcttgcgctttactcgacctaagtaaccacaaactaatcattgtggctcatcaacaagctagccatatcaacaactactcattacgattgtgctaatttaatcactcccctcttcgttgtcccaaactatattaaaattcaaactggaaatgcgactgtacccaacaaaggtagaattggactattacgtttaggagaagcaactcgtattccaaataaacagagaaaaagaagagaagatacctttgagagcgacactgcgtagggagagaagctgctggcgaggtttagatcgaagagaagaaagagagtagagcgcagaggaagaagaagaagaagaaggaagtgttgcttgcttggaggccgcagcgagaacagaaacggcggctatggagtgagcagatgccattgacattgcgacggagttcagcaactatcgcgacgattccagaaaacaattgaatcttgttttttcttattttggttttgcctgcggcttggactagagtatcggttaggggcttgaattcttcttataaggccgaagctatatattaaatttattaacgggccatatattgaaaaatatcaaatagaaagggcccatataatcaaagcccaataaggggatgcattggtcaaagggtttgaaactttgaattgaatagagttaacaatggtggtgcaaggcaagaaggaaataataataatgagaacagctattgtatgtttgtaaatcccacatgggaggagttaaggagtgcacgtgcacacgtatgtgtgtcttcttgtcctttctttgatggtcaaatatagaagaagagttatttgagagagagagagagaggctctggaaatcttgtgatccataaattgtctctcttcttttcctctgttctcatatacaaggaaaagggcttcctctgttctgttcctaataaatatctgaaatcaaaaacagagagagtcttttctttctttctttcactctatctctctccacacatgttacttacaacataatagtttctctatatctccttgagatctccatccagctgttgctttttttactaaacaaaacttctctttgtgtgagt

SEQ ID NO: 59261 - DNA, 1354 bp, Arabidopsis thaliana landsberg
aaaaccaaataaaccaatgagattcattgataaaataatcaccttcaaactgccactacaagaacaaggggactcaaagttcttaacggaatcctcctcttggcatatacgacattcaaccgattggatgagcggttcctcttcatcatcaacatcgcgttgttccgttgcctcttcttccttggttttcttaccatccatagatttagtagtagacaggcttgtggaaccctgagctctagaactctctccagaagattcaatagattgattggatcctctatctgagtttaaactttcaggtttcacgagacggtcagtacttgaactctgatcatcagccatctctcttttagcctcaatgtgtaaaaaaacgttgacctgttaaaaaccaagaaagatccaaagattcaaaataaaaatctcataactcttataatgataaatgttccatcatcaacacaaaaatctccatttctttgaatcgaaacatcataattgagctcagacaatcgatttcatttcattaaagcggaacaattcagggaaaatgtcttggtggaagagattaggatctgagtttaaaatatgtctttgtctccaaatttccccaaattttcaagacataaacctaatcggaaaatccccaaatttcagaatcacatctcaaccatgaaaacaaaagagagataccattcgattccatcacaattcaggaatgaaattgaaaccccaaaagtcacagaaatcaaaattcccaaatagcagaatcaaccaaccataacccaagaagaaaatgaaagaaaaaaagagataaaagagaagatgatcaaattatgattacctatagaagaagaaatatcgtgaatcgcagaaaatgggggaaagaagctctctttcgatttcttgaagggcacaaacagctctcaagataaaattcggacaaatgtgttttcttgtttgatgttcggtctggaaaaatattcagataagtaaatcaaaatttcgaagcgcgtgtaaacagataaatatataattaaatacacaaaaccggagttatggaggttgacgatttgacacggtaacgttatgataatcagattttcacaaaaaaaagtttttttttttttttgtacctatctatcttggttctttttagattttagataatattacaaaaataactctttaccaaaatacgataaaataattccattatttttagaaaatttaagattgaggtgtttgactgttgatagataatatggtaagattgagtaaaaaaaaaaaaaatatattccaattatgtcaaatttttgaaaaatttaagaagttccattaattacacgagatg

SEQ ID NO: 59262 - DNA, 367 bp, Arabidopsis thaliana landsberg
aataggagggtcttgtagattttcatgcttagtctaccgaagaaaaatatagtaacattaatcttgtttaagagagatattattttacagctcaaatctttggtctggtacaaaatgttaaacctttatgtacacaatccatattattagtcaatgatatgccctccattgttaaacccatatcacctgatcatggtggtatcttctacaatattctgaatctttgtcagatatttgcagctgagatttgcggatcttgctggttctgagagagttaaaaagctgggctcagctgtgttgtcaactcaaagaagctcaaagtatcaactaatcactatctgcattaggggatgttattggtgcttta

SEQ ID NO: 59263 - DNA, 660 bp, Arabidopsis thaliana landsberg
  unsure (1)..(660): unsure at all n locations
nnnnnnnnnnnnnnnnnnnnnnnnnnnnnnnnnnnnnnnnnnnnnnnnnnnnnnnnnnnnnnnnnnnnnnnnnnnnnnnnnnnnnnnnnnnnnnnnnnnnnnnnnnnnnnnnnnnnnnnnnnnnnnnnnnnnnnnnnnnnnnnnnnnnnnnnnnnnnnnnnnnnnnnnnnnnnnnnnnnnnnnnnnnnnnnnnnnnnnnnnnnnnnnnnnnnnnnnnnnnnnnnnnnnnnnnnnnnnnnnnnnnnnnnnnnnnnnnnnnnnnnnnnnnnnnnnnnnnnnnnnnnnnnnnnnnnnnnnnnnnnnnnnnnnnnnnnnnnnnnnnnnnnnnnnnnnnnnnnnnnnnnnnnnnnnnnnnnnnnnnnnnnnnnnnnnnnnnnnnnnnnnnnnnnnncccccggagagaggggtgtttctcccccgggagaaaaaaaaagaaaatccaccccccccccccaaaaaagtggggagggnnnnnccttttttaaaaaaataaactctctccccctcccatcgagggggggggggggtttttttttttttttttttggggtgggggggagagaaaaaaagaaattctcaagtaccacttttgtttttttttttttctcccccgccccctcccccagaaaaaaaaaaatagagggtggttntttttcttta

SEQ ID NO: 59264 - DNA, 1439 bp, Arabidopsis thaliana landsberg
ctccattcctcgaaacaactgcagtgcatcttcaatcattccacatgctagaagtccacccatcaacgaattgtacataaccgtatttctatcgtccaacccgtaaaaaaccttctttgcatcagagatgcaaccaacatttgcatacatatacaacaatggactcccaactaaaagataagactcaaacccaagtttgataacctgcccatgaatctgcttccccaaactaacatggccattgctagaagaaagtttcaacattgtcatcaacgtaaccctagtcaaattagcagaaaaatctctcatcatcgtattataagccttaacagctgcaccaaccaatccactcaatgaatagccttcaataagcacgttccaagtgacaccatctctatcaggaagcttctcaaaggtactttccatctctgagataagcccagcttttgaataagctaagagaagattgttccaggagaaaaggtttggttggggaattctgtcgaacactcggcgtgcataagtggagcttttcattaacgcatacgcgtggacgatgttgttatacaaaaacgtctctggatatggaagagctctgatgatattcccgtggatcatcttcacataacgactctgatttctagctcccaacccaatgcattgctttatctgaacagagtagtagttcgacgccattctcaaaataacaaacaaaactagcaataaaaataaaagagaaaagaaaattgatggaactaaaccaaccggtttaattgaataaaccagagagtgaagatagaatctccgagagactactagagtagtgtcttagaagaagcttgtaagtcaaagcgttccaaatctgtgtgtgtgtctcctctttgggttgtaagaaaacaaggaatcttcttaaaacatttctggtttcgttgttaagacttttttctcaaacattcgtcaaaaatcgtttcatcactatactccattggatattctattatacatcataacatttatttggcaaaattttataacgagttatattttcatatagccgcatcaggcattttccgtcgtaacaacgaatccacaatacaaagattgagatagcagaccaaactaaaatgttatgacttatacaaaactattttgcattgttggtgttcacagtttatactcttcttccactaatctcaaacgcttagtagtagtttagtctaagtatcgtattcggtaatagtaacatcattacaatatagtacatatagcaactttaaataaaaataaaaaagattacaataatttaatattctatctaacaggacgaaatatcatggctcaaccttcatatttgcagctggaagagatgctgttataaaaaaaattacagagaagttttacgcaaacaaaattcttattgcttggtgaaaaaagaaagt

SEQ ID NO: 59265 - DNA, 483 bp, Arabidopsis thaliana landsberg
tttttgtggtattgatccccacatcacacgaggttaaattctttttctttttaatgttcttgtagttaatcatctttttgtttaactttatatcatgcttaaacacttctacacgccaattattatagtttcgttcccaaaggcactactgattctgaatcgggacgtagaattaggactcattaattagaattctgagttatggaaactcttatctgataaaaaaaaaatggatacacttacacaattagattaaaataaaacaaaataataaaatgattttatctgtgaggtgatagagaacttcagtgattcttaattggggaatttgggaccatgagaaatatccactcaccccaaaaattaaaattaaaaaggtctttcttttagactgccccctcttacttttaacatttgaaaaataatgattttctttatgaataagaaatgaatatttgtctactttttattttgaatggattt

SEQ ID NO: 59266 - DNA, 1673 bp, Arabidopsis thaliana landsberg
  unsure (1)..(1673): unsure at all n locations
ggctccggcaaaattttaactggaaagctagacaattaataatatatagtcctgctctataatagaatactataaaatagtaaatcaaagccactgaattcagacaatccaaattttaatgctatcatgatcactctaaaaaacaacttttacttatacaagcgtgagaataatttggtcaaaaaagttaccattacttttgaattcaaaaacgttaattattgaggtttagctaatataacttaatttttagtgatattatcagatatagttgacgtatgtaaatttaacattgtagaagttcatattagtaaatgtaatccgtatgattttctaatgaatttaattgaattttagaaaaaaggtccaaactatttggataaatcgactacatggtattgatatgacaaaaaatctcatactaacaaaaatacataaattagtagtaaaataactctgtatagtaattagtaactataactatcatgtaatccaaaaaatcccataaaataaaataaaataaaagcattaagtagaaaaggtccacaaatctgtgattaataattagaggaattaaaacgacatatagaaatcgagtttaagggagcgtcagagaacgaacagcgaccaattactctctctactctctgcgctttaatttgaacttgtggagagagaaaagggttagatacagagagatagcgaaagagaagaagaagaagaggtctatcgacagagcaaacttcgtcaagagatccgttaaaaggatccatttggagctccgattcgagctagagtcaataatgagcggaagacagagatctgttgcagcggcggtgcatcaccagaggcagctctccgataaccctctcgatatgtcttcatccaatggcagatggcttcaatccactggtcttcagcattttcagtcatccgccaatgtaatctcagaatctgatccttttcatcgattcaaaattttgaatttctctgtgaagatctgttagttcaggagatagataaagttttccggtgggacttatttatctccgatctgaagttgtgggcaaatttgtttttgagtatatatgcattttctcgatgagacttgtgaacccaagttttttgaaatttaatgaacaggattatggatactatgctggtgggcaaggaggtggtggtcaagcagcaagaggataccagaatgctcagagaggaaacgagttctttggggaaccaactactcctcaatacggtgctcgtcctaccannnnnnnnnnnnnnnnnnnnnnnnnngagtttagtcctgggctcttagatctgcattcttttgatactgagcttcttcctgaggtaattggtgttctcgttcatttctactaattagtgtgccttattaaacttatttagtgccttttctaattgccatttacatatgtgagtatgcgattcaaagttttaccttttgtttaaatgtggctgcacttaggtaggcattcattaaattgattgcttcttggaagagtggactcgttacacagcactttttaggtcattggactatttttagtaaaagaaccttttttcttcttttttcctgtgaccatattatgagtatttttcctctaaccaatttggcaaacataagatacaacttagaacagagctgtttt

SEQ ID NO: 59267 - DNA, 89 bp, Arabidopsis thaliana landsberg
tcccctcaatgtgtatatcgttggccaggtacttacagggaaagatgtggtgacacaagagacagcaggtcgtatgataaatatattaa

SEQ ID NO: 59268 - DNA, 373 bp, Arabidopsis thaliana landsberg
atacattttttcgacgacgaattcagatgactcgcggctatggtaaactaatatattttgaataaaactaacctagctcaattgatatatgcctaaaatattattatgataagggaatacaacaccagtgatcacaaacgggacataagatctaagctatatattaaaagatatacacataatctgcgtacgcatagggtagcaatcggagggtccaaaaataaacactcacctcgggctggttagggaaccccaatttttcaaagggatgtctattttgttatgagaaaatgaactaatttcccttagaggattgaggttataaaactaaccctgtagacaaaaccataaacccaataaaaaaatggaacat

SEQ ID NO: 59269 - DNA, 1186 bp, Arabidopsis thaliana landsberg
  unsure (1)..(1186): unsure at all n locations
acaggtgttcttttcgatctcctttgtgcccaacccgaaagaccatggaatctcacggtaatttttcagattgaactttgtattatgatcttaagtaagcctgagggaaaaatattcttgtaatctaagcttaagtggacaatgttaatgatccactatgtcattctcttattcttgtaagctgacactcgtaagtatgttattaacaagatctttcaccagtgtccctcttgactagctaattgcacaaagcttacctccttatatctttgcatttcttgagcttttctgaaaattttgcttgcagatacactttagaggatatcctagcaacatactgataccatgtgaaggagaagattctgtaaaatggaactttgttaattctttgaaagaggttagtgaaaatttcttcaaagtttatgactttcttatcattttaagtgaaagtctatgttcaaattattttcgaatagactataaatactgttctattggatttcacatcgtagaacagtgaaatatttgttacctttgggagtgtttctcttttgttataagagtggttttcttcaacatattgatgatgtattgtctatataggtgtagctgcgtatatccgcaaatagtattgttagtaatttgttagttttgctgcaattggtttgccattatctaacgtaatacataggcttctcttgtgttatatttttacaatgctccatgccccaagtaaagaaaaaggataaatgataagacgttttgacatatgtgagatactgttatccgcttatcctgcaggcacaatatatcatcaatggaaattgcaagaatgttatgaacatgtctcagagtgatcaagaggatctatggacctctgtcatgaacggtacgagtggacgatgttaggcatatcaattactagcagtcacaaatcccttatcctttttgttacaccacttcttctggtcgtaactctagttgccactcgatgtaggtgtagtttttgcgttcagcattgccaatgtcactatttgcatcaaccatggtataaccgttggatatccatgactgatttagtaacgagtttgaaaactgatggtttggcaggtgatcttgatgcctatacaagattatcacccaagcttaaaatgggaacagtcgaagatgagttntcaaggaaaac

SEQ ID NO: 59270 - DNA, 275 bp, Arabidopsis thaliana landsberg
tgacttaacttactaaaagcgctattaagtcatttggttatccagctattcagtactacagaggtgtggggtgtcgaagccatctttttcctaaatccccaattttttttttttccctcgtttccgaatcttttaccggcgagactctgccatggattcaggcgaacaaaagtctaagggaaacctctactgattctatcttcttggtctccttcctaatttcatcgggggggtcgaaaaatttggcgggaaaattgcgttaaactgaccttact

SEQ ID NO: 59271 - DNA, 437 bp, Arabidopsis thaliana landsberg
attccagaaattgaaaatttgaggacagatctttggatgcataaaaaaaaaactttatgggttaattgtaaggcaagtgagtgagactaattagcttgaccctgcacaaaagtcatatatgctctacgcttatagctatttagcattgctgtactcattttgattctcttttcgcaattattgtggtcccgtttatgatcccaataatactaaataaagaatctatggtgctcttcatataaaaaaaggtatatttacatgatgcatatacacgcgacgtatacaactacaatctcatgttaagccgtgacgtaaacctatattatatttctcaagtatatatataaaagttgctaattaattttgaatcgcgattccagaattcgggttcagtgcagccataagtaaagaatgggtcgggcgagtaatgggaaatg

SEQ ID NO: 59272 - DNA, 300 bp, Arabidopsis thaliana landsberg
actttgatgggagagggaataaccagtttgagtttttgtctcaagaacagtggttttgtaagagatttctttcataataaagaaacagttaaaaagaaaaaccgcgatacttttcataaaacaaatatgaaaagaattaaataaagatagtgaactgaaagccttgtacctattgcatttagccatctccgtccgaatggtgaggtgtgatggtgtatgtacttgtgtctctgggtttagcatcctcttgatttcctctctgacggtttgctactggttagacttcgatgtaaggactat

SEQ ID NO: 59273 - DNA, 1696 bp, Arabidopsis thaliana landsberg
agaagagtggtacgtgccatgttatgacttcatatgttcaacctctgttactattttttggagctctattcatctgcaggtatatctatcaagtagttcctcgggactttctgagatttaattgttgagatattttggtggtatcctcatctgaagtgcttggttgagataattgattgctggtgactattccttatatagggcattagatcctgttgtccttcctacagaagctagcaaaattgtgaaggatcgactgttgaattttgtgaggtcattgtcaacggtacttgcatttgcttactgcttatccaggtaagcgtattgtctaatttaaatacaagacttcgtcttcatcttatgtttctgtattttagtggcttctatcacgtgaaattgctatgtggccatctcatgacttctgattctttgatgttcccatgcagtcttatccaacaaacacaaaagctattctcagaaacgagtaatccgagcgatacaagaaatgtatgtaaagtgacactcataaaaagtgctttaataattttgtagagttattattcttaggatgtttggtctattttgcatatctgtctacgcaagatcagaaatctctatcaaaaatataattggcttctcaatatgttttgctaatttgcccctggaatggtacagatgggatttcaatttgctgggaaagcattgtattctgctgtatgggttgctgctgtatcacttttcatggagttgctgggtttctctacacaaaaatggctcactgctggaggtcttgggacagttttgattactcttgctggccgagaggtgaaaaacctaattctcattttaattactggtttcttcggaatatccactgttcgctttagacgttccttttcctgttttatgctaaagatatttcataaaaactgagtttttttttgttttttggttccagattttgacaaactttctttcaagtgttatgattcatgcaacccggccatttgttttgaatgagtggattcaaacaaagatagaaggttatgaagtgtctggtactgtggaggttagaatctctgagcttagatgatgtgaattttttcctagcttcggtgcacgtcattgccatacctgaacgtttccttaaaattagctagctatcgttctgaattgcttgttgcaatgcatttacagcatgtaggttggtggtcaccaacaatcataagaggtgaagaccgcgaggcaattcacatcccaaaccataagttcacagttaacgtcgtgagaaaccttactcagaaaactcattggcgtattaaaactcacctagcaatcagtcacttggatgtcaacaaaataaatgtgagttttctaattcccatatggtcgttaactctttatacaagttaaggtccaatcatggagtttttttagctgatccttgtttggaacttcctcaaacagaatattgtagctgacatgcggaaagttttggccaagaatcctatggttgagcagcagaggttacatagaagggtattcttggagaatgtcattccagaaaatcaggccctctcggttagacttcaatacctatctcttcttttgcacccatcttcagatatttcaggcagcttttgaaaggtctggttcttacatctggttctcgttttacagatactgatctcttgtt

SEQ ID NO: 59274 - DNA, 152 bp, Arabidopsis thaliana landsberg
gtggaagcacttttttcgctattttcggaatggcaagaccactgctcaatgggatttgtgcaacattggaactggaacaaatccatcgcatacatctgctcataacaacgctctgttgattttaggatgaggatccatgcttcatcaaacgc

SEQ ID NO: 59275 - DNA, 723 bp, Arabidopsis thaliana landsberg
agccttagttagttgatttggtctcttgacttgttatgaatgggaaaaaaaattgcttgtttcttatacgttttagcattctacagcatacaatctgttttagcaggaagtcgtcggaagaaattaataggtccaggaggtgtcttacccctgaatcttggaggtctcatgatgtatagtccggcgagaagaacaaaaaccttaaacggcacaacatacaaaacgacagtagaaaccaaacaaagcaccatgaagatcgaagttgctcttggatctctccagcttaacagagcctgaactcgttctccttgacctgctatatctcccacaaccgtttgagctctactagcgatactccttaaccgctcgtaccgcatttttacaatccccgggtcttgagacgaaaaagggaaggtatcgaactcttcgttaagctcttccgggtggatattgtctgcaaatgatagtcttgtgtccatgtgtggaggttgtcttggacggagcctgtagttccataccccaagcatgaacaagcaaagagacatcactggaagaatcatctccggcgaacacactaacaccaagaagattatatgaatagctgtagtttctaccggtttcttccacctgcagatatcttgaaaccattctccggttcctagtaaaccagagaaaacagaactcaatctgaagagatttgcacggctcttcctcatgctccat

SEQ ID NO: 59276 - DNA, 456 bp, Arabidopsis thaliana landsberg
gactaccgggaataaaacgttttttgcgtcattttaaatgatgttcatagtcaaaaaataaaatcttctttttcttattttcaatgttctaaacattcgctgtaggtttcattgtttctatattaaaagctcaattcttcatctttcttggttaaaaagtcaattatctaattattggactcatgactctcatcaataaagttaaatcagttaatgtacgatgtttcttgcaactttttatataacaccaacttggccaacaaaaaatagaaagtgagactagtttactgtattttgtatgcaacaagatgttattaaaaaaggaatgatatagtgactagtgagtaacaacatcaatacaaaccatttaacttcatggtcttattacatctaatctataatctttaaatcatgaactaatcaccctagagattttatgttgtggcccaaaaaata

SEQ ID NO: 59277 - DNA, 600 bp, Arabidopsis thaliana landsberg
ggtttgatgagatcagatttgatgtaccatgattcttatagatatgatctagaatttcaaatacatgtgacaagattgttgatcatggacatacgtataatccatgcttttgtatatattgtaagtctatttacagtttcaatataattttttcgtttaaacgctattttgagatggtgattgcttttccattctatttcagaccaaatttcaattatgtttggaccgatcatattttctagacttattgaactttaatttcattaaaaaatgatgaatctaaataaaaaacgaagtagcaacatatagagaaattctacactactatattttgttagtttaatttctactttttcacctttttagcgatagactttagcagttacctataaagattaactatatacgttccatattctgaacttaaagattaaactaaggttctgaatgaagaccgtattagataaggtgggtggtgtaagacggacacctaaaataatattattttcttatgaactctgatgttattccttggaaaaactgctgatcttccaattacccgaatcgttttattgaagatgaaacgaacaattaaagtac

SEQ ID NO: 59278 - DNA, 648 bp, Arabidopsis thaliana landsberg
tatccatacttcatattgtttactgttatgatccattcttcacaagattgactagacgcgatatatgtgcactcttatcatcaagaagtgaaatatagcgtatgattagatatgtgaatttaaaggctagtcttacaagttgctagcgaatttggaaaacttgtatagtcgtttttttttttcggtatgatcacccaactttgacgtatctatttcagacactataaaagcatatgtttcgattactgtttatccaaatggaaatgtctcgcccaaaacctcaacatgaaattcaggaaagtccaacaacgtagttttcaagaagtcacaatatgtccctcctctcgtgtcacaccactcctagtcctagcgaactagctgcatagtgtaaaatactttatatatgaaaaacttagacataaatatatatacgtgtgcgtgtgtgatgcatgtttattgttttttattcaggcctatatgcattctacatgttttagatcaagatggtgatacagagacactactaatacaaacacttgcataaatcctctatgattatgtcattcgtattcattattttaaaaagaaaattgacgtcaatacttgaaatacattaattgatatatgttttcctagttttggagaaaa

SEQ ID NO: 59279 - DNA, 1803 bp, Arabidopsis thaliana landsberg
  unsure (1)..(1803): unsure at all n locations
gattgaggactgtgcatcgcgaaaaggtccagcggaaaccaatccctcagaccacaaaagactatctcttaactcacaagtgtaatcctacaaccaaaagaaactagactcttaattactacaatatctctggatcttgatatagacacaagcaacaatgatacgaataagagagacaacaaaaggactaacccggttcatgaggtcgaaacaagggtctagagggcttgtagtgagatactcttgtagagccagctcagaagcacttctcttcataccaatgtctttagctgtgtgattatccattttctttgaatgtgaacacacaagaaagaagagaattggtgggaaaagagaggagaggggaagagtaagtggtgatagacatcttctttatataagtctctcttctttactaaagttgtgaaaaagcttcttaatggctaagcccaattccatttgcattgtcaatgcaacgtcctcaattccaactttttttttctttaatgacaacaataccaaaagagaatagaaaagcaaagccacagagatgtatattaggctctgtagtattggtgcatattatggtaccaattatatgctaatgatgataacctttaatcccttaactagggagactatctaagatagctggagactctttcaatataaatcatatgtgaattcaaacattaagttgtttgtcagcacattaatatgttggagcttttgatttgaaaatgaatgttataggcatatatataagcagcttatattcataaaaggatcctaaaatatttcgaaataagcttttaaatatttgaaaatatttagataataatattgtcactcatgtacatttgtattcttggcacatgtcaagaaccttacacttacataaattactctactacataacctgtttgaattcgaatttgaagtacttaacgactaatttaagattaatatacaaggggcatagtccaatgatgaaactacaaaaacattgaaaatgaataaattaacctttttaccgaataatttcataaaacactaaaaactaatcttcataaataattgataatatttgaaggaaaaatattgataatattgtttcagttttttacacctttgtatcatgtagtaaaaatctttaaaatatttattatcattcattactactacaacaccaaaaagaaaaacttaagaattttccggtcacacgaacaacacaaaatgcttcgtcctttgtttactcttacttttcgccatatgcttttggaaagcagatctaaaagacgtttctttactccagcaccagaaatactttttatttcatcaacttttgtatgcgtaaaccaacttttctttcttttgatctgcacttcctttaaaaagttaaaatatttcacaacacaacaataaaaagaaacaaactaggtaatgtgtctttaaaaaatcaaaagttgtttagatcagaaaatagaatccaaaagcatttttaaattagtatttctcattaacgagaacattcgaacctagtggactacaatgtttacaatctaccgactaccgtagaattcagtaactatagtaactagtacaatttggattcagaatcttgttaatccttagtgatgttgaaaattttcatgtaatttagatgatgattgatgtacgattttttgtaagaaacanatttctacttgaggcacattgctaatttgtaagttaaaatacagacaatatgaatgacaattaaagtatgaacacagcagtaattttggtttcttttagcaaaaa

SEQ ID NO: 59280 - DNA, 412 bp, Arabidopsis thaliana landsberg
ttatgctccccgacgaattcagatcttggtaccgcctcttttagatagagttagattgcattacatatcttctctcttgtattcccaaatgcaaagtaatatcggttccatctctgttgggtaatggaaagaatagatgttgatcggtttgtgccatatcctaagaaaacaaaatatatgcgagttgtggtggatgctctgtattcaatgcagtaatgccccatatcagtgtcgttcctttaaagtttaaactatattttgcttgtgattaaatttgcagagcacttcacactgatatgattaatttttccatctgtatcatacctaaattaagaaaaatgacattgcgttgtcctaattctgggtgtccacgattggaaggcctcttgggttgatcttttcagggactaca

SEQ ID NO: 59281 - DNA, 507 bp, Arabidopsis thaliana landsberg
cagctaagagcgagcgagacgactgcttcctcgttcaccagttccctgtggggcaggtaggcactctgttgctgtcatatgagctgctgaatgaatgagccagccatgatatgatggctaatccttcatccagtggctgtgcccgagaggaggatagcaaaaaaaaaaaaaatgattgattggccaaattttttttgtcggggctgagctgctgaattcagatctgccggccggtcaacgagtagaagggtgaagccaccaagtgttgaacggagcagatgacaggctccacaggtggtcaggtcaaatgccaccatctggtggtggtggaatggttgtggaggacgaggcaaggttccaaatggtaggtagagaattattggactcggtcggcgcacgccccacggagtagcaaatgtgtttggttaaaatgacacgatgggatgggatgagacgatcccttaaataagattatttgattagagtcaaggttgggaggacatgata

SEQ ID NO: 59282 - DNA, 1011 bp, Arabidopsis thaliana landsberg
  unsure (1)..(1011): unsure at all n locations
tgacaggagaaagaaatatagcaaaatatattatttgttttcccatttatgtttttttgtgtaaaagaaaaatacgaaaaaatatctaaaattttactgaactacgataattatatcattttaaccatataagagaagaagaatctatattatagtacttttatcaaacaaacataatcttatttgttgtattacatgtgtgcatttatttaccatcacattattgtgttcaagaacacattgcttacctattaagtaaaatcaagcttgtctgcatatttgcctataaagtaaaataaaaaatcgccgatggtcgagcgagaccggttaacataaatagtgtcgtatgggtccttcaaactccactcattttataacacgcgtcaaaatagtcctatgattttctttttgttttttgttttcatatgagagaatattccaaaaagaaaaaaattacgtcggcaaaatcttatttttcattggagcttttttgtaattaaattacacgacacacaaaaaaaacagagaataaataattttatacatatctacgctttacacactcctttgcattcttggaaaagcctctctctctctatatatatcgattgaacattagttaattggctttaagaaaaacaaactatacaacaaccttctccaactccgaccttttcaactaagcataaaaaaacgatatggtcccaaatannnnnnnnnnnnnnnnnnnnnnnnnnnacggtggcagaatcaccccacgttatcccgacggcaagctccgttatcaaggcggcgatacacgtgtcctctccgtcactcgcgccatatccttcaccggttagttagttaatcagattttttttttttttatcaccctacgaattctagggttagtgtagccgtctagtagcacactcaccggttatctgtttgataatattaacagagctaaagaagaagctaaatgagatttgcgggattgcggtgactagtctccgatgtcagttacca

SEQ ID NO: 59283 - DNA, 488 bp, Arabidopsis thaliana landsberg
tcatagggttggattatggtctggtaggtctactgaagtggcgtttgaaatgacactaaccaacattgttatagtgtttttttcattattttttataccttttgtagttataacaatctatccatcctatgatgtgtttggtagatgttaatttatggactatagggttaaagtaaattattcttttattgtaacaagtagctttgtgtagtcaccgaaggaattagttaatgattttgcacaatgttttgggacaggaaatactaaactgggtgtggcaatgaggagggaaccatcagcatcagttgaggacatgcctcctatggggaggcaagcatactactgtgccattgtaattttgtacatgtatttgtttttggcatcaaatatttaaatacgaatgtgacatattactttaaaattgtcagaccaatctcttattcgcaacaggcatcatgtttgtgcgctggtgatcgttccagtttata

SEQ ID NO: 59284 - DNA, 457 bp, Arabidopsis thaliana landsberg
cgcacgggttttcagatcgatgttgaacgagccgctggtgccctgtcggctgctgcccaggcgcgaaccgacggtggcgacgtcggggtcggccatcagcatggccgtgagccgttccagccgctgtttgctttcggcgaacgagacggtggcgctggagctggcgcggccccagatcaggccggtgtcctgcgccgggaacaggccggtcttgaccacgccgagcaggaagaaggtggccacgatcagcaccagcggcgtcagcgagaacagcagcgcgtggcgcagcgagaagttcagcgcgcgggtgtagacgcgcagcatgccggcgtggaaaccatccagcgcgcgtgcgagtcgcgacggctgcaccttttcctgcgtggcgtgcccgttgaggaagcgcccgcacaacgccggcgtcagggtcagcgacacggtcgccgagaccacgatc

SEQ ID NO: 59285 - DNA, 1197 bp, Arabidopsis thaliana landsberg
gaaaagtttttctaaatcaggaatcatagtttccaacagaagctttatataaataccatcatctaatatactctaattatacattctaaaccatagatttaatggaaaccgattctaatctcaggaaactctctagctaattcatgcatttagagtattacgttaagttcttagctttgaaacaaaacaaaaaaaaaaaaaatcagttatttcagaatgtaagaaactgcatctagttacccagagatagtagacaagtcaactaacaagtgaacctacttatgcttatagcacaaactcatcacaaagaaaaaaaggggctaaaactgtacctctgctcttcccctaacgattttaacatttgtaagcccggtaacattcacaacgtgctccaagaaaacacaacgcttatttatagactccagtagagtaactctccaatctgagcaaaagaacttggcttttttaataatctagaataccataacaagcaaatctgacaaaatttgcataatcatatttgtaatgaaagagcacctgggcatgcaatggctagaaccaacccaggaagacctgccccgcttccaacatcgattaaattgatgtgatcaaacaaatcactggaatgcaagttgtaacaagtctttataggaggcaatatcgcaagagaatcttcgatatgcctctccattacttcatcagcttctttagttgctgtaaggttcattttctgcacattaataatcacaaggcctactcaaactcacatagatttcccaagcaaaacatactttaaacccaattgtaacatagacattcaccagtgatttcaattgagtaacatcagtttgagtttgaggtaggaatataaagcaaaccaaacactcagatgttaaagtgaagtgcgccaaaaaagggacaacaagattgaatttttttcattgtgcaggtaaaagcattcgacttgtcatgctttgacccagtaaggacttataacaaatacttggtgggcaacaagcttaaaccaaccattaaacccaaaattggattctaaagctttcaatttgattagaaattcacgaatcttttcaaacaaataatgcccacgaataattccaaagttccaacatgtttatctagcaaaagggtcgagagatagagagagacctggttccattggagaagtgtatcaacgta

SEQ ID NO: 59286 - DNA, 727 bp, Arabidopsis thaliana landsberg
aaccaacaatttgtaaaactcaaatcaaatctattgttattggaaaaactactactttttttataataagctgctgaaagtgattccaagagatattctttacctttttttttaaggaaaagagtttttttttacctttttagttgaaaaatatgactttaaaaatatgacccatctctgcaactaacctcaattaacaaaaatatcgcatcattgcttcaccaaggaactacataaagagttagtgatatctcatagggattcacataccagaagaaatttgtatatgatcacgtagattaggcaaaatttccagatacaaaacgttagttcttttaagacgttaaaaaagggtaagaaaaaacagcgctacaaattgttgatattgtcctcaaaaaagagttttttctggcttcatgacattctatgccaaaaattggtgcgacgtgaaagaaaattatatttttaaaaacaaattattgcattagctaatagtgactcaagaacaatattaatgatattcaatttgaatttacaactagagacatagttcgatatataagaaattaaacaatggatttggaagagttttatagcctttgtcaaggaaaagctcaaacgcaaaaaagccctaactaattgggacaaaagcaattccttttactttggctttgccaaaacttccgctactcacaaaagttggagacacaatcacctgggaatttga

SEQ ID NO: 59287 - DNA, 235 bp, Arabidopsis thaliana landsberg
taaaatagtcaaaattagaatggttaacttcaaattctatacctaaactaaaccataaatcctaaacccttataactcttatttttttttaccataaaatgtaatatggtctatataagtttgtcatcaatattattaacaaaaagtttcaacttttcctttttttttattataaaaaatcaacatttactttttcttttaatttatttccttatctatcacctcatacatttta

SEQ ID NO: 59288 - DNA, 459 bp, Arabidopsis thaliana landsberg
tctccagatttcatcgtttcgaaaatcattaccgaaactaccgacaaaacaagaactttatgaaacctgagtcggattctctcagtcgggtcgagaaaacagatgaaaaagtttcaagccaatcaaaattcccccaaaaatccaaaattttcagtcacctaacacagaaacagcaaaattcaaaaccctagaagaagaagaattgaatcgaaatgcgacgttcacaaacctgaccagaagccaaaacgacgggatccctcataagctcattagagagaggacaacgaaactcctcaggacaagacacagtctcgagcatctctaacgaggaagatttcgccatcttcctcatcgtcgcttctctcaacgcagacaaagcgtcctgtaactgatcaatcgtctgaacacccaaatcatcttcgtcatcgatcttaatcagcaacttcttcatctcacgct

SEQ ID NO: 59289 - DNA, 1460 bp, Arabidopsis thaliana landsberg
atttgtttcagacatggagtgatgtgtcatcttgtttaatattattgtctacagaatgttactaaaaggtgaaaaccaaatcttgataaagaagttaattataaaacaaaatcttccggttacatttttttggtttttttgaatgttatagatttggtcaactctcttaattcatccaatcacgcgtcgaaagctataataacacttggttgcttttttttttttaatacaattttgtttttaaaacgtttagaacaaaaataaaaagaagaaaaagaaagagtgaaaaacggcaggggtaaaaacgtcaaagaagaaatagagagagagagagtgaagaggagtacaacagaatccacgcggaaagacagctgttcccatgttggaataactgtgcgggtcccactttcattacactcactcctctcgcacatcttctaattttcgccgccgttaccgtctttggaattttttttggtttaccacactaatgttacatttttcgttagagatgattttgttttttgattacaacctcctacgacatttgagttattgagattacttttataaatttccttactctgtttctttgggccaacaattcaaacaatgatggtaatggagtgatcaattgacaaaaaaaaaacacgaatcaaacaatgatcgattatataaagctgttatggtctaataactagataataaaatcatcataagtaaggaaccaaattcgagtactcgcaataaaccaatactagtaatttagtggataaaattatagttatggggttcgggtcttaaagaattgagtttgatcattgtaattcgtaaacctttgaaacatattctgtttttttcacaaacttttgggaatatttgttttggcttgacaaactctccaaatagctctttcgtcgtttaaaatctcttagttacaaaacaatgtattgaggtttcgaactcccaaaaccaaacacaagggaaagatgaaaaccattaggccgatcaattactattaagttataactagctaaattaccaataacgtgtatggatttatacccaaaaaaataagtaaacgtgtatgagtctacgagacaaatcgtgtcggctgtattttgacaccttagtcgcgaggtaggtcatacgtgctgcattattaaattcttaatttggcgaattaattagtaaatactcctaaataatgacgtggcaaattcggtgcaggccacaattctattatagtgaagcactagagtacaacaacaacacttgtgcctcttcttctctcttcctcatatttattactctctctttcacaaacacacagaaaataaataaataaaattaattaatgtgagaaaatcaattcaaaaatttggacatacgtatcatctgagagaagaagggtttggtgaataccggcgggtggaaccgacggcgatggcgaagaccgg

SEQ ID NO: 59290 - DNA, 1156 bp, Arabidopsis thaliana landsberg
taacccattgaatatatattcttttgacaaaaaatattttatttagtatggttttaaaatatgacttttagaagattataaatgttaaattctatttatttaactcttaaaaatcaattcattttctttagtgaaaaataaaggcatctttgaaatcaaaatcccaacattattactttaagaggggtattcaataattgattttaacagaatgaaatggaacgagaaaagttttattataatgattatttctctcccaatttgtgaattagaaaacttttgttttctatttaatataaattataaatattaaaaactccacaaatcctaaactcattgaactaaaaaaagccccaaatcctaactagatcagccaggtgaaatctactacatgccatggagcacatcatatacaagcttttgtcccaaaggggacatatattggcagaatctagagagtactttcaattcctaatcttttgaaaattttgccattctttcggcaagtttgtaatccgtgttgtacacctcgaactcaactcgtatatgaccttgaggttcctcggtctccatatcacccctctatggagtgcctattgttgtagtcgtccttctttatgaagagaacaatatgttttctaccctccttagtccttatccaccttggtctccggttttccaaccgagaaccccccctcattactcctaacctgttttactatctttcgcgtaagaagtaatgtatctcacatgccagtgagaattgaggtttcgactcatcatcttctcgtttgtggcaatgtatctaatcgctagtgtttttgtcatgaggaatttgatattatttgtgttttaaaggtctttttgtgcctcattacccatgaatatgtattatcatggaaaatatcaatgacgaaagaacttggatcttcttcccattttgattgtgcacatactctaaaattttcatttgatatataatataacattgatattttctcatttatctgtattaagtcttgaagttaatctcttatggatatagagatgctacatcattacgcgattactaggtttctgtattattaaatagaggacgactgctgtcttttccactatatagtgtaacttactggagagatgcatttaccttcat

SEQ ID NO: 59291 - DNA, 358 bp, Arabidopsis thaliana landsberg
  unsure (1)..(358): unsure at all n locations
nnnnnnnnnnnnnnnnnnnnnnnnnnnnnnnnnnnnnnnnnnnnnnnnnnnnnnnnnnnnnnnnnnnnnnnnnnnnnnnnnnnnnnnnnnnnnnnnnnnnnnnnnnnnnnnnnnnnnnnnnnnnnnnnnnnnnnnnnnnnnnnnnnnnnnnnnnntatttattcaattttctttttcctttcctttacttttttattatactttttttaattaatattttttttttataatttttttttcattattttcttttattttttcttattattttatattctatatttttattttttatttattttttacttcttttttattttctatttacttattttttttcttttattttttttttttt

SEQ ID NO: 59292 - DNA, 690 bp, Arabidopsis thaliana landsberg
aatctgttaatgctcttaatttgccaaaataatcaggtcaatatatatgatttctttccattctaatcccgctctttacgaaacttgaatatccctaaaaatcgataacagtttcaaagaacaataaaaacaaaaaaggttcgatttttaaaaaaaattgtttttttttgctaaatgctttttacaaagacaaaatcatacaaaattctaaaagaaacatacatttatgatttaacgcaaacccaaaaagagccttcaccttttttctcttcgtcttcttcaccatcttgtggggaaaaacaaaacttctccggccatggatcctggcgacccaacttcaataatcttttcaaagatcagaactttagaacctgagaacgcttccaaagtcattggctattttctcttgcaagacatggaacaaagagatttgattcgaattgcttttggtcctgactctctcatacagactttctgtcagaaagctaaagtcgatttaggtttttcctcgaacggtttctcgagacccatcaatatccatggccagtcattgtccccgtcttctcccagaaatgggttcttagagttctcgagaaaccctagtaaccctttgtcttcttcgttaactttgaacacactcagagataataagcctaacttcaattctagtccttttcgtgagagttcatc

SEQ ID NO: 59293 - DNA, 205 bp, Arabidopsis thaliana landsberg
tccttggaaagatgttcaattaatcgacattaacttaactcacaatggagtcgacggtcctgcaattgcgttgtgtgagaacgttcatggatctgctactgggaagatggttccttcgcattgtctaaattgatccagtccaaacatggtcatgtttctcattttttggtttacatcattataacattctatggtctattctttt

SEQ ID NO: 59294 - DNA, 379 bp, Arabidopsis thaliana landsberg
ggtcggtggagcacagagacaacgctattactgctacacaaactgcactatatgatggcgcaaagccctgtcttgtccaatactatggcatatatgtattgtgtgtgtttgtgtttgcgtatgcgtatgtgtgcttaaatatctctatatagaggatatatatatatatatatatatatgcatatgtatatatatacatatacatgctcaaggactagaaatacgctcccacactcgcactctctctctctcccaccctcacactaagatctctctcgggctactcactcgcgggatatacactcacatatgaacagctatatacggggacttgtattcggcgttcccccccccacacctccatatacgagcactccca

SEQ ID NO: 59295 - DNA, 230 bp, Arabidopsis thaliana landsberg
ttttaatgatttctgtataatggagttctaatccggtgctattcaatatcacgtttaacacgtttttgttatttaatgggttctcccctgcattttattttaccctttttcactttttgtttcttttcttctcttttttcttcttctcttttctttcctttttttctttttctttattactacttactcttctcttattcatttctttctttatttctctctactttttt

SEQ ID NO: 59296 - DNA, 1079 bp, Arabidopsis thaliana landsberg
aaatttttgtttctaaataaacaaatctataaacacattttttgtaatgaagaacttaaactctgtcttaaacgcaaataatttctgaatttctccagttctttcttcttaatttgcaggttttggtcccaccgcttaaattaggaaaaagtttccttttttcgttctgggttttcttctctgattattatgattcattcctcgagtgtcgagctttattctcaagtgtcaaattattgagggtaaaatttacttcaacgacgaaagttcattgaaccttagctcttacgttgcgtcttaaatctcattctcacccacaaaaacaaaaaagaaaagtttgcattttttttctttccaggattgggtttttgggaatttaaaggaaaagactttacccttttattcgttttaatttcaccaacccattaaagctcgttgatgacgattcctctgcttttccagtaagttttttgtaatctttcctcttctcaagattgctacttgtttaattcctcccttatggatcttgtcgctttcagattcgtggacatcgttttgttcgattgatgtttcgttttactctactctgacttggaacaatggctgctaagagatctatatactgtcttcttcttcttcctctgctcttgtctttactgatctggattccttcgatctccttagctgctactaaccctgatgatggtaagcacttatttttgcttctaaattacattttgtctcactgaattttagagtgagatctgtgcttattggttgaggagttttagattttgttcatgagtttctgagaattaatcagcattgttgtaattgtgactcagttgctgcaattaacggattattcgctgcacttggagcacctgttcttcctggttggattgcttctggtggagacccatgtggtgaagcttggcaaggcattatctgcaatgtttcagatattataagcatgtaagggcgtctttcagagatatcaacaacttttgagttatcttttgtatcaatgctctgttaattctatcttgaatggttgcagaactgtaaatgctgcaaat

SEQ ID NO: 59297 - DNA, 1187 bp, Arabidopsis thaliana landsberg
tgtgtttctctttagagatgtctcagttatttctcattcgctgcttcattctaactcatttctttgccatagccacttctctaaacgatcaaggtcttgctcttctttcctttaaacaatccatacaaaaccagagtgactctgtttttaccaattggaactcttcagattcaaacccttgttcttggcaaggtgttacatgtaattatgatatgagagttgtctcgattcgtcttcctaataaacgtctttcgggttctcttgatccatccattggaagtctcttgtcccttcgtcacattaacctaagagacaatgactttcaagggaagttacctgtggaactctttggacttaaagggcttcaaagcttggtgctttctggaaattctttttccgggtttgtcccagaagagattggtagcttgaagagtctaatgactctggatctttcggagaattctttcaacggttcgatttctttgtcgcttattccatgcaagaagctgaaaacgcttgttcttagcaagaacagtttctctggagatcttccaacagggttaggttctaacttggttcatcttcggacactgaatctttctttcaatcgcttgactggaacgatccccgaagatgtaggaagtctggagaatctgaaaggtacacttgatctttctcataacttcttctcaggtatgattccaacaagtcttggaaatctccctgagcttctctatgtcgatctttcttacaataatctcagtggtccgataccaaaattcaacgttctgttgaatgccggtccaaatgctttccaagggaaccctttcctctgtggattaccgataaagatttcttgcagcacaagaaacacacaagtagttccttctcaactatatacaagaagagccaaccatcattctagactctgcatcatccttacagccactggaggcacagtcgccggaatcatttttcttgcttcattattcatctactatctccgaaaagcatcggctcgtgcaaacaaagatcaaaacaaccgaacatgtcatataaacgagaaactgaagaagacgacaaagccagagtttctctgtttcaagactgggaattcagaatctgaaacgctagatgagaacaaaaatcaacaaggtttcatgccaatggacccggaaatcgaattt

SEQ ID NO: 59298 - DNA, 1327 bp, Arabidopsis thaliana landsberg
gtctgtacccaacgatcatggaaacgaccctatggtgttggtttgctggtaggtggattggatgagtctggagcccacctttactacaactgtcccagcggaaactacttcgagtaccaagcttttgctattggatcccgttcccaagcagcaaagacctatctggaacgcaggtttgagagctttggggattcttctagagaagatctgatcaaagatgctattttggctgttagggagacattgcaaggggaaacactgaagagttctctctgcacagtcgctattctaggagtcgatgaaccgttccacttcctggaccaggaagcaatacagaaagtgatcgacacatttgagaaagtgccagaggaagaggaaggagaaggcgaggctggtgagggtgaggccgaagctgccgaggctgcaccagcagaacgaggtggtggtgttgcaggtgaccaagacgtggctccaatggaaatgtaaggcttgtgtgtgtaacgctggaactattttatttcgatgttagttggatttttactttgcaaaatggctgcgggtttagattatatgcttgagaagttgaaaccatttcgtcatttaaactcaatagctgccatcaagactttctcgtattctggtcttttggtttaaatctgaaatctgttcacgacttcctatctctttggttctgcaattccttgctaaaaaagtgtgtagtgtcatctaactagggctgtcaagcaggccaagccagccttgttaggcctgccctgcagagggttttaacaaaaaaattgaccagcctcaagtttccttcgaaggttaatctaaaatttgttaacccaaagaactccagaatttaatgttaaatcgtaaattatgataaaatcattagctcgacgtcatttagtctaatagaaaacataagtggccccctacatggtgacgactacgaaagactttggataatgggaaccatgtaaaccagacccattgactttgccgtctctcttaatcatttgctttatccagcatccgttctcgtatatacaccaaattaaccatcaaaggaaaaaaaaatgatcaagagtttatcattgcatctaagagctagtggatcatataaaattgaattaacaacgaacagtcatgttttcggtgtcaaaagacattgtgaattaaacatacgaaactacgtcaaatcgtttaaggcaattggaaaacacaagatcttttacgggttcaggtgtctcgttgtaagattatcctacattacaacagggtttgaacgataatcattgtcaaccgtttctatcaagaacat

SEQ ID NO: 59299 - DNA, 161 bp, Arabidopsis thaliana landsberg
  unsure (1)..(161): unsure at all n locations
cattnngcttgaggaagcgtgttcacggggtttctctatagatgagagagactttatgagtctttcccaaataactctggtcttgcaatcggtttatttgcactaggttttggcgaaatctagggaagcactgatgactgtgaagtaggttttttaaatga

SEQ ID NO: 59300 - DNA, 964 bp, Arabidopsis thaliana landsberg
cttgtccccagtttcttctgcatcaccaccagctgctcttacaaccactgcaaatgcacctgaagagcttgagactctggtacttgacataaacaaaaccgaatttatacttaacagcaatacctgctgttagatgcttaatgcttaatattcttggtttaatcaatttgtacagaagctggagttgtttcctagtgagagactcttaaacagggagagctcgatcaaggaaccaacgaagcaaagtcttaaactctttgggaagacagttttggtatctgattcaggcatgtcctcttctctaacaacttcaacatattgtaaatccccaattcagccattaccacggaaactctcatcatccaagacactacccataataagaaactcacaagaagaactcttgagctgctggatacaagtccctcttaagcaagaagatgtggaaaatagatgtttggattcaggaaaggctgtccaaaacgaaggatcatcgactggatcaaacactggttcggtggatgatacgggacacacggaaaagaccacagaacccgaaacaatgctatgtcaatgggagtttaaaccaagtgagaggtctgcattttctgagctcagaagaacaaactccgagtcaaattcaagaggatttggtccatacaagaagagaaagatggtaacagaagaagaagagcatgagattcatctccacttataacacattttcttacgtaccctaaagaagagactttaaatttactattcattcgactttctaagttttcatcaatgtaatttttgttgttgtttcattgttttctcttgaggtgtttgttctctaggctaaaattttctgcaaaagtttgtaactgtaaaactcgtgtacaatttatacagttaaatctaatgattatgagatctttcttaattgatggttcaacaaaagcaagtctcaggtgtctct

SEQ ID NO: 59301 - DNA, 496 bp, Arabidopsis thaliana landsberg
tttaatcaggattaacggtccgctgacgcatatcttatacagtatttactgtataaattaataaataggtaaaaaatggaatcctgatttgttgttccattcttcttttgaataaaaaaatatcaatgcaataacacaattgggcttccacagtggctttgtacattttccagtgtccagaattgtaatatctaaggtctccgaatcatttacactcgcatagatgagatgagaaagggattaaggtctctgaatcattttctagtgtccagaattgaaatattttgctagctgtctctcgatgcagaaaagctaataccgtcttcaggattcctagtaaatgtggggcatagccatttgatcatgttagggcctaacacctgtaaaaagcatgtaactttttatggtcaagttcttaaccagaaagacataacagtgatgaagtgattgaagacacaaaagataaaggtcaatgtgatgaaaggtaccgaggtga

SEQ ID NO: 59302 - DNA, 540 bp, Arabidopsis thaliana landsberg
cggttcgttacatgggaaaaagatacaggaagtgttcatagcaggccggtgatgtcgatgtatgacgataaagaggttttgatacgttccaacacatcccacatcttattcacgcctttccaggacaccagaggggagcgtttcaatttgacactacgaatgaagttgccggttgcatatttggtacatgcgccaggtactttattacctttgtaagccttgcagatgtagcttatgaagttttcatagtcctggtttttaaaaaggagacaatgagcttagttcaaagaccagaaacatcaagaacaaacacatacagagagagaacttctgttccaattgatcaatattaattttatgagcctttgccaacaagcctatgtacaatttcacttcccgtaggctaactacagctaaaagactaaactctccttccaaacttccaagacgcatctaactcacaagattaccatgtagggacttgcactaactatgataccagctttgaaaaattgtacgggttaaagatgatcccaaatc

SEQ ID NO: 59303 - DNA, 484 bp, Arabidopsis thaliana landsberg
tcctaaacttaccgcaccagtttgggcacaagccgagagaaggctcacaaacgtcgctgaatccggttcgaaccccgactctcgcatctgataaaacacctgaatcgcttcatccgccaacccattttgctcaaatccagaaaccaacgaattccacgccacaatagacttctcaggcattctatcgaacacttggcgtgcaccttccatatcgccacactttgaataaaacgtcaccaaagcagcctgaacgtaagtatccaatccaaacccagaaaccactgcatgacaatgaacaccttttccgattctcaaggcagagagatcggcgcaagacttgataacagaggtgaaagtgtagttactcggagagacgtttgaagatacatacgacggtaataagcaacgcaatgcaaaggtaaacgcaacttaaaagtcgatttgataactgaattgaagaggaagtcatcgggaaggggaacgg

SEQ ID NO: 59304 - DNA, 1778 bp, Arabidopsis thaliana landsberg
ggagcgaatcctagccctctcttcgacaatcgccttggctacacgaatatgaaacacataaagataaaaaaggagaataaaatagaaagaatgatcaaatagatactctgaataaatacctatctttagataggccacctcctccttaagttgtgcaacatattcatcaattctggatattatttccggaaatgattcgatttttgagatttcttgctcgaactcattacaatccttccagctcctggggattgaaagcaaagggaagcttgggagagaagaaaggattttaaatcagagtggaaaaaacacattaaaaacctagaaattacctcttcttaaagtatcctggacgaggatgacgaattaagaataaatgtgaacgggcctgtcggatttcaaatgtgtaatgcgagtgcaccatcttgagaacgagatctgtcgtctctctattatagtcttcttctcttttgcaacaaagtttacttttgtcgttgaatttaatgatagggataagatcaataatatcagtgttatttaaaaatacaaagattgtatttattggagtactaggatctttagtaaaatctaaacaaactataatttagatttcaatactgaaattctaaacagagtttatatattttaaagaagcatttaatgtatatatttgtttccttcgataattcttaaaaacatttagagaaaacgaaaattgaacgccataactattagtgatgatcatgatcactgctgaactctactagagacgatacactacaatgtaaaaactgatggatgatatttataagttaacacaacattttattggttttaggatcagagaagaatttgagaaagcatgatcaatgatgttcattccgatcgcctcactttattcttccatatacacaaaaaattacacaatgtgtgtgtttgattttttctttgtttttcgttgctttaatcatatatagatttttccgtccaactttgtcttttttgagctttttgtctctaataatctgaattactctaaacgaatctttctttattttttcataactgaaaaattgcatatgataaaattaatgcaaatcactattttttttcttaaataaaacttgatcaagtaaaaaaaacataaatccggtttaaacccttgtttgatcctcacatcttgttcaggagttgagtctccattaataatgacctatataaaatagcaaaagtaatcattaatatatataccaatgtagctagtataagaaacagtctattgatgtaaaatcagttgttagacttattttctcatcgcttccatattcctaagtacctcggtggtaatcctctcatcctcgtcgatattcctacgctcctccatggttctcatttgtaactccgttatcatcctagacacattggcaatgactgcaaaataaaataaaaaaatagacatgattctcatgcaatagaaagaattgatcaaatagagatatcaaaaaatatataaatttttacctgcatctcttttcatctgcttcacttcgagttcctgaattcgttcgtcaattctggatatttgttctgaaactgattcgagtttgaagacttcttcgagaaattcaaaacaattcttcctccttgggattgaatgtgaagggtggcttggaggagaagcaagtgttctagaatattattggaaggataattaattatcaatatcacaattaaagaaattctaaaaatgaaaatactactagacatatataatacct

SEQ ID NO: 59305 - DNA, 336 bp, Arabidopsis thaliana landsberg
aacgacaacatttgttttctttttgttgatttaatcaaattccttattagttttttttcttcttcttctttttaatcccaaatgatgtgatcacatgatacgttctattcattagtaagtttcacatttttggaacccacatgaaagttaaattgattaatcaaagagattttctcatggcgtgtacacgttgtaatccacaattaattacttttttgataacaaccaacatataatgagcttcatttgttagatgttataaagtttgatcgcatgactaatgacttaaatggggtaaccgatttaacacctgatctcttcaaattaattgagtta

SEQ ID NO: 59306 - DNA, 1592 bp, Arabidopsis thaliana landsberg
gaatccccatatgctttggatactagtatgtcctagacagggggtcatgagagtaaaatctccagtgtttattaccattgggccaaaaaagcccattaaaaacccatattagtaacttttttttttttggacaaacccatattagtaactaagctagtctttttgggtctttattctttatcttcaaagggtgcaaatttggatgcttggtgttcatggacttatcttagacacaaggtaaccacacaaactaactagagacctatctttctacatgagtgtaagattcaaggaatctatttcagcttcaacttctcttgttaagacaacttaactagatactaaccaagagccacaatagattgtttgtagaaatctactttgagcatcactttatcctacaattataatcaatgttgacaatgcaaatattctaaaacagctcttcaaccattggttttgtgcagtaacttaccgtagatagcccaaatcgcctttcgcctttcgggtgtcataagcaaagttcctgcaacacaaacattagaactcagaacaccactctacattacaccaaagccaaagaagagttaaaaagatccataccaagataaaacgtcttagcatattcagcgcaaacttcaccgcatcgatcataagcttcacccaacaaactcaaactcccaggaagaacaacatcttgtggtttcttcacatcaagatcataagaagaagaccttagctgtttgttcaccaaagcagcttgtttcaacacaacattgtaaaccttctcttcagatgaaagagctatctctccagaaggacttgctactaagcttgaagacacaacaccaattcttctacttcggttcattacaaaagaagaactccaagttggtatctgcttcttcttacctttgtttagtctctgattctgacaaggagagaacagtctagaagattctagaacccttaccaacccacaattgttcattgggtctggatttagagaagaagtagcaacccataacactgctacagaagaagacatactcaagttcttgagcgcgtgagagaaaaatctcaacttttttagttttcttctgttgactctgtttcttctacagttagaagaatcaaactcccaactttttttcagtgaaacccagaattggatcaaactggtaaaagactaaagctttcctgcaaattgaatacaaaaacaagtagattaggaatcgagatctctaaatctgtatataaagccaaatttaagcgagatgagaaactcaatttcttcaagcaagtaaaatagcgaagagacacaaacatacataaagagaagatcttcaaaagcaaatgaagaacatgaaaagagaaaaaacaagtaaatcctctaatcgtattggctaaatactcaactgggttcaactattttccactcgaaaacaaattagattatgtatcgttgtgttacatcaacattaggtataagagcccaaaagtatcaaaacagtgaaccacatggcagatgaagcttaaccaaacgagcgaaaatgagtgatggacacaaaagcctacctttctctctgtaa

SEQ ID NO: 59307 - DNA, 178 bp, Arabidopsis thaliana landsberg
  unsure (1)..(178): unsure at all n locations
ctactttaaccctaacaaaattcatactatttttccaatttttatacacaaatnaactgggcccccttagagtcttttctccatattaccccctatcttcccttttttcctctctatttttcaatttatttctttttattttaatccttatattacttttcatccttttaattatttt

SEQ ID NO: 59308 - DNA, 442 bp, Arabidopsis thaliana landsberg
ccttacatcgggaaggggtgacgttcctgataccggagtagaatactattgatcattctcaatggcccagcccaatagagatagaaatcatttctctaatttcttgatcgataaaaaagggcataactcataactaaactaattgtgttgcccatgaagggtagtcagtagcaacggatgcactacacttgtacttatactttgagcgcactagcctttagcggcgttgcgcgttaggacgactacgaaatccgctttcttttgcatccgctttctttgcttcctccgttcccggcttattcttcaactcagcacctgtcttttgggttgagcactagcacctggcacttctaccactgatcccattcactcaacagatttcttctttgacaagccaggactggactgtacgaattgggtgggcacttggctaatgggatgt

SEQ ID NO: 59309 - DNA, 1217 bp, Arabidopsis thaliana landsberg
aaaatcttatatatagcctcttaaattaacttcaattcaataaaacaacaacttttccggatatggttttcattttttgaaaaccttggtctatttaccatattcgttaaaaacacaactccttaattaggtaatattacccaaaaataggtaagattaccgattgatgtagaaccatttctgaactcccgtacgtatcttcttcggatcttacctaaaattcagtattgacaaaaatattattgcgccgccacatttgaaatttgttttctaagatcatactaatatgatatcatcatctattaatcatgtttttaaacactaccacagtatattaaacgattaatatattgcattctagcaccaatataatcactcacgagaaaagggtaaaaaggaagaaacacacttaaacataatcatataagtctccaactctaacagtaattataatcacatgattcacatttgcattaagggatcgatttatgcttaatactgtaaccaccatcgaaattaatgccttaaacgatcattatcatctagttctagagtgatcaatactgccaaaaaaaaaaaaaaaaaaatcaagtagcaaagaatttctcgtggatgtgtggttagggagtcatgagaccaatcaagttttattaaatgtgttttaagtgattattgccaggagaaagttgtgaatacttagtggatttgctaccaaaaccaaaaacatcatttccaaatcttttctatttaataaggatccaacactaattaaagaaacaattaatgttttagattatgagtcaactcttatcatgtctgaactaatggctatggttgaggaaagtggattaccttttcccatagtgctgctaccaccatttgactgacccttaagcaacgaaattgaatcagatcgtggatgatttcattggtagtttttaattttaaaattttaattagactaaaaatgaagatgatttataatataggcatatagcatacatagtttaaattattttgttaaatggaattattatttgatgtcaacaacatacatactgatttgaatatggatggtacacaacaacgacaacaatacaaataatcaagctacatgtactcggctatcaaatgaacatgtacgtacataaacaaatgtttacaaaaccaagtgaagtcccccccccaatgcttcctctctctctattttttttatt

SEQ ID NO: 59310 - DNA, 598 bp, Arabidopsis thaliana landsberg
ggaaagtgtagaagtccgtgtccagggcgccgatgtggggaaactcataaacgtggtgagagatgaaacggaagcgagaaaaggagccactccctcagaatcacccaccacacgatcgatcatctcagagcctgactcaagaaccgagcctcgacctaaagaaccagaccccatcaccaattactcagaaacaaagagctttaactgctgctcggattcttcaccagctgagaccagaactaactcattcgtgcctgaagaggaaacaactccgactccacctgttaaagagacgttggacatcaagtcgttcagacagagagcagaagcgcttgaaggtctattggaactatctgcggatttgctggaacagagcaggctcgaagagctagccattgtgttgcagccgtttgggaagaacaaagtttcgcctcgagagaccgctatttggttggccaagagtttgaaaggaatgatgatcgaagacatcaataataataatagcagtggcagctccaggaattgttcatgaaggtaaattatcatacaagcatttgcaaccaaactctctttgggttactttttttctctttaacat

SEQ ID NO: 59311 - DNA, 725 bp, Arabidopsis thaliana landsberg
cgactactataccttcttacaaataaaaagaaagaaaagaaaagtggttattggtccatattagataaatgagtaagagagaacctagtaaaccactgccgtagagaccaatgactacgaccaccacgcggtttgtgatgaagagggtcccaaaatggatacacttctctacctattttttaacatatcctacaaaatctcaatggtttttatttagttcgataaagtattattccgaatgtaaatagtggaacaaaaagaacagctgggaggattttgtttaaaaggacactacacttcccagctttccctcactgcccgaaaagaacactgcagaaacactttcctctgttcacagagaaagagagagatgatgctttacagcaacaatagttggagatcgaattccattttaatacttctacttggtctctccattgtggccgccgcagactccgccggcaaaacttcaccggtcgaagacggtacgctgttcactaacataatctcatcacttttcttggttttgtttttggggggtatagctcatagtgttaatgggttgacgaaagcatgattctttttgcttctgtggttatttgatttcggaaacctgacccattctctctgttctctctgttccaagaacagaggattcaccatggcctgttgtacttagttcttctttctaaaacggtttactttcagatctgtataacacaaaa

SEQ ID NO: 59312 - DNA, 564 bp, Arabidopsis thaliana landsberg
cgtcacgagctggaacacatgtgaagagaacagaaacatgattaaatcagcggatttgtcttggagctttctcgaagtctgtccacaagtaagaaagaaagaagagtcgttgtttatattacgacaacctaaaatcatttatataggttttctactaataagaatctattactcgtacaaaaactttgaagtgggacaatgacaagagacaaaaagtaaaacataagaacatgtgaactgataaatagaaacataattaaaaaaaggcaaaaaaaggagagaagcaagttaagtgctttaggcaacatctaaagttttcttctgctataaacaaagaattcctttttttcttatggtaaaatacctttttggcgtcttatatatatgcattataaaaaagagtggaatacagattaattcatcaagaaatattacaattccctcgtagaggcatgaatcaaaaactcgttataggggttaagtagattctcttagcgaaaagtataagagcctagacataattggagaatttcagtaacatagtataagcatatttatgataag

SEQ ID NO: 59313 - DNA, 1773 bp, Arabidopsis thaliana landsberg
ttttgtcacatcccctgaacttgtcccctttgaatattttccaagttcaattatgctctttatggttaattttatgatcaagacttcatcaatgaatcgaaacgtttgcacacaaaaattgatagattaaaacgtatatttttggataaaatgggatgatcctattttaccattcaactaattccctaaaatgaatgtaggtagcatactcaccatgtttttaattttaatggatctaaaatattagaccgctcgctaaatacatataattagaaactttcaggattacattaatccctaatcgacatctacactttttgtttctagagagaaatcgacataaggagcaaaatcaaaatgaagacaatatgtaaacatcatcgaagaatataccacccaaaaaatctctaattatctttataaaaatcagtttctgaattcaaggaaaataacactaaaccgtaaccgaaattttacgtgattgtaaagaaaaccaataagtgacccttgaaatttcatttattatatattgacttatttcaaaatatttctattaaatccttgccaaaaattgataaaccgaatctagtcgaacaaacagattcgttgataagatatagtacttttttttttgtaggggttgataagataagatatactttgacatagtaaaccttgattatatgaagatgatttgcctaattacgataattaattaatattaaacgtcggtcatttactgctgacgtcatcattttaccttagtggataaggtattattctctttcttcaaaactcaaatcaaagaatcgcaactatacatttctccaaaatctccgagttctacaattgtgtgatcaatcaatcttctccgatttcaagcttctcgatcaaaagaatcatcatgggaggaggaagagctatggcgacggcggcgaaggttgctggaatcggagttggtaaaggaggattcaagggatttggatttcctccggcgactgagcagtttcgtgttaaaaccgcggcggctgcggcgtcgtctaaaccggtttcggcttcgattacatcggcggttcatccttctgttgaagaagatgggatgattatgcagagaccggtttgggatgattgggaatttgctgaagaagaaccgattcctagggttgtttttagcaaacctcctagtcttgaagaagctaaagaagctactgaagatcttaaagaagcaattaatttgtaagattttatcctaatttgtgttcttgagagaatttgaggatttgtgtttgaatttgatgaattagggttcggtatgagagaaatgatcttactttgaaacacttataagtttgtgattatgtgtgtgttgatggattagggtgtatatgtcatctccaaagtcgtctgctgctatggaaggatcaaatgatggtggctctgtttccaaaatgctctctggttttcaatcttctgagaacagagctgttgaatcagctgttccacaagttgctcttcaagcatttgcttttctaagtgagaacactgctgcgcaggtatgtcggtttgctctctctttgcttggttaaaatggtctctgctcttgtttggtatatgtctcatatttgctttagtgctattctctttcacatgtttgagagtctagttgtttatctttacagactggtgttgcttccattgcgagtgacccaaaagtatgggatgctgttatggagaataaggatcccatgaaatttctgctgtccttcaggatta

SEQ ID NO: 59314 - DNA, 671 bp, Arabidopsis thaliana landsberg
cttggagacttagagagataaaatctgggtgaaaacgacagggcggagagatgagacttagttctgttcatgggacataatagacatatatatgtccatccatgagacaatacacctctttctcatttgatacatcatcagtaacttggacagagtgtccatgtatgttagcttagtgactctccctaatggccatgcaacctataggaattgaccacatgagtacatgactagcttaacaagtatggaatgattggttttattaggactaaataaccaatattgaaaatacttttcccgtaaatgtgcatatttgtggaggtttctcgaatgtaaatctaagataatctctcactaaatatatatatatatatatatatatatatatatatttttttttttttcggtacaacaataaaaaatattttgttggattttttgacaagaatctattttccttcacaaattgggatattaattgttaaatatatccatcttcgacacacatttggattgtgaatacctttgccaaatagtattgtgaagttcgtatttgtctatataaaaagcttttttgcttttgtctcctacaatgcctctctttccgtaccacggtgaaggattggcaaatatggtgtcttgggataccaagaaacgaaggaatgggtaat

SEQ ID NO: 59315 - DNA, 502 bp, Arabidopsis thaliana landsberg
  unsure (1)..(502): unsure at all n locations
taactcggtaaactagggggggttacacttttacagacatcaagagatactctctccaatccagattacgagatatttcgtctttttagagagttaaaagcatatcaaacttaaataaaatcattcaaaaaactacgacagcaaaataagcaaactataaaaatataattcacgaataatcttaaaaaatcaaattcacaaaaaaatacaataatacttatatttattatcataaatattatcatttcactatatatatttagttaagtttaagataatttagctgtcaaaacaatttaaacaatttacaattcatattagatggaatactaccgtttcaaattgtaagctttagtntttttttatttttgcccacgtngattttttaattataataggtagaaatatatgaatgtggggtatgtgacactgcagtccgagcaagcatgtcaccgtcacaacttaggtggttggacactcaaaaccactacaatacatacat

SEQ ID NO: 59316 - DNA, 501 bp, Arabidopsis thaliana landsberg
cggggtcatatcatccatactatcctcgcgcacaacaataatcaacattcacctgatttatctaaacaaagatattgctgaaaataacgcacggtgacaatgtcaatcgataaaagagctctgacaatatctaaacttaaaaaaggcgaccttacaagtcacatgcaaccataaataagctatgtaaaaatacactgagctattcaaccataaaagagctgtgtaatctataataaccatatagttggaaatagaactctcactacgtgaagcgatagaaaagaactgggatactcacgagcagagaacactatgattataagtcgatagtgtgtctgcctaaattgggatgagtgcttgaaccatgacctactctacaatcaggacaccaccttcgaaattgatttagaaccaaaaagattaggatcgctttattacaaagtcttatctcagtgtcaatctaaccatgagcctaaactactactatataaacttgatttc

SEQ ID NO: 59317 - DNA, 165 bp, Arabidopsis thaliana landsberg
cgcaaggtgcccctgttttttcaggtacagaagggttacataaaatgcctctttttaatgttcgagaaccaggtgcttcggggcttattttactaattctttttttttattcatattttttcactacctttaacaaaagggtacctgtaccctaaaccgacacat

SEQ ID NO: 59318 - DNA, 994 bp, Arabidopsis thaliana landsberg
cttacacctaacctcaacaaactccacagctgcacgggctttcattgctgtttctgaatctgtgaaccaaacgtaaccttatatccaatccaccagagtattctatgtgctgcagtaagcacaggaaaagatgataactcaacaatcactttttaagggattggtggtttgacaaaaagtgttgcaacttactttaacgctgccaaatctttgaaaaagatccttgagaacctcagagctgacagaattactgttgttccatgggggaaccacaagttgatcagtgttgtccttgcacaagctagcacatgagttatctccattttccttctctctatcagcaatgcctgtctccttatcttccttctctttaattttatttttcagagcgctgggtttttctgcaacccagagaagttgcttaaagagcagttcatactttttcagagattaacagtcctgagaaaagagaaaatacctttgtttgttactttttcttcactggctatccatttcaatgcaaatttgacaatttgtcctctgcggaatctgtagcaatataaatatgagcagtagaaatgagcaaagttgcatttcaatcaagaagcgttttgataagacaaaaaaacaagaaacggactcgttgtgggactctgattttccgagttgcttgatcatattctctctttgacagtcaaaatcactcctgcatatcaaacaggaatagtcaggtcatgccaatccgttatatatatatatatcaaaacacaaagcatcccccactcccacttacttactttggtattaatactaagtcagcgcctgcatagaccaagctctgcctcaaaatatcttgagtgtcttgttcagaggagaattcaaccaacgcagtgccacaaaagcgtcgcttatcagcgatgtgaagaggtagtctcacactgttcacctgaacaagtaaaatcagatgagcaaattcaaaaagctcgttgggcag

SEQ ID NO: 59319 - DNA, 405 bp, Arabidopsis thaliana landsberg
ggtttaagggtttattagaagccatgggttcgtttgttttttgatcggtggatgccgggcgtgaatgatggagttgccggtcttttgtttcccggttgccggatctttttccggtgagctgttgacggcataaagttaccatcatcacccaggaaagtcaaccgtgaaaacactgaaatcgctgcgtatttctacggtattttgtcggtttagggttcggatatcctttccggcagctgttttccaatccgccccaagatattaagcagggtgttctgacggtgagttcagtgatgtgcggcagcactgcatccgttatttttttcgttgccggtcactgatttttaagaaaggacccgttgagagaaaaggatcggagtgaccaggccgcattcgccgggaggc

SEQ ID NO: 59320 - DNA, 130 bp, Arabidopsis thaliana landsberg
tttttaactcatatcaagggcaggtaccactgggggaggcgcgtcttggatgatgggatgagctcttcagtcttctatgccgggatcacccagccaactctgtgtcggtggatcaacggcttcagctgat

SEQ ID NO: 59321 - DNA, 458 bp, Arabidopsis thaliana landsberg
ccccctaaacggctgaaaaaaaccatacatatgttacggctttacgcaatcattattgtctctcaggctctctctctatctcccacggtcggtttacatacatatctaaactcaccaccggagctccgacgattttttcggccaccttccgatcggtatgtgttgagtacccttttgtcttctgagatctatctggctttatcacttacacttaccttattcattttgtttctcctcaccaggatctgttgagctcatggtacttatagctccaaatggaaatcttgacgattatgatatatattaccaaatttaaatccgaatactggttatattctcacaccttattttttgtttacttgtacttcttctctttgatgttcttgaagtttcctagggttttgtgcttatataaaaagtattattatctgggtgtctatacttcgtccatctctcat

SEQ ID NO: 59322 - DNA, 1396 bp, Arabidopsis thaliana landsberg
tatgattaaccatatgaaattatgacacgtgacttaattttaaatgaacaacactaaaatcacaaaaacacatgtggttccatgaatatttagccttaaattttatattactttgattcatgattttcgaagaagaaaaggatcaacaacatggtggatagagaagatgagcaagaaaacgtagagaaccaatgcaactaaaccggcgattagagctccggttatctgatcgcaaaatctcggaacttgaccgcatattggcaaccatcctgcgtttgcgtttcctctttttcccacttgggccactgccactgccgctgataagcttgacgtcagcagcattgtcaccatcttcacgattaatttagcatttacaaatacataatgattaaacacatattcaaaatatagacaaatttagaagtatcatgattcaaatcaattttgtaatttcctggaatgtttatatctaaattgttatatatatatatatatatatttttgaactgtcaagatagaaagaagttgaatgtaattaaagaggtaatataattaattaccaggtccaacacaactacgaacttccataataaactctcctttggaagaaacagaacgagaaagctataaacggtcacaatcgcatttgcgatcacaaagtacctgccacacatgcgaatgaataacatatcattagaatacatatacacttctctaaatactctaataaaacacgtcaaatagaaagaaaagaaaaattctcacttaaacgcagccaaatcgctatacttagccactagggagatgacaaagaaggaagatctttcacggctggtgatcattgcgataaccgctcctaacgcggcacaaaatgccgcaaatcgcagtaccaacccacccaatctctgcgttaacttcaccatcagtttagtttcttggatctccaaagagtttaaaactgtagaatttaactatggaagagaaaaggagagggagagagagagagagataattaagaaaacaaaatcacgaaatataaaccaaagtaaaatgaatatgttattcaagtgttggatgggttggttgggttttcttcaactgtctccaccggtcatgcaatatttatctttttgtttcaagatattaaaaaagccaaagaataatgaaaactaaatttttagtaaaaccatagacgtttttcaagctaatattctttaattattatagattaataatatgtcggtattactcaaatttcatttgttaaagagataatttctaatttgatgacataataaaatgaacaaaaaatctgttttgaagcgtttgcctaacttaagtgaaccgtgtgtaaccctctgggtttagtctgaattaatgattaatgataagcttt

SEQ ID NO: 59323 - DNA, 1266 bp, Arabidopsis thaliana landsberg
tcgttttaaatatcattagttggatttagagacttaatccaactttaccggtggctgcattttcagcagattcgtttcttctcctgtgtagtaatctcactctatagcttgcccgtttcattcttacttctcaagggagaagagtttttataaagagttcagttataattccatggtgatgctcagaccctaaatctgacttctccagtcgatttggcagactcatgatatcaagtagttcaattgctagtggaacattagcatgaatctcattcattaacgatatcaatgtaaggagtaacatttatcaatctcattcgaaccataagaactgtaaaatgaaggacaaattccaaacagagactacatttatcaataaattaagccgtgtacatatggaatttagacattgataactttcttgtcaaaattttcccccacaaagcatagaattaagaccacaacaacgaacacagatagcaacatgtctggatagtatctgcaagtattctcctcacttgcctatgtcactttgttttggaactcagatgactcaaagactctagcagtgttatcgacagataccgaaacaatgaagtccgtgttggtagagactgagatggcctggaccgcatcttggtgaccatggtaggtatggacgcagttgcctaataagctgtcccaaatgctcactgtaccattggcacagccagtggctaagtacttggaggttcctatccaagtcagagatgtcacaccttcctgtaatcgaaaaaagaagaagagaggagttgttttagtttcaatatctgttttgatgctatctcagagaaactataagggtttatacctcgtgctcgcagatgaacctgggagtggaatgctgcagatcccagattataagcttcttgtccattccacctgttgcagccaaagggatggttgcggagcttggtgaaaacttcacacattcaactgaatctgtatgagaattcaaggagctcacaacctgttggtatgattatgaaaaagttagatgatatgtcaaatagatatgagaagcaccaacttgcttattgaaatgatatagatcataaaacaatccattgaaagcttggtaacagcagtacagtaaaggacgaacctttccggtgactatattcacaatgtgaacagaaccgtcttttgagccactgatagcaagacttgagttcgagttaatgtctaagcatgtcaatccttccgtttgataaggatgacctacac

SEQ ID NO: 59324 - DNA, 1473 bp, Arabidopsis thaliana landsberg
  unsure (1)..(1473): unsure at all n locations
aaattaaaagtaaaaaaatggcctaaaagattgttcttacttgagtgccacaatagaaactaggcttagcagaaggcactgatggtttctgagtaggaggaactttcgatgaacggacaaatcgctgagtggtattgcaaagaatgaagtttggtaggaaatcactctgcatctctgaccaaatctagcaggcaacaaaaaaaaaaaaaatcaaagattgagaaaaattagactcaggacttatattttgtatggctgacctgtgtagcaagtcgacttgaaaatgagacaagagatatgttttcttgcatttcattcaacatgagactgaaagggtctatggaaagatcttgtgaaagcaattcatgcgagtgctttaggatatctatcagcttctccagttcctacaattaaagagagcatccacttttgtatattttaaacgaaacttgttatacatacagaatcaagattatgaaaaaggaaaacaaacttaccactacagcacataggtcctgggactcaaaacggtcaaaaagaaactccagattctctctaaagattctattcatcctttgagcgatcaaacttcttaaattaattgttctaccaagtatctgcatgtcacaccaaaactcagtaagaagattgtttaaacatgccaagccacacataattagaaccactgcttgaaacataatctaatcctatgttaggtcataacaatggagctaaagattcaactaattgtgactttctctataacaggagagtagtattattattcacctttacttttgtcatcttaaataacgcagtaaacctcacaggctggatggagaacttttcaccattgtccaaggcaaagagaaatgatggatcaagaagctcactgttgaactcgacaatggatgataaaagggtttagttcctcattagttaacagtgaagggggtaaatatatcaaaaaccgtgtaattaggtaccttgctgaccaactcttgtaatatgtgaatatagactccgagagccttgaaacaaatatatcaaaaccatggtccacctacagaaagaagacaggagacaagaaacgatagtattgttcaaggaaccttttcattcaagaagacctataggattatacctgttgagatcagaattgaaatctaattacctcagcttcaatttcatcatagaggaatctctgcctcagaacaaccagagcttgttgagctgagtcattataaatgtcaaaaggtagcagaacactctcaagaaggcctgaattctgggcttccagaatgtagtctatcagcatccatggtagtgaacactcaatcgggaactgcagtaatgaacgtataattngtaagaacaagtcagggctgcagtgaaaacaaagtggcaaaatatagttataacctttttgtaattccgcatacctgaataacacgtgaagactccaggtaaaat

SEQ ID NO: 59325 - DNA, 152 bp, Arabidopsis thaliana landsberg
ggctgcagggggggggaaagccacattttttactcaaaattaatctatgtaacattgctctttattaaaatatggcatcattaacaataaaactgcctgcttacataaacattaaaataatgtgttttattaattataaataaattctatat

SEQ ID NO: 59326 - DNA, 535 bp, Arabidopsis thaliana landsberg
tgcttgaaggcttgaagctggttgttgaagccaaccagttatttcttgtaaacattatgagccatcaatttagaaaaagaagaacttggggtttgctggtggcttgattttgacatgattccgggcctcaacgttggttgcgatcatcgttaccatcatcagaacgatgatgaaggaggcaatcatagttctcttttcgatggccattgtgcttgataagctttttaaatggttctttttttttttttttttggttttgtttctttttttgttttctgtatcttttggttgaatcatcaatgtatttatatgtaaaatcaaacgtctatatatagtgaattactaaaattaaaattttgtggaatgtttcaatagtctttacttagataattggtcaaatgatcacctctagttttgtggtttcttagattgaatactaaatttatcttccaaatttaaagctgacacatgcctatcatgtgaattttacaaaagtttgacatcaaaagtaaacttcatcaaaaattaataatca

SEQ ID NO: 59327 - DNA, 425 bp, Arabidopsis thaliana landsberg
cgatctcactatgtctgcaaagggggcggacccaggatgaaataggagtgagggcacatttacaacaaccaacactaaaatgtcagagcgagggcatttaaattagaccgagcataggacctaatagtgaaaatctggactgtattacttgtaaccgagaaatgagcgggggcctgtgccctcactgggctacacataggtgcgcccctggctgcaacaccagtcatcaaaggacaaatctccaagtgaaggaggcaaaacttggagaccaaaacgatgcaagagactaaaccaaaactctttctcaaagacggtttgtagctcctatcttaacatgatacccactgccactgtgttctggattggaattctcgtttcagtaagggagatttacatatttgcacacaccttatctatgaagcaca

SEQ ID NO: 59328 - DNA, 235 bp, Arabidopsis thaliana landsberg
cagtccggcgtgtggatgtaaacgataaaaagtagattttgtcgtcctggctgcataatgcatgccgcatgtggcagctagctagctagctgcaggacaagatggactctgtgcgacttgtaccgtgtctgactagcaggaaataaagaggagaggggtgatgagctagaacactgtcactgctgctgctgcttgagatcccgtgacacactctctttctctctctctctctctg

SEQ ID NO: 59329 - DNA, 530 bp, Arabidopsis thaliana landsberg
agtagaaactggttgtttttgaaaggagtcttattgggagtgatttagagagaatgagaatccatagaacaaaatcagttagttgataaagatttgattccacaacaacaacatttgctcaagttcttcatataaagagaaacaaaaaagacaattctgagatatttgcaaaggttgatcttataccgttcttttggatggatcaatttcacaaaaatcaggtttgatgattcaagagctttacccggttcaatcaccggtccggttttaaaaaacatttaacactacacagaaaatttggaagaagagtgttaaataaacactggctttaatcattttgttgggtaaaacaaaacaaaaacaaaaccaaagagagcgagtttaatcacaccattgtcgaaacaaatcaaaaggctcaacaaaagtcttcttcttcttctagatctctcttcccgatccgatttgtgactcgccggaaaggaataacacacagacagacattttctccgatcgtgaaattagatggatca

SEQ ID NO: 59330 - DNA, 463 bp, Arabidopsis thaliana landsberg
  unsure (1)..(463): unsure at all n locations
cgcgtgcgccgacccccgagagcagcagggttttggaaggacgcgagagcctgcctgtacgtgtacgagcttggtttacatgaacacgctgaatcgccaaaccgtggctagtccaatatggtggtactaccgccggaggttgttgatagcacggcggggggcggctaaatgtaggagcattttcgtagccacactcgctccgtctgaaagcaggaaacttgttgtcgtttccatccatgtgagtactactttataatagtgactgacaatgctgccattaaattttatactagaaaacctagtcactatggtagtttttttttaacaatcacataaaatgaaaacaagcccttatgctaactaaatggatacacactgtaactgtaaaacaaannnnnnnnnnnnnnnnnnnnnnnnnnnnnnnnnnnnnnnnnnnnnnagctgcagcattttcaattcaaac

SEQ ID NO: 59331 - DNA, 1443 bp, Arabidopsis thaliana landsberg
  unsure (1)..(1443): unsure at all n locations
ggggcacccgcattgtcgctttcgatggtattatcggcctgaagatactgtgagttgtcattgcgtttgattattatttgattccttacatactaatttatgtatctcatttgtctcctatagttaatcgaaagattttcccaccttgtgcaaccaaagagagtgtttctctcaaatgatgagaatgacaatcctctcacctgcatctggtcaaaagtcaacatcgctaaagtcccattacctaaggtataataacactatatgatttcaattggcacagtctatgaaccgtttggtcttttgcttcgtatgaatgtttacactaattacaacagattacctccagaatcgagcaaagggttattcctccttgtgattactactacgatatgaagtacgaagttccttatctcaactttacaagtgcagatgatggtaattgagtttttattccttagggtttcggttttaattagcttccttttaactgttttgtccatgttgtagcaccatcctagacttattactgttctattgtatgagtattatcttatatgagctggtcgtttcaagtgcaaatgagtgtacttgaattttattagcttcctactaattgtaatgtccattttagttggtttctagcaccatcctagacttattactgtttttgacttgagtactatcatatcatagttggtcatttctaacaaatccttaacacaagctctgttttcttgcaattttatcattcatatccttattgattttcttcctagtattttagagagaatcagaactaatgattttttgttttgccaacaggtagtgatgcctcatcaagtctttcaagtgactctgccttgaattgctttgaaaatctccacaaggatgaaaaattcttattggatctatacagtgggtgcggagcgatgtccacaggtttctgcatgggagcttccatatcaggagtaaaattgattacggtaaatcttattatgaattttgttatgaatactcacttaccattttgctgtatttgagcaagagtctttctgattttgcagaaatggtctgtggatattaataagtttgcttgtgatagtcttaaacttaatcatcctgaaacagaggtaagtctttattggtgatttttggaaagtttgttaggagcaaagatacgatctccactcatgtaattaatttattttgaacattgtgcaggtgagaaacgaagccgcagaagattttctagctcttctcaaagaatggaaaaggctctgtgagaagttttctctcgtttcaagcaccgaaccagtggaatcaatgtctgagttagaagatgaagaagttgcagaaaatgatgacatatatgaggcangtactggtgctgtactcgaaccttgagagtttgagtagaaaagttccttgcatcatgtttgagat

SEQ ID NO: 59332 - DNA, 217 bp, Arabidopsis thaliana landsberg
gcagatattgagcgaaggtgaacgccgcatcatcggcttagctgcgttcttggctgatgttttctagaagccgaatgcttcatccttcattttggatgatccgatttcgtcgctcgatcaggactttgagctggcggttgccgtccgacttgtgcaactagcaaagtctcgacaagtgctgtgtttcacgcatcgtcttttgcccgtcgtggctatt

SEQ ID NO: 59333 - DNA, 1732 bp, Arabidopsis thaliana landsberg
actgatattaataaaagtcattcatccataaaatagttagtttttctttggcattatttagcataaattttgttcagttcaaatgtttctatcttatttttgatgaggataagcgacgatgtagaagctgctctttatcacattaggaaggccattgaatatctcaaagagataaacaaatgcggatccagtataggaaaaggaacttatgtgcctcttcttaagttcttagctgatatgggaatggtagaggaattccaattttccatggatgttattttagaggcaaataatggttcgataccaagatggaaccactctcatataaccattttttttattaggatttaaacataaaacattggatttggattaatatactaactacacataatggttcgataccaagaaaaaataatacacattcttttttgtattttctttaaagacgttcagataaacaaagattgaactcgtgggggacaaggaagaacaatgtaacgcgttattaagcagctctagcaagaagttgaagactttcaggaacatcagaaggatcaatgagcctccttgtcataatcctcttgggtacaatcacagtcaacacaccatcttcgtaaccagctgatattccgatcatatctattgattccggcaaccggaatttcctcttaaaagtcttcaaaggctgatccggaggcgacataggggttgcctccgttcgtatgattaagtatatcgaatcttcgatctcaacttttatttcttctttccttaaccctggttgggaagtgaacaaacaaaaaaaacagaacacatacaaaaaaatgaagattatccaagattatttattctttacaatatgtggtaatgaataaagtgagaaaataagtaattataattaccaggaagatcaacagagaaagtgtgagaatctggagactgagaccaacgaacatgattctcttgatagttattaagagattgagaagctagaacatattcccatggcatcacttgaattgtctgaaaatccatttttttttatagatttctttcttttccttttttcagttgttcttgtggattgattgatttttgggtttctatttatagttaaaaatgaccccacatgaaccatttgagcaagttgctgtctaaacttgaaaagttgatctttaaccctgaaaatataaaaaacttgaaagtcgataataaatgaaacattaagtacaaatcacttgaaaagacgataatagggtggggagaagattgatttatgagaaaaaatccaacaattgtgtcgactcactcacgagtggagaaattctttgtattctcgaaaaagaaatacttgctaaaattagtttaaagtgttttttctcttcccccgacaagcttaaagattgattggacgataaagtattttatactattattgtccactagataatactatggttcccttcaaataaatatatttttagtttctcatattaatgttctatcgattacaaatattttcaaccactcattttggttcgacatcgcaagttgcagataaatagccacttgtctgatattaatgtttgcaatttttagaaagaagaatataatattaactttatcgcggtttatttaccaaagaggaaaatttgcagtaccgtaagaaaaaaaaggagaaattttactcgacccatcttagtgaatatttagttactcaattaccctc

SEQ ID NO: 59334 - DNA, 193 bp, Arabidopsis thaliana landsberg
  unsure (1)..(193): unsure at all n locations
ccttatccatgcttcactttctcaatcctgtttcaagtttaacacactaaaactttattatcttaggtgatctcaaaatctcagaagaataaaaatcatttgtgtgaatctgcttacgctggggcttatttgccaaggctgtgaattctttttcctgcgttttgttcatggtttntttttactttttttcttc

SEQ ID NO: 59335 - DNA, 1729 bp, Arabidopsis thaliana landsberg
tttgccaccaccacgagcagcctgtcatatatatatataaaacttcaatatcagaaaactaatagccattaaatttttaaggaatgtatagcctttggtcatttttacctccacgagcagcctgtaatatataaaacttcaatatcagactttaataaactgaatctgttttgagtggtttacctgaacgaggttggagactgacaataaaaagagaagagtcaagaagaaaagagcatttcttctgatacaattcgccatttttttggttaaaaaatcttgattgccaatgaatgattcttaagaaacaataaaacggattaaagatatttatagagaaaatgattagtgtggatttccttcaatggtattcaagaaatttggtattgccaatgttcatgccgtgattctggggaagtaggtcattttaatttctaattacgtaccacacttgtcgtttttgtctcttagacaatgtcaaagactcaacagtgtaaattactaatcactaattacccacgtatagagaaccaaaagactaaaatcttgccttggaaaaaaaaaaaaaaaacatttctctcagtgaaaattggaaaattatattgtgtagttgactagtgtctaaacgctctgtttggaaaatgaaaatgtcactaatgataatatctgtatatagaaaggggaaaataagcgagtttaggaaattaattaagctaattgtgaagtgcgactaaaaagaaaaaaaagtgtaatagaaagcgaaaaatgcggcgaagttgagcatgtgatctttgtgggccatttcattgattttttgttttgtcatattatttgtgtttttagttttaatgtaaaaaaaatctgattaattttaaaaggactggacaattattaatggacatcaccataaaatatgtgaccataaatttttataaaaggcccattagcccaacggttttccaattacagaatttgggctgaaacggccgaaaataatcttaggatgacgaaatggccattttgaaattctcttcttcgtttggtctattattttattttttaacgttaacggcctaacaagttttcctaacttaaagataagtgggaacagataaaacaattagaattaacttccaatgaaattaccaaattaacaattaagttaataatgtaattctaaatttggcttaagaagaaaacttaaatatttatgtttatataattatctgtcagaagtgcagaattcttaattttccagagtagagaggagtgctttcatggcggtaaaaggtaaaatactaatcactgtaaaaatctcttaactcttgcgttgtgtttaatactaatagactaaaattagtaattaatttataaataattgcgtgtgtatatgcacgtatgtccgtacgtatctacgtgtaggtagatatagagaatccttgaggtggctatttaatagcagctctcattatctgggctctgtgttttgaggaaaagcgatttatcgagaaacgaacttagggccacgccagagagagagagagagagggaaatcgaatctggattttagaggaactagggtttgtatttgtactgcgaaaatcaattaatggtaagtttagggttttgtttcttctcgattggctcatgctgatagtgattaagatgatgattgcggaaatccaaatgtcgagaaagatgattttgagacatcaacaatgcaatctta

SEQ ID NO: 59336 - DNA, 466 bp, Arabidopsis thaliana landsberg
  unsure (1)..(466): unsure at all n locations
caccgtccgtccactaccccataattcttgccttagaaggtttcactaattacttcgtcttcgttnttctattttgagatttgacaacttcccccttttaatcatgtttttagttctgttggacaataccaaatcaattgcacttggtntgctatctttatccaatcattttttcttttgtagttcattggatccatttttacatcatgtagtagccattgttacaatacccaaacaaaggtagaaattgcttaatataaattgttaaattgatataataaatcgtataatagntaaaactcaccttgttcaatttctaatcttaaattattgttgttttgggaccgacatcattctcttaatgtaatgaatagccatttaaaacagagttgaaatataaattccaaaaatttctggcagcaaaagagaagagaagagaaggagctattatctgcgccatctgttt

SEQ ID NO: 59337 - DNA, 601 bp, Arabidopsis thaliana landsberg
  unsure (1)..(601): unsure at all n locations
tcttgagaagctttttgtcgacgacattcacgaatctgnnnnnnnnnnnnnnnnnnnnnnnnnnnnnnnnnnnnnnnnnnnnnnnnnnnnnnnnnnnnnnnnnnnnnnnnnnnnnnnnnnnnnnnnnnnnnnnnnnnnnnnnnnnnnnnnnnnnnnnnnnnnnnnnnnnnnnnnnnnnnnnnnnnnnnnnnnnnnnnnnnnnnnnnnnnnnnnnnnnnnnccccaattcttgttcaccccggatgatcgtgttgggtgaattgtgacctcnnnnnnnnnnnnnnnnnnnnnnnnnnnnnnnnnnnnnnnnnnnnnnnnnnnnnnnnnnnnnnnnnnnnnnnnnnnnnnnnnnnnnnnnnnnnnnnnnnnnnnnnnnnnnnnnnnnnnnnnnnnnnnnnnnnnnnnnnnnnnnnnnnnnnnnnnnnnnnnnnnnnnnnnnnnnnnnnnnnnnnnnnnnnnnnnnnnnnnnnnnnnnnnnnnnnnnnnnnnnnnnnnnnnnnnnnnnnnnnnnnnnnnnnnnnnnnnnnnnnnnnnnnnnnnnnnnnnnnnnnnnnnnnnnnnnnnnnnnnnnnnnnnnnnnnnnnnnnnnnnnnnnnnnntc

SEQ ID NO: 59338 - DNA, 1284 bp, Arabidopsis thaliana landsberg
acaaccaaaaaagaagatggtgacaagcttataactttcaaatacacgcaaacggaggcagtggccatgtgaccaagttcttcttttaaacttgagcaatgactcaaaagataaatatattagatagtcaaacgtgtgataccttctgatctgctaaggatttcgaatcctctaatacttcttcggtagacattaagaccagacgctgattgttaactggttgctcaatgagagcaaacagtttttgcttaacatccaaaacagtctctgttggatcacattggataaagtaagtagttttcatgcgcttcacacgaatatacatagcctgcaaacaatattacacaagactaatcaatactacaaccaatatggccaaaatctaacttgttcgattgattaaagcaaaattattgcaagacaaaagtatctcaacttttattactccaagaagaacagtaataaatgtgatcaggaagctggaattaagaagggaaaagatgttctcattccaaaaacatctctacttcccgtcaaataagcaaaggattgaatatactaagaacaatcaaacccatcaaagtgaacaaaagaagtagaatgtttaccatggcaagataaggatgaacaattcactcttcttccgctgccgattcacaagactttagaatcaaaatctgtttctaagatgccaataaaagattaatcagactatcagtgacaattgacacacctcaaagagtcaatttaactaaagagatgatctagttatcccccaaatcttttcttcttttgatattcaaaagaaaagaaaaaaaagcaaagattttcaaaaattactgactcaaataacaaacaatgaaatcgacttacctagatgggttagggacgaaaaagtgaccacaagaatggattaaggatgaaatactggcaaagaaatcaaagtcggcttttttataactcgagctcagacgccctgcaaggtaaggaaggaagaagataaataccactttggtggcttgtttggctacagatataagactaacgtcgattaggcgtcgtacaaaacccactaaaagacagagagggtttgttttgttttaggcttttatttttgattgattgaatattaaaagtcaatgcgaaaagtcatattgggcttatggaccgaataactttattttatttgtgtggtaaagttaggcccacataccttttcgtcttcttccagttcgcgacaaaaaaaataataatgcaaagcaagctgccatttccgaatgctct

SEQ ID NO: 59339 - DNA, 682 bp, Arabidopsis thaliana landsberg
  unsure (1)..(682): unsure at all n locations
nnnnnnnnnnnnnnnnnnnnnnnnnnnnnnnnnnnnnnnnnnnnnnnnnnnnnnnnnnnnnnnnnnnnnnnnnnnnnnnnnnnnnnnnnnnnnnnnnnnnnnnnnnnnnnnnnnnnnnnnnnnnnnnnnnnnnnnnnnnnnnnnnnnnnnnnnnnnnnnnnnnnnnnnnnnnnnnnnnnnnnnnnnnnnnnnnnnnnnnnnnnnnnnnnnnnnnnnnnnnnnnnnnnnnnnnnnnnnnnnnnnnnnnnnnnnnnnnnnnnnnnnnnnnnnnnnnnnnnnnnnnnnnnnnnnnnnnnnnnnnnnnnnnnnnnnnnnnnnnnnnnnnnnnnnnnnnnnnnnnnnnnnnnnnnnnnnnnnnnnnnnnnnnnnnnnnnnnnnnnnnnnnnnnnnnnnnnnnnnnnnnnnnnnnnnnnnnnnnnnnnnnnnnnnnnnnnnnnnnnnnnnnnnnnnnnnnnnnnnnnnnnnnnnnnnnnnnnnnnnnnnnnnnnnnnnnnnnnnnnnnnnnnnnnnnnnnnnnnnnnnnnnnnnnnnnnnnnnnnnnnnnnnnnnnncgccgccccttttttttttttataaaccgggggggagggaccgnccccttttttttttcctaaaatatagggggggggggggggggcgccctcccccccccccccttttttttttttttttgggggggggg

SEQ ID NO: 59340 - DNA, 730 bp, Arabidopsis thaliana landsberg
attgtccaatcacactaaaagatcgtccattggagtacacacctacgatagacatatcagcagatatttcagctgtaaagtgtggctaacgtctagaaagacaatacctttgaatgcttggaacactaatagttatgtaaactattgcataaggtaaaaaacttaaaattacgataacaaaactctcatctccaacaacacaagactagacgaacattctcaatggctcatatttatttttattagataactgaattgaaatgtctcattacaattttatgtcagagaactctctagtgcattgaaagggttcaaactcaaattatacaaatttagtcttcgaatggaatgatgatttcttctttttgttgttgtagtcagaagaatgatattatctcacaaggtggtaacagaggaagaactctgaagctgcctcttgacaagatttgtgtagattccattaaggctgagaagctcatcatgagtgcctttctcagccacctcaccatctgatataaccgccacacagtctgcagtcttgaccgtcgataacctatgagctatcaccaacaccgttcttcccgccattaacgagtccatcgcatcctgcaaacagattcagaaaattaggataggagtaagattttttctatgtttttgagtcatatgagttttgattccaaagttatgttttattacctgaacaagatattcgctttcagcgtcgagt

SEQ ID NO: 59341 - DNA, 214 bp, Arabidopsis thaliana landsberg
tctgttggaagaatgtgctggctacctgacgagttgtgacaaacaatccatggctaactcttactttatttaccacctcaaaacatgaggaactcgttgtctcatgatcgttcttgtccaaatgattctcgttatgttcgttttccgaaaactcgagtgtgaaagcatcattccacatctccattgttggtgctaacaaccataccattttcaa

SEQ ID NO: 59342 - DNA, 1384 bp, Arabidopsis thaliana landsberg
taagagccgttgggtcagatagccgagcctctcggtgcacgcacgcatgccacttgctcggtaactgttcactagacagaacacaacaacactcaaatagagtgataacattgaatctgatgatttggtttagtataaaaatcgtttccaagtttcaaccagtgggacttgtgttaggttaaacaatttcggattaagtaaacgtcactgtctcatttgtcttgatacaagaaacgcccgtgatattttttcttcgatgtcgtccaatggggacaaagaaacaatttagtccccggatatacacacacacacacacacacaaataatacatgggtgttgttattatggcttaccttacacaacacaacttgccaatgtttttaaatttaccaaaaaccaaagccagaagatattttattgccacaaattgacgtcacacctgcccatatctaatccatgtctgcaacacaaaaaacaaaaaattgaattcccccaaaaagtgaggagagagagataaaaggctgtgtaccaatcaatatctttttgagcagagtaaaaaaaaatttaaaaatttgagcttctgacacaaaaggagccaaatgtaatagctggatccaatccaatgcaatgaaaacatcttagctgtaaaatggtccaatctctctcttttctttctacattattacttccacagaatcaatttatctctcgaaaagcaataaagtctctatatttgtgctcaaagatagacagagaagcataaatacttgtcctctgtgtagtacaaaagtggagccccactgagtgatgccctcacagtaacggctacatttttcttttatctctctgtctctctcttcttttgagtgatttttttttaagatgggttcttttgtccacttattactgtcctgaatcacacgtcgaatcctacgtggcatctctctccattgtatgccagctcactctcactcactcactcacctcccgcctttataaagccttacctctctctcttgtctccttcattgagtcaagtgctcgagactgtagagtgaagtttgatttatttagagagataagttaaaaaaaaaatggtcggtatggatttgttcaaatgtgtaatgatgataatggtgttggttgtctcttgtggtgaagctgtttctggagctaagttcgatgagctttatcggtcaagctgggctatggatcattgtgtcaacgaaggcgaagtcacaaaactcaagcttgacaattactctggtaagtagatgaagacaaacccatctctgtttagtttcctctgtttttggtgccatctctgttttgtttcctctgtttttgtgggttcattataattgaatatgtttttatttaattt

SEQ ID NO: 59343 - DNA, 1336 bp, Arabidopsis thaliana landsberg
tttttaggaactttccttttgtgtaagattcaagggaagcttcggggtttacatttgtgagcatgacacatctcccccaggtaattcttttcttttttcgttttgttccacgagttgttttcttagagacagtttcttgtagcaatctcataaaacaattccttttcattttctctctgggtgagaattggctacactggaaaagtaattgagagtctcaggattatcagtttcagaataagctgcgtttcagtaataagtctttgtttcctgtagaattttgtcttactaacaactcctaacttattttgtttgtcatatatccagaaggacagcttatcaaaacaaaccagcaaaatatactaatcagatctctcttgttaaagaagcaaaaaggcgaatctagttctaaagactcaaaaggaactgctgaagatggtcctaaaaagaggtaactacgacacgtgattagttctttcctcccttgcgtgactaatcttactgactgaaaatcactaatctttcttattgcctacataaatggtgtgttcatctattactttttcttattcgtagggctgcaaatagagctctggacgacagaagctcagctaaaagagctgctaatgcatctagacaaggttatctctttatacctttaattctatttgatttaattttcaagatcgtatgtcacttggactttaaacaatgaatttcttctgcacagaaggatcaagcagtcgcacaggcgaaagagactttcagtctttgaccgttgagaagctccgcgccatgctcaaggagaagggccttccaacaaaaggaagaaaggcaagtcacaatatatgctactgttctttttgaaatctctgttaaaattgtttacagcttctcagtcttgtactctcaatagtatcttaaagaatctgtcgtatggggttgcttccagttctttgtttatcgtggctcttgttccactgattgattatggaacttgactggttttgcaggatgagctcattgcgcgtctgaagagtgccaactgaaatgaagttgagaagggtgctctggtgaatatatgtatctttagaggtttcccaaataggagagaattgttgttgttcttgatcaaatacaaatccttttgatctcatctggagaatttgttatcaggaattaggctactttagtttatgaatccggtttggtgacatttgtaatatggatttcatcttttgataaagcaaaccaaaccaaaccaggcggtcttggttaattaaaaatgtgatggaattgctttggggctggctatattaagtacaacactacggtc

SEQ ID NO: 59344 - DNA, 662 bp, Arabidopsis thaliana landsberg
  unsure (1)..(662): unsure at all n locations
ctttnaagcttttgtcgacgaattcacgaatcacattgaggagcagctaggggaaagcatcatagatttgagttcttacttctctgcctccagcgatagacccgggataaatccattatatggacgagtctatacacacataacataatagtatactgtatttattgcatgaatcttatacttcttttgcctccaacagtatgctggatccgtctgtcagcaaattagtacccactctcgttgctgctttatagaagacagaaatctgtgtagcaaccttgttacagcatgatgaatatgctctatgcataacagatacgtctgtatatatctgaccttcagatctttgtgtttcttttcaatatctttgagttgcgtcaaggcctctgttcgttcctcctgcagcaagaacagcaattctggtgaaaagcacacgtaagcttattcgagcattaattctacaatactgaaaatacttaccgattcttcccttcccttctttatggcctcacactgatcaacaagttctgctaacctttttgtactaccctgaagatcagattcaagtttctggcgaacactcctaagctgttcattcaaaatgagatcagaaacaatgaacttcgctatgctcaaataatatgaatctttttgatgcatct

SEQ ID NO: 59345 - DNA, 1590 bp, Arabidopsis thaliana landsberg
taaaggttataaatctgactcgcgccaatcattacaagcagcggatactgattcagcctcttcagaactaaaatactctgaagctggctttaattcaatcaaacttacaggaggatcaagtacaaacgcagggaacgcaaaccaataccgaaaactccatttcttaaggtctgcaaaggagataacgaggaatcttgataacacagaagggtcttcaagagcttttcctgattgaatatcctcccaaaattaaaatttcaccacaaatattgttaaaacttttgcagacaagaacctattaaaaccaagtcacggagctaagttttgaattaaccttatttgcttctgctttatagcaaactttgtttgtcaagtttattgaagctttcaacggtattggtgttatacaaaatcccaggaacaggacacttattcctatttccatgactagtactagcaatcaatgattgttcatctaaaggcaatgactctgataaaagagtcaaatgatttgagacttgtggatgtccacatggtccatagaaacctgaaaatttcagttccaaaaaagcacataaattctaaatctgaataatctctactaaacaaaacagaggcttttaaagttctcaactttttttttgcttctctaacctaaacggatcataacaacttgcccagaaaacagaggattttcaagttttcaacttttttttttgcttctctaacctaaacggatcataagagctcgaatgcatagactcatcgaataatatataaaaatcgatgcattggatgattttttaattcgatgattgtgtgtttaccggtgattgaaatcggagaatcatcgattccgagtttgtcgagtttcaaagaggagaagctatgccagaaaccttcgtcgacggaactgttcaatggagcgaattgaagtatgattgctggagtttctttctcagccatggctgatcttatctttctgagagattgcaatgtttattatggaggagagtcaatgaatgtgagaaagaagaagacgatgacggagaacggtgagaaaaaggagtcgtgcaaggaacatggtcaatccgggtcgggtcggctttatatccaagcaaaccaaaaccggtttattttaaaaaagtaaaaagcattaaccggacggttcgtctttttccataaaaatcaaactgaaccaaattcggtttattacagtcttctcagtaaatggttaagagttttcaaacttcatttttttaacaaattttcatttttacttggtggaatttgattgtgtatatgcttcaaattatccctagctaaataccgctgaaatttgaaagaaacatttcgaaaattatcaatcctttgcattacataagcttacaatttcataaaatgcatacaacagtctaaatacaatttttttacataaaacaattcaaattatttttagacatcaatcccacacaaacatacacaattaaaagcttaacacggttttgaattcatatagctgggtaagaagctttcatggcaagaccacatagtccttggttatccttgacatctttttgaatcctcata

SEQ ID NO: 59346 - DNA, 627 bp, Arabidopsis thaliana landsberg
taaaaccacggagccgtgctaatttttttccaaaatatatgattcctacttttctcctaattttcatttctatatatattataggcggaattaacatatcttaacaaagtcaaaaaaaaacccaaagtctttcactttgtgtctgttctaaatctctgcgagttttcttacttttcgagttttgtgtgtcttcaagtgtcgtgcatgcattttatgcgtttcgttcacttgcatgctctctccctctttctctctctatctcacccataaaagttttaatttttcacatcgataaattaaatcgaaaccaaaaaaaaatttcacccaaaaaaaaaaaaacctcgttgccttcttcttcgccgttacagtcctctttctttcttcaattcgccgtcaaaatcttctctttctcttcccccgccggtccttcaccaatcctctgatctctctacacacgaacctttgattttgaccaacgtcgatgcatgttcatgactagtctcttcctcaatccttcaatttcatcaattcacgtcgatttcgtatccgattcgttgttctagctctttgtgtggtgttagggttttaagattttggaattggggtttggagtttgtgatgtttgaa

SEQ ID NO: 59347 - DNA, 216 bp, Arabidopsis thaliana landsberg
ctgcttctgctgctgtatgctgcgcatagcctgccggcatctgcatttggggcgctgtctcctgtcctgcccctgcatgcgcatctgaagactgggtcgtctgcaggcaaagggtgcagcgctgctacctgctccaagcccggtcccgcagcgtttttggcaccaccggcggggtacttctctcgtccagttcaatagacttaacggcctttgtgg

SEQ ID NO: 59348 - DNA, 477 bp, Arabidopsis thaliana landsberg
cgcacagcctcacatgaggcatgtggcggtttgtagtttgttttgtggcatcatgaacagtggccgcatcgcgaatggccgactgcctgcaccagcaagcactgcaccaccactgcatgtggatgcccaaaaactttgacccgtctccaaccatgccacgggctaggacgccccaggattatattattcgttccttggctgctgctacaagaccgcatcgtatcggcgcgtcgtctcctgggcctagggcccacaggccacagtgccgctcaggtcaaagaaaagcgcgcgcaggaatccagaggatggcatggcaacaacaatatggcatgcacgcacgcgcgcacggacggacgagggacgactccagtcgaggcatacctcgagctgtcgagcacggagcaccaccggccggagcggagcggagcggaccgcccgagaagacgcgcgaacggtgatcatgatgagcagtggtgg

SEQ ID NO: 59349 - DNA, 1329 bp, Arabidopsis thaliana landsberg
gaagaggacactttatgattaatgcatcatcatacatgtaaaatttctggagcccatatatttcaagctctgcaaatcaacatatttaacactaaacggaaactgatatgcgttaagaagttccttaaaacaatatgatcttagatttactaaccaggcagtccaggcgagtgttaatagtttcaatatctttcagaggctgtaacaagtttgcgcgaagaagcctagtcctgaccaacatagcatgcatgaaataaaatgactagtgagttgaagaataaatgaaatatgccaatgactaaagaacagtactatgaagattatcattagattgcaaaaatgccaaaagaaaatatttttcacaagagacaaagactaattagtaatttcaactcaaacatatgcgcttccagatacccgccagctgtttttgttgtcttgaacatctggaacaaactcctctttttgttgctagtgcccaaaagtgcgttgtggaatggatcaatgagttccagattctcaacactaccgtcatcaaatcaaggaaacaatgaatcagaatgataaacagttttgatgctaacattctatataatttaatagacaaacatgaatagtatcaaggtaatcgtacctagttgcatcgatattcatgtgatcaaacgatccattaaaagttacctagacataggcatcacaatccacaaaaaatactattagtacccttcagcagcaaagaagaggttgaaccaaagaagaaacagataaatacccaaaaatagaaagaaacaatgactcattttgcaagaaatattgaaactaatgcatataaaacttctacaaccatgtaattcagatttgtaaataaccaaacacatacagtcagtgagtggttggtgactatcacacccttttccgcctctatcctgcacatgagtcatgacacaacacaccaaaactcagtatttcaaaaacacaaaactaataatgtaatgagacaaaaagttcgggattagacaccatttgattgtagcagcagcagcagccaatgagagataatgctgcttatagtaagtgtctaaaccaagcgccaaaggttcttctgctgccaagttttgtattagcacagcaccctgaaacatataaccaaaaatgcatatccatttagaaacacatgactacagggatcaatggatgtttctacaataagaagttcttgtatcaaccttggtgtcatcaaaacagccacgggcaaacacaacctgcaagaagggaattgatagtaacagtcaatagattctgctatagctatagacaaatacattcaat

SEQ ID NO: 59350 - DNA, 125 bp, Arabidopsis thaliana landsberg
gaccccaagaatggattagatcgaaaggactttcctgtcgaacccctttgtgtctgtatgaatttctgaccgcgcgggatgtccatagccaattttccatttcttattatttatatttagggtgc

SEQ ID NO: 59351 - DNA, 494 bp, Arabidopsis thaliana landsberg
agcgctgcatctatacttggtctgcttgacgccggcacgggtagaaccgcgccgaatgcctgtgatacggtccaagctctcatcatcaagaaacaagagcactcatgactgtggttccctcttccccatttcaacacccagattgccgctgtagtcgcccaagcaaagacgtttggtttcacgattcgcggtattgcggcgtagaactcccgcatcatcgcaagtgaggatgtccgccagcggcactcctcggaattgccccgccagctccttgtccagctccacccacgcgaatttctggccgttgcccaagtgctgacggatgaccgacacatagcctgccagcacgccgtcatcgggtgtattgaacgtaatgcggtccagggcctgcggtggcagcatgacgaaatcacgctgtttcggctgcttggcgaaatacttggcggcgtagtcttcggcgcggtaagacacggcgggattggtggttgtggctg

SEQ ID NO: 59352 - DNA, 492 bp, Arabidopsis thaliana landsberg
cctcataaggatcttagttcctaaatcaaaatcactattgtttttgtttcattcagttttaaacatggaaatacaaactgaaattgcagttgattggcaggatgcttttggtggccttaataaagtgcttcaaaattttgcaagacgcgtttttggtctttgttgctcggcctccggttgtgaatgcagtcggagtattatcgaatttttaagacattcacattatctacttgctgaaatttttattctttccctttgtagttggttactgagtagtggttttttttagatccatacaaagaaatggtacaggttggagcaccaaaggttgaatgatttggtttatgtccaatacagtaagaagacaatggaaaggttcataaagagacatgtggaagggaaaaatctgaacctgttgatcttagaagagtctttatgggacaatgaatgagttcaaatggcaactaacaatgaagttcatcctagatcatg

SEQ ID NO: 59353 - DNA, 1133 bp, Arabidopsis thaliana landsberg
cgtcatcttgaacttttgttgatgcttttaagatgtacgtcgtagtcagataaaaaaaaaatgaagttttcgatgaatattgattgatcaatgaatggcattggcatatgccatatacatagtgttccttgctcttcaagcttacgaacccattttcttgatttaaaataataagttttctacgttaattgaaacacatttaataatgtggggaccatataagaaataagaaattatttttgcaccgactttttatttgtaagtgatgatgagttgggaagaggttgcttgagatgggcatccacaacggaaacttactgtagtttcagtatttttatttcgcggcattgcttatagcttcaaatttcaatataattgaatttatcacattccaaagtttcaaaggaaccaataaccaaccaattatgcttagattgcaaaggagaattgaggtttttcgtgaggtaattttatttgcgaggggtgtttgatcgttgagtggtcttattggaacctcataagttttaaatgttgatggtgaacaatattttagcctgcaatctaaggaaatgaaaatgatcgttgacttttattggtcgtgaattaagaatgagagtgtagagtagacttatggaatccattgaatgtaaacttaggagcaaagcatggacgaatgatatttagtgctcagcgagcgaaactgacggatcttgtccatattagccgaccaattattgttcataatcaaactaactagtgcttaatcataccattgttatatctttggtttaaaggggttcaagttctggttatatatgtggccttgcgttttggtgagtgtgcaagtgatagaactggccttgcgttttggtgaagcccaaatctattgtggcctccatgtatatattcattaataaagccttaaatctataagccttttatcttgcaaaaaagaaacagtatattacggcgataacttctgataagatttgttaattcactcctcaaacaattatcccttatttaagtcacccaaaaaaaaaaaaaaaattatccattatattccttggcagtcacgctacttatttaagccagaaaaaaaaaacagagcaacaatgttttctgaaaaccaa

SEQ ID NO: 59354 - DNA, 615 bp, Arabidopsis thaliana landsberg
agtcctcattttttcttttaatttccaaacccgttttatggtaaaaatgatctaatatagttagtttccataacaatagtgggtaggttgcatttttgattcaatgatcactggtcgctccacgtcgagtagattttttgtgtgtacctccaaaccttacacggggttggttttgacaataactattttggaaacaaatttggaatcacttactatttcggtgcatgcagccttgcagcaatattgaagaagttggaatcacttactattttggtacatcaatattaaagaaatttgggattaacaaaaatatcaaagaatttgggaactggaatcactacacatctaattttatctacacttctacaatttcgtagtattgtcaaatcttgattttgcattttcaatgttggtactaagtatgtatttttatgtcattgtattttttggtcggtcattgcatttttttatttaatatatgtcatgttgcttttgtattataattaattaataatataaatttaaacagtagttttactcatttctattataattttgtttaaataaattaatcaggatattctttgagagttaactgttttcttggatttttcg

SEQ ID NO: 59355 - DNA, 414 bp, Arabidopsis thaliana landsberg
  unsure (1)..(414): unsure at all n locations
catgttgagagttcagaggtcatacatgcacactattaacgccaaggatgtagtggaaaatcgtacattcaactctctttataattgttttgcatcctctctagaatttgtactttttcaattccatgcattaatactctctttgttttttagtattcattcagagtttgagaggcttttttgcctacacatattatggagtcaaagatcaaaacattgtttgagcaaaagaaattatacagtttcaatttcattacatactctctcagattgaaggccgagcaaacccgtcgaatctcccctttgaaaccagtcttcacaccaatcttgcncatctttacgatcgccttaacgaaatcagactcgaatgttggcccagagaatggatttagcatcccaagataggaatccacg

SEQ ID NO: 59356 - DNA, 256 bp, Arabidopsis thaliana landsberg
aatgcgatgggggaattttttttgggagaatgatccaaataaaaagcagagcataccaaataaagtgacggttcatttcataagattatattttaagagagattcgaccaaacactgtcttacttctctctctctcaatctctcatgttcctcccccttgaaattaacaacgaccgacctacataaaaatatgtatataatataactgagtaaatcgcgacgtatgtgcaaagaaaattatacctgtcatataaca

SEQ ID NO: 59357 - DNA, 873 bp, Arabidopsis thaliana landsberg
gtttcttggttgggtggaagtgtcagctgtatattaccattttttgattaattcatttagtttggggtttttatggttattttcggagtttcctttgcgtatcgaattaatcaaaatccagcttcttgctgatcggattcatgcaaaaaatgttcggtggggatgtgttttgcataatggcaaaataaaattaatgttagaaaataaccaatttgaaaattaaatatttgacccaacaaaaacaattttttcgtaaattaatcaccaaagtatcgatataattggccacagaaagaattgtaatttgaagaccattgactagagcttttgttgttggacggcttatctagggtcaaagatagaatccttataggagatgacgatgtgatgttttgggtttggtccaatgtcacggttgcttcatactatggtacttaatgatcccttgtcctaagggaaaatactattccacttggtacttatactttcaaagttaacttgcttaacagatctatatcgttggttgaatttaagaccaacaccatgtgaattcgccaatgttcaagtatatgtgaccaaaggaaatcaataggttcaacaggtagaacataaccattgaacttgagtaaaacttggtacttccaacttcaagttttattcatcatgttaattagaatagcacaacttcaaattttcttgaaaaccatatatacacatctctcattgctataattagatactaataggagatgtgtctaaggcttggccttcatttgaacacatcctctactaaactcctggtgtcatcatcactcttgtaaacatacttactcgctgcccacacgaaaagtcccatgttcactatcgaaatca

SEQ ID NO: 59358 - DNA, 193 bp, Arabidopsis thaliana landsberg
ctagtggatcccccgggctgcagggggggggaaagacaagatctcaataaaacttagtacttagccccgggcgacccaccatactcccggcgacgataggggagaacggggtttctgcgctatgagcagcatgaatgacgccacattcaaacagccgcatgatgaaggtgagcaccaggttgcaacctgaaaa

SEQ ID NO: 59359 - DNA, 1699 bp, Arabidopsis thaliana landsberg
atttcaaggtaaatgtgtgtctgtctcttatatatgcgatagcttgtagcagttttttgagtttaattttgaatcaattggacatggataatttgttgcagtctactcgggacagcctacttcctcatccgatgacatagaagctgtcaccattgtcgggagttttcaggacactgctaatcacattaatcaaaaagaaatacagtggggagtacgtatttcccctaaagtttcttttctcttctatttttccagagttataacatgttgatgcctcatcccagggatgataacatatttgcgtagttaatagctacatatgcatttttcttttacagttgcttgaagattcactagaagatcgccttgagaagacaggaggtctgctgtctgattctgagaagggacaaggagaaagtaaagacggggatgcagatgatagtaaggtgatacatagcttcaacttagtcaataatttctgaactgaaatcccgtttttactcgtcaattgattctgtgtacagaaaagatccactgaaattggaaagcaaggctcttccttaaaaaagttgaagaaggacaaagcgggtaatgcaacagcaaaagttgcacgtctggagaccattacggtgtcaccggcgccgcgtgtaaaaccagaacttgccttgccagtaatgtactttcgaatcccttacccattttttgtgttgggatttgattaaaaaggaatgaacatgtgatatctatgggtgatgcatgattgtttaggagaaatgaacatagtctttgtatttgtcaaagactcaacctcctttaacataaatcaattttgctccatctccttgttttctctgtcaggtccacagatgtagagcaatccatccttgaagaccttagaaaccgtgtgcagttgagtagtgttgcaatgccatcagtcagcttttatacatttgtgaatactcataacgggtaatgtccacctctcctcctaattttaactacttatttgcaaccttgttactcactcttttattctcccccaggttaaactgttcatctatatctcatgatggatctctggttgctggtgggttctcagattcttcaataaaggtatgttattctcggatggttggatacatttccctttttttgttttcttcctctcttaaatgatgccaagtgacaattatggtgttcaggtctgggacatggctaagataggacaagctggcagtggtatgttaattctctgaaaaattgtattgacatccacgtttaagaatgatatttatctcatacgtttcgcttgtaatttttgttgatttctcataatgattgtttttgtttccatgagagttatagacactaagctgtctggttccaggtgctttgcaggctgaaaatgattcaagtgatcaaagcataagaccaaatggcagaagaagttatacattattactgggtcattcagggccagtttactcggccactttcagtccccctggagattttgttctatcttcttcagcagatacaacaagtatgtatctgtccatcactttacaaatccatacactggctcattagttcagacttttttagttaccaaccctgtattcataagtgcagtacgactgtggagcacaaaactaaatgctaatctcgtgtgctacaagggtcataattaccctgtagg

SEQ ID NO: 59360 - DNA, 1555 bp, Arabidopsis thaliana landsberg
gtgtgatgttgtgtgcttaaacttgttttgtgtgtttctgtttcttataacatcctcctttctcaatataacaagagttacatgaccatacattatattgcaaatgtgatttatcaactattgctatgataacaaataattgtaaaactaaacgtaactaaaatgctttggtcctggtcttaacgaatatatgtgcctaggcccaaaacctcttagttgtttaaataaaaaacaaaaacgaaactaaagaaacgaaattagacaattttttcttactttactctcactcacatatttgtaatttattatgtgtttcatttttgtatatgtttttttcaatttattatggtcgacattgtgctatcatcacgatgtgcattcttagtgatcaagactattcattcattgactcatggactcattgaatctctaggagctcctacgctcaatgacccaaaaaaatgttagtgaagttgaattttggtttggtctctccgcttcagtaaatttagtctaaggggaattgaatcgtttggtgacctcgtttttgagagattctagttaggaatcctacatctaaaatgagaaagagcctatattagcatctcaactcattactgataaattttaattggaagtacattaatacttacacatgatatatatttcagtaaatttaagcgaacagacactacgattttattgagataaaatgagccaaggaaccaatatctcgattctcgaagatacgtgttatgttttaaaactccctaaatttaactaattctcattattgatttcactatatagctgtaacaaattttctttatgtactcctttaatttgtaaatgatattttcggtttttttgacaccattaaataagataatttccttgaaacaaataaatttgtcctcatgtcaaatgagtcatcatatttttgtttatatccaatataggtatgtatcttacatgtagtaatgaaaattgtaaatgagactaaaattggtctcaacttttaatatttcattttgatgaactgtatttcataaagattaccttttaaaatttcttattcttttttttttttgacagctaaaatttcttattcttttgtttccatttactcaagaaaacatttactacattttcctacatttagcttatttgactatttttaaaaaacgttataagctagactcgcatagtttatgtcaagctctcatcacagttatggcgaatctaactctagagctaaacatcaactccgcaagaaaccttttaaatgtcaatctcatcactaaaatgaacgttttcactgccatcaccatcaacggcgagaatactcgaaagaaacaaaaggcgaaaaccacggttgatcgttatggtggatctaacccgacttggaatcaaaccatcaaattttccgtggacgagaggtcagcccgtggtggtcattcgtcacttgtcatgagagtaatctctcgtcgagtcctaggcaacaaagaaatcggacgagttaacatcccgttacttgagctcttgaaagcaacca

SEQ ID NO: 59361 - DNA, 747 bp, Arabidopsis thaliana landsberg
atgcattccatagcacttcaaaatcttaggtttctgtccagtaacatttgtattttttttctgtagtgaaatatagagtgagcatgagcctcctggttatctctcgatgtggtatgggccgcccaaggcgatggatggagggtattaatttatttcctaaccaaaacattcgtctttaagcaatcggcaatcctcctcatcctccaaaacctacattaggagcttttcctaattcgtcgcctaaacctagtttttttcttggcggaaatattaattctcaccttcctcatccattctctataattccttttagtgaatataaatgactcgcatgatcatgttttcaaggtgtcatagacggactacacgtacggaacccaacggaactcaacaatttccctaccttttaataaaccagtatgaaaggttttggggaatttaaatcaaaaacacccggttttgccgggatttttttatacttactttagaaccccctccaaatttgtggggggaattcaaccctcccctttggagtgaaatattttgccacccctccctgattaaacctcccggaaaaaaggggtttttttccttcctttaaaaataggttggcccaaaaaaatgggggaaatgcaaaaaaaaacttttctccactctcgagaaaaaaagaaaacaccccccccccccacttttttaaaaggtttatcggggggggccaaaattacatttttttttgggggccccccc

SEQ ID NO: 59362 - DNA, 976 bp, Arabidopsis thaliana landsberg
tcctccgtcgcctcctatcgtcctcaatgaagcagtttcgatcgctgaggtaaactatacggcgatgttgttctccgatatgttagttacaaagcagaagataccgaaaaatccgaattcttgccagggttcgagcgtgtagaggatgcgtcgtcgttcccattggattatggtatccggcggcttgaccacgccgtgggaaacgttcctgagcttggtccggctttaacttatgtagcggggttcactggttttcaccaattcgcagagttcacagcagacgacgttggaaccgccgagagcggtttaaattcagcggtcctggctagcaatgatgaaatggttcttctaccgattaacgagccagtgcacggaacaaagaggaagagtcagattcagacgtatttggaacataacgaaggcgcagggctacaacatctggctctgatgagtgaagacatattcaggaccctgagagagatgaggaagaggagcagtattggaggattcgacttcatgccttctcctccgcctacttactaccagaatctcaagaaacgggtcggcgacgtgctcagcgatgatcagatcaaggagtgtgaggaattagggattcttgtagacagagatgatcaagggacgttgcttcaaatcttcacaaaaccactaggtgacaggtacagttcatttgatcaaacacatgttacagttccctaacaatccatttgatgataaacatgttacagtttactaagcaatctcttgtttatgattgtgttaataggccgacgatatttatagagataatccagagagtaggatgcatgatgaaagatgaggaagggaaggcttaccagagtggaggatgtggtggttttggcaaaggcaatttctctgagctcttcaagtccaaagaagaatacgaaaagactcttgaagccaaacagttagtgggaggaactagcagaaaagccaa

SEQ ID NO: 59363 - DNA, 587 bp, Arabidopsis thaliana landsberg
cctcttctcttctcgtttgtgggaagcctacaaggattaattattaaatacccaaccccaaaaaattcttcctttttgattctctgattcgtccctttttgtacatggtttctgtttggttgttagagcttcttgctgagttgaattgagctggttgcaatcactctgtttcttgggggttgatcgtgtattcaagtggtggatgagtctgttccatgtgctagggtttggtgtcaagattgggcatctcttctggatgctatgctgctggtttgtttcttggttcgttgataatgggatcgaggacaagtctggtcttttagttggctctgtcggtgatcttgagaagactaagatgactacgttgaagaagaagaacaagatgtggttctggaataagatctctagcagcggactcaagatcccgagtttctcttatcagtttcttggctctgttaaattcaacaaggcgtggtggaggaagcttgtggtggtttgggttgtcttatggtttttggtctatttttagtctttttggatctttattttcaatgtttgttgtagtgttaagatactcttaccttttt

SEQ ID NO: 59364 - DNA, 1864 bp, Arabidopsis thaliana landsberg
aaagaaaattacaagagatttgtaacacagctaaaagcctaaaacaaatattattttattttatggattatattggataaaaccaagaggaagggacacagataacatttagaaccagagaaaaaaaaaaagtagcagcaatggcgacatctgttgcgactctatcttctccaccaccagtatctctacctctcctctcatcatctcgctcttccttcttctccaattgcttcacagtcacgacccgaccaaacactcgttctctggtagcgattggacgcagaatccgacaagaaccaacgagaaagccactgacttgtaatgctttgtttggtctcggtgtgcctgagcttgctgtgattgctggcgtcgctgcgttgctttttggacctaagaaacttcctgagattggcaagagtattggcaaaaccgtcaagagctttcaacaggtttgctaaatagaaattttgttgggatctttatgaaattctttgagttctgctttgctattgtatgagttgtgtctggatttgtgaggaattgataacaagtttcaaaaaattgtgcaattctggagattcttgtggtaagaagaaatgtgattttggattagttatgtttggatttgtgtggaattgagtggttatataactttgctatatagaccatctgcttgtaaactttgctgtataggatcataactaatttgatagaatatggatgtgataatcttcttatgcccagtcatgtgaaatagcttgttgattgttgttggaattgatgtaaaaggtcaaaatgaggaaacttcatgtttcaggtgcttagtttttctatgagtttatgtttagatttgtaaggaattgataagaatactaagaaaaacttggaaactgagtggtttatataactttgctgtatgaccgtagatgaagaataaatcattcatttgcttgtaaacattaagtttcattgataactttgctgtgtattataaatcaaagcatgttatgttagctcaaacggggaaatttattcaattcatgtgaatagcttgttagttgtagttgggattgatgtaaaatgaatgtgtatactttttgtggatttgtgaggaactgataagaacaatcagaaagattagttactgagtggggacaataccttatagagtatatagatcaagaataaaacattttatttgcttgtaacagtaagttcattcatgaaatgtcgatcaagcttgttgttatgttatgttatgttaaatcaataataaaattttgctatatagtatagaccaagcatgttgttatgttaggttaatctggcaatgcaatctctattcaaaaaccgatcacagaggtagctcgtgatttgattattggagtgatattagctccgagaaaacttctggttattgttatggctctcatggttgtctgtttgttgtatgtttttctgtgttcctattatcgttttacttgtattgatgaagctttgtatggtttggtataacgcaggctgcaaaagagttcgagtctgagcttaagacagaacccgaagagtctgttgcagaatcatctcaggtagcaacgagtaacaaagaagaggagaaaaaaactgaggtttcttcaagctcaaaggagaatgtatgaagatgagagacttcagtgtttgcttttccttgtagctacaacaattttatgtcatgaagagtttagatcaaatattattgtctggaggaaacaaaatagcctttcaatgaaaagtataaattaactttgtgtttgatgaatctagaaggctctttcgagtagaagatagttaagaacttgcactatacaaattaactctacttaagacc

SEQ ID NO: 59365 - DNA, 477 bp, Arabidopsis thaliana landsberg
agcgcggatctccggtgattataccgccgtggatacgcttttagcagagtgcagaactctttccggtggataatattccaaggattttactgtgcataatttttctctatatatatgtctcctcttttttactctttaccttctcaccgcatcatttcaccaaaaaggtaaataaattctctctcccttatctctttattttctcttgttcacgcttccttggttgtggttcgtcgagaacgtcttggttcggcgaaaagagaagcttgaatcgaactagttcggcgagaagagaagaaagagctggttcgtgagttgaggaggaagagacggttcgtaagaagaggaagaagagctggctcggcaattgaggagggagagctggttcggcatttgagaggagatagagctggttcggtttgaggaagagatccggttcggtgaagaagaagaaaagatccagttcgggttggaaga

SEQ ID NO: 59366 - DNA, 1358 bp, Arabidopsis thaliana landsberg
aacctgaaaaaagtgaaacatctgtgagtctgaacatcaagccagacagtgatatcaaactgagacgcagctttttcaatatcatcttatatatttttcttttggccttgtacagtcacttcaacaataattcgttgaccggccagattccagttgagctttccaatcttactaacatctttcatgtgtgagtcattgccacgatgttgccactgttcccatgatttgttacatcatgatggttaaaggggtcaaactaattttacaggctgctagacaacaataaattatctggaaatcttccaccacaactctctgcattgccaaacctgcaaatcctgtatgtttctcgattgtgtgttttatctcgttctacaagtaatttgtttgatttatggttattgtcctcaatttcaggcaacttgataataacaacttcagtggatccgatatcccagcttcctatggaaacttttcgaatattctaaagctgtaagtttcaggccactgttatctttaaagtccttgtttgattgtttcatttagaagattatagagagaacttattatgtttgttcgtctttttgtacttacaggagtcttagaaattgtagtttgaaaggggcacttcctgattttagcaagatacgtcatctcaaatacttgtaagttctgatcaatctcaatgcatgtattctctttccagtgttgtgaatgtgtttgtgcttcttgttcgctacagggatcttagctggaatgaactcacaggacctataccttcctctaatttttctaaggatgtgacaaccatgtatgctttttacagctgttatttatgtttcctttattcttaaccgactttcaattgcgtttagacgtacaccttactgctttgggttttgtactggttaattaccagtaatttatcaaacaacatacttaacggatccatcccgcagagcttctcagatctccctttacttcagatgctgtaagtttttatgtttatgtttctttatatccaaaatgaataagcttgtgagtagcaatgttgacttagcaaataaaaatctcatcttctgcagattgctgaaaaacaatatgttatctggatctgtccctgattccctttggaagaatatctcttttccgaagaaagctagacttctactgtaaagtcattgtatccctacttcacttacattcacttgcagtttatcaacttctctaattttcctgttttctctcaattcctacagtgatcttaggaataattctctgtcacgatatacaaggagataaaactcctccacaaaatgtcactttaaggtatgtgtaccttggctagaattttcatt

SEQ ID NO: 59367 - DNA, 566 bp, Arabidopsis thaliana landsberg
acatccatgttttatcgacatcacacaccgaataagcaacttacatgttactcccttttttaatctaatggaagtatacatattgaatgaatctaaaaaactacttctatatgaataaatcaattgtgtgtcagaataaattattatgcagactttatgtcatataatgcataatcactccgatcaacagctcaaaatggattgttttttttatttaatacattgctctccacatgtggttgtagaaagtaaagaagagaaaagagaggcaaattctataaattagctaaaaagtagcttcacttcacgaaagttctctcttatatatattacaaacctcaccgacagctattttttgttatctggaaagttgtaaataatcgaccccatgatccattctttttttcatgttaaagaaatgcaactaaaggggctttaaacccgaactacgtggatcgaacctaaaccatacaatcttgtaaatttaaagttttgatcatttcgtgtggaggttcaaacaaactgatgacacatggtcggtcgaaaatagttctaacgtctcatgt

SEQ ID NO: 59368 - DNA, 1940 bp, Arabidopsis thaliana landsberg
  unsure (1)..(1940): unsure at all n locations
ttagaaagagacgaaatgaaggtttattttctcattaacttaaaatatgaatgtacatgtacatgttcatatacaagatagaatgtaaaaaactaccctacacaagttgtaacaagctctctatgctactctaatacatcaatgtggtgggatacatacacttatctttacagaaccgttcaaccgcaaacataatttgaacaaagtggatcaagactcctataaacaatagtacagagcaattttcaagacatacatatatactaaaagaagttctgaataagagccatacaaaatgaaacctaagaagagaatcatatgttaatggtagctcccatatagctcatctttttaagtaaaataagaaaaggttttgttttcatggcaaagaggcaagttttagacctataacagatgaaaaatctgttcattattctgtataactatcatcacaacaatgcccactaacataagagctacattgagagttgattccaagtgtaaagacagctcctttcaggtctaataatgaaaattacacacagagtggaaaaaaagaagaaacttttagcttacggaagtcggaacggggacgtttgggaggaagaacgtgagggttcgacgaaattggaagctgatactgtctctgctggttccagtactcatccgccattgacggcgacggaaacaacaaatcgagagatcacaattcgaaaattagtaaataaaaattcctaatttacagaataaggcattcgattgcagttctacttggtcccaatcgaacaaaaaaattctacccagcaacttgctcgttcctctgtcagatcaaaattctaattcgctcaatttcaatttcatcgagttttctgactcattctctttcgacaacggagtgaatgatcgaattctgagtgacccgacccgttttgtttataaacccggtatttcttctggcgccaatttaacaagtaacgactaagtgaggccatgaattttgtctggactaatatttatgtaaactcagtaaaaatttggtagaaaataagtttaacttaaaaactggcagaaaatgagtttaacttacaaaaaaaaaagactttttaagtttaactatttaagataactcattttcaacaaatttgtagtgagtttacataaatatttgttgtaagtaaaaatttaagaaaatttacatacatgtcacctactagtatgtacatagcttggggttggaaagatatcattccccaattgcctgctctcattcatgcttttcaaacatcggagatgaacactcccaaaatgagaaggttgtgcaaatttacagcactaccagaagtaagtcttaaaatcgtttttatgttgtttattgtatcttttatccaacacttatagactctaacacacattgtattatataggcaatgaataacataggcgacagatcagatgtttacagtttcagaatttttcttggtactataataacggttaaggtttcatatgagactttggatagattaacggctagacacacaagccttaggtgttatcggggtaagacttttctccatccttaaaataactctgactgtgacataattgactaaattgcggtcatgtgttcattagggacaaaggcctgaacttccaagcgagacgaatccaagactgaagaaattaatcgatgaaatgcttggatggagatgatatgtataggcctcacatctaaagatgtaagacgtgttttggagtcgcttgtctcagaattaaatacgcctactacaccaacaacaacgcctctcctggtcactccttcaacatcaaactcaacatcgacactggtgttaagggatcaatttgaggcattatcaggtgatcttgattcttgagtaaaaacangaaaatattttcacaaaaggaaaacctttttccca

SEQ ID NO: 59369 - DNA, 521 bp, Arabidopsis thaliana landsberg
tatcccaactccgtgaccttgcggggccacgctaggagcctgctaggcggggtccgcgcaacagtcacaggggagggcgcacgtgaaaggcaggcgggagaggtgcatatgggccgagcgacgccagatctggcccaggtggggtggttgtttctttttttgttttattttatgttttctatttccaattgaattcacttttgaatctaagtttgaattttctatctcaaacaaaatgcacaatcagaatccagcatgatgcaatattaattatatatatatatatatatttattcattcatttattattcttcataagcaattgcttttgaatatatagcacccatgtaattgttttaagaaaaatagtttacattgtatgatctctaaaaaaatgttctcacattaatacttataaacttcaataaatgctaatttacataagaatctttttattgaatttttgttataaaacttttatttaaggagatgtgacttcaaatgttatgggccttctaaag

SEQ ID NO: 59370 - DNA, 558 bp, Arabidopsis thaliana landsberg
tattgaataagttttcttttattgggatttcactttagtattattatttccaattatgcttttaagcagataaggagtttttaaaatgatcattaaattgtaggaaaataataaactatagttttgttgtaattagtagtcattacgaacaaaaataatggggaaaatgaaaaaattcaattgaatgcatatggttaagtttgtcaacaaattaaataaataagaggaataatatctatacaaaaaaatatcgaatattagtcaaattttgaataaaaaatgtcaaataatagtagaattgtgaaatagttgtatggtaatcgatatatcatatattgaaaaattgatgaaatgtgaatcatatcattcagttaatttgaattggttttctttcttttggtatggagtggatttgaatcgttagatgtgatgaaactttgtttttctattcataaacattctaaatcatagaaatcattatttattcttccaagggtaacatttttgtttgcttgaatgttaagtagcattcatattcatatgtataggaaaaactaa

SEQ ID NO: 59371 - DNA, 900 bp, Arabidopsis thaliana landsberg
gatgatgattaattgaggatgtggaccagaatctttatatattcgcattcacatgccataactttcaaggtctatgaaaaaagattctattgcgtgtttatattctgtggtgtgtactgtagttccaaacataacgcttgtactacgttcatttccggaaaatatctaagaaatatggagtcataaatatttattaaccaattagatgtttttcctatgttctaaatacatttatggtaatctttgcggtcaaatatacgaactttaacaacgacgtttaacaatatatcttttgttttatacatatcaagttttgatatacggacgatagatatttattttcagaaaaccagtagttgtcgtagtcacatggtttgtttttcgttgatcaaaatttgttaatgttattcatttagacttagagactgtatatcgaatttggtactcggttctaaaaaaaaaaaaaactcaatatgattttttatacattctttttcttcccttttaatctgtaagaagaatagtaaagtgaagaagaaaaaactattcattatattgtaacatacgaatacgactcacaattaactaaagttaaagtgtctcattgtatttggactttggacattattctccattattgcattgtttctttctttcttgattaattatgtaaagttgaaatgatttgaagatgctttccggatgtaaacaaactaaactttactttaccaataactttgttttcagaaaactcagatatttatctctagtttctcgtataagtcccaatgaatctaagatttcaaaaacccatcctatatttggtttatatttacaaaaaaacaccaaatttttttccccaattatgccgacataaacttatttttttacatacaaaat

SEQ ID NO: 59372 - DNA, 1437 bp, Arabidopsis thaliana landsberg
gaaattcaagtgtataataccgggtatttggttaaaatttctaaaacaaggctttttaaatgttgactataatatattattacgtataatataaacgtaagtaggcattgaagatatttacatatttacctattgttctataataaaataaataaaacaagagttcgccgattctcagttctactttttgtccaaagcaaaatcaaatctactgactaatcccgtttgatcgatgaatcgtggccatagaaataatattattatcttcacttgtctcttttgttgtgagaaaaaaccatttgatatgattaaaagtagtattaatcattaatcacgatggtaacgtggcaactggtaagacaaatcatatcaatatcaaatattcacactttgatcgaggcagagactcgacaatgtcgagatgcaaaaaaaagtaaacaagaatagcgattctgctgaactaaacaatacgatatatcccgagttgattagcgcactggttagctttggtcctgatctctattagaatcaatctagagttcgaataaaaaaaactatacatgtatactaaaagaaaatcgataaaacaagttaacaaaaataggatgaagtaaatgtaattccatgttcataattttgcaaaagaatattatttttttgttcgaagttagtacttcgctagttgcactacatacatgcatacagtatttaaaagcaacaacgaacacaacaacatgaaagatgaagagaacacgtcatttagaaggtcacgtgacagtgaaaattgaatgttttccttctttatatggtcaggtatattcttcaatgtaaatgtgatgtagtactgtttggtttactttgttttcgttggtgtgggctaaggataaattcccaataaatgatctggaatagtacaaattaattatgtgggacacgtgcccactccttccctgctggcatcttcctagtctgaccttaatacttgttgggccatgatggaatttatgggctgagaacaaagtttgtttgggcccaatagaagatatacggaattttatatttttatatagaccgattgtaaaaataaaatattgtaaagatgttattgataccttgatttatgaaaaatagcatacttatctccaaatcaatcaaccagtaatcattctttaaaaatcacatacttatctccaaatttttagattttacataattatcatatatcatacaaaagatctatttaacatatatagaagattcttacaaaaaaaaaacaaaacgtatatagaagattgtacagatataatgcattttttacatatgtgtattctgtttagagatatgacagtgattctcaattatgtctcaatatctcattactctgtttaaggaacattctacagttagtttatacctagaaattttccaagggctcat

SEQ ID NO: 59373 - DNA, 876 bp, Arabidopsis thaliana landsberg
tttttttccacagtgactacaacgggtccatctataccttctttcagaacctgtaacatttgaaaatcatcagagacaggccatagggcattaagagatggtgaataactacataccttgtaaccgtcacctttgtcatccacacccacaatcagaccaaagtcttttcgactacaaagggaaagataggaagtgcttaacatatgaaattacaacaaagacttgcaaaaaagtacagttatggacgaatccttacctgaaacaaactagattatataactcatagctactttctgacttgaaatctgatgaaacttctccttttccaccccttgacccttctccttttccaccccctgatccttctccttttccaccccctgatccttctcctttcccaccctctctgcaggttggaagaatctttttcttcctttcttcaccataaatttctgagatccactctacatcaccagtttcttttcggtctacaggcgtaaattttagtaactcatccttcgttggtataaccccccaggaagatattgaatctaaggatactttcttatagagatacccatctttcagcatcagactatcaagatgttcaaaagttattccagtatcacgatctcgcctcacttgaatgagaggtctgaactccctgtgataaaagagaggagaagaaagattaaaaaggtggtaattatttaccaaacgagaagaaaagatcaagcttttactcgagctcgcttgaactgatcaatcttggagctggagtctggcctttttggacagttactcccccaccctgcaccagaaaggttgaagtaagcacagagccaacgaatagatgacatgaacgcaccagaaaaa

SEQ ID NO: 59374 - DNA, 1288 bp, Arabidopsis thaliana landsberg
agctgctagttactatatgagcctttagggtttttaggcctctttagggtttaactttcatttcaaacttaaaaatcgttaatctcatttgacgaaaaataaataaaaaaaagtcgttaatctcattttccaatttaatttctgtaatattttttgccccaaagaaacagatttcattttttcatcttttgataaccagcatttgtgattttgccataatatacatgtcaaattttatatagcgtttaaccaaaaaataaaataaaattatatcgcatggtctaaatatccttgaatctaatcaaaccgaaccacaccaaaccaaagaaaaccaacggtaattaaatggttccggttggattaggtttttggtttaggtgtgcttcagctctacaaaacaaatcggtgtttcgagttttttagattgaatttgttctctaaaatcagtggcaatttgtgtaatattttacctcagtaaaagtttcttaaatacgcaaagataaaaactgataatatgaaatagaactccaaaagaaatccaaaatccaaacaatgcaaacaaaaaagtgaaccaaaccccataataaacacctagatgataccaaaaggttgaccttgcttcactttttttcttcattactttgctcttttagttgtcctaaagtagaggaatttgaagcttctattgatattaaaatttgtcaatgtctctctttaaaaacatgagtaatttggtgggctgtcgtcatgttccacgggccacatggatgctcctatttattttctttacctgtcatatgtgtccatcacgactcatttctctccatttttttttctcttaattttcttactacctaaacattctctcttatttttcaaaaaatacaacagactatgaacaaatacattacacacttcttatacatttttaaaatcaaaagctacatgaaatctaaatttcaccaaacaaacaatgagtgaacgttaaaaaaaaattgcaaccaaacaaagaaaaaaaaaacgagtaaaaacgtttaattcaaagcagagaaggggaaaataaaaagaaagggatctgttaaaaagagatctgacgaacaaaattaatatttgaacttcgtcctcctctccttcagatcgaaaaccctaatttcgatttctttgtttgacaattccatcgatttttgaacttgttttctcgagatctccatctgtttcctccaccccgaaatttcaacaatatcttctcgatctgtgcgtcaggatctgggctttttgaaatttgagt

SEQ ID NO: 59375 - DNA, 764 bp, Arabidopsis thaliana landsberg
cattctcagcttttttttttttttttttgttctgtttttataaatattgttactctgcttttcctctgtttttctttgagggttttagcattaataactttagttgctaaaacatgttttcttctttttacattagtctgacaacatacatatacctactttagccacaatctgtgttttcaccagtaatttccacacgagcagcgaccattggagaagtgatgaaaaatcttggaatctcccacaacgatctctcttctcgtcaatctcgaagctttttccaagaactcgtgacattttctgcagattctcgtgttattcctcaccgtaactcttcttcccgtttccgtagagatcaatccaaaacacgtggcgagccttaccgaatgtcttcttggtgaattgcttctgctcttaactagagtctctggtctcaacctcgagacacagtgaacataaatgtcttcttctccaaccatcctcgagacgacatctaagacttcatagatcttgttcgtcgccacgtgggatctgtctccatttgtgaacacatgacttttgcccttcgcctcaacagtactgcgacttgatgttctggatatgcctttgctctccatgagaagcttaatcctatttacatcttcccatcttccaacttctgcatacatgttcaaaagcaagacataacatcccgtgttatcgtgttccatcttaaaaatctgttctgccgcaaaattcgctatggttatgtccttgggggttct

SEQ ID NO: 59376 - DNA, 356 bp, Arabidopsis thaliana landsberg
ccatctgtgtgggggtgacggggggtgcttaacagcaaatcagttcccaatctattccatagagatctacagaaatgactcagacacttaacatcactatccgcgactatagtgttgtgaataccgcgcaaacgaattatctacctaaaaacaattcagcaacattgctagcatcatcagtctcactacaaggcttgaaatgagccacttcggagaatcgatcaacaaccacaaacatgctatccctacccttcttagttctaggcaatcccaaaaaaaaatccatcgaaatatctatccatgggggagcttgaacaggcaaaggcatattcataccatggttgttcaaccgagac

SEQ ID NO: 59377 - DNA, 455 bp, Arabidopsis thaliana landsberg
  unsure (1)..(455): unsure at all n locations
aaaagaaccctttgggttatgtgatttattcataagacatgttttcttgcaaataaatactaattacaaacatatgaactcgtgcatcatgctgaaattcttttgtttgtgaattgaatgataataatagtgacactaataaaaatataataatgagttgaaaatttagatttattccaaaggcacaatttaggaaaaattggaaatgacataaaaaaaggggaaagaaggaaataatataaaatataaaacaaaatttataaacatgtaaactcaaccatactggtatgattagaatctatctttaaaattgagtacaaaaattcaaagtcatacttgaacttcaaattgggaattgaaaataagagaagaagaaaatcagagaaaaatagaaaggaattctaacctaattgngtcgtggcaagcaatttggcctagctccacgttgcgcgcgc

SEQ ID NO: 59378 - DNA, 1228 bp, Arabidopsis thaliana landsberg
ttcgaactttatactatttaagcccattagtattattttgtttcttaggacagagggaacgggtttaccaaggcggggatagaaaagtaggaccgagtgatgagatgaaccaatgataaaccttctgagagagttggtcgacagatggagtaggcggggtcgtggggcggtaggtgaaggattacgacctttccttttttgttcacacccacttatatctacccctcctcgcttctcacacaatttctcagatcaaactcaaaacaaaatttgtttgttcgtttgatctttcttaaaaatatgaaaattaacatcagagattccaccatggtccggcctgccaccgagacaccaatcactaatctttggaactccaacgtcgaccttgtcatccccagattccatacccctagtgtctacttctacagacccaccggcgcttccaatttctttgaccctcaggtcatgaaggaagctctttccaaagcccttgtccctttttaccctatggctggtcgcttgaagagagacgatgatggtcgtattgagatcgattgtaacggtgccggtgttctcttcgttgttgctgatactccttctgttatcgatgattttggtgattttgctcctacccttaatctccgtcagcttattcccgaagttgatcactccaccggcattcactctttcccgcttctcgttttgcaggtcagcttaatttaaagtctttccctttttttaatttattgatgcttgtgttgttctgttttttagttctgtaatgatattctttgatgatgtatgttctgtttttagttatgtaatgatattgtttgatgatataggtgactttctttaaatgtgggggagcttcacttggggttgggatgcaacatcacgcggcagatggtttctctggtcttcattttatcaacacatggtctgatatggctcgtggtcttgacctaaccattccacctttcattgatcgaacactcctccgagctagggacccgccacagcctgcttttcatcatgttgaatatcagcctgcaccaagtatgaagatacctcttgatccgtctaaatcaggacctgagaatacactgtctctatattcaaattaacacgagacaagctttgttctcttaagtgcgaatcaaggaggatgggacactgtcactacagtcatacgagatgttggcaggcatgtgtgagacagtgggaa

SEQ ID NO: 59379 - DNA, 498 bp, Arabidopsis thaliana landsberg
caccactatggataattacggcagtaagacaagtgttacccgataaccgttcagatgtggatttaggacgttgagcttgtagtagagagataagttgagttatctggtcactgccgttggaagatgaaagaggagcacgtgcgctgttcactctaccacgaccgcgaccgttacctttgctcgaacgacctccgcgttgcgccggtttgttctccaagcgagagacgacttctctgttatcagatgagacacgactcccacccttttgttcgtaataccattctggaaacccatggaccaagaagcattctgtcacatcatgtccttggcgatgacaatgagtgcatgaacgatctcgaggtttaggagcatatacagcagctacttgaggagcagatggcgttttgacggagaaaccaattgcctctgaattggtcgtttctttggatcgtgcaaaatccacattttgttctcctctgattacacgagaataaactc

SEQ ID NO: 59380 - DNA, 658 bp, Arabidopsis thaliana landsberg
  unsure (1)..(658): unsure at all n locations
atttgtaataagatgctgaactattaaaagtattcaaactcatttgtcatgtatatatataattgcttctcaagcaatgtttttggaataatttgtacgcacgtaacgacgaaacatagtataaaaatgtcaacatggctaattaagtttcgaaaatattttaataataaatataattaaaaattgaaacctaatcaatttacaagtggacattttaataaggagtttagcatcactcgtgagatttttacttccccaaccaaaaataatggaaacataattatgcaaattatgtaatgacacttatttctttctttaaagaattatgagttattattgtccatctactacaaaatttaaaagtagatgtactgataatttttttttttttttttttgtcgacgtactgataattaaaaatatcatgccaaaactcataccaatgtccaaaacctgaataaagttgaatattattgccactcaaaatatcaattagaagactcatatttttagtccataattctatagngaatcttttatctattggnctttcgttttcatctgaattataaatgagttttggaaataattaccagttaaaattatttcttaatgtccaaaatgttaatagtaagtcctgcatttgtgactctgaatc

SEQ ID NO: 59381 - DNA, 747 bp, Arabidopsis thaliana landsberg
tataaacattcataaagaccgggacgatgagaaaatgcagaggtctgaaatggaaaagcagaggaatgagagagcttacggtcgtttggatccgttgatgattgtggaagtttgtttacaaagtaagtctccatagcattgatcagaggtggaagagatgaactctgagtctgacgaagagaaaactggaagctctctgctttcaaagggtttgaagtgaacaaggctaaggtccggaagtagttaagacttaacggttccccaaaagacttcccgttcaacaagatcacgaattctcttgtttctacggttccggaattaggttgttgaagttccgtgaaatacaagtaaaagaaaaactcaagagacggatcatctggaatccatccaaaatctacaaatcctcttggattatctggtacaattccagttctcattacaacttgtggaagacggaaattaccggtactgttgcttgtgagagaagtcgacgggtcacttaacggcttcgtcccatttggcgtggcgggaaaccaaatccgatcaaaaacatcgtttggatacctaaccgttagatttgtcgttgatccaaaatccaaccgttgaaatagttgaagtgattcacattgagctgcataggaagaattcggcaactgtctaagttccaataccgatataaagggcgtgccattttctgtattcactaaacacacttgtattgtatctgtcaacacataatatatgatc

SEQ ID NO: 59382 - DNA, 925 bp, Arabidopsis thaliana landsberg
aaaaaaaaacacaggtctaaacgaaccaaaagcagataggaagcgtgttaatgttgaaaagtgatgttcatttttctggtttgagcatgaaacatctctgcgatatctgtagccgtactacattcttcaggatttctatctgtcactttactgataaatctcggaaacctaacagagatgcctcgcgatggatggacgagacctaaactggcactgtgaacaggcgagactgtgaaatcagcacctctgatttcccaaactacctctgcggaaaaccacatgtcaggtgtctcccctgttctgtagtaaggcggctttttcgcaaggatcttatcctccgagtagaattctttcatctgcaagataagcaaaataagaaagtagaatcaagcttgaaatggttctcacgtgacaattaggagtccaagtatagaccaaacccaacgtatttactaccccatctgtttcatcattaaacaacaacgttagagttgagcttttcattacctcgatgtaaaaggcatcagaaaaaccagacatgacacggcagacactctggaattcttcagtctcagggttgaagcaggccataaggaatggactatacctacacacaaaatatataaaaaacatcagaattcatcaagatgcatttgagaaattaccagtaaacttatgattacaattctgcttttcagaaaaaaaaaaagagaaagttggaaaatatgtttttactaccatcctgcttttctcccattgccataccaagcaccaataggaactaaatccaatgtatcgcccaatccatctacataatctcgcttaacctgagccagaaaagaaaagcattatttaatccatttccatcacattatgttttagtaagataatttacagcaaagagaccttgagccatgaatcggag

SEQ ID NO: 59383 - DNA, 1379 bp, Arabidopsis thaliana landsberg
ggaagttgcattcattttgtcattttctgcaaacttaaacatgttcattggattggtgtaattacttgaaattgagtttttaaagttcattaaaatcccattcattctgcaagtgaacatagatgtacattttagattgagtgtggatcagcaaaacgacatttattactggtttaatttttaataatttatttcataatatagatgtttcattgttttgtatttgtatttgcaatgcaatttcctattttgtctttattaaccttttaccaaaaataaaataaaaaataaagcgaataaactaattgaacacatctaaagtatttggaatcaatgcaacaaacatttcttacaaaatgattcatataaacaagtttctttcgaacaaatcatagagacgagaatacagatcttatcctgacatatttccacgatcgaggttgacatgcattttttacggacccgcgagctattctctctacagtgatactcacgacaatgccaatcttatttccaagcttgatttgattgtatctggaatatatttataaaatctctttctgcaaaattattattctgtcacaaaaaatttgggtcttctagtctaaacctaactagttgttacaaaaaaactcaaaaaacaaagtcggatcgtgtgaataagttttcatacaaaagatagtttgatcaacaagtattttgatatatacggtttgacctgattgatttggatctgtgttccaaaaggtcacaagacaacgaggaataacataaactcattcatacgtcccattttcaagttcctctgagaaatggaacaaattcggagtgatatcttttgattgactccacagcagcaacagcaatagcttcttcttcgggataataagcgatcggatcagatagatacggttctggaatcttcagcacgccttcgagcatggcgtggaggcagtaagctgcatatgttacatgatacccgccttcttgcaccataagcaaccttccatggctgtgctcctctgcaactcccctcattatctgcccaatccttctgtatccattcattgtcaggctttgtctcccgtttggatcaaactgcagatccgacagtaaatagtggttatccgtcagtccatgacattcaaatcccctcacaaactagacaatcagcatccctagcaaatgtttgaaaccaaactaatggatttaagccggagaactttaagagagagtttcctgtgaaccagaaaattcattaacttccatgggccaaaaagtgaacagctctgttagtaacatctgtgctgaatataaattcactaagctcgacaaggggaccactaggtagcgtaataagaaccataagaaccagatct

SEQ ID NO: 59384 - DNA, 1674 bp, Arabidopsis thaliana landsberg
aagctaaatataatgtttataatttaagctaaaaataaaataaaaaataattattattatgatcatatgtacatcgaataattttataatataaaaacttgtatacagtcgaaatttcatatttaatatatatgcatctaaatcatttctagttttgatggatacgtcatcaaaaatacattattatcttatcaagagatcattccaaaattccaacctcgaaatgctaaattgtaatataattgaccaaaattaaagaagtttcgttgcgatgactcgtcatagatgtgtcaaccatatctgatctcactcacacacttgctatctgccactaccgatgctattttcctttttaacaaaacttttacttaaccaaaacaatagcaaagaaatgtcatcaaattcaaccagttcttgtcataccatctctaatacatgaattctttatggtgaaggtgaattgtggatttaaactagtatcataattttcgtgttttacgccaagaatttgattgccgtttggacatattcacgtattctttggcacaataacaaaacgtggcattggtggatctaccaagtggcacaagagtctgacttaagcagcaaagtggtctttgaatacattaaagttgtttctacgaaaagtagggctaatgaatctagaggaaaagtttttttttattacaaatttcgaaaatacttgaatttaaataagttcatgtttccacaataatttaattcaaaatagtactttcataatttaggccagacgctatttggtattactaccgaaatgatctcacatcacatgtgtgtattagtttgaaccgttcgattgtttaaacaagagtaacgaaaccaatcaacatcaaataattaatcgtctcacaagatcacaaagcaaatgtcacaatggcgtaacctgttttgtattctataaccggtagggttataaccgataataattgagctgctagatggttcgacccaatgatcggtgatagtttctctcaagaatctcacgtcagaatcataaaacaaaacgtaataaaaaagtgtataaaattttatggtgaaaatacaccagaatgattgaaatggaaaggcttaccttttgggctatggaagcggccggatcggacacagggctaagtatggctcgagccttcgtctcacgatgcaaaccggtctttgctatgcttaaccgttggcaatggattgtaccggttctagggaaacggtttgatccatcacctagccggtttgatcgactaaccattcggttttctccgagatgatccgtacggaacactccatttcctttgaagagctccggcgttgtcttcacgatcatacttgtcattttctttcttatataaagcataaaccacttaaataaatataatatacttacttttaagagttgtatataaaaataaagaagttgagagaaaggagtgtataaaataaaaatatatatagcttacgtgatatggaaattggtgtttgatggttagctatttgcgagagtaaaaatggcggttctataaatttcttctctgatcctaatttatttgatttttggtggttcttattagttacgtagactttatgtgatctattttttatttatattttatgtatttttggaagtttattagattttggttt

SEQ ID NO: 59385 - DNA, 1838 bp, Arabidopsis thaliana landsberg
gttttgattttcgttctctattagtttctccccctcactctcatggcgatgaattttcaatttatgtgagattttattccacaatcggaataattttcctggcaatggcgacgaccaatgctccacctgagctagcttcaggaaacccttgctgcctcgctgtatgtattcgatttttatccatttatgttgtttagtgcttttcttcaaagaaatcttattctcgtcttcctttgattgtatttcagtggcaagggaagtacataggaatgaagaagaggcgagatgcttttaaagaaggagtaactcttctccagaaggctatagaaaatgttaatgctgaaaaatccaatctcgagagaagtaagttccttttactccttgtggcagagattagctcgctcccttttgatgtgttgtgtttctgttactgattaattttgtttatggtacatgatccattgttatgcctttgatttgatgtagctaattctccaattgatgattctttggcgattatgattgaattatggtatgctttaaaactgggctttgtggcttggttggaaagatgttgttgttactacagttccaaatcttaattttgatttttttactggtctatctgctgaatcctacagaatttggggagatggcgactgacggagatactaaggaaaatggttcaactgtgaaagcatctttggagaaagaaatatctcgtttgaagtttgagatagtgtctttgcaacaaaaactggagcggaaccttaaagaaaaaagtgaagaaacaaagcttcttcaggatcaagcttctagtcgagaaaaggagatcaatgaactgagggatctccttaagaaagaaacattaagggcagatagttctgaagaagagagggaacatgcttttaaggaactgaacaaggcaaaggctctgatagtaaaagatgaggaaatcgagcaagatattcctgaagtaaaaagggaaataagtctggttaaaaatcttcttgctagtgagagacagaagacagagtcagagaggaagaaagcagaatcagagaaaaataaagctgataagtatctttcggagttggaggtgttaagaaattcagctcataagactagttctgatttacttactttgacctccaatcttgagactgtaaaaaagcagcttgagcttgaaaaacagaagacactgaaagagaaaaaacgtgcagatatggagagtgcaaaagctagggaccagatgaagctggcagaagatgtgtctaagaagcttgaaatcgttagagcaagaaatgaagagctcaagaaagaaatggaatcgcagaccgctagtagccaagtgaagtttgctgaaaactcggaaaagctggaagagaagataaggctccttgagatgaataaaaaaacagccatggactggaaatctcgtactgatgatctgactcaacagttacaagaagcgcaattagtcgctgaaggtttgaagaaacaagtgcatgagctttcactttcccagaaatccatcaagactcactctatttctcctcagaaagtcagagacctggaaaaggctgaaatgaggcttttgaaaaaaaagatgaagtttgagagaaattgtgcaaaacactcccaaacagtggctaaatttgaaaagtttcgaagggaatttcagtgcgaagagctaggtcggttgaaactggagttcggtagtcttacgaatcgcatgaatctactggatgagtatttttcaacagacgttgaaggaacagctggccatggaaaggtttgtttctgccatagtttttgcacactttgtctccttatcg

SEQ ID NO: 59386 - DNA, 438 bp, Arabidopsis thaliana landsberg
gctgatgtgtggatagaactgcttttgtttatgagctatgcatatgacccaggctcatattttttcatccgactatttggaatcattaattccgcatcatctatataggaatccaatggagcccgaggtcatctttaaatggctcaaacctaacagattacagatctgatcaacgcggtatataaagtgaacataattagcttaaggctcgaatgataatcacggggtagacgaaccgttcggcttaatgttctattgaccagtcggataacgatttaatgccgcatcaatttttactttataaaacaatttgttctagctgtataaaatacttttgatgatatgaaaattattcattgtggatgcacacaataatcatcgatttccgtatgattaataatatacgccaatttgtggacagctataattaaggagttt

SEQ ID NO: 59387 - DNA, 1162 bp, Arabidopsis thaliana landsberg
tgtgtgttaaataagaatttatctgtatctcaattaggatcacggcacatgagaaagcttttggatcattcattacgtgtcaacacatctttccttgagttcaaattaaaatttcgaggcctcgagaccaccttcaccactattatatattaatcacccctgtatatttccaagacaagtgattaacgttagctttattacataatgtttttagtcacacttgaagaaaaggcaagtgggtttggatgcaaaaggcaagattttaacataagcccatttgaggcttttgggccttaaccttttgggcctgtattacctatgaattacacatttaacattttgattattggaacccaacaaaatggagcaaagccttataataaaatagagggacatgggtgtcatgtcgacgtcaagcgcgagatgtgagatgtgagtttgcactgcaaatccaatagaatctattaacgccccttttaagttacagggcaatccagttagtacaaaataaagagttcctaataaatgtcgcaaaggttaacatggttatattaaagaagatggtcggtatttgcctccggtcaaatacttagtgaagaactcacgggcaagagcgttaagatcaccgtcctcatccactggattttccaggccaaagaatgtgctaagatccactgactctgttgggacctcaatagcttcttttggctgttcttgttcttgttgttgtgacatacaaggaatgtgtgacgacgaggaagacatattgtctttgctatcgacagaagaaatgagtggcacattagatgaagaggctgcttctgtccgtgaattgttttgagaattcggcggaggaagaccttgtaatgttgagagttgagtttggacgtaagctaactccgcctgtagattcatcacctgttcacatgtgggacgtttatttaattaaaaagttcatataacattagtttttaaaaaacctaatttattcgtattagaagaaaattttcaaactgttttattcaaccgatatactattaaagacaaacaagtcggaatgtaaccacaaagaatgacgatttgactttctttaacgctgttttcgacaaacgagccattgggaagacacacgttagctattttcaatattagcaactttgac

SEQ ID NO: 59388 - DNA, 402 bp, Arabidopsis thaliana landsberg
tatattcacattctccctataatgcgggtgttttgagcatttgacctttctcattcaatgagagaaaattagttagcctagtggcactatattatgcttcaactttagtagctttattttggtatacgagttaatgatttatccctaaactatgttaaagtatgaaacaaaaaaagaaagacaaacttttagaacccaaaaccccttgatttggtttaatggtacatatatatatggttctaagctaaaatattatattgagtggtggacatatagtaaggctgactggtatatgcatatatctttcacacgacttgacctattacctaatcatgtgtatatatgatcgaacattgacgacccgttgttgtccgttattgatcatgtgaccttattaatttt

SEQ ID NO: 59389 - DNA, 467 bp, Arabidopsis thaliana landsberg
taacaaaccaagcttgactcatggcttttggcacgcaacattcgtgtcatgttgtatgccgcttgctttctttaagagccgtgtctttttgatttggaaggcacggactgagaagctatacctatgacgcgatgctcagacagaacgttcttttttgcagatgatgttgggtttaggatcatagataggattactagggagcagagtatgggtacggaagaattaaagctacactatctcttggcacagttgtgactaatgttcgtagaagactcaagagacctctaagtaatcggttaacataataagaagatagattttaattctaggacccgtacccagaagaatgtcataaacccacggggatcttttttacagaactggaacaaagtcttgctttttgcttcagtgattgatttggctattgatccattggttctctatattcctattggggatggagaaag

SEQ ID NO: 59390 - DNA, 551 bp, Arabidopsis thaliana landsberg
atgcactgtacatgagggagcgtctggtttaggcatggctcttggtgagaccgattcttgcacatcctgtttgcgagcatgagctaaatgacttaaatatctacccttccttgcgacctcctcaagagctgttctattaactgatatgatcttggtaagtgccgtcatcgacgccttaatcacggtcttctcctcggaactagaaatagccgtaaacagctgatccagaatgacatcttttagcatgctatacttgaatccttctttcctgttcagcatttgatatatcattgtaacctctgagacatatttctcatctgcattccctaacacttcctttatcaagctctgaaggttcatccataaatccattgttggagctcttctagaaagcgtctcaagtccattccctcgttttttggtctgcaaatttctcctcattccttcaaaacttatggaccctttttgtccaaatactgatttttcttccaatctaggtgccttaaagaagatgcattttctaagtgggtattccaagttgtctttgattg

SEQ ID NO: 59391 - DNA, 448 bp, Arabidopsis thaliana landsberg
caactttctctgatccaacattctaattctgagcttttgaaacaatgttgaagagcattctaattctctgctgaactaattctgagcttcaaaatttggaatctttaacgaatcacaaacatgtcaacaccacaataaactgatatttccttcgaaatcactccaagaatcataacatttgcaagattagctcatgttaacacctcaaaactagaactatcaccaagaatcaaaacattacaacacaagtataaatcgtagcccaaattctgagaacaaattcagcgagacaaacggagtgcggaattaaaggtttaagagagtatcgattccactaacctccgccttcatttctggcctgagaagatccgatacagcccattctcgaaccgttgagagtcgcgtttgattaagtgaaaattggaaagtcgcttccaacaagtaaagt

SEQ ID NO: 59392 - DNA, 1033 bp, Arabidopsis thaliana landsberg
aaatccggatcggtttttgtgaaaaatcggtaacctaatcttaaagtttatatccataaaactttaaacaatacatacaaatgattgtttttcaaggtttttgggtccaaatgtcagttttatatcgggtatcaattaaatttcacggaagccgaatgaccctaaccgatccaaaccaaaaagtttctggttcctacacggatcctaaacctccttatctaaaaaaaccgatccagaccgacccgaaaaacctgaatgcccatgcctagttataatcatggtaaaaagaatatgcagctttgtaatttagtgaatgtttactagcatcggaaatgtttttatgtgaaattgtgaattgtaatatacttattagttattacacatgaatcccaagatccacccctaataaagaggccattagtttaactccgataaacgagattcaaacctatgctattaaggcctgacgactccaagtcatactttcatgattccatgttcataatgtacattctagagcaactacatggattacacaaaagaaatgtctcaatcaaattaactattttcactacttacgaaaatctaaattatgtttccttttactgtttcgagtaatttttgtgacattgtgctacttttgcgggcgccttaccggtctgtcagtggcataagtattcagctggactgttcgtctattccttagaatgatcagtagtctctatgtttgttgtcatcttctcttctactccctcaacttttaatttctgccacaagtacatattaagatatcgtcacaacgtttggcattacaatcgaatcacggaaaacgatcatggaaagtgagttcttactttagatagtgcaaacatgtttgcatacaacttagcgtctcttctgtcgctctcagctttagagagtttcatcgccttgtaaagagacttcacttccctggaaacataaagtgtcatcgcataacatgcccaggagaaatgaggatgcaacaaacaacatacacaatttttttttttac

SEQ ID NO: 59393 - DNA, 1581 bp, Arabidopsis thaliana landsberg
  unsure (1)..(1581): unsure at all n locations
aagtctgacctaagaataaagttatactttcgtacttggttttaccctttgcataagctttccaagtgatatagttgacaaatccagtacccccattatttgatagattcttttgtactaacctttgtattctgcgatttagaagaatacaatgatgaccagaggttggtacttcttgtgaatatatcttaaaaatgttgtcaaattttcaaatattttccttttgtcgcatccattttaactccactcttagctcgctattttaaaccattaattaaatgtaatagttgactcaaaaaacatttgctgaacagaaagtatatttgtatataatttagtatatcttccagtcttccactgatatgatcatatgaactagctagctaggtacacatgttcaataaagaaacttaaaatagctagtggtgtaaaatattaatgtatgcgatgtgtacatatcgcttattgctttaaaccgaaaaaaaaaaggaagacaagattagtaatcatgagataatgtgtgtaggatacgatgatcggataaaagagaaaagggtatgtccaaaggcgtaggacagacataggtctggagacaaagtgatgtgtcatgtgtgtggtgtccccaaaaattaactctgttgttaagcatttgtgttttaccaatcttttggcctcacctcttaaatctttctttctttctcttctattcctctcctatcatttattttttggccattttgttttctccacacacacacgtatttttggccagtagcatttataattttctcttttacaaataaaatagaaaaaaatatagatgcatatgatctaatacataatttaaaacagtgtcatcacagaacttataacttcatgcaactagcatgtcttaattaacaaaaaaaaaaaacaatgtttaatttctttctgaaaaaaaaacaagaatttaattgatataaaaacctagcatgggcttgttttgagtcaatctaataaagttgttgacaaagaaaaaaaaaactagcatgtatttattcaaaagtcgttttgtaacaattgtttaagcacttccccaatgttgagaataagagataggaatggttttatgtagtttaaagttcttgtttagaatggttaatttgtgtgaattatgttctttaaaaaaaaaacagaagagtttttctcataggattagtgaagcttgtcaacgttgaggcctctttcgtttctggttactatcaagcaatcatcatggcctatatcataaagtaatttgggccagttttattattaatgggccgaagtctatggcctttagaatttatttgactaaaaaagggaacctaaattaaatttctctttcagacagaataattagagcatatcagagatgnnnnnnnnnnnnnnnnnnnnnnnnnnnnntaacgtatttttctaaatattccaaaagaatttatttattttccacattttatctgtgaaaaaaaaagaaaaaaaaatccatctaaaaaggcgtaagaggtctgaattcgtcaaaaaggtctttgagaatccaaaaacgttttatggtttagctct

SEQ ID NO: 59394 - DNA, 458 bp, Arabidopsis thaliana landsberg
ttattgcattttcagcactctagtctcagtaaaagtttagtatatactctacagatagttggtattgcagttgctaattataattcactgctttattagcgccactggtatcacttaccgggaatgggcaccgggagctaaggtttgtttcaactcaatagtcaatactttacctaacaattatgtctttaatgattttgtgttatatttgttccgtcattagagtttcagaattttcttgtgtatgtcaaatgcaacttcttatgcccgtgacgagaactaaatctaaaatcatggattaaaactcatgtattccctcatgtgatgcacacctattacgaacataccaaaaacaatttctgtggtggtgaattttttttctttgagctgttggggttacagatttaaaactggtcaagtggttttttattaacataagtagaatgatcagcctgggc

SEQ ID NO: 59395 - DNA, 1869 bp, Arabidopsis thaliana landsberg
cgaattttaagtcatgtatagacataaagatagattgatagtgttggtgcttaagaatagtattgttctattacagtttgggctggattttctgaacgtgttcgggatggaagcaaatttatagtggctgatagacccgtaagacaaggaagacgaaatttctgcgccggcacagaagaatccgtcattgaagagcggaagttgaggaaagaaagtgcagaaaatgggtttttcgatgacaatggaaatgaaaatggaagttcatcatccgaccttttggacggtttgttccttaacgaataattatcttttataaaagaacaaagtcttgatttgggttccaatcctgggaaacacatccttcaatatatattatcaagcaagttagcttactcacgcttgttcattccctagttaccgaatctttgtttcgcaagttgagaaagcttatgaattaggctaagttgattttgattatttgatctgcctttggtatgatactatgattatgaacatgtttgaaaatgattcagttgatagaatctcattacgctgtcttacattgtcttcctcatgtattctgtttagaaacaatggtttttattttattagcaattcaattattacatgaaggctttatattctacattctttagaaggaaacaaaaatagttaaatccaatatctttgattttgttcatttttatggaacagaaaccaaagcttttttattcacagaataacaccaccaagttttttcttcatcatgcaacaactacttgagcagctgcaagccttgcaattggaaccctgcaacaacaacaacaacaacaacaacagaaatcccaaaattacatcaatctgagttatacaatagtgttgtaaaaaaagtgtttattggtttggaaattaatcaattacctgaaaggagaacaagagacatagtcaagtcctgcttcagcaaagaatcccacagaagatggatctcctccatgttctccacatatcccaaccttgaggctaggcctagctgctcgtcctttttctgtcgccatcttgatcaattgccctacaccttgctgatcaagaacctggtccaaacacaaaaaaatggctatcaagattttatcctatggatagagagcaaacgaaatggtagtcattatacctcaaaagggtcgtgctgtaagattcctttggcgaggtaaatcggtagaaacttgccgacatcgtctctactgtatccaaacgtcatctgcgtcaagtcgtttgtcccgaacgagaaaaactccgcctctttcgcaatctgtcaaaagaaaaaggttcctacttagcaaatagcaacatggtttcaagtgcctaaaacacattttgtgtcttgttacatttacctcatctgcaatgagcgcggctcgagggatctcaatcattgtcccaaccttgtagctcacggtatgacccttctcagcaaatactttctttgcaactttacgaattacatcaacttggtgacccaattcctgaggagttcctacaagtggaaccataatctcaggaatgacagtaacaccttggtcctgcattgacgctgcagcttcaaaaattgcacgcgcttgcatctccgttagctctggatacgatattccgagcctataacgtacaagtttaccgatcatcagattgttcttcaggtgcaaagagacagagagaaacaaagagagtaagaaacctgcaaccgcggaaaccaagcattggattcacttcagagagtttctctatccgtgacaagacttcatcttctttcacaccagtttcttcagctagctcatgtacaatgttgtccaagtcgccttccgggagaaagctcgt

SEQ ID NO: 59396 - DNA, 1978 bp, Arabidopsis thaliana landsberg
atgttatgaaatttgatacatagaaggtgaatctgactatagaagatgacaacccaaaaaaatgttttaatatttggaatagtgacctttatcttaacatggtttatttacagcatcataccacttttatacgttgctgtttttgattatttaattcctttttagtctccttatgctcatcttattgctatgcaggctacaggatgcaggaaactgcagacgctaaattcacagaagaaccgtaatggtgaaaagcattctgacgcaagatgcaaattggtagccagctcaggttatcaggagcaggcttgcaagttgtctgcccacttaatttctaaatctggacggggcgtgagtgagtctgtctcaggtactatttctcaattggagtctcctactggaggctctagaaaattaccgagttctggagtaatttccagcgcaacatctttttctgatgggcagttactggcatcacagggaagagagcagttctctgttactacttcagcagaaatagcaaaagataaaccgaatatccaaccaacaaaatcaagtatgctccaaaagatctccgataccagtaaaaatggaaatctctgtttggtggcagaaaactatcttcaaaggtgtcagagagatagtcatgagaactctcggaaaagaaaaagaatgttagaggcagttgtgtcccataagcatctggcatctggtgataaaaagaaaaatttgccgattggagagaagatgggcaccttgaagtccatgattgtaggaactgggtctaggccttcagaaaaggaagaaaccttggtcccccctgataggcaaggtggctcctccgcaattgacattacagtttccaagaaaagaagggtttcttgtaagaagaagataattgtacagaattctcttgagttcaaccagtcaggcaagactccaggtaatatagctgggaaaactacgtgtctctctactgctactggacatgacgtgaaaacattattttcggaggactttgctgctacagattatatgaagttgctagagttggataacttggaagaagaaaattattaccagatggctagagaatcgcttctgtcccctgatcttcctcaggtagattttttgggttgtgagatcatgaatgaggacaaaaatcctgctagggctattgacttggctgccagtaatagcatgtatttacgtgagaccatactttctagtgaatctcctagtctcaacactcagaatatctcagtgacagttgaaatgccacccatgttgaaaccgttgcatgggcatcttcttaaacactttattgtgttttcaaatattgaagaccagaacagtatcatcataataattcatgctactaacaattgtctacagcgttgcccgtcagttactaaagaacagtgggcagtgccagcgattttgtcttctttgaaaatggaagaaaaccttttggcccagtaagatattctgctttctgatgcttcttcagtgtatagtggtgatatagatttcctttttcaactcaatcagtaaactagtgtctaggcgctaacaaatacccttttttcttttcagggaaagggcctgtgtgttcctctccttgttgctgcataacttctccatggttcacacaacaaaaactgggaatactctgaatgttgattctttctcctgcttggattctttctcaaagcatatacgtggtggtatgccccaaaataatttttcttttctttttctttttcttctcaaaactaatattttatctgcttttgattttatgttttaatttattgaacttgtaattttctggtctagttatggctgatactgacgctggagttatgctttccggattttttggaagaactgcgatgtcttctttaagacccttctttctgggtccaggatctattatttctctgtatatacttctcactaattcatcttaatttct

SEQ ID NO: 59397 - DNA, 516 bp, Arabidopsis thaliana landsberg
atggttgtaatattatgccgccgccaggaggcacaataataagttgttgctcttgattcttggttctttcgttttttgtgacaaattaaaacctcttactaaactctttggtgtttaacttgtgatacaatgcaacttctattttttttaaaaatattacttcagtttttctttcgttcttgtctacatgttaaaactaagcacaataatcatcatctgtgttcattattatccaagagtatgagccgcgtacgattcgcataaacaaagtaagctcattaatcatcatttcatcgatttatctggaaaccaatctcactctagaacaaacaataaactctatttggatcaacaaattgtactataatgctatgttaagtattaccaatttgtaattcaaaattaattagcaaaaagtgaacttggaatcttggcacaatttggtgtccaaatttttgtcacgtggcagataattaaaaaaaactgccttaatgggccgaaatgaagtgatctgac

SEQ ID NO: 59398 - DNA, 1153 bp, Arabidopsis thaliana landsberg
ctgtagaacattaatcaggaggcagactgggtccaacgaggaaggatggtagaacagtgacgaggtcaataccattttcttcagagaatttccatgcagcttgttccgctaatgtctttgataaggcataccagacctttttttccatgttgcatcaaattgtgaaagtcatttacacaaacagttagctaatatgagttttgtgtttagcaaaatagctactctttcacattcgggtaagctagaagacattttgatctctgtcctttcgtaaaacataaaaggctattttcaaattattatacctggaagcgcttgcagagttccacagacgtccaaattgattcgtcaagagggattttgggatcaaaatcatctctgatcctgactgttgaagaggatgaggtgagaaccacgcgcttcagggaaggattcttcctgcatgatcgcagtacattcagggttccttctatagctggtctcagaatctcctcctatcaaattataaggaagaaaaagtcagagaatagataatctagtaacagatacacaaagcatagtgtgaccagaaaaaaaagtttgtcgtggcatgcctctggattagaggtaggtttaagcaccggagaagcagtatggaacactccttggcatcccattatggcgttatcaaaacttccttcttccattaaatcagccttcaccaaccgtagtctctcctttgccccttccaacttccataggtgcgcaagtttcttctcatttcctgtcaaaacatgaaaactaactgagtactgacaggcaccaaatcggaccaagacaaaggaaacaagaaggatagaaagacctggatctctgactgttccgataacttcatatccttcaagtagaagcctctttacaagccaagaagccaagaagcctgaagcaccagtaacacagacttttccctttgcttgatccattttcggtataaatggaatcacacccgaatgattatatagcatgtgtatccatgcatgttcagagggtactagctatatcatgatggaggtaagtataggttaggtaggtcattcaacccatgcggggttacttcttctttacctaaaaggttttagagggttgtttaaccaaacacaatggcctgactact

SEQ ID NO: 59399 - DNA, 1394 bp, Arabidopsis thaliana landsberg
  unsure (1)..(1394): unsure at all n locations
atttttcagaaactgcgtaaaacaccgtgaaaatcatcttctgcttttttttttttttggtcaaactctctacagagtttatcaagtgatttttaccggtacctgtttttccttgtttggttcaactcaattattcgccttaaacccactttaagaaaagcccactgaaaagcctactttaaaattcaaccaaaaggcccataagtactacagccgacatcagcagacaacaagccacgtcgatctcgaggaaccgcgtaattaacgtgtcggaatcacacgagccaccgtgtactagatagctccataaaagcagacacatctcatgaagaagaacctaaaaactttaatagcaaacgaaaaataaaaaagaagaaactaacaaaacaaaaaaaaaatggaggccgggaaaacaccaccgacgacgacaacaacgacggagaagaaaacggagcaagtgaaagacaacgacttgccgaccgatagcccttacatggcgacgggtactttggaagattacaaattgaaagcttatggagccgaaggtcaccaagagcctactcctggtcttggaggtggctccaccgatgctcctactccttctggcgacgcacccgccgccactaccaccgatgcgaaagctccgtgaaaaaaaagaaagactataataatgaacgggttttgtggatcgtcggaaaacaaacccataattgtagtatgttcaataactgatccagcttcgttcttaacgtttttatggtttaattaaaaatgtatttgcgtctaatgctgaatgctaaagttcgagtttcgtatcaaatgaagttgtaacgatttaataattaatgtgaagcttatttctttttgataatgaccaatgttatctagttttatctccgtcgatcatataacttaatttattaatttagtattccatcaaaattgaaattatttagttcttggtcacacagccaactttggtattcaatccaaatattcaatcttgggtttttgtttggaattttatgaatagtactatccaaaataagaacattatttgttgaataatttatacgttttgggttttttacaataatattagatcgataatttcttcgattcgcttgctttagatacatagatacaaaatcattatctattcccgatcatactagagcgtcttaattaattaatattctnnnnnnnnnnnnnnnnnnnnnnnnnnnnntgccaagtgaagtcggtggctttgtgactttgtggtacgaacgaatattaaggtgtaggggatattttatttgcccacgtacacgtggttggtgatagccagatcgtggacttaatctcaatattatatgtgtgcctcacaaattatatgtagtcaaccgataaag

SEQ ID NO: 59400 - DNA, 1552 bp, Arabidopsis thaliana landsberg
ataccaattatgacaaatgaggtaaaaaatagtttctcataaatccattcacttcggattaaagataagtgacagtagtttccttaataatctgtaaaatctgacatattatgtactatgaattctggttattacgcttgagtgcagcatccagagctggtatttttttcaaaagtaactagtaaaaggacctgatcaggactaagtgacatatgcattgcccactaatcaaaatgtgctctttccactatatttctatcaaggtgtactctccttgatccatatcattcatcaattgtctatatactacactatggtctatactctactaatcattgggcaacgaccttgagaacctttcatgcacagcggacagcacagccaaagacgatataatcatatgaactggaggtaacataagactatgaataacagctatgctgaccctatagccagactaagaagtagtaaaaaagaaagttaaagtgctagaagtttagcttgctgaccctataaccaacagtaaaataatccttgtgctcagggacaccaatcaactggattgcattgtatccagctcttttcacatgaggaaggacctgatgtttgataggccacagaaaaactgagatgtgtgcataataagattgcaagtaagaatacaatgaatacattaggaggtaccttcttagtaaattcttcgaaagttgaaacttttggctcggacccactgattccaacatgacattcgtatatgcgtaaggactttggaacttttggcttggagtatttccacttgtatgcagcttcaggagaaggttcccaatgaattgcgtaagcttgctttccttcatcctctattttagagaaaaatgaatacattaataataaacaagatacattatcgtggaaatattaacatgacacatacaaaaacgttatttttaaagcatctctgcatagaaacatcaagcagtagcgtacagaaacaagaaaggttttaatgcttctctgaaaaatgttgttcagtaagactgttaatttagtgcttacaaagtttctagtaactctggacatgaaaagcagagagtaaaaataatggaaaaaaactccttccatttgttcaattcgtgcaaatacttctaagcatgtgtcatcagatgaaagaaaaactgaatgcttgcttccttatatttatgaatgttatgaaatttgttatatttcttgtgctactcctaaccatagaaataccaaacgctatcatacctggttgcacatatgtagcccaagcaggcactcgttcaagcggtccatcaggagtattgaaatacaatctatacttgcttccatgtggaacagctgaaatatatttttgcaaccatgcctttcttctttacgtgtctctaaccaatatggaatcggaggttctttctcataaaatttctttgtccattctggagatgtcacgacattaaaaatatcatatggctttccttgacctttatcaatgatgtcgcatggaggtagattacttggcggtcatctttatgct

SEQ ID NO: 59401 - DNA, 1103 bp, Arabidopsis thaliana landsberg
cctctgaaaaccatagctgcaacggaagacattttctcgccaatctagttttttcttctccttcgctgagagtgtgattttggagaatttaggaaagtttttgggagaaaaaggtttgacctttgactctgccacgtgacgacgtttgagatatgaaacttgtcttttgacactaaagctttcaactttcaaggattaagatgcgaaagtttccaactttctcaacagtccagccatggaatcattttcatatcctttgtaatagcttcgacaaaattcatggctgcttctctttctattgattaatacattacgaagatatttgtaatgataaaattgctcagagataaagaaagggttatgatatgactgaggaagatgctttgattctgtcgaggtaaggtaataactaataaggtattgttgacaagcgatagtgacaataataaggagaaaaccaaaagctaacaatgataattcttggagaggatggtaactgagttaagagagcttaaacaacgtcggtttgttccatcgagaaaatctctgaagcacaacgacatcgcaactattccacaagtgacaagaccagaagagagaatcgaacttgaccatcttgaaaagtctaagttagttccaagagctttacatgcaaattttcttagtcccggaggatgatagatggagactaacatggcttgatcttacttcttactaacaatctctgtagcacgtgcagtggaaaccaagccgatcaaaccactaagattagcaacaaactctaccgaggataagtacaacttcaagaggtatgaccagagatgccccaaaaaatcaggaacatgacagaaactcgactaaaattcaagtaaagaccatagaattgtcttaagagacattcaaagttatcccagacagttacttgtaaatagctcattccaaaacttgtgaagtaacgattaccatatacaatgtctaaagcatttccaaaaaatgagttgtgcaaggaaaagacaaggcagttatcaagatgtagaacactagaactcaacaatcttatacagaaatatccatcagagaaacaaaatcattcatgtgtaaaa

SEQ ID NO: 59402 - DNA, 1122 bp, Arabidopsis thaliana landsberg
gtgcaaagccaatactgccaacaggcaacatatatatcactacaagtgagctcagacgatactgagaaaagacaacctttgcaaaggaagcagggagcaaaaccatggtaagagaactaatttttctctctaagtctaattgtggatcgtcaggactgctttgtaactaatgcgataagtgagccaagaagggggctatatatgattgataacggtgatctttcgtaacacactaatggctataagctctaatttccattcttcaaatgaaaccgttagcctcaacgaacggatgtttcacaaatgttgagccaatggctggatatactcgtctttattatcgagcaatacgcttggcgttaactattcatggaagtagcatgtagtagcgagagtcgctctatttgatactagatacatagaagaacctttcacatcgctgtctttcaagaaggatgaagatgccaactcaaccaaagcaagccagaccactaccgaagaagatcgacaatcatgaatcaagacccaatgatgtaccattcaaacccaaatgggtggaattgctttcttatggggattatactgatagcattgtcggtcttctaagttaatattgggctcatagcccgagtttttttattcacatatattattgggcccatagcccaagtttctcaaaatggaaatgtcaatcaaacaaaaaggatcggcagtttaaacatactaaaaatcgaaaaagaaagaaaaactcccacaaaactttagtataaaacaatttacaagtgggagaaacaaattagctacaaacaattctttctcattttatggttttctgcttactgagagagatcaaccttcctatggcttcccctttcaaatgtcctttttaccctcgagagaacccataggaaattcaacctctctttcttcttctaacaactactacgtacacatacaagtttacaactgagagaactttttttaaagaaagaataataatcaaatcctgcggagggaggtgctaacacgacggaggttgtagctgcttcaaccgtcttacaacttgcttcatcgtcggccccgtcgacagagaatccaccgtccaaacaaccgttaaatgca

SEQ ID NO: 59403 - DNA, 1460 bp, Arabidopsis thaliana landsberg
gatgaaagcaacaatgatattcaaacgcaacgcagaacgtggcgatcctgaaacgtttcctcattctataatcttaagagaaatgagaggcgagtggttttaaactaaagaccacaataaaatgttaagaagtgtctgaataaacttttgtcaattagcttcattgagacattttggttccttacgaaagtgaacaaagcctctttatgtcccaaatctctagaaaccctaaaatcaaaagaatttgttcgtacattatggattacagttatggtatggtccaaaaaagggttttgttcttgaatcaaagctgtaaaatttaaatggtatcagattccaaagttattgcttttgaaggttcttaaaaaagtcaagttctttaaaaaccatagactttcttcttcattcttgaaccatttgatagatggcaaatttttctctcttcctcttaaaatggaggttgtatctctgtttcgtcactgtgtttttactatcacaatctgttgttgcattgagtataacagagaaacaagagattgaatgtgcaatgtgtttagaatgtgagaatccatgtgatcagccacctcctccgtcgccttcacctccacctcctccgccaccactagaactcctttgtcctccgccgctaccaccgcctccacccccgctagagattttctgtccgccaccgccaccgccttctccaccacctccttctcctcctcctcctccttcaccaccaccaccatgtaaccactgccccttgccgcttccaccgccgttgccgccggcttgcaatgaatgtgttccgaataagccgagaccaccgatcattatcacagccgcagaagcttccccgacgatttctgcttccatcagtttagttattgctctcgtctttctagtgtcctctctgtttcaataatgttgtagcgattgatcttcagctatttgttgtctctccgttattattcttacattcataaagaaattcaatttctggttctaggaaattatatatgtttactcttctgtaacccattgatctctccttcagtagcaaggtctctagtatttatcagaatgatataaaacaatagtgagattataaaagtaaaccttttagttttcagttttgctttatctctacgatttgattatcttaacgaataaatcatgtgtataaacgagtttttctcaatatatggagcaagtgggatactcaaatagctatagttgtgccattactttgatttttactgtcttaatcgtattttaagtgctaattactttggtttgacaaactataacaaaaatcgcaaatatccaagaaaatcgaaatttaattggtagttactttgatttgacaaactatattaaccacgatgaagacagttgtgcgaacttgtaacccggtgctcaatcagatatgaggtatattgtagtgattgaataataaa

SEQ ID NO: 59404 - DNA, 1359 bp, Arabidopsis thaliana landsberg
  unsure (1)..(1359): unsure at all n locations
gcacttgtgtgtgcgtgcgtggctctttaacggtcaacgataaaaatcatgagctcacatacttttacgctctctcacacccatcaccaagaaattaaagcaaacaatacactttaaagatcattgtcctgaatcatccatcctttttcacgtgtcgtcttcatcaaatcctcaccgtcccaacaaacaaaatcctctgttttcttctattgacaacccagagaaacactataaaggatcccaacatttttattcaatggatctgtactacaaacccacacgtgatttgaaaccacttgcagctcaaaaatatgatgaaccaaatcggagaaagagacgannnnnnnnnnnnnnnnnnnnnaaaacagagttgacttattgtagagacagagagagacctttccaaagtgttttgcagatagtcttccttgatcaatcaaagtcagtctttttcgcccatctcaatctcatctttttaccttttaaccaaaaccattccgtgactgcccaaatcgacgtttcgtttcgccattctttttttttttttttcatatgtgttcagcgatcactctgtgttcttaccaaagctaacttgtaaaaatgagagggaggatatgtttcttggcaatagtgattctctgttctttctccttcatcttagtaagatccttaaacgaagaagggcgtgttcttctggagtttaaagctttccttaatgactccaatggctatctcgcaagctggaatcagttggattcaaatccctgcaactggaccggaatcgcgtgtacccatctcagaactgtaacttctgttgatctaaatgggatgaatctatcaggtacactatctcctctcatatgcaagcttcatggtttaaggaaattgaatgtctccaccaacttcatctctggtccaatccctcaagatttatctctctgtcgaagtctagaggttcttgatctctgcacaaataggttccatggagtgataccaattcagctaaccatgatcatcactcttaagaagctgtatctatgtgagaattatcttttcggttctatccctagacaaatcggtaatttgagttcactccaagagcttgtgatctacagcaataatctcaccggtgtaatccctccttccatggcgaaattgagacagctccggatcattagggcaggacggaatggattctcgggtgtgattccgtctgaaatcagcggatgcgagagcctaaaggtacttggattagcagagaatcttcttgagggttctcttcctaagcagctcgagaagcttcaaaatcttactgatttgatactctggcaaaaccgtctatctggtgagatacctcct

SEQ ID NO: 59405 - DNA, 1452 bp, Arabidopsis thaliana landsberg
cacgaggcacgtcgatatctcattctgagtaatgatccaaaactactccaaaatcgggtcttttctgtcattcgaagttaaaatgcagcttgaaaactcaaaaggaagagagagttttgctcaatgcataagagaatctgatccaaaggactacagagaagtaaagaagcatcttggttcataccaaaagtgtaagaaaatatatgtttgtgtatttttgtaagagtaaaattagagtacataaccatgtttcaatcatctttcttgtaccattttctcttcacctgttgaataatcaagtatgagacttgttgctgcatcaaaataacatttgaaattttgcctatttaagagctcttctttgttgttgaataatttcgtagaagccagtttgattctttaagaaaagtgaagcatgattaagaagaaagatagatctgatgttaatttttgttgagatgacccaagtcaaaagcgttgttcatgttcatctgttctcatcagccacaaaataacaacagaccataacaataaacaaacctaaagttaacttaaaccccacggaagtctatacaactgattctgccaacatagttttcttcatcatctctctgatctctcctctttttcacatttctctaagttttggaacgcaccatacagacatcacaaccatagacgacaaagaccgacaaagataaaccctaacttactaaaatctgcaccaaagagcttcccaagttatataacttatcatctcttgtggcttttatccccaagaactcgcgattacctttttctgcgcttcgtttccacctgatgatgaaaacatttcagccttgttaatatcggtgacaagactttgggcacaaaataggaaggaaaaaacgggttccttagagtgccagacatttcagaaggtaaggaacaaaagcttttaaaaatcaggttctctcccgtaacagtcacagagatttctaatctgatatctacagaatgcttaagtgtatggaagtagaagcattaaaaaaattgatctttgatgataaccttaacagacagattgttttgcagcaagacctggaggaatcttaagtaaagataagatccttacaggaccaataaccataaattgtatctttctggtcatccaccattcatcaagcaccattaagccagtgcataattttgttttagtaacttttcccagatctcaatgacacaggtgcacacagaggggcagagactaaagttataaataagtgatagaacatctatataggagatgactaaagagagacaaacggaccttaacatcatcagctggagatgaagtaaacccattctgcgatcttttgacatcgtcatcagaactgcattcagcacatacaaagtgatcaagctgtctttgcttttcaatcgcatgccacacacgcggatgatcctacacag

SEQ ID NO: 59406 - DNA, 533 bp, Arabidopsis thaliana landsberg
gaaaacaaagtataacaaaataaaccaaacgtaattttgtaaaattataataatcgaaattcctatttttaaatcccaaattcatacaaaaaaactatctaacaacctgaattcgaactttacatgttctactcctagtcggaagaaactataaaatggacgatgattattgattacagatttagaatataacttgagattgtttgatttatatatctttctacagtcagttgatgtgtggtcttgtggagtggccctctatgttatgttggtaggagcttatccattcgaagaccctaaagaccctcgcaatttccgaaaaactgttcaggtcttttatatataatcaaataaacaaagtgattcgtatataatcacacactcatatgtcatttttgggtttgaaaatgcagaaaataatggccgtaaactacaagattccaggatatgttcacatatgcaaagactgcagaaagttactatctcgatatttggtgccatccgtacatgttagttttttttttttttttgcc

SEQ ID NO: 59407 - DNA, 1245 bp, Arabidopsis thaliana landsberg
aggcattccatcttgtcgacgacgtatgtcgtaaacataaacatacgatgaagttatcaactacatgggctcatgaacgcacacctttggagtgcaatggacctctatattaagaaaaggctttttaggaaactgatatgcaaaaggtaaaaggctacattgtcagttgtcacaaagagtttttgggcttctagatgcatgtctttctcttttgcttaaaccagaaaaaaaaagggtacacaacctatttagagtgagtgaatgagtaacaaagagcgaaaaaattctcatgtttatgacattatcatactccataacataataagtacacaacccatctagtgtaagcttacgaaaacttatataattaatgtctgagaaaaaaagcgcacacaaaagttaggggaagggagctgttctcttcatatctgtttcaacaacatcaagcgcaaagcctttcctaaacctaacccaataatcagcaaccaggttcttcttctctggtccacagatcccatctcttgacggcttcaacgattcagtcgagattccatgttcttcatctctctttttcaccaactccggtttgattctcccgagattcacgtcttgtggcgataccattagtgatggtacacctagtggtaatttatcccctataacaagacaacaaaaaacctaagttactaaactcatatcatctataatcatatcaaatatataaaaaaatcatattaagatgagtttattacctcggtcaatctgccatgtacaccaaaatttcccgtaagatttggcaagatttttaagctccggtttcgcaacgagctcagggacccttggagttactagaagagccatttggatctaaaaacaactctcattcgatcattttcgtttttcagataaataataaacatatcggacaatgtatcgaaaatcatgaacctcgtaatcatgcgagtgccaaagcttttgttcctccggtgagagactttcgaataacttttccgacactatatattcgatccctatagattcaatacaataacaaacaaaattcagaagtcattagtctctagcaaaaagcttcaatgctcaaacttagaaaacatttatacgcataaaaatatgcatggccattaatttaccgcctatataaacctaaaattaatagtgcatacgaaaaaaatgaagtttagttttattttattttcatataaaattgtgaatgtgtgaaacgaa

SEQ ID NO: 59408 - DNA, 854 bp, Arabidopsis thaliana landsberg
cattattaattaagtctcaaaacatatatagaagaccatgacttggtcaatgttattaccagttcctctgccgtgtttataacaaaaaacgaactcgcccatcctaagtatctccgaccgggtcaatgggttatcattagttagatctttggtttggattttgctaaacgagtatttgtaacgttatttagtaaatatttgttgattcttggacatatttcacctgtcgacaaagaaaattccattttacttaacccagccccaaaaaataacagtataggtaatgatgttatgtcgctttaagtagataattacaacgtttgaataatctgcatattcaaaatttcaatagagttggaaccaacatcgaagcaaactgttggaaaacaagactaaccgtcgtgtacgtatctcttcgtctatatatatgtatgtgtgcataaattttaaaaacatgtactcgtacaaaaaaataagttaccagatggaagaggtaatgtcaatgatcttccacggaatgaaactagttaaatcgctcgagtccagcttaccggaaaagccaccggaatctctattgacatctcttgacgagatcgtaaagacattcagtgatgcaaacgagcggctgaagatgttactagagattaagaactccgagactgcgttaaacaaaaccaaaccggtgattgtgtccgttgcaaaccagatgttgatgcagatggaaccgggtctgatgcaagagtattggttaaggtatggcgggtccacgtcgtctcaaggaacggaggccatgttccagacgcagctcatggccgttgatggtggtggagaaaggaatttgacggctgcagtag

SEQ ID NO: 59409 - DNA, 404 bp, Arabidopsis thaliana landsberg
gcccttggaagatttatgcatcatgggtaccatctgaatgtgtgtttaggataaaaaagtttaatagaaggcatacgtgtgggggagaatctgggaaatctgctcatcccaaaaagaactgggtagtgggtatcatcaaggagaggttgcaggagaacccaaatcagaagactaagaacattgctgactctttttttcaagattttggtattgagctcagttattgcactataagacgaggcattgatgaagctaaaggaggacttcatacatcattcaaagaggcatataagtatgtgcctcattttgtgaataaggtagttgaggcaaaccctgaaagtatggtgaatctggtggtctggtgaggacagaagatttcagcggctttttctgtgtttcccatc

SEQ ID NO: 59410 - DNA, 1224 bp, Arabidopsis thaliana landsberg
taaacagcttaagcatcacagtaatcgggtataataattatataagcccgccattccctgcacaggatttatttgtccccttctgaacgttgactccaaggaccactgccagaaattatacaccaagttatttgcaatgttcaatactgaatatagtactccagatcctgctaataactgctgccgtaaaggaaacttcacctcagcacaaaacgcatgtacccattgcccatttgtggttttcctaaaagccccagttgtgccaccacacagagtacattctgtagaagaattcggtttttccccaaaattgaaagaaggttctgaagatgactccgcacatagctcacagtaccagggaccagtagattctttagcacatttgtagcaatcaatgtgaacagcaacctgtaattggagccatattatataccgtacagtgcataaaagtggtccctaaaagagatgatcatgccttgatcaaacattagaaataaatcacaggaaatgtctttcaccttgcaactagagcacactacaatcaggttccatatagtttcggagcgcctgcagatgtcacaagttcgtggattttctactaaaaagtctggtgtgtgatgatcagaccgctttttggatggtggcccagaaacagccatctttaaaagtgattcctttgtctgtggaactaggtgagagctgccaacaactttacgtctagaagtgctcatctgtccgatttataaccagtaagaataatggataagaaatatggcacaactaaaataaatacatggaggcaaaaaatcaaaatgtagcaacaacaacctcttgttgtgcaggttcttctgacatatctttcctaagcgatgtattcctagaagatgtcgccgctgcagcagtagcagcagctagaacagcctgggcttgtttgtttctttgctctttcctaccttgctttcttgcttccctgacatcatggaaatatttgttgaccagaacatcatcccatcttcgtccatgttgttcatcaatttccagaggcagctttttagcaacttcatagactaaattgtctgttaaggaccaactattagaatactataacagatattgtgtagaaaacatgaagaatcgggaccatgcaattaaaaatggatcatcaaatcaccagatagttgcttttttgaaactgcagtgccaagtaactgaagctgataatat

SEQ ID NO: 59411 - DNA, 250 bp, Arabidopsis thaliana landsberg
agtatctgactagaactagttccatctactgagaaactgttaaagagacaatgtagttgctaactatcataagcttactcttgatatcatagacctgatatcgttgaccattcaccttgatcaaaccaatattcttatggttcaagacatgaggcaacctgactttatccgatcgccagtaacctatgattggttgtgggtcaaataggctaacaaatgctccaacagatcttaaatggattcccacaaa

SEQ ID NO: 59412 - DNA, 469 bp, Arabidopsis thaliana landsberg
tgatcgctttttattgctgctgatctttgctccagcttttatggtaacggtagcggttcttgtgtcggctattgttggtgttggggtagctgcagccatgtggatgatgggaatagccgctttggtatgttgtggccgagagattggtattgaaaccggactggctgggaggatggttgagtcggtggtgagagaattaggttacggtcggagtcgttacttgcgagacaaatcagaggatagttattcaacttcttctccttcttctcgggattactcttcttcttagttcaaacttggaaaaagtctcatgattcatgggaatttcaagaagatggtgaataaagaaacaaaaaaaaacagagacatggctatgataagaaaacaaaattaagtagattttttcgagagtgaaaatttgtaatatctatccaaagaaaatctagtaatgctatatcatttttttcaa

SEQ ID NO: 59413 - DNA, 646 bp, Arabidopsis thaliana landsberg
gcttcagcacgtgtggccggtcgcatatcgatttatatattatagtctcttcagttttataataccaaacaaaatttgtattacgcataaaaagaatataaataataattactttatacgtttgtgttgtggtaagaaagtaatttaggacatttccggaagtcaacacaaaaaaattaggaagtttgttaatcactgaattgaaatcttttgtcgttatgatgattattttcttaacgtttttgtttgtttatcatggattcatggtcggttgatgatattgatagatgagtcgatttcaataagtaacgtttactactattcggtttttaaattggattaatgttatgtaattttggtcattgatagtttaatagacaatgaataaaccagagttcttttttgctgctacatgattcaaaagtttcaaactactgtacatgatgttttaaaataaaataaaaaaataaaagagatatagtggcattacaggcccactagttggaagtatgtaggcccaaaatttaatttggatttctcttatatcaagcccactagctgcgtttcggtggatttacggcggtttgttgccttcttttttttcttttatgacaaaacgtcaattcaaccatttgatgctgactaa

SEQ ID NO: 59414 - DNA, 445 bp, Arabidopsis thaliana landsberg
  unsure (1)..(445): unsure at all n locations
atcaacgacaaagaagtcgggttagctctggtttctgtatttattgttgctttttgtcaggggcaagagcgattttctgggatctgagagacatgttccttatacagttgtacaatggcacagtcgaaggcgcccgtttggaaagaatactccctcacattgattcagtaaaccaaaatcatctctttcttttattcaccccgttctactaagcatgaacttacactaggaaatgcaatgcacaggtccttgatactgtatgcagtttgagttatgaggactcacgggatatggtggtgttaagcatctgccgatccgctctggtaacacttcttttctcttttgcatatggaaacangttaactaactctaacctcttttatgcccacaaaaatggcatgcttctctcccataggaagcctatgttcgagtactacttgatgga

SEQ ID NO: 59415 - DNA, 209 bp, Arabidopsis thaliana landsberg
ttttttttttttttcttttttttttttttttttttctttttttttttttttttttttatttttttattctttttttttatttcttttttttttattttcttttttttttttattttttttttttttttttcttttttttttttttttttttttttatttttttttttttttcttttttttttcttttttttttatttcttttttttttt

SEQ ID NO: 59416 - DNA, 248 bp, Arabidopsis thaliana landsberg
cccccccccctttttccccctcccccccctcctttccccttcccccccttccccctctttccccccccccccccccccccctcccctcttccccccccccccccccccccctcccccccccccctctcttcccacccccccccccttcccccccccccctttcccaccccctccctatccccccctcaccctccccccccttcccccccccccctctcccctctccccctcccccccctccccccccc

SEQ ID NO: 59417 - DNA, 1130 bp, Arabidopsis thaliana landsberg
taaattgtatgatgtatatatccaatttaaactcatactttagggaaaaaaacatctcatgtagcacattagctaaaattttctttaaaaaacagcattttcaggttcaaattcccgtagcggaaatttttttttttttaaatctaatatatattcattttatatcccgctaagtttctttttaaattttttttggttttaaaataaataaattgatctatatatctaatttaaattcataccttagcaaaaacatatgcactagcacattagctaaaatgtttttttgaaaataagcatgtccagattcaaattccggcagatgatttttttaaaaaaacaatctaatataaatttttattttaatagaaaatctgctggatttttttttgataatcaaaatttttgaaaaatcttttggttctaaaaataaataaattgttgaaattatttaatttaatgaaggctcctatcacaacacaaactgtcatacctcttgaaatccaagattagcagagtggatacggcattgttaaagcactgaacgctatggaggcctcgtccttatttacacaaaacagttagcgaaaaattccactaactattgaaaagaatttacctgaagtacaaccacactagaagaaaaactgagaagtctcctcaccacaaaacttgtagatcgaacgagcttccgtgccactttgatcatcaaatgtagggttgtcgaatgagttttctgaccatgggatgtccacgtccaaataataatggttgggttttggtgaagcccaaaattaaagtgtttaaaatggattacaaaccatataggctcgctagtaaatgggcaaaattatttagacatggtttgtgcagtaataattaaaagctagggtttaattatttagggtaaaattttaagatttctcatttctctctcgattgagacaatttcagagacgattatgacagatctcaaaggctcactggttccaccattataagttcttcatgagcaacttatatgtctttatgtttgtgttgatgtgttaattgatgatgggtttttgttgatatattaattgatgatgggtttgtgttaattcaaatgtgcaataattgatattgcatag

SEQ ID NO: 59418 - DNA, 483 bp, Arabidopsis thaliana landsberg
gaaccttttgcatgctcgagcctcttggcaagttacacgctggtttgcaaaatgagcataactgctgctgcctgctggaccccatacgagtaaattccatcgcgctgttctttcgctcttcatttgtgattcaatattcatgattgaattgggagtggcttctgaacttggtccacagctgtgcacactcacgcgtagcgttcttcgttccgcggcggactgattcaacgtatgtacaaacctagctagcaggcagtacagcgtacagactgctctcgcgtgccctgtgtggcgctgtgtatcagtaacgtgaaaagtagatagaaagtctaattattagctcctttttgcctcctccttgatttgattctccctctagtctagtatttatgagctagaaccccagaacgacatgcgtggttctgtctgagtgccagttcagttcgttcagttcgtttctgttgcgcctcaaactgcgcgagc

SEQ ID NO: 59419 - DNA, 238 bp, Arabidopsis thaliana landsberg
tcgaatcggaaccagacacaggggcacagtgcacttagactaagtaaagtaaggacacgtgtaagtcacataccgtgggacacttgtcgttaccagatcctccgtgtttttaacttttcttataaaataaaaacacaacactttttcactttgtgaaataaaaatatctccaaaagttccaacacctgaaaccaaaaaaggatggaaggagaattaaaccttcttatccaaaaaaaaa

SEQ ID NO: 59420 - DNA, 466 bp, Arabidopsis thaliana landsberg
ctttctggctgcttccaatcaagaacaaaccctagctcctctgtttttctctctctacctctctttctctatctgctcttatcactacttctctcgccgatcaatcatcatgaacgatcctgataatcccgatctgagcaacgacgactctgcttggagagaactcacactcacagctcaggatgctgacttcttcgaccgagacacttccaatatcctctctgacttcggatggaacctccaccactccttcgatcatcctcacagtctcagatccgactccgatttaacacataccaccggagtctaacctaccaccgacacttcttcttgatcctcatccgccgtcgtatccgttgccgttacctctactaataataatccctcagctacctcacgttcatgtgaagatcctgccgagaactcaaccgtctgcagccagaaaacaccaccaccagagacaccg

SEQ ID NO: 59421 - DNA, 573 bp, Arabidopsis thaliana landsberg
acctcacacaaaagcatatcttcttcaggggaccaacctccttttttgaaatcagagtttaagtatgtataccatctgcaaacaaaaatccatctccggatttcaaaacagaacccaggaaagtttttgcctacagaaaaaaaacagaaaaacagatattgaatcgattcagtaaccttcttctgcattgtcttgtgcttttgtctttgaactttgatgcaatgatcgcccaactaatatcatcaaaacacacaacggaaaccatatctcaacaacctcttttaagaatccatcttttcaaaaaacaaaaactttccaaggaaaaaaaatttatataagaaaaaaaaagacttttcatagcaaataaacagaagagtgaaatgaataatgaaagctcacttttcagttccatgtagagttatttgttctcttagtataacatcttcctgcaactccataaacccatttcagaatcactcaaaaacagagcaatacaaaacaaaaacagagtttcatcatatatatgtacagaccttttgtgaccaagtaacaatatgacgctcttttttcttg

SEQ ID NO: 59422 - DNA, 356 bp, Arabidopsis thaliana landsberg
ttactgatgtgcagatcgaccaggtttacgttcttcggcatgtcaaaccgatggttgtacttgtattagtctgtgttcggtacatagctatgccaattatcggtataggcattgtactaacagctgcaaatctcggatttcttccagctgatcctttgtttcagtatgttttgatgcttcagttcaccctcccgcctgccatgaatatcggctagtcataaatcatcaactgaggtcacacaaatctagaaataacaatactaacgaggaaagaaaaattgttacttacaggtaccatgacacagctgtacaatgttgctcacgacgaatgctcagtgctcatgctttggacctac

SEQ ID NO: 59423 - DNA, 506 bp, Arabidopsis thaliana landsberg
tctgagataaaaaggtagttacttcacatttacaggccgtccgattgtccccttgttatttcgacggacgagattatatcttggtaaacagagaatctcattatcgacgaaagaacgatggctgagaattcttccgggcaaggatgcatcagatgtgaaggagacaagaagtagatcgggtcgggtatatttcaattgggaagaaggaaaatcgaatctcttgtttataacaagagaataattgatagatggtttgggagaggtaagaaacctcatcaaatattgatatatagtttgggagaggtaagaaacctcttcaaatcccaaagattttctcttctatttttcaatttctgcttctttttgatttgaaaaattcaattcattcgttgtctcacctttttctccatttgatttgaatttcaagttcttttcttttcaattttcatcttctcaatgtatgaatctattcatgccttaatttatagaataaagaatatttttca

SEQ ID NO: 59424 - DNA, 498 bp, Arabidopsis thaliana landsberg
cccacatttgttataatcttatttattgttcatttgtaattgtttatggtttcaaagtctattcgatttctacatattatttattaccaaactttttttgttggtttgttatattagtattgatttgtaagagttgtttaaatctcatccaatccgtggtataatgcattcgtgtgtgttattaacgattattagttctatatttgtagactgaagactgaaaaactttccgttcatatgatcatgccttctcgtatacgatcaaggaccacattcaatggacatattcttggtatttgttatagccttgtaggtattattagtaaacgtgttatgcagacttggaaaatagaatgaaaatgaagagcatattctttcgtgttattctcctatacatcacaaaatggaccgtcgatgtgataatgatctggtgaggtagaccctacggagtcttgttcttcaatatgttggtggaaaggagagagagagagagacaaa

SEQ ID NO: 59425 - DNA, 694 bp, Arabidopsis thaliana landsberg
aaaggtttgcctttttatcttaaatttagattcttttcccttagttatgtgttttaacattcatatgctgtttgctgcgatcccttagttatatatgtgttcataagttgttgtctgtgattggttctctaggtttttcatgcttgactaaaaaattgcacatcaactaactcatttgtttttaccccttcgatgctcacttagtacacacacttgtatctgtatgattgtattacaaatgacattaatgtacatatttgatatcacaccaattttgagttggttttgactaaatatgacttggcatctccaaaatctctttgcttaacttgtggctgtttgtttatcttaccaatgtgtaggtcatcctgctttgatcggacgtcaccgtccatttccagtgacccatcaagctgctgagagatggctagagcacatgcaaaatgctctggacgattcggttgacattgaccaggactcaaaaatcaaaatgatgaagttctttaggtaacaccatcttcttctcagagtcaaaagtcacatagttcgatgaaagtttgatcgggtgttttattcagcttaaaaccttaaaattctgtagatattaaccaaacagatttgattggcttactttttgatctggtttcaaaacaccacccgaattttttccctttgtggggctggggaaaaccga

SEQ ID NO: 59426 - DNA, 545 bp, Arabidopsis thaliana landsberg
  unsure (1)..(545): unsure at all n locations
acgacgaacgactgtttcagattagaatcggaaactgcatgccggcgctgaagctgtcagctgggtgggatggaactggaaactgcgtgcaggcaagagcgggctacatctcgactggaagaagcggctccgggtggcgcttggcgcggcgcgcgggctggcctacctccacgagctcgccgacccgccaatcatccaccgggacgtcaagtccagcaacatcctcatggacgagcacctcacggccaaggtcgccgacttcggcctgtccaagctagtgtccgacagtgagaggggccacgtcagcacgcaagtgataggaacactggtacgccgccgacaggctgtcacttcatccgtcatccgctgcagccaacgaacgactccctcttccggtgatctgaccttgcattgctttcattcgaaaacgtgcagggctatctggaccctgagtactacatgtcccagcagctgaccgagaagagcgacgtctacagcttcngcgtggtcatgctggagctgatcgtcgcgaagcagccgatcga

SEQ ID NO: 59427 - DNA, 502 bp, Arabidopsis thaliana landsberg
  unsure (1)..(502): unsure at all n locations
aatctgacgacggctcccatgacctgacatccacaaattccaaccaattgcaacaaaagcaaaaccccattaagaaaaatcaaacagcaaaaaaaaaaaaaaggcagaacaagaagaaggatagagtctgaaagattatagtaaaagagagaaagatgaaaagttagagacctggaggtgaagattgctccgagagcgaagaaagagatgcagagaaatggaacccatttcagagatattactcgtttggagactttgtgcttcatcgtggtggagaggttcaaagaagaaagagagtgtgagattagaacatgtccagatttaaaggggaaagagacacaacacaatcaagaacatttcattcatgggatgtgagatattaaaattagtaagcttccgaacataacttttcattacaactttgtgactcttatttaatgttattcacaccgtcgaaaatgccacgtcattacttntacataaaacacattaatgattaatg

SEQ ID NO: 59428 - DNA, 506 bp, Arabidopsis thaliana landsberg
attgaactcttcactcgcggacgtgttgcagagaattttcttttttgaaagataccttgatttttgtcatatcgttcaagaaatgttttttcttcgaatgtatgtacgtgtcatgtatgagtcaggatatgtgtgattgtagatctatatttagattttcttgtttttaagcaatttaatattagtgaaccaagcatccaggaagtttctgaactgagattttcttttagatactaactttgaatcttattgcacaagaacttccttagtatagcacgacatacgtgtgattatataaatcaaagtattaggaaaattaagccttagaaaaggggaaaattcatccaaaaaaatgacgaaaaaatagtaaaactaattttcaaaatttctggaaatattttggtccacatgataaagattttagcgtttttacattttgtttaggtttgatttttctgaggaataaatgtatgtagattgtgaatgtcaaaattacccgaaatact

SEQ ID NO: 59429 - DNA, 398 bp, Arabidopsis thaliana landsberg
  unsure (1)..(398): unsure at all n locations
atatgaaatttggagttataagcaaatccacctaaaaatggtaacaaattagatgttgatagatagtttgtcgtctgaaagcttataaattattgaagaatctctccattagctaccttcaatacagtgcgggtgattggactaacagtagctgccaactgaattgaaggaaaatatcctagatgctgcttgaccaactagaaattccagtgcaagcaaaaaaccaaaaaacattagtgcttttttccatatatacatgcagtaacttagtgaacttaagatttatatacccttnccccaggattataacgaatcagcgctccaatttccttttcttcatcttatacaatggtctaagtcatcccttcgctcttcaagttttcttaatatctgatcaa

SEQ ID NO: 59430 - DNA, 964 bp, Arabidopsis thaliana landsberg
  unsure (1)..(964): unsure at all n locations
gccacaaaaatgtaggcattttcagtaagataaaatagaacactagaaactaaactaagccgtgatttgatatcattttagagattcatttcttcatttcaataggtagattcagtaaaaggctggcaatttagctgaaacataatcatgtataataaactgaaacattagtcgaagtctcgaactaaataattaccaagcgttaggagagtgaaaactcataccttcatatcaggctgggtactgaagagacgcaacattgcaagttcagcagatatagttttcccacttccagttggagctcctacaagaacattgttgtttgtgtgatataacacatgaaaaatctgcaacaccaaaccatacaattttcagttaactaaaaaaggagtgatgaagaaaaacatttttaatataaaattaggagagtaacagggtaaatatgctcaaacctgagtctgtattggattgaaatgtgaaaatttgtaaagcgattcatacaacttattcccaagagaagtcacaggaagaggttttaagtctaaaagctctgtgtgagacgtccgcgcctgaataaagaagactgttaggacctaccttaccgataatttaagcgtagaaatgatcttgtaactatttcggaaatagcaacctctagaagatatatacctctggtagtgcaagattgtgaaaagagattgtgaagtaagtctctgcatgcaaccaagaatcagaaaccgcatgaacatagtattgtggtgggtgtggttcaaatatcggtacggtaaaagaaagcttctgtggttcccctctagccattcccccgccctttttccgcttttagttgtgaaaaaaggatctgagtgatagatcataatcatttctctgtgtcctgtccgaagaaatagcacaagacaagcgttatattccannacactgncgaaagagttagcatgtattgaag

SEQ ID NO: 59431 - DNA, 599 bp, Arabidopsis thaliana landsberg
atgttgggggggtggtaactataagttattctgatgattttgtagttgcctgacatgaatcatatatttatacctcttcaatcttttattgttttagtaaagagacttcgattgataccacagcgaaaacttagaggcacagattcgctgcggagtttaatgaatatgcaaataggaatgggggcagagtattgcagacaagtttcatcacttgtaaaaactgggatgacttctattaaacaggctacgctttcagcagtttcagaaggtttgcttttgatatttggttataaatttaattttcttaggcggttaatatgtgatttgtccactggtttgacacagtttactaaatggaagataacatttgttagataagccctttattgatatgagatgacacgacttattctacctgcagaacaattctcttgctaccttcaaatgaagagcacagcagaagggtggtcaaattgaacaaggatcttctgtttgtttgcagtcaggaactggaagttaccatgtttgtaagttcttttatttcttttgaaaatcagtaatgtgtatgctagtgggtgttgagaataatttgaatacat

SEQ ID NO: 59432 - DNA, 165 bp, Arabidopsis thaliana landsberg
cccccccccccctcttttttttctccccccccccccccctttctccccctctttttccccccccccccctccccctcccccttccccctcttttttttccccccccccctcccccctttcctcccccccttctttttcttccttcccccccctctttcccccccc

SEQ ID NO: 59433 - DNA, 599 bp, Arabidopsis thaliana landsberg
tgatcatctcgacggggtgctgtaccccatgcgcgttcgcgacttcacgcgctttggattctccgacgtcctgtttcccggcctgtcgagcgccgacgactaagcgcgcctgcgctagagcacgggcgaattgatgttcagcgggttgcgcttctccggatcatctttgtcgtcatccttcttctgctcttcggcggactccagtgacgttttcggctcggcgttcttgtcgcgcgtgatccagaccagcatgtcgtagtacgcgcggatgttgccgacgtagatcactgcctggtggccgcgcgcataaccgtgctgggtctgccggtaccagtggctttgtgacagcagcggcaagggtgtgtcgcacatcaagccagcggttcggattgccgccgagcttggcggtcagatcgcgtgcgtcgatcaggtggccgaccccatgttgtaagcggccagtgccatccacgtgcggtcgggctcgggaatgtcggtcggcgctggtcggaatctgtttgaaaagcgcgccgccgccgcatgctctgctcggatctcgcggttcggacatgagaagctcccgtacatggtcagcatcatga

SEQ ID NO: 59434 - DNA, 1145 bp, Arabidopsis thaliana landsberg
atgtttttccatggtttaaaactttagactcattgtgtcatcaacgcaagtataaagtttgtcatctcctttaggttctcaaaccattttccattttctccatttctttctttgacttgacgattgtatttgtgatctgcttttgccatctatctcattacatagatttttcaaaagttatcttccctttcgagcattcttctcaactattttcatttatctcttcgcaactatttttatgttgttaagcccaactgcaatcacagtttaagtcatgaactttgagagggcatgaattccgcctgtttctttaaatgtcttcgatgaaattttgactttagcggctccagtactcctccacgtccctaatccttgtgttagcatcgttagagattcattatactatgtgtaacccaatagacattgatgctccaacgaacataattctttgttaactaggtaactactaattgtttgcccacaaaaaaaaaaaaaggtaactactaattagtcttctatgcccttaacttcaatttccttcaaaataaaaactcaaattgtatgcaaaagatggatcaaagatttgccaaaaaacctctttcttctccgttacatgaggaaagacaacaagataatttacaaaattagttctctcagcctttttaacatgtaaaataaaaaaaactaatcacaattttaaactacattcttaggagacttaggagttagaagtcttttctccactgttgcatttcgtatcaaaatgtaaaatattttcggtcttaagatacatattattctgacatttttaatttggattattaaaataggctaaatattacattatatttataataagtttctcttaaaaatagccaagtatatttttagaaattacattttgataagaataatatttgttttgactaagctgaaaaaaaaaatcattttaataacatttctcccgaaggtctagggaatgtgaagaagatcatctcatgataaagaggatctttgtgtaaaataaataaacgacgatttcattgaagatgtacaattaggaacataaattggaaattagatattcatgataagaattacaattatatcaatagaactttttattttatcatagaaaacttact

SEQ ID NO: 59435 - DNA, 1487 bp, Arabidopsis thaliana landsberg
catgtcttgaaaagtaatcattatctagtgaaatcgcaagcgtaaggacaacagctctttctgacaaagtcaatggccgtttcacttctaactcttctacctgtcatgagttgcataagaaaagctcgatcaaatgtctaatgttaaagtaaacaaccaaaattacaagtacaagagtccacggcacaggagtaaacccaccagtgtcgcagggccggtcttggctgcagcatcagcttttccaaatcggatcacgtactgcccagcatctgtgaatatctgtatcacatatataaggagacattcagatttttatatttacgatgtgtcttctagtctaacatagattgcactgaaaatatttcaaaatcttcaaggcttattggtcgccacaatcaactatgtattcatttttcctgtaagagattcttcatttggctgatctttaagtatataacatttagttagagaaaacaaacctcaaagccaaaacctctccaatcacgatctatttgggctaagacttccccatcagcatccttcactgtaaatgtccaattccaaaacccaggattttctaccactgcaaactggttgttcctgcaagcatcaaatgtcagaaattttgttcgtccaaagatgttgatagattaacgaagagcataacacgtgttgattctttgtacataaaagacgtgctctgtaactgtaagtctatgtcattcttaatagttataccagacaaacatacacggtcttttgatcccaaataacaaagaaaaggatatctaataggtcaatgaagcattcaagaaagccaattaaaaaaagatgcttagaaataaagtttaccccaggtataaatcataaattcttctccatagatgccatcgtcgatgaacaacaccaatttcctacaccagtaccagacatgacaatgagccgaaattaaacagttaacattggagtacagtttaaaggcttgaaatcctacgcaagtgtacctctccatcaatttcagcatatattgaacttgtgagccaccagaaaggtcgacgaacctaaacgatgtagaggaattatttcagctccaaagaaattcaacaattctcttgccggaaactttcaaacaacagaatgtaagaaaacctcacccggaaaagctcattacccaaagcatcagttatggaagcaacaaatgggcgccgggtacgaagcagctgcaaatatatttaatatcacatgtgaatggtttttatcatttaagtcgacacatatgaaaatcactgccaacacaatatgtatctgaatacaatctcggaggtagaacagaatcagatctattctaagttcatggggataactgatagaggcgacacaagctttgagtgagtaatgttacatttactattatgaagactcaagaacatggtttttaagcaaacctatcattgcttgcttaaagttgcaatatcagcgcacttcgt

SEQ ID NO: 59436 - DNA, 727 bp, Arabidopsis thaliana landsberg
aaaatttgtgtctcgtgttgccaccataatgaaactttttgtctttacatttgaaaaattgtgtagcacttgttcactgttttcccgacaaatgttactttatccaaaccgcccaaagcccagaggagatcccacagttaatatgcctagctaattaattagttaattgatcacttaacatattcaggctaatattcatctttgactgatagttaaaagttttcaattcaacgatttgttaatttcatatattaatactatattgggaaattttataaagaaaaacaggttaatagactttcacgactaacaaaaaactggttttgaactgaacttttttcatcataagtaaacctagcttcgctatagtcacagagacagaggtgtcatacacgcgcctcattcgcgaaacgaattcaaattattttgtttgtttgaaaaaacgaaagatttgtttttgaagttccacgaatgtcttgaagttgaagtacaaatatttgtcggcggccgagattcgcataccaataagttttaagcactaaccatttacgctaatgatctaacacgcatgtaaaaaatgaagaaacaagcataaaagacgaaaaatctataagcaaaacttttaagacaacaaagaggagataacgcgttggtcggaaagtatttcataatatcgatattcattatcatcggaaccatcatttcagttgatatgatgataagaaaa

SEQ ID NO: 59437 - DNA, 428 bp, Arabidopsis thaliana landsberg
  unsure (1)..(428): unsure at all n locations
ctgtcaaagatcgtagccttgagaagggaatgctctcaaacacaattctgtctctgtcccagcttttcagtatgatgaggcgacgccccatgcgctgagaggttagggtgcaactgcctcccagttcaaatacaaggttctcttccatttgacgagagatgatatactctcggacaaaactgttgacttgacacaaagtcattctgctgtctctgaatccggtggtgactgaatatggtttctnnnnnnnnnnnnnnnnnnnnaggagcctgcagaagaactgctcccctctttcctctgcagaaattttgtccgtgtccctggcatagccctctgcaatccaccgtataaccaatcgccttctccggatactgtgatctcgaggaaaaattgacagatagaagatacatggcttgagaaaatccggg

SEQ ID NO: 59438 - DNA, 446 bp, Arabidopsis thaliana landsberg
gaacctctacctcggtctgcggcggggggcgcgcgccccacgccccgatctcggctccgaccttgcgctcggcaccccgatgctgtcttcgtcgtctacctcgtcctcggccgcctccgcggacgcgccgtcgctggagacggatccactccacccgccctactcgccgtcccgcgccgaactggtgcgcccgccgaccccggtgcacgagccctacagcccgttcgcgcccgaggcgcaccccccctatgtgcctacgccaccactgccggttccaggggctttacctgtgctcgctgatgagcttgagtttggcttttccgacgcgcaactcggtctggtcgagcgtttagaccggccttcgtcgtcgaccgcatcttcttccttccggccggatcgtgccgagcgctaccgacgcttgatgtccttgggcggatctaggtact

SEQ ID NO: 59439 - DNA, 372 bp, Arabidopsis thaliana landsberg
acgtaggtcattgtcttctagcttggtcgaaggttactaggcccaaagatttgggtggtcttgggatcagtgacctctggaatcttagctgggctttacaagcacaatggccttggttacaaaaactgatcattgctgaccatggtcttctatccccattcgtgtgtgcccggaggtgcaagtgcaatctcttgtgggagtggcagttgcgacacagcttggggatgggtctaacaccctcgcttggaaagattgttggttgaatggcacttgtatccaagactttgcacctgcgttgttagggttggtccctagacgtctgattgattccttaacggtccaagatgctctcccaggttttcaatggatgac

SEQ ID NO: 59440 - DNA, 1407 bp, Arabidopsis thaliana landsberg
  unsure (1)..(1407): unsure at all n locations
taatagtttcttttatcagaccttcttttgatgattcttggaagctctcaaatttgcgttccagttaggttttcgcagcttgggaacgagacccaatagcgaatgcttgatattcgaagtagttcccgcttgggcagttgtagtagagatgggctcctgactcgtcnnnnnnnnnnnnnnnnnnnnnnnnnnnnnnnnnccgtttccatgaccgttgggtacatacctgctcaacgagaattatgaagagattaaatacaagacaaacaacaaacaaatgagttaacatatgaatgaaaatcagagtgttgttcaaactataagactgatatcaatacgaggtttcttctcagaaatcaattgaaaattttgatacagcagctaactaaatgtttgacagacatgacaattaatgggatgtagcaagcaaaaccttcaaaagttgtgaatacatcatctaacttaagaacactacatttaacactaaaagtagtgaacatgtagcacatagttaaatagcaactgtgaaacaacatcttacagaacgaataattcactaggcaagtaaagatagtggcgaggacacactactagtaagtaaacaaatgcaaagtaatacaagtcaataccaaaaaatcaaaaagagatcaaacaaagacgtaaaacaacatgatgccaaaagaaacaactaaaggaccaaatcaacacattcttatacaattctatcgccaaagtggatattttacaagcattctctagttacaggttaactctttctaatcggattaagcaactagcaagagaactggatatgattaacaacacaagaagctctaattcccaatcactaagacttgatcacaaaccaatatcactacttgcataacaacacacacattctacaaataaaattggccacattgctaataaaaacctaaactttactccaattacataaagcttcaaactttcagatactcacacatcataaaactaaaccctttagcaaattctaggtcaaaattcaaaagttaacccaaaaatctcaatttacctgagctttatcagcaagatgaacaacaagacgaccaacaggaagaggagactcataagtaaaagagtgattaatagactcagatctcatatatcgagagagaacacgaccatcagcagtgagaccagcaatagcaacaccaatgtgatcatcgactttaaagatctttctttgatgagaagagagctctgattgtgctttgttgacacaagcgaggacgacatgagagcgagatctgagtcctattgctgcggagccttgtttcacagcttccatggcgtattcgacttggaatagtctacctgtgggactccatgtggtcacatctgggggatcctctagagtcgacctgc

SEQ ID NO: 59441 - DNA, 991 bp, Arabidopsis thaliana landsberg
gagcatatcttctatatttaaatgagtttagtgtttggctacaggtgatagtgccatatatatatatatatagatatatattaacttgtggagtagtgttactgacagaattgatctattttacctttgctgctatacaatcgctttatgattggaagtgttttcttcctttattgctgaagatccacaagtttctgcttttgtattttccacattttaggggatgttgagtctttgcctttctgcaaaaatcattcatttggataatgtttaaaaacgttacaaatataaatattttttaaaaacattgtgctcccagttctgtttgattctaatgctgctttgtttttatttatttattttgaccaggcaattgacattgcattagttgcaactttctttttggagacacttcctcctgtgaaatcatcagaaggagaaagtagacaaggtatgacattttttcttgctatactatattcgcttgtggcattgttttgtcatcctaaagatttcctgtccattctgctcgcagtagtttcttcataaatttgatcttgtgctgaaagagacatacacttttatcttgattcaggctcttctgatgaggatgatatgttgattgacgatgtaccaggattagtcttgaataaggctctggagcagcagataaccaatgcgatagactcacgctttcttctgcagttagtatgtacctactctctgtcatatagaaagtatattaagtgctatgcctctgtaattttttatttttaatctaagtgctatacttcctctggatcaagtgattctttaattttaatctaaataatcttagtttcatccctgcagacaatgttttgttccgtcaagtttcgcttggtatgcagtcatatgacgaagataaagaagcattagctattggcacagccagtttttttctgtatgcagcattcaacactcttccctctggagcggatcatgacaattt

SEQ ID NO: 59442 - DNA, 695 bp, Arabidopsis thaliana landsberg
tggaggatcaaaccagtgtggcaaaagagttaatcgccaaatgcaacgacccttctttcactcctgatctaactctcaacactatttttgtatatataatctacgaacaatcggttatctcaacatttgcatattgtctacttttagattatgatatctattggaactcttactagctcattcatccgtcgggtaactttcttgacctctctccatcttatcttttacgagtcttaaagactttacttatctaagaaaatccgttttagtctctcaaaattgatttattagatggtatattctagtcacaacaactattttttggacgagaattttacaaaataattgaaggatacttaactctttcttactaaacaaaacaacttaaatctatatccgatatgaattcttgtgggtaaagaatacaaatcatgtatattatctggatatccaaattattcactaaaattttataaattatctcaaattcttctaaatttgtaaattactcaaattatcaaaatcactaatacccaaaatgagaagaaacatttattgcttaaaagttagattcttccacgtggcccggtttagttatagttgccgacgattaatttccggtcacatttttaaacgcgtgagtttgtatgtgcgtacaacatgtcaaaatgcgatatttcgtaacgacgttaact

SEQ ID NO: 59443 - DNA, 536 bp, Arabidopsis thaliana landsberg
agtgaaatctctgggttgccacccgatcgcatacacttcccgaccaccgcataggaactggctggaataccggggtaaaggataaccagggttcatgaatacgaaaatctatatcaataagggatgactataaatacatctcatgttagtatgactcaatgtgtgcgaactagtctaataaatcaaggcttccgtgtgatggatttttaccaaaaatcataaatgtgttgtggtattgatctaacgaaatcgatattctgtgccagcacagcatgcacgcatacttgtaaaaatatacagcgaatctttctttaccagaaaatcaacaaatctttctggaagatatgaaattgtaaactcgagcatttatagtaatagaggttatgacccatttatctctgtctttccataaacaaatcaatttccaaagaaagtagtaatgttaaaaggggagaaaacgttgattcaatggtaaaaccggtaaagaaggtaaaagaggagcaaggagggtccagatgtgagtgagagtagggaga

SEQ ID NO: 59444 - DNA, 1524 bp, Arabidopsis thaliana landsberg
atgatcttcgtaatagtgttttaattggtcagcttctttatccattggatttcttgtgtggtctaccttgtcgttttccttgcccaatcactcttttttttttttcaatattcaagactttttgtgatttttgttatttcttttttcctttttttagtagcaaaggtttcagctttgacattttttcctttttttctaccattttttagagactatataataactactaactttgactatggataaaataatttttttagctaaatagtttttctccaattttggtaatacttatcaacaaacattgattcactttttagaaatctgagaaatatcttagcaaaaagcattgattcaattttttgaagtttgaagttgaaggaagatttgattggatagaagtttttaagctacaatggttgattatttgattaaacaaataaatttaagaaaatgaatgtagagatttatcataaatgataaattggtacaatatttattattaattattcttattttggtgcaccatgtgttgccaggttcatttatctattggttagtcttgtccaatagaaaacattgttatcaacacagagttaattatagctatcaatataaaatcataataaagactactcatgtgatatgaactattacctagacaaaagtgatatcctcatttggagaaaggcgatattgtacccaagagaaatatggtaagacaaaaggtaagttttatttagtaaataaccttaaaaatgcgtaatttgtaattttatttttatcaaagataatagtttcacgggtgatattaacatgtattcatttttagtaacatgttttattcataatgtcgcattattacaattcaatcacatatgttatcatcatgtcaactatacccactaattactggttagcataaggaaaaaaacaattagtaagcataactttattggtaacatgattaacaagatatttcatgaaaacaaaattacatttgtttagggttataacctaagtatatgattagaattataaatttgcattcacattccatccaatctacttatgttattgatatatagatgtacatttgatgcacacaattaaatgtaggaagcctcattatcataagaagaacgagcagccactattactaggattttaaaatcgaaaacataatactatatttaaatgacaatatttcctatttcaatagcaaagtgaaataaaaaaaaactcaaatggagttaataccactaaactacgattaattaatgactatggatccactaatattgaaggctaatcagtttggttacaaagtataacattagttctcacatattattttacatgaacaagtaatttttttggattgtatttctgtagaaaaaaaaaagaaaaaagtgaagaacatgttgtttattagagatgagggaggactgatcgagttacgtaagaggcctttatcactgggctaaataatgtgtcggctcaaaactaaaatatatatgggcc

SEQ ID NO: 59445 - DNA, 1327 bp, Arabidopsis thaliana landsberg
aaccaacacaaagaaagaaaaactatcatcgtaatcaagaaccagaggcggattcagacttgagactctgctttagggtttggtaagaatctgatgtttctccttttcgtttgacgaattgagccatgtattttctgaaacatcttgattttgggaattgtagtcataatgagaaagagagttattatagtttcctgtcgttttggtgtaatttatctttgagaaatttctgacatctaaaatgtttctgacaattacaggtgagagagagagagaaaagataaatgatccatcacagtcacgacaaacgatcgacggcaacctttggcggtgatagcgggcttgttgcgccggagtatcatcttggacttccagttgactactcgccgtgatgttcagggtaagtttcatcaatgctcttcttatatgtctctctcagtcgttactctgttaaaagccatataataaaaagaccctataataaatcgtagacttggtgagtaatgagttagatggtcggtttttatagattaactctctgattcatccatatgtagctcgtgtttcttcagtttttatgattttttgtcattgcatacttgttagtaattttggaatgttgatttgataaaactgattccaactccacgaatactggtttatcaaaactgtgattgtatcatcgtagacacaacaaataaaaaactttttactttgaacatttcaaatgctaactttttccgacaaattaattacatggtttgttaaagattcccaactcttagttttttctcgcagtcgcaggttttcttaccaaggaaggttacgttgacccgaataagttcattagcatagacatctttcctcacgtaaggcaaatatgaccaatgttgacattttacatactcggtaaaatatttgttagttgagattattgcaatttttggcagaaaatattaccacactttgttgacatacaaataagttcaggtttggtccataatataaacaccacattcttactagccaacatgcaaattcaactaaccacattcaatattacaaacaaaatcatcaaacatccttgaaattttaacataaatttggcgagtatccgcaattggctggttgtaccgcaattacaacttacagactttattgtaccaacagccaaggttccataaatattaaatcataacttagagactttttcacatttggtgagcatccggaaaaactagtgaaaaaatgaattagaatagtaaaacaaatcgtactaaaaattaaacagacagttaaaacacgtataattttagccagggttaat

SEQ ID NO: 59446 - DNA, 649 bp, Arabidopsis thaliana landsberg
attttccttgaaaaggctatggatattgcagacagattattgcctgcatgggacactcaatcgggtataccatataatattatcaacttgaagcatggaaatgctcacaatcctacatgggcgggggtaagtcctatctgtcatattccttgtcgatcttttcaaagctttaggcattggatatacattttctcttcttttctcgcccagattttcatatgcgtgcaaaactttatcgagatagtcgccactagggtcctgaacatgtttctaaagaagctcctaagaggccactgaaaaattgagatttaagttccagtcgttttcttagatgtttcagggctcgccaggaacgaactgttctgtttttcaagttatgtgacaattagtattctgtatgtgtctacactgttttagagtttagttgtaaagatcatgatgaaagtaaagattctttatcaactaggtattgtttcactagcaagctcatgtttaatgtggaatgggtaccatctgatctatttacatatggctttcgggttaaggtgatagggtacttccttcttggtttagggagacaggattcttgcaaatttggtactgaccgcttgatttattgcctttccagaggacaggggaccaaatatca

SEQ ID NO: 59447 - DNA, 844 bp, Arabidopsis thaliana landsberg
ttaggttcctgattatgtttctaaggactccttagagtctatttgatagcttaaatccaagttctgtccactttcttagatgattcaaccccgtataaaaactaagatctggactcggcagaaacagccaagttatggtttctctgtatgcaacaattaacattcttgtttggggtctagacttttaaacaggtgttacgtttagagtttatggtagctatagtttcttaactaactatatattcactagcaatcatatgcagtgtctttgaaatgagtaccaagtgtgatcaggtttagatatgtttcagtttcattgaggacatgtgctgtgtcagttttactgattgctacactttttttttgttttactagggagacagtattctcgcagactccggcactgagcagctcgagtttattgccctttcccaaaggacaggggacccaaaatatcagcagaaggtagatactaattttgagtttgtccaacagattttctttatatcctaactcggtgtgaaaaagtgggcaatcaatctgcattaatgctgaagaaaatattggctgctcaagattgacacgtttgctaactcatgtctctcaggtagagaaggttattacagaactgaataagaactttcctgctgatggtttacttcccatctatataaatccggataatgctaatccatcgtactctaccacaacatttggtgccatgggagataggtagtttcttcctccaaattttcattttgtgttggtcgggtcttgtgaccatgactttgctctctaacttttaataataatttggctttacagcttttatgagtatttgctc

SEQ ID NO: 59448 - DNA, 1041 bp, Arabidopsis thaliana landsberg
gatttgccacattgtaaagaaggaaaaaatcatacagtaaaaacagtaagaacccatttgcaatacctgtcacataaatcgcaggtgaaagtgcggaaccagcaagcttaactctcccactctcgtcttcgaggatcagattatcatcaggatgcataaagttatgtggtttaacaagcggagtaactgacctctgcattatgttaaatatactcagattgattcagcatagacatagctcaaaaaaacagtagaggttaataaaaaccaacctctttagaatattcatcgagaacacaaggtttaagcttcatgtgtttgaacaaggttcccacaattatgcattcttttcctttttcaagtcccaaaaccttacacactgcaaaaatgaaattcacattcagatctataatttaaacaatactagcaatctttctcaactgtaatccataagatagcaaaaatccctaaaaatcactgatttcacctaattatatctaacccaagaaaattctcaaaaactgctcttcgttgttgtgctaaatatgagagaaacaaaagcactgaccaggcaaatgagatttccaagtaggagcaagagagtagagaagtgttctcatgagatgaagacgagcaaagtaaatctgactgtattgctgacctctgtacatctccttctgtatctcgaatctctcatcctgcttcaattgcaaaaactcagaatcagataacaaaccctagcccgtacacttataagtagaaacagtcaccaccacgaatgattacatttgtctttcactacaagtcgataaagtaatagagttcgtaccagcgaattgtaatcggattgctttctttcgtgaattttctcggagtcgatttccatggcgggaaaaaaaaactcagaactgagcagaaaattctgagaaaaggtttcaactttcaactttggcactaatcgacgacaagagtcttctttcttttatgaacaatcgaaccaaacacaaaacccggttaattgtaagaggtctattaaaccgg

SEQ ID NO: 59449 - DNA, 444 bp, Arabidopsis thaliana landsberg
cattatcatttaaaaggtggtaggtaaaaaaatacacgaaataatcatcatggtcagcttcattttcataagtaagatatcactaagagatggtagttaaaagaggtaaaaaagttgttggtaagacagtgatacaggcaaaaattgtggtctcattcaacacgggaaaaaagttgctgtcttacgcatgtactgcagtaggaaacagagatagacaaaaatgtgtttttatcatatccagtttctgttgctgcagagctttaacaaaacaaaatcaccttaataaaatattagcgtatagaaaacattcagctatagattctaatggaaaaataaaagccaagctcattacactacataatcatttgatcttccacatattgaaagctgttgatgcaaagccaagagtggtctgttgagtcactcagaagacaccttcatctt

SEQ ID NO: 59450 - DNA, 941 bp, Arabidopsis thaliana landsberg
gtctaattaccaaaaataatatcaaaaaggtgggcctgggggaatatgctttccgtaggttttgtataattctatagtaatagctttttgtatttaaaccgaagatatgtctaaaatgcggggttatacgataacaaaaaaacaacgttatgtggtatacgaaaaatgatctcaataaaaagatcaagaaattctaagacattgctaaagctcttttttttttggttaaagattggtgaagcttttcactaaacttttgcctcgttacaactaatgaaaaaagccgaaccacacttgcacacacaacttttgattgagacaaaattaaaacagaagtgaaaaataatacaagtgttgagggaatggagttggtatagaacacgtcgtaaagaaatgatgtcttttcgtgtatcaagcatgcaccttgcattttttgtaaacaaccccacaacactttcccacttcaaattcgaattttctcataatttttttcaacgatctgatatcagaggagatgcgcataaatgtgcaacacggacatttcccaattttaaattaagttttaaaaaaaatcttttactatatataaagagatgttatggagatcactcaaatgatgataattataagttctcatcgatgtgcatatatattaaagaccatacgaaataatcgaccaactcgtaaataagcgaaacgacctagcaaaaagctacaattttcacgattcaatatgcattcacgtggctcatgcatagtcacaaattaagcacaagaatctagtgcatgacgcttggtaaaagaaaaatttcatgtactgcatgaacattacgaccacattttgagtcatcatcacaattcggaagcaccaaaagagggactctggaccacaactaagtggtgcaagcttgtcttgctttgaaccatagagtaccgtgcat

SEQ ID NO: 59451 - DNA, 572 bp, Arabidopsis thaliana landsberg
  unsure (1)..(572): unsure at all n locations
tgactgtattagacatggcaacttttccatagtcaacataggtgatattgcggattccccaaccctaagaaaataaaagataaacgagttcttagttaatcagtgagtttgtaaaataatgtcaaatctcgcattttcttcaatacgtaccataagggtacgagcaacttggcaacccaatgtaccagctccaagaagaaggcatttgacagaggacaatacatttaagttaagagacggtaatgctcgccatctcattaactttaagtttaaatcgacagcagaaacagccaacctgcgaaagaacgtgatttcggttgtctaatcagattttacccatttagttgagtagatcattgacacagagcaaaaatgtaccttgttggatccatggaattagcaaggctaatggatcggggtacacgtgtccctttgttaagctcccatcccactgaattaggtacagtctcagctgattcacctgatgaaagtgcaattgatgcttgnccaacaaggacaaaggttcaagtcaccgaaaccacaactctttctgttaccagaagaaccaaact

SEQ ID NO: 59452 - DNA, 500 bp, Arabidopsis thaliana landsberg
atatactatcttttcgtcgaaagaaaaactcaccatacaaactaagtgatttttcagtagtttgtgatcaatgcacaaatgataaaattaatttaatgtttacaaagctgatgttgggtcgaaagacttggacgtcaaggataacatttggttctaaaatatatggacgtgaaagatagcataccatctttgggactgttcggataagaatgtgtgtgcattagttttggaaagtgtttggccactcggatctttttgtgataatctccagactatgaatattgcggaaatataatccatgatcagagaatatttggcgatgcttgatccatgaccgtaattggagccggatacgttatgatttgatctacaactattattacgctagataagccaattaattatggtaggtgatcgtgaatataacttcactgtccgaaaaagaatagtgtatatgttgccctgaaccatctatctcatatgtgctatgaactagtgag

SEQ ID NO: 59453 - DNA, 1714 bp, Arabidopsis thaliana landsberg
ttcgaggtaagttctctggcttttagaaatcattgttttgattctcctttgtgtcttgtcatccgtatacatgagtcctaacacatatgttattgattcttgtctactcacagaaacgggcacctgcgctgttagacaatttactccaagcttttctcatggctcctttcttcgtgttgctcgaggtaaaagttgttggtgttatgttatgttgtgatttgtttgttatctcctgctaccttattatactgctctgtggaaactgtaaccagaatacatgaaaagctaatgtggaaatgtttgaatgaatacaggttcttcaatcggttttcgggtatgaaccatatcccggttttcaagcgcgtgtgaatgccaaggtagaaagtgacatcaaggaatatagggcaaagaagcagaagaagaataagatcacataagcttggattatatataactgaagaacttgaacccattgtcgtgtttctataaccgaaatgataataagaccaccatgatccatggattgatgtatttgtgtgtaaactatgtttcaatatattgaaaataatatgtttcagtcactcatgtttcaagaaaaataaacaaaatgcgttgcatgtattacgatcacatattcacaggtcaattgttgttccgctcgacttgttttagtccgttctgaaccaatcaattctttgtgtttaactaatgagtaaaactggtagcttaaatataaacttttattattctttgtgtaatcataaaaacactaatacagtatcacctaaattaaattcatattgattaaatatgtagcttagtgttttatttatactagctagctactaatatcagtgtatcataataattagtatttaaattataaataaaaaaaatccgcttgaggcacctaaaatgtttggattctaaagataaaacatcttctagattggaattcggaggtgggagggaatccaactttctttattgttgatactctaatcaatttattaatagtatcaatcttgaaaaaatccttagaaattagaataataatgcagcgttgaaaaaaagaaagaataatacatgaatgttgaaagacagaataatagtaatgaagtgactaaatatctatcacgtgactaatatgtaaacgcaaagcgataccgaaacgcgttttccatgtgcccatactccataagaccataacgatgtcgtcttaaatgttggttgtaacgacattaattattttaacattctacttggccacgatgtcacataactcatggtgatgtggatatttctcgatttataccgcattttttcttgcaccatatttattatatgcattgactgtctataagcggtcgtgttagtattttcgtatcattaagaaaaaagagaattattatgttaaatgttgttaatatgaaatccaccgttacattggatttgaaacgtttttttgttttctttgtaagaatagctagaatgtgttctgggtaacatatgttgctacgtgctcgaaaacatcggaatctaatgcttatcgattttgtctttacaatgtgaaactttataactaaagcataacttttaaggttttttttttgagttttctcttgtcttttcgtgtctcatccagccaatgtaatttgaagaattagtactggttctattagtaatcctacatttagcatgttcttttagttca

SEQ ID NO: 59454 - DNA, 1073 bp, Arabidopsis thaliana landsberg
tccctgtggtttaacgatccgtaaatcgaaccaaatacatcacattgtaagatttttcctagcccccgctgattcccaacattttcattgagaactcccaagcaacaattgctgctgcattagcagggaatgctctcacaatggttggacccaaacctgcatagcatcccttgagtcctgccctcttgtgaatctgcagagatgatttaaagtcaaaaacaatatttcatatactcttttgtatcggtaattagattcatagagggaagatggctgactgaccgagctcaacactttaaaaggatttctctctgtagctttctctgaagaggtctggattatggtttttgctacatcaaaaggcaaaacagctgaccagcactgcatcatagaagcagaagtaatattcatataaaatagcaacattttttatgatggaatttatgaaacacactatatagattcctacagctatgcctccaagaccaccagtgagaactcctatccccatgtcaaccaagtaaccatctttcagcttagaatcctccaatctcgagtggatatgataccgtaagtactcatagacagtaaaaaagacagcatttcccgtacattctcttaataaggttgccgaaccaccacgaaagatacctgttacctgaaagatatccccatcaacctgatattcgattcttaagtagaatattttagcaacgagagtttctcaccccatcatttttaacggtctgaacggcacaatcaagaggactgttgtatctacggaagttaggaaccagagaatccgttccttggatctgcattctacactgaacaaaacagtgaatgtcccaaaactccatggaaaccatcaaaggtgataattgcggggaaagaaatggtgttctggagatttcacctttactagctctgttggacataacacaaaactaatgatagctccaccaaacatagcagacggaacaattatctctggtcgtggcccatcatctggcaaagttccctttacaataaaacaagaaagaagcgaaatttgaaatctggaggaaaataca

SEQ ID NO: 59455 - DNA, 607 bp, Arabidopsis thaliana landsberg
gttagcaccttcctgcaaacggacacagtatagcaattagcaagtaaactaaccgtgccgaacacagttttgaactatattcatagtcccaactttctctgtaatacactcaagtagtagttaaaatgctaaggcgcaaactaaactttgaactcaacaaaagtttataccaaaaaagggcattaccatgtgtataatgaaatgctcatccaagccatcccgtggtagacatctctgcaatcaaacaagtatattgttttataacagacacataaactgactgaaaagtgggaaaaagcaagaagggtgtctaaacgagtgttgtctttatcagtctagcctagaaacaaatctgtaagtgtattacaaaacgactaaccatttcataccgatccaattatataaacaagctctcatatctcgaaagagtagaattagattattactagaaaggtgtagcctactaagagttcaaagagtgaaactaaaacaaaaccaacatggttacaaagagtcttttatatagacttaaaacaaagcctgtaatttacacctccagacatgggaaagcactagcaaacaatcaaagaacaatcacaaagaaatc

SEQ ID NO: 59456 - DNA, 460 bp, Arabidopsis thaliana landsberg
ggctcgatactcatgccggagccgaaccaggccaccagggcaattgcaaacaacagcaagctcagcggcagcagcaagatggcccagccgccgacggcgagaaatccgccgcccgggaacagtaggccgaggcccgcggcctgcagcggcggcgtgacgccgacgaggctgggcaatacgccgagcgcacagagcgcgaggtaaatgagcagggttcgccgcaggcgcgcccgcgtgagtgggccctcccggccgtcgtgaacgatcgccgggggagtcagtcccgctgcagtggccggcatgcaatctcctcatcaatcttgcgctagcgacatccatgtgtcgctatttcaggtatctgaattatagcctaaactgatgcacgtcacgagcaggcgctcggcaccctattgcacagaggaaaatcatggcttttcacgggaaaagtggcgctgatcac

SEQ ID NO: 59457 - DNA, 326 bp, Arabidopsis thaliana landsberg
gggagaccattggatacgagaaacaaacgatttacaatcccaggaacctagagtttggacaacaggccaaacattgaaagtaaaactaagtgataaaaaagaataatatacttacaagagtatcaatttgagtaatgatgtttgcgtaatgcaaggcaagaccagcagagcccagttttttatgattgattggcgggtcatttgcaggcttatcaggatctgcatatcaggtgaaatggccatgatttgtaagtacatctttcattttaggtacaagaaaataactaaatcctctatctttctgaacgcttaaataagacgaaaac

SEQ ID NO: 59458 - DNA, 794 bp, Arabidopsis thaliana landsberg
  unsure (1)..(794): unsure at all n locations
acctataaatcttatgaatcacaattttttatcactatgatccccgagttaatttatgacaatagtaatatatactccaaaagtacatgtaaaaattttcatagtgataattttttttgggtgagctaattaaagagcaatggcagggcttaagagagagttactaagcactaagcaaaaccgtgatattatgattagttggcctaacgagaccgaaaaagttctccttggtgtgatttttggcgtcggaattgaatgtgaatgaatataacgagtaaattacacgagtgtaaagcaatgaatgtgttagttttgagaagagtgagaaagagagagaatgaataaatgcaaaagctctaaaatagttaggagagggaggagaggagactgttaagcaagaagggtttcccaaaagaagaaagccaaagagacgaaatagaaaatgacaaaaatagagacaaaaaggcaaatgaatagtggtggttgcgatatgagcctattccatttattatttaaatcctttttaaaataagaaatataccagnnnnntnnntttttttttttattaaaattcatggctaagatatgtcatttgggatgggaagatcatcatctgtcatttattaccttctcttgcttttctatttcttccatcgagttctcaattttcaaatatttctttgaattttgaatttgcacttactgttgagacaaaaaaatatagtccttctattttcttatttatatggcaatgcatattttaaaaaaaatgcaatgttcaattttaacccttt

SEQ ID NO: 59459 - DNA, 1005 bp, Arabidopsis thaliana landsberg
agagatccgagatttctgtacttactcctcattgactttttgctaagtggtagggaaattttttaaaagatctcttattttgatttgtggacactttcatttcaacaggtgactcatcctctatgcgatagaaatttgatatctgctcggcttgatgctgtttctgagatttctgcttgcatgggatctcatagttcttcccagctcagcagtgagttggttgaagaaggttctgagagagcaattgtatcacctgagttttatctcgtgctctcctcagtcttgacagctatgtctagatcatctgatattcaacgtggaataacaagaatctttcatcggactgctaaagccacagaggtaaaaatttggcctgtcctttgccctcttatgtatgtgcctgtgtaagttagttcaactcatatagtgcaatactgtaataattttgtccacaaaggaagtttaaatcgcccccatgtatattgataaaccaagtctaatcattaaaaaatccctctgaagtgagttgcaaataatacagcgtattggtatctttgtgatatctagtcatagagatacttgtttcatggttataggatctgttagacattattcaatatcctatcctcttttctcacgatgattttcgttttctatatagtcatatgtaaagctataaacatcaccgcgccaattcttagttatcttgattaagaaaaataaacaaaggggagaggaggatagagtgcagaattatacgagttttgcttcccacccctgtttttgttaactagctcttgctttacagctcctcctcacctggcttgagggttcttaactttttggatgaaaagttcattgcagttatggaagctattttacttgcggggaagcaaattcagcggcttggcataaagcaagactctgaaatgaggagtatgcaatctgcaactgtgcgatctactcttttgagaaaattgatttctgttatttcatcccctgttg

SEQ ID NO: 59460 - DNA, 452 bp, Arabidopsis thaliana landsberg
  unsure (1)..(452): unsure at all n locations
tattttcttgcagaaccacaacatctggtcaaagagacggaagcgaaaatagtataactagagatggttgtttcactccagaaataagtcactcgaactgtagaaaaactaaccgatgatcaatcgccatctaccttgagaaacattgccacccaaaaataacaagatttcgagccacctatcttgagaaacattgccacacaagaataacaagatttcacggtatcacgtatactgaaacatatgaacttgaaatatgaaagtatacacaaatcatcacacanaaagtgacagtaaaattcatcactaatgttagccacgatataagaactaataagactccaaaactgatcaactcctttgaaatttacatctgttcaaaaagaggcaatgatatatacaaaaataaaggcagagaaatgatatctttacatttcaaaactctttcgagc

SEQ ID NO: 59461 - DNA, 1299 bp, Arabidopsis thaliana landsberg
actcttcttgaacttctcattcattgcttcaaaatcaaattctttcagtgtactcaatgctagaactagggatgcgagactgcaacacatttagaaccaaaggaaaaacaaatgagaaatagtgaaatgtgtgaaaaggatacaaaccaaagttgcaatgctttgaatttaacacttccaagacaaagagagaggctaaatgtatcactactagtgtcaatgacatcatggatttaagaaccaatgcaatcatgaatgctttttatgataatcatgagaaaatcatgcataagtgtgatatctacaagaaaacatcagatgaagaattacataggtagatacctgatgagctgaaactggaagaggcagcaatggtgcatgatttctgggagcaaaactttgtgatggcacattcgctgatgccgggttagttgcagcaaacatctcttgacccctatataccatctgctgcctagattgcagtgacggatccataccgaaaaatgactcaggcgattttgacaatggaccaggaatcacaggagctgaattagaagccacatcaggtaactcatgaggtatagatcggtgaggatgattagactgagggtcatagacaactttaccaatagactggggtgcactggggtaaattttctgaatatttggagcagaaagctgcgcttcagaaggtggagaaaggttagaggatactgaagcaaggccaggtggagtatggagttgagtttgaccaaaaggagaagggttggaagagtatgattgattggaagagacgtcaggtgaacgagtaacaacctgtgatgaatcatccactaaccccatgattggtgaagaaaaataatctataatctgcggaccattgggtatggtcgaggaggatgaaactggcttctgcatcataccaagagggacaccactggaagcaaatttgttaccttgcacaaaagaaggcatgggcatcgaggaaccagcattactttgagttgaatcaattaagctcactggtgattctgtcaagcttccagcattagctgaaggaggctggaagcttaaagggactgatgaatgttgtgtgacaggaaccggtttactactcctagcaggtgtattgatccattgtgatcctctccccaaacccttaacacgctatcatagccagaaagtggagagctgatggtcatagctggcctagagtgaaaagcccgcaaaaagaaagggggaatgtcagattacaatgtaaagaaaagtgataaatttagccacccattctcattttcc

SEQ ID NO: 59462 - DNA, 424 bp, Arabidopsis thaliana landsberg
  unsure (1)..(424): unsure at all n locations
ggcacggtcttcttaagaggggggctatggtcgcattaggccaaggacagcttgaacgcaatatacatggtcctgtgaatgccctttagactgttcttgtggccgcacagcgccgctacaactgatgtagttcaacagagttcannnnnnnnnnnnnnnnnnnnnnnnnnnnnnnnnnnnnnnnnnnnnnnnnnnnnnnnnnnnnnnnnnnnnnnnnnnnnnnnnnnnnnnnnnnnnnnnnnnnnnnnnnnnnnnnnnnnnnnnnnnnnnnnnnnnnnnnnnnnnnnnnnnnnnnnnnnnnnnnnnnnnnnnnnnnnnnnnnnnnnnnnnnnnnnnnnnnnnnnnnnnnnnnnnnnnnnnnnnnnnnnnnnnnnnnnnnnnnnnnnnnnnnnnnnnnnnnnnnnnnnnnnnnnnnnnnnnnnnn

SEQ ID NO: 59463 - DNA, 1093 bp, Arabidopsis thaliana landsberg
accttattaagagaactctttaatgacacaacaatgcagatagacaacgggttaatgacaccaactatgaagattagacgggacatggtcgtggctaaatacaaagacgagattgatcaactctacaattaagatatttgtattagtcttgttcctgttgctaatattaattataacaatcaaatcatagccttaaagcatatatacaaaaaaaaacattttacagcttgtaaattttatatttctaattattttgtatacggccaattaataatgaaaaaatgatgattggtgaatataattacaacctctaaatgaacatataaaatgatgaaaaaatagggaaaaaatacaactactaagtagtgatgtactctttaaaatcattgattatcaaggataattataacgtgtcctacaagttctctgtcttggggataataatatcacacattggaaagaatgatatggacatattacagaacatcctccagtgatttatcttattttgagacaatgtgaaatggacattttagtttgtagcatattgtaatgttaaaccaaataaaactttgtattatcttgggaaattgtgggacatgtggagggccttaaaaactcagcagcagtgacaagaaaagagtttttgtgaattaaactttctaggatccaaatatggcaagtttgttctttgcatgatcaagtggggaaaggtgcaccactggacgtgtggagaagcttctagaatgtgtacaagatctcttagtttccatatgtggctttgagatgcatacaaaggaaagaaaaaaacaactttccttaaacagctctaggtaggtgctcgtatagtctgaattgagtgtctctcgaccatcttcgatataccttgataacacacaaatgttcctcaccaattcttcataaaataggttgttggttggtgaaatttcaatacggttctaggaaatatgtcatttgattggtgaaactaaacttggtacgattcgggaaggcataacatagaagctagatgaatggatcggaccgttcggtaataatcgaaaatgactcgcccattcttcataatgtttct

SEQ ID NO: 59464 - DNA, 253 bp, Arabidopsis thaliana landsberg
  unsure (1)..(253): unsure at all n locations
aaaccccccccccccccnnncccccctttttttttttttttttttctnncccctccttttttccccccccctttttttttttttttcttttctttcctttttcttttcccccccccccctctctcctttttttcccccccccctcccttttttctcttttttccctctgcgtttttttttttccccccccccttccccccccccncccctttaataaaatatttccccctccccctctctttttttttttttc

SEQ ID NO: 59465 - DNA, 358 bp, Arabidopsis thaliana landsberg
  unsure (1)..(358): unsure at all n locations
ccggggggtggtgctcgaaatctgggccactcaatcaacacgggcgaagaaccctcacacctgggacatgattttaactggagagcgaccatagctggagacccatggagtttaagcgaccattggacgcgctgggctacgaattatgggacccggaggatgaaatattacacctggtaaaaaagacccaccgnnnnnnnnnnnnnnnnnnnnnnnnnnnnnnnnnnnnnnnnnnnnnatgaccaacgctgataccatgttaactcgtcttgacgcatgcaagagactatggacgaaacctaggaccgcgatggcaaaacagcattatgcggctttggctatgtaggcgggaaattac

SEQ ID NO: 59466 - DNA, 1139 bp, Arabidopsis thaliana landsberg
taattatttccaaaatttagcttcgtgtgggagatttctgaaggcgacatctctctaatacaatttttaaaataacatttatctaacacggatattacctaattaacaaatcaccgtaaatcaaaataagcgtctggtaaattttaaaagagtgaaagtgacagatcttaatcatgtactttttgagagtaaaaagtgtaagggttaaaatgctgttgactggtttttacggttataaattgtgaactataaatcaatcaagtcctaaactacaatcatacgttttggagttagttgggaagaatacaaaaaaacaaaacaccaaatgtttgtattggttataaagtttaataagaaaagtgtaaagaaaagaggggagggtgtgtgggattagaatagaggtggttggttgtaccgtatatgcatggagctggtgaaatgaagaagagagggaagagaggtgtcggcgttttggttactgcaaagtgacaccataactaattacaggccacaagtctttgtcccttcttcttcttcgttgacttctttcctaaggaattatatttaaaactatgcattacaatattattattattatcttatactaatattaaacaattaaaaacaaacattatttcatctaaactaggaaaatataagtaggtgatacaaaattcgcctaaactaagttgatggtcttaacccaaacagttatgctagataaaattatgtactttttatgtgatgaaaccaacttcaaatggtttaagtattataacgtcaaaattatgtacttcacatggtgatggactctgcttttgcctcaaaaggactctcttactgaaatccacctgatttgggcccgttgaacaaggtctatttttatttgggctttagtgtggtacataacagattccaggtttgatgctaaaagtctctgtagaccctatgtacattcttatatcagaggattagccatttatatgctgaaataattacattttaaagtgacacacacatattagcctctaaagaaagaaatggtgggtgcttcgttttagatcttatttacaaataatgaagtcaaaaatcactttagcttagttttctccgtatagccaccacacttttaacctttt

SEQ ID NO: 59467 - DNA, 124 bp, Arabidopsis thaliana landsberg
acgaattcgcagaatttgtcagttttaaataacgaaccgaaaacccctcatatgaaggtggatattcatttactgttattccataacttccctttctatttaatacctctcgtattctatatat

SEQ ID NO: 59468 - DNA, 1463 bp, Arabidopsis thaliana landsberg
acatcgttaaagatgaacgaggaggtgaaagaatgcctaactataggaatgcaaaatctgtagtccggacaatagtagaagctatctagcatatagagtagtccacattgtcaaatatataaaaaaaaaaaaaaaggccatttaccaaatcctttcttagctccgatcaaatttccattatcaggaacatcgtctacaagaggaaccttaaagtctctccctttgtgctgataccacgccccagtttcttcgtcctggaacacaaacagtcccaaataaatgcacaactaaagccaaaccaacaatcaactttgttacaaaggttaaaagcagcagaaccttcaaaacaaaattgagagctgctacagaactctccagatttagattaatagcaacttcaaaaaaagaatctccttcagataacttcttcaaaggtgtctctatggcatagtcctgatacaccacataacaacatattacaactatccaaagtagatataaaccaaaagggaaaaaagacaccagagtaataccttaatggcaattgagccaggaggtctcatatcttccggaggttgatcccattcactatcgaatcgaaaatgtagagaccatcaagggaataaaattttctcaataatgtaaatgagacaaccaaaaaaaagaggtaaatgaggaaaggacctgccagtatcacccacatatgaaactccccaatgcaaaatccattttccaggtatactacatccaacactcagctcccaattcttctccttcacttcctttaatcgaacataaatctttccttctgcctatcattcccaaaaatcgaaatcaaaaccattaaattcagcaaaacacatacacaaaatcaatgtgtttattagatttaactaacaacaacataggaactatattcaatcaatttccgctaaatgtgactgtgtacggcgattgagaaaaccttttcgattcgctgaacagggaaaatttccttgaagatgacatcatccgattgagcggtttccacgacggcagtatccgatgaggtagcacgaatggcgacgggacttttgttcttcgagctaacaccgacactttttccaattgagtgtagtagtttgttagaagtgaaatgagaacggagattcaacgagataggtatgaagcttctatttccgcgattgacttttgagttgtgacgaagataagaatggtggagaagagactcaatgggaacagtggacatggcgagagagagagagagagcagaagaaagaagaagaagatattttgtagcagcgaatgttactgaagaagaggttaataagagtcgttggaattatttttattttttgagaaaatagtatttggcagagagatatgataacattaggtttggtgaaaggaaaagatctttttttatttcgaataatgcgtggacttgttattatcaaacgata

SEQ ID NO: 59469 - DNA, 1457 bp, Arabidopsis thaliana landsberg
tactctaccttgcgacgattctaagcctcaccaaaaacaatatttgtttttatgttaacacaaatataaacgttctgttagttttagtatatataatggagcgactatagggaaacaataatcaatatgatctttatcaaaaaataaataatgaaaaataaataaatcagtgttaaaatgatctcaccatacattaaaaaataggtatcttaaaaagttagtaacacatttgttatattttaatattttttatacacgttgtctgattttgaacgttgactattcgattcaacggcatgaaattccagaagagaattgtcaaaacataaaaacaaaatccagatgcgcggaccccttaatatttttagctagctgtcttcacgatcgattattgttttgtaaacaactctcacatattgtttttgtgattttttttttttttgtgaattttttttttcttttaatagtaactggacaaaatggtacacctttaaaagtcaattaggtgtttgaagtgtataagcaaatatatttttcttttcacgaaacgtatattacgattccttggtgtgtgttttttcactacagatttaaagattgtgatttagctttattataattttcagctatgaacttatatcttcggactactctcgacatttggattacaaaaaatccgattagtgtgacatgaaattgtagagttttctttcttttattatttggtgttaaacagcaatttcaagcagcaatttcaccaatttcagaaacgaagatctcgggacaagtatcgagttgtgatagcctcatttagatcgaactacaaatttgtgttgttgcaaagaaagtgaagaaaaacaactctcattcgttcttgattcctccttttaaagaatcgtcgatggtgagcgttgaaggtgaactctctcaccttgatacaaacttcacaaatggaaattgtattgatcaatgccacatacatgatagttttcagattattacacaaaaatctggtgaagtgattttacttagaatgacagaaacgtttggcatgacaatgaaggaaataagtgatgagatagggaatgcgagtaatattcatggcatagtagagaaacaaatagatggcttgtgtatgagtaaaagaatcttcatgaatgggaataaaccttttggctcttttgtttttagctgggatcctggagaaatcttatgtgaacaacttcaactaggctggatagatcattactttggtgagaataaggaaccgaaactactgtcaagaatgttggaaatcgaaactctggaaatcactatcaaaggtaaggtagttgggggttatctctctggagcaactaggtcctggtgaaaaagttgaggctctagcaatccaagatggaactctgcacttcatctctgggcttgatatcacgtttgggaacctggggagttactgc

SEQ ID NO: 59470 - DNA, 588 bp, Arabidopsis thaliana landsberg
tctttccgtcatcaactagttagtagtagagaagcaatcaaattatacgagtatttgacattgaaaagaagattaaaaaaaatctttcagactgaaatatatagcaaggaagatagaaagctagtgcaggtacataagtcaaaagtcacaacatatagtaagtacatcataagttcatttctcttgaaaacgatctctagtgatgatgcactttttaggtatttattcacatccgagagttttctaaatcacaacattgaaacgtgttcatgaatttaaatcaaaacaaacctgctcatgaatttggggatgatcgttataagcaacgctcttcaaaagctttcgatgggtttttaccatcgatatgcgaatgatgggggaaatcaaacggcatttcttcgggagagagccaagcttctctaaaaactctcgagacttcatcaaaaactaccccattgccttcaggcgtgagatggagcccatcactgcttatagccaacaacaacgaggcaggaaccatttataaacaacaaacatgattgaggaggagatgagtgtttgtgaaaaccacaacatttcagatcagac

SEQ ID NO: 59471 - DNA, 925 bp, Arabidopsis thaliana landsberg
gatgatctgggggtcatcaagaaggtaggacctgattttccatatatgtagacatatcaaatgggtcagggatgatgtatttcttgttcgtactgatggctcaagcattgctttccttttctatgaaagattctaaatgaaggtgagggctgggaatctcccagagaaccctatgaagtgaaagccaggtaatttattcttgatcattcctgcattttgggtcaaaatatatttaaccttgtttttccatttggggcaacgttgagtgaagttttaatgcatttctgtggtgtatattagaatatctgctaaatccggtgatggacacgtgatcttctctcacacagaagaaccttatttcttcacatttggaaaatctgaggtaattgttaagtttatggggcagtttttactctctgtccatgcaaatccattctagtggaatacatttctgactattgctcgtcaattaggcaggtgcctaaaggtcttgaaatcggaattggaaccatggctcggaaggagaaggcagtgatatatgttcgcaagcagtacttgactgaatctcctttgttgcatatagatcaagaccttgaggaagttcattttgaggttgaactggtacatttcattcaggtaagaaagacaaatgcaatgcaataagaaaacagtattttgtgcatttaagaattgggaaactgagcgactgacattcaagttctcgctttgaaggtgcgggacatgcttggagatggacgtctcataaaacgtcgaattcgagatggaagaggtatgtttcacactttcttttcaactgtctattatctgtttcaacatggtgcgggtttttgttcttatacatcttgctggggcatctcctagattccagctcttgtttatagtttatccgctagactattctgat

SEQ ID NO: 59472 - DNA, 1374 bp, Arabidopsis thaliana landsberg
agtgatatatagttcgatccatttataactaattgcttttgagttagaaacttctagacttcacatgcatcatataattaaaagtaaatcgtttcatttacaaatagctaaagtattggtggaaactaacacctttgcatatcgagcagactatgtatgatatgaaattcaacttagacgatgaaattgcaagccatgaaataatgttcaccggtttctctaagaaaaaaggttcaagcaatgatgcgttgatattttcctataatgagatgaaactgtttttttgaccaatcattcatgagcggagtcgcatcacgacgacgtgtgggataaacaatgttcaatggaacttccaagcacatgattgacaaccttggtcctttgactgcacgttacctcatatgtaaatagatattaatacaacattttatgcccatatttgtcgacatatcactgagttagtagtatatttgatggtaagcaatagaacaagaaataacagaggacaaatggatagtttctcacgtgcctccatgtgatctttaactccttcaagatacgaagatcaacaacattttgccaatgaatgataatctacaacattgttttttttggttctattataaaacactttttgctagaatctctcggtcaaatattcgtatatagaatatagtcatatagatcaagcttgatggatctatgagttggacattaataatctcattccaacttcttatcctatatataactcaatggcttagatctctcattctatatgccattgagtaaaaacataaatggcacgcttagaaatgcacaactccatgaatggtgctgctagaatctctttttctaacgagtttgtcgagatcagatcggagaagagtaatgctaagagcaacaacatcaactcgagaagctctttctccatgccctcagctgatttcgctttctcagtcaccgattactcgatgattcccgccgatgaaatcttcctcaaaggaaagattttaccttttaaggagaccagtcacgtccataggaccttaggagaagagcttcttactgaagaggagggttctatggtcgatggtaacactttctccctcaggccaatattgttgtcttcttcatccttttccacaaagggcacgtggagggagcttttgggacttaagaggacccatgttagatctaagaagactgataaagtcaatgaggaagtgttaagtcaagatcacaaaataatctcaggtatacaaacaaaaacaatcctctgttttgaaatttttattcttctttggataaccggagattcccaaaccaatactaatatgagctagtgaaaatcttttgggctgatcaggaaat

SEQ ID NO: 59473 - DNA, 376 bp, Arabidopsis thaliana landsberg
  unsure (1)..(376): unsure at all n locations
cgtaaaacgggtagagctaattcgagggacatgacctgccttctcggagggaccccttaataatataaaatgactacacggtccgtgcctagtgctctaaggatagatgataacgcgacatatcgtatggcctatacgctggactagcatgatttaaaagagagacctatgaacaatgcatggttggataaagagattccatgannnnnnnnnnnnnnnnnnnnnnnnnnnnnnnnnnnnnatagacaccactgtaaacggctactagatgcacggtacgtgtctggcgcgcccagaacccaatactgacacgaggagagcgggtcagtaaagaacaatgccgatctcgtttataactcggtatgggcatgagctc

SEQ ID NO: 59474 - DNA, 123 bp, Arabidopsis thaliana landsberg
  unsure (1)..(123): unsure at all n locations
cccccccccccccctttcccccccccccttnnnttttttccccttctcctccttctcccccccccttctttctttttccccttccctcttcccccccccccccccccccttttctcccccccc

SEQ ID NO: 59475 - DNA, 1297 bp, Arabidopsis thaliana landsberg
actattatgctacttgcctgatttaatttttaagacctttattatgactaagttaagaaattatataattcctacaaatacgaaatactagtgataaaaaaaatcatagccttttgaaattatcaaaatagttctaccaaacacagtgaaataagatcaaacctttccaactgaactaacaatagaagaaagtaggaaacagtttgataacattctccatatagtagcatcaattaattatataagattaaagtttcttcccctactattgccgacactatatttatatgtttgggtgaatttatagttcacccaacattttatctttcaaatttataaattttatagagcattttgacactacctttaaatttcaatatggaaaatcatatataagttataaccattgaaacaaaaacttcagaccaagtttatatcatcaacaataccatcatagttaaaaatttggaattgagaatggttgtagcaaaactgttttaactttgaatttttttaagataaaactatactgttattttatataattttgcagtttataatggcatttattgcagttgatgtctaaacaaactttccaatcaaacatacttcagaaacctgtctcatgacgttgtaataataataatatagcaaaatcaagaaacaacataattcactaaaaataaagtaagtaaaagaaagaaaaaaagagatagtggctcaagtctcaaactcaatcaaaaacaccaaaccaaagttaccaaacttctcatcacaaaagagagaagaagaagaaagaaacagagtttcgccatggcagagaaagagaagaaaacaaaaaagaagaagaagaaagagaagcatcaatcttccgacatctctttcaagccttcttcagacgtaaaaggactcaaattcggcggccaaataatcgtcaaatcattcacaatccgacgagcaagaacactcgagcttcttaaactcctctctctcccatcttcatcatcaccgccgcttctttccacggcggcgtatcttccgacaaacttcacaatccttgcacaccacgcatggcacacactaacactaggtctcggaacaagacaaatcccaaagtggtggtcttcgtgttcgaaacagaggcgatgaaatcatccgttgtggcggcggaagcaccactctggccatcggagacccccctgggagatgtgaacaagaagatgataagaaagttaaagaactgggagatggcaaggtttaagttcagaacaggctgtatcacgtttatacgtatacg

SEQ ID NO: 59476 - DNA, 308 bp, Arabidopsis thaliana landsberg
acacaaataatttctgattcagttatggtccactatattaaaatttgggtctagcatttttaataatttccattaaataaagttataacttataaacaaaaatttaggatttacaaatacattattttacattttattccataaaaatcatagccgatatcacggctaaaacacaccaattctgcgactggtcggattactaagaaacgaccaaccggggctctggaatccgtccgatccttcaacaaaactatggagacagctttgctctagcatgaatgggaaaagggggtaggcttttcgcccgc

SEQ ID NO: 59477 - DNA, 448 bp, Arabidopsis thaliana landsberg
  unsure (1)..(448): unsure at all n locations
cnaggtatggttgtgtttgtgtatcctctataatcggatttgcagcagcaagcacgtgaaaaccagcagaggcagtccaaatctagacccgaggaaacaaacattactgattccgataatgtcttttggattttcttgagttcaatagtatatgattatttttttatataagttatttcatatagcttacatattacaattattaattatacgttcgtaacttagctattatttttaaataagtttacatattattaaacttggcgggtaatgtggtgttaaataagtaaaataaagtagttgattttatataccgcatatattttggagatagtcagaagttgttaattagacagataacttttcaaataaatatatatatcataaaaattacttataaaacaaaagttttacggcaaatgcatgcatattgaatcattgtaataaa

SEQ ID NO: 59478 - DNA, 166 bp, Arabidopsis thaliana landsberg
actcctggacgggggggtgcgcagtggtctgcctaataacttggtgtggctgactcgacgcctatcctgaaacctagattttgaagggccgtatgcgcggcagcgcaccgcacgctgaatagctttgagacggtggacacattggcgacaatgtgtcccgtgcttc

SEQ ID NO: 59479 - DNA, 1301 bp, Arabidopsis thaliana landsberg
atgtaaattttaacaaaaaatgtatattaacaattaagagattttcagtcgaagtgtcaaattgtctttaagtatctgattaaaatattatatagtagaaaataatgtaaatattgaagatcgtaaaaatccatggcttataaatgatgaagtagtagtcattatttacaatctaaaaataaaacgttatatttgttttataaaacaacacatgtaaaagaaaagggtataaaaaggataagagatctaattaaagggcaaaagagttaagctgacaaaaagaaaagaaagcaagagatctaaaagacaaaagaaaggtacactggagttttcgatgttgtttcctaaggtcaaaatcctaacgctatctgttctctaagttatcgtttttacttttgcattttgggatctttttgcttgctagttgatacgtaaattgatactaaagaaaaaccattcattatatttatagtggaaactagctaaattgatggatcaccattttgtgaacagtaaaaaattgtttttggagaacagtaaaaattcaagaggtatcatgatcaactgcatgttctgccataattaacaatacttttaacgagtaaaataaaattcaccgtgggaattagttacaaactaacccttgctgtcacaaaaataaaataaaaaataactgacctacacacacaatttatgttaacgtcgagtgatcatgtgaaagcataggttgatggcaaatccattatcgagatggaaaaagaaaaaaagtaagttaaacacgtacgggccacggtatcggtcgaggacttcacccactaccttagctaaagttctaattatgttaatgacacaatagtataactgacatatgttgacattctcctagcgaggttgacatattttttcaccatgaggttgacatttatatatatattagtagaaaagagaagaaaaatcttgtacaatattaatgtcacttgtcttttaataggcatgttattttatttaaaataatatttacgatagattcacaaaacacaaaattccagaaacaatcaaatatattaattttatactagaacatcagttatttcatatccgtaaacaaaagtagaaccaatgaaaaaatacgaaaaaaacaggtgtaatttgtttggcacgaattacgaaggaagaatttacgcggcgaggaaatgagttgactttagaatttggaactgttgggaattgagcaaagcgcgagacagatagactgaaaagctacagctgaaagttttgtttcagttttgctttgttcctta

SEQ ID NO: 59480 - DNA, 1136 bp, Arabidopsis thaliana landsberg
catgtggtggcattacgtggtggtataatccgtgatcgttgttgagtttagcatctctggatcccttgaaagagacagtgtctttcatcagattattatataaatggtttaacatatcttctttttctagaattttgttgttacattgtattaaaactcataagtcatatagtttttttccactgtcttattagtatttctttctatcaaatttaaataaaattttatttttattatggaatttagttaggaaaaataaccattttgatttttctctaacattatgtacgttattttcgtcttacttttttcaacacgtcattttaatctgtccaacaatatgttcgttattgaccttaaattagaagtgaaagatttgactgtttagatttagaacgatctaagtgcaatgatctagacagtgaaaataagttggcctcaagatggtcaggtaaaaattatgctttattttcttagcataatctaacattagtagctttatctatttgcctattgtaagaactaagaaagtgaaaatttagattgttctcgaaaatcgatttgttcagttttcagtttatggtagtgacatttaagatgcacatgctacctctcttatgaatgccgtagcgttcatcgagatccatttgtttttatagctttgaataataaggcaaatctcagtgtgtctacagttttaatatttcatattattacacaaataactctagttttcttgtctacaaagtcaccagtttcatgattctaatggaacatttattcccaagatcttcattacttcttggatgtagggtaggtaccgagagtgaatgtatcaaactattggtttatatgtgatattattttgtctgtctagattttagatatttagctcaccaatgattagactgcccacaaagtaatcaaattaatgttggaaaatgagaataaccgatcaataacttgttaaaacatcaacatgatttatatttacatggctatgtactgcattatcaaatttcttaaatattataagggtttttttaaaccaaaaaattacaaattattggcagtgggccataatattattttttcttaacatggtttacttttttctttttaaactgacaaaaagc

SEQ ID NO: 59481 - DNA, 498 bp, Arabidopsis thaliana landsberg
  unsure (1)..(498): unsure at all n locations
cgatcatcagggagtgttggaggtagtactataactgcagttgcacgtttttcacattattataccgacaacacgaaaactggttacccaatattannaacgcgatctaccaatcatttatcactgtagatgccgagtccacaatacgcttttacctacctatntnnttatcgacattaatgtaatcacacagttgaaccgttagatcaaaggagacgtataaagtcaacgaatcggcggtgttggcttcaattattcgagaatttttaacattactactcatttcaactttgtatggttttaaccttaatgtccagcattaccgcacaagaaaaaaaaaaaacacttaatgtccacgatttaagcgtcatctttttttatagtttaaactagaaaaaaaaaatacttcacacttatgactcagatttaagcggatgaagatttgtttgggccttattatatctctttttttccctggcgcttttttttttttttttt

SEQ ID NO: 59482 - DNA, 787 bp, Arabidopsis thaliana landsberg
tcagatattgaaaacttatatttgtaaaaaatcaattgtattctataaacatgtaatgtattcaacaaaaaatagtcaaactaaccccttgctgatcgtaaatgatcgtaaactaaccctttgaaaatttggtgctataattagatggttaccattataaacggacaaatttaaaacatctataaatatttctgactgaatttaatcaattcccattttacatataccttactaaaacactctttgactaaaaaacttaaaactataatagtacctatcttggggaacatagaggttgaaggttacacacacctaaatcctaaatgttgcaatctattgttaactaaagaaagagtagaatgcattcatctattggaaaagcctttgaacttttctgttttcttgttattttaattgttaaccatgtgtgttggatccaggcacaaggcaactccgatgtgaattctacagcagtgagcagatctacggatacatttctttcttctacaagcttacctgtggagacagccttcacgtttccatcggctttacctgtcatcccttcgggtggtggaaattttgggaaaggaaggatagatctcggaggtcttgaggtgatccaagtctccatctcaacctcaacatcacaaagagtatggaggacatacgagggaggtcccgacaacatggggctctctatcttccaaccaatcaatcttcctcccagcttctccactcttggcttctatgggcaacccaacaaccgcctgcttttgggtgggttctt

SEQ ID NO: 59483 - DNA, 1329 bp, Arabidopsis thaliana landsberg
cgtctttattgccgttgtcctctcagactaatactattgcttcaatctatcaaataaaggcaaatactatatatgcttatatgttatcttacatagccacaatctccacaatcttagtattcactagttactataaaatcttgatgctgaaaaattcgtacattaccttcatgaatatgtgtaaaatggcctctttttttgtcgtttgtagccttgtaaaacataggaacggctctgcatttagacatgcagaatggacgagttattcaaaatcaacgaaactaaacaaaaaaaacaatgtcaatttttgtttaacctaaactaaaccgaatctaattttaaccgataatacctcttgatagacttttactaatcaattaaccttccttgtcttctaccttgatttggggaaagtgttgtcctagattcatgtagatcatcagtacatagaagaaagttacttgtaacataatctgaccaaacaaaactaaccacttaaatatcctaaatctctctttctaagcctatctaaatactttgaatttgtatcatcgtttgaaacaatttaatatagaaaagaaaaagtaaacaaatactagtatgtatttatttatatgtggtccaatttgcccacagaaaaaggatcatgagacataagcgtgagaccgtctccaagctgttcgtctctgatgctccagctccctttcccactttatttttatgttattttaagtttgaactacaatcaacttacatatatacccaaaaaatattaattactgtatacctattttcggatatttcatctattattgcatatattttgtcacaaattttgttttggctattttgtgtagatttgagtatatatagttatacaattataattttctaatattttggtttttttttttttgttacatgaagatacatttggattaaaaaaagtaaggaatatgaaccacatctaaattttgtttgtccatgagaccatcctcaacgtaaacactagaattgtcccaaacccaaaaaattgaaccaaccaaataaaagaaaattataatagccgaatgagacctaaatctctaaaaccaaaaacctcgtaattggaatagaaccgatctaaacttaaacgaatatccaatacgaaataaaaagccactatttaatagcaataaatcataaattcttttctttttttgtaaatcataaattcttacgtctatttttttacttattagttacctaattcactccctagcttgacttaatcgataattatatttaaagatacagtatatggtaaacatcaaataaccaacgcttatt

SEQ ID NO: 59484 - DNA, 170 bp, Arabidopsis thaliana landsberg
tttatcaaagcatgcctctggttatcgaacgattgaacaaccgggaacaatctacttacgatacttagttgacattcataaaacgtatctaatgaattatgagttcaatacatcctgtttagcatatagaccgaattcccttgttcattatttgccaatcgcgttttctc

SEQ ID NO: 59485 - DNA, 703 bp, Arabidopsis thaliana landsberg
  unsure (1)..(703): unsure at all n locations
gccttttaaaacaataacaaaattctttaagaaaaataacccaattgcaaacggtcgttaacatgtacatgactactagcatataacatcttgacccattgtagtaaactagtaggtataaaataaatattttataaacatcatgatttcaagtgtttatggccaattttcaacatgaatagtttatttgaatcacgtccgtacaatccgtctccaaggaggtaaaatgactttgccaaatatgtatagttcatggctcagattaattagcattatttgtcttaacataaaaaaaatacaaaattaatagtagtttaagataagaaacgttatattcattgatttacttaatgcattgtttttaataaaatgttatttattacaaaaatatttttgtattttcaatatgctgatggacataaaacccttttcaaactaattgaccaacaaaaatttatctactttttttttacaaatttagtttcaatttcttctgtttttgaccatactatagttatatctttatttagatcttgnttttttctttttatcttttgttatatttcaagaagaacaaacttacaaaataagagaaccagtattgttcaaaaaccaactcactcctacaaagtaaaagttgtccttataaatttgtgaacangaaataaaacaaccaatcaattaattattacaatgtctacat

SEQ ID NO: 59486 - DNA, 545 bp, Arabidopsis thaliana landsberg
atcatcctttgttttggagaaatgtgtgacgaatatctatgttctgaatcttcataattaatcaatttgactggtgcggaaaaaaatgaagatgtgccctttcatggcgtgtgagttgtgacgtaaaggagagacaaaattgattcttcttgctacgttgttttcttcccaaagtggaaataacgaaagatctgagaagagagacccaaaaaaatatctaggatgtagcaaaaccacacatatcaattatatatatatatatatatatatatatcttttcttctgatattaaataaataaatattttctatgtcaataataagtaaataataatgaatgtataacctttttcttttagaggggaagggggcaaaaataatgaatatataactaaaatgctacaacaaattgattgatttgagtttgattagtaatctttaaccgcttcgcaaacaaaccgcttttaaaataccgatcattagcgattagaagaagcagttggaaatagtgtgttgaagagattgttgcccgccacctaaagatta

SEQ ID NO: 59487 - DNA, 1161 bp, Arabidopsis thaliana landsberg
  unsure (1)..(1161): unsure at all n locations
aatgacgagactactagacttttgtttctctgtttacgttccttaaatctatttacaaataagtttttatttcatcattggtaaatgctttttgcgcgaagtttttattccatttttatacacaaggaaaaagtggaaaacataaattgatgttatgcttcaattcagtttctcatgtaagctaaggaaggttcggaccattgatcataagggaagggattgttaagatgagaaaccatattaagaaactatcggtaaactatcacaaactttgtttgaaatcgtccatgcaaggatcatgttcatttttaacaatttttacatttgagatgttggtgctgccatcgcacttgttggcgccaccaccaacttaaacgcatttgcattttcctattgattataatgaagatgtttagcaaattgatagtacgagtgattgatgttacgtccatatgatctttaccagtaaatatattgtctatcattaatccttgctaatatcacttgataaaggttaagaacaaaaacagtcactctttatacatcatttgatctcttccgcgaatatgacatcgaaaatgtgttgtactgcacagtggatatcatagagaagctaaaatcagactcagacctttagaaagatttacatttaagaataacagtcgaacaagaatgtgagttttttgtcaatgtgataccttcatctttcgggatattcggctgatcaaccacgaggtattgtagcgcgtttagatcaccaggactatacaacagtaaacaagaatataagaacaattttataaacttgtcaaagttcaaacaaggcaatattctcagtaccttggtttcaggataagacatgaaagtacggaaagaattgaagatttaagatggtatctgcgagatttttagagcacaaacaaaagttaaaaagtgatgattataactacataactaagcagattttgtttgcttactctgattgatgcatgtcataaagaatagaaagtccctccaagcaatcagtaatgcacggttttactccaattcgttcctctactcgcctcttgcttgattcaatntcacgtaactgtaaaccgtcccgatgtagcttctcaaatgtcaaaacacagccccagaattcctccctgacatcatcac

SEQ ID NO: 59488 - DNA, 1068 bp, Arabidopsis thaliana landsberg
ttgcaaataaggaattgattttgatctcaattttattttacctaagctagaaaataagcctaatttatagaggaacgatgcaacgatcaaattaacaagtgtctccatactgattaaaacgctaccgaattgtacaaaatcaaatgaaattcaatcaatctgaaacttcgacgatgaaattctagtaaagacggagcaatttgaaaattcaggaggaaacaaaaaggagcttagcaggtagagaaattaaggatcgaggtgaagctaaaaggaggatcgattaccagatagagaaagaggagcagtagcaatacacgacgccattggaactgaagacgaacaaaagagagatctgagctagaagaagaatatgcagacatgttttttttttttggatatactatgtatatcttcttctccttgcttgggaaaactatatgtaaatttacgattctaccctcgttcttattatttgctcagttaccgaccggacgacagagtacgacacagctccaattgatcttttaccaaatgactacaaatagttgattactacttggatgaacaaatttcttcaaataatatcacatgttaaccagattgtaatcaactatagagaagtggagacagatgaaatcagatcactcttttgttcttctatagatatcatatatcaaaccagttattattttaaaaacattcggtatcctttcttctttttttaatcccatcaccatttttatatacaaaacctgtgattttatctcgttggagtcttcaccaaccataagacaactaaagacactcaaaatatattttaaagaaaaaacttgcgataataacttaactttttatctgggaagatctctgaacaggaacaacggagtattcacattcttcctctcctcagttcccggaaatgagagtgataacgacagagaagctgccacttcggcgtcatcttcttcttcttcatctgctttctgtttttctttattcatactattattactttgttcaccagagttgctacttctgcttaagaaaggtaatagtcccattgttgcg

SEQ ID NO: 59489 - DNA, 1049 bp, Arabidopsis thaliana landsberg
aaatttgccggcattcccaactgtatcagatttgttatcacttctccatcaagcaatagtaaggaacaaaaatgttgtttagtatcagtgtatcacttaatggtgtttctggctatttttatcaagccatacacggcatctataagttacagattattaagaatagcgatatataactgtacaaacaatagactactttaagttttggctatttgatagacttgtaatttttggaaaatttaaaacaaaaacaactgcatcgaaacgaccctttactatctcgttgcgatacaattacagtaaaattttattgttactgaaacgaaaggaactgcttggcaagttacaaggcagggtaaggagacagacgatggagtttggtaggacaatgtacacaacttgatgttttctaagagttagctatataaataattaaaattttagtccaaattcaattatgtatccaagaaaatacaactgccgaaaacatttctctatgtttagtgttttttctttttctttttcgtgcaagttttatctattattttcccaacatcacggcctgcaggcacagagttttgtggtcaatacgtgatggtgtgattagacatatgtattaacctaattaccatggcccacgaggcacgagcttgagagttcattaatctttcattacactgatttttttattgcaaacataatcatcacatcatccgtttcaaaaaaggtactatcattttaaaattggtaaacatatttgtaaaaccgcagaaacaatgaagtttcgaatgaaaattccaattgagaacaatgataagtttgtattactacttcaaataaaatatactttatgtaaatgagcgagagaggaagagaaactgacctccattgagccaaaggacgagaggacgacgagaagagttttgttgagcttcgaagaaccaatagaaaagtgccttttgcttctgttcaggccccagattcacgtaaccggcgtagtgtttgaagttaaccggtggttggccgggcaaaccggttacaaggtcatc

SEQ ID NO: 59490 - DNA, 351 bp, Arabidopsis thaliana landsberg
cgcataaagaacaaacaaactaatagaaaaaataaaaaatgggatttgaagagtcaaagtcaaataaatgatcattcggtggggactgcacggtcctcattgcaacacggccacatctataattatcgacaccctcagcggccgattcaagggatgttcctataagttaccaacttcggtgataatgatgaatgataaacgtgacatcttatttaattatcttgatataccaatgacaggttgcgtttgttgttgcgtttgccatgcatgtgaatgagtttatgaaaatggaactgtatatcgaacggtggaaaagtttaaaagtagtatgtgtcattttctgattattta

SEQ ID NO: 59491 - DNA, 880 bp, Arabidopsis thaliana landsberg
acataatacatgatccctcaaattttgtagaaaaataaaaactcgaatatttctatccacaaaggggtatatacaaaagttttatgtgagctccaccaaaaaacaacatatgaacgtaattacaactgtatatttaaatttcgtccaaatcatttgctgatgcgaaaacctaatccagcacttataatggattataaaactaattaaatattaacaaagaagatatatccgtcagcaacattataaaaatgtagaataaagttgcaacaggatgacgaggagagtaaaggtgaggccatgaacttaacaaatgccaagtgtttctgactcagctatgaatgtgacgtacacaaattaccgcttttgagtttttacatgcaattaccactaattgtttactaatttctgttataaacatatccgaattagccaaaaaaaaaagagagcaatcctaatatcattaatatggcaaagtttagtagatgccgttcgaaaacttctacactgatacgatacatgtggttatgaatctttgacttgtgagatttttaggacgatcatgaaattgtatgtgcataacaagcatgaatcatgataataaatgatgggtgatgatgatgtatgattaatgtgtagggtattatgttgacatgttataattagtaggaccggtccacctcaggcccacatggcaatttttgtctctgttttgattgcacggcacgagtctcccccacaagtacagctggaaaatagaatggtcttcttcttcttgtgtagttgtgttccaaaatgaataataaaaactcgctacatgagacaaatatatattcctttccaaaattttcactgatttggtctaaatgctctattatataaa

SEQ ID NO: 59492 - DNA, 850 bp, Arabidopsis thaliana landsberg
gcgggttgttgactttttatcttatgtcgttgttgaactaatttctcagagtgagagtgtaatcaagaaaactaattttcgaaaagaaagaaaaaaaaggcaagaaaactattgtcgaaaagacataaatgacactaaaattggattattaaaaatggtatatatgtttggtggaatttataatcattaccaaaatcaaaggaaggagagagggacctcttcgtgcttatgatttccctcctaaacaactgctcccactatccttttttacttccaacaaaatcattcacacgagaaaatctgtctcgtgatcactttcatgcaaaattaaactaaattttggtattttttgtcaagttcttgctgttttaagtcgattatttggtaatactatatgtgtggatatacacatccaagctaatcaataattgatctccttctcttatcaataaattacaccacattagctaatcaagctaataaattacaccacattctcttatcaatttttatatggtataaataaaacaaccgactataggctacagagttggtattaaggcattattgccttctagtcgaaggaatttttttgttatgataacactcgtgggaaaaaaatccagcctaatatgctcatttaaaggataattgatttaaatgctttaatcattaaaataaaaggtttttgcttttaaaggttaccaccgcttaattcatcattaggagaatattaactttgatcgaaattccaaaatacttttttaacacataagaaaattttcagcatttttaaataaagggtacatttattggttcaataaatatgtttacaacgtaaagttggacc

SEQ ID NO: 59493 - DNA, 204 bp, Arabidopsis thaliana landsberg
cccttcatatctaagatctttatagtacgagttacagtctcacaaatcgtcatagatggtaaaagaacaattgaagcatgcattagcactctcacatggtagagaggtgggtactaatctgagagttacatggaggcttataggaacgtcgattggaacaaatggaatctcgataagaaagaactgatccaatctggagggaaa

SEQ ID NO: 59494 - DNA, 224 bp, Arabidopsis thaliana landsberg
catcctgttacgcttttaatttgaaatggaaattgtaaaacacaaacacaatgttctttctatttctgatatttatgaattaccgactgtttgtcgactgtttgccgaccgctatcgagaatgttcacccataacaatcaccatcatcatggttttttgcttttctataaaagcaataataccactttgcattacacattcttatagtttttcaaatggatttg

SEQ ID NO: 59495 - DNA, 311 bp, Arabidopsis thaliana landsberg
taggtctgaagtagaaagggaaaaacaaaccagaaaataaaaggataaagaaaaaaatggaaaacaggcgctgggctgaatttcctgcctcggcccatcttgttctctttccgcatggcgggcttctggcagatgggccccgcgggcggaggcgcgcctggaatccctgcgccgctaacatgtgggcccgagcagccgatccactcagctctgcatgccctcaacctcccactgtatgacgggtgggcccgcttgggtagctcgatcttcttcctccagcgatcttcggggatttaataggggccgaacgt

SEQ ID NO: 59496 - DNA, 302 bp, Arabidopsis thaliana landsberg
ctatattgaagcgcgggaggtgttaccaatctggtccgtcggctaaaatggttcgattcttcgccttaaggtctaaacgactttgcttcacttccggcttgattcaaatgagttattattgatctacgtccgctaagcataacgacggcgctctaaacatgtcatcatcaacatgtccgatgacttagcatctttactgatttgactcacaccccttaacttgactatcaatcttgcactttttatccccaccagggctgacattccgatggacatacagcccaggtttgactatgccctac

SEQ ID NO: 59497 - DNA, 1747 bp, Arabidopsis thaliana landsberg
ggatttgttcagacacctaatgcatcaggttaaacatttttcaagattcttatgattttctttatccattgccattattcttttagtgagtctttcatgcattattcgtgacttttgatgaccaatgaactaacttttatctgagaaagaaactgaaaacgaaaatgtttttgttgttctgtgctaccaggaaatagcattttatgatgtcacaaaaaccggagaactcttaagtagattatccgaagacacccagatcataaaaaacgctgctactacaaatctttctgaagctcttcgtaacgtaacaactgcgcttataggagttggtttcatgtttacatcatcttggaaattaacatgtaagaagcttctttttatctttaaaattatttggtactagtagatggaatgaatacacaaactgacatatcttcttgttcatcaatcatgattttagtgttggcgttagtagtagttccggtaatttcagttgctgtgaaacagtttggtcgctatctacgtgaactttcacacacaactcaagctgcagctgctgttgctgcatcaattgctgaggttttaactctgcttcttttatacattgcttatcgatatatactttttcagttcattacttttaaattgattggatcaatgtatactatgtaggaatcttttggtgcagtccgaactgttagatcgtttgcgaaagaaagctatatggtatcacaatattccaagaaagtcgatgagactctgaagctaggactcaaacaagctgtgagtttttgtggaataaaccgtttcataaaattaaaacttttttggatgtgtctttgagaggatatatctgattttgtttgatgatttaggtacttgtcgggttgttcttcggaggactaaacgcagctttcacattatctgttattacggttgttagttatggagcatacttaacaatatatggttccatgaccgttggagcactcacttccttcattctttatagcctcacaggttttatttatatacgcgtttcttgatctgcaacttttgaaagaattatttgtactaaactaagatattgttttggcagttggttcatcggtatcttcgttatcgagtttgtacacaactgcaatgaaagctgcaggcgctagtaaacgagtttttcagatcatggaccgtgtttctagcatgtcaagttcaggggataagtgtccagtcgggtgagatttcctctcatactatccttaataaaaatttatatatgaaaagaccagaatcggtttatgtcccggaaaaattatggttccagtaatcctgatggagatgtggaattaaatgatgtctggtttgcttatccttctcgtcctagtcacatgatactcaaggtaacactaaatctctgtttgcttatccttcaacttataaacatttagcatgcttgtagaagtttggtagaacaaatataggcttggttggttgtagttcttttactccagagttacaaatatagcagattcttgaaccatgactaaatatttctgaggatgatgactggattcatacagctgttacaactttaacgattgcttaaaacccaaaatttacagggaatatcgttgaggttgacaccaggctcaaaagttgcactagtaggaccaagcggtggaggaaaagtaagttcagatcatacggttttcgatttggatcttttgggatttaaatagtgaatgttttt

SEQ ID NO: 59498 - DNA, 567 bp, Arabidopsis thaliana landsberg
  unsure (1)..(567): unsure at all n locations
ctaccagatattaatttttcgacttaaagtttgcaagcaactcttttgtccgaatagaaatgtggggtcttatcaaattccccaaagtttagatttgcttaaaaaatctcccaaaaaaagattcgtgggggcaattattctataaactccaaatctttctcctctactcctttattaagtgtgcttctactttttcatttttcaatcaatctttttcctattgtacttctctttttcatcacattatgaaggatatatatatatatatatatatatatatatgtaggaaattgattcgtatatacggataaccttacgaaataaaatctaaaatatacaacaaactgtgtggcctgaaaggtcttacaattttacactaagtgaagtggacagcatgcttttcactaggtttcactcttacgtccccgtgtcggagtaacttactcanattgatgggaacctttgttctctatttgaccactataataaattntcaatagtttttgatatttctcctatntattcgtcacttaagtccgacccctcagaacttatcatgattagttt

SEQ ID NO: 59499 - DNA, 1453 bp, Arabidopsis thaliana landsberg
aactctatagatttagataactagatcttatttcatcagcacacgaacaatatatatcagattattccgttttactatctgattatttagatgttgccatgttgggttatatattctactatttagttaaatgacgtaccttacttctcttatgattatataatcctcacacaaacaaactattttgaaacttttgttttgaattccaatccatccaataattcaaatgtggattaacgttaatattttgaatgttaatgcaataataatacgatgaacctaacaccacgttgacctctaacacctaacatgttgatctctagtgtgccaaaggaaaaaaaaatacacgacaaccaaaagctaaaacaagttatccaaaaaccagtaaacagaattcagaatttaaagttgctaattatatatcggcttagaaataatgtttgtcttggtaacgaagtccgacaaatattcctgaattctgattttctgataagaaattgacaatagatagcataaggtataagaaacagtggtgacattattattacagtaataattgacttagcgacttttggaaatactatagttttgttgctctgacgcaccatgtcaacaacaactcactcacgtgacccctcctcaagttctcacttattcttaaaatctttctaagcttttctatcacattttaccaaacctcctgaaaaaatcgatttcatcctttccctttttcttgttctcatatctaatttcaaattttgaaatatggccaatgacgttagtggcgtttgattacgaattttccatcatttcacatttttatatctcgttgattgtaaacaaatttgcttgcttccatcaaagactctagtatacatacatactattgtgattatgtccttgagatttcgagccaaagtcaaaatactaatctctgaaattaacgaagcgccaagactgcttattattttattgaaacatcagcattggttaactatgattgaaatcacatttgaaaaactccaaatctcccaacaccatgatgagtcattcgactattttaaatttagttggtctcttaaaatattcataataacatttacaatatctaacattactttttttgtttgttcttaaagctgttttggagaggtaaacctctaataattttacagacagaattttggtagaatatagcaaaaaagagggtttgatggtacttttgcactgaaatactgaaatcatagttaggtataagccaaggttgaccacaaaaaaagaattaactataagcccatagcttattcatgggctttgatgttggcccatcaaattattaattctctgtgattatttgccacttttaaccattgcccaattaggcgaaaatattaatgagatcgatttctcacaatagagagggggctaattgatcaaatcaaaaactaaaggg

SEQ ID NO: 59500 - DNA, 1473 bp, Arabidopsis thaliana landsberg
gtgtgcaggaggggggaagtaatcatttaaaccagcaagcagtaaaacactgatgtgtcgtttttacatgaactggtaaaagaacatcctgttttgtccaaaacaaaaaagaccaccctgttattgggactcttagttaaatgagaattccaaatatcaaattaatcaaccagtttggattaataaccggttttaatccaattattgggactgcttgtaaacctcataataaaactaatatgatcttttaaattaataggggttaaagagcgacggaaaatgctttggtcaatataaaattttcccggtttaagcaataacattatgcattgcttgcttgaaattcaaatcgttgatttgtggtgaagaacgatttcgaatatttgtttaaaactttttatttccaagaaaatttaggggagacagcttcatatcccaatttattgcttctactagtaactttccaaacccaaagttaaaaccattttaggattgatcaaaaaaaaaaaaccattttaggaatgcttttaaacctcatagcttcactcgctaatagacaaaatagtaataaaatgtctattgatttaaatacatttggaacaaaaatttgcaaatatttacataatttataaattaatttgtgaaaaagtgttcacgcaaaaaaacaataaaaaaactttgggtgggccttgtaacacatgacgccgccgataaaaggaaatctcacgatcgtatcatctccgaaacaaaaactcgtggaggagatatgcaattgctgacgctaaatccggcggccatttccaggacgccgccgcaagccatagacccttcctcatcctcgagtcttcttcttccttttcctcaggtgatttttgactttttctcctccttcgatttttaatctcgttctttgttcttcacacgcttatttgtttatgtttactcattgtatcgatgtctctgctccgaattcttttggcagattttgagctcccaacgcgctcttggtcttgtagctaggccttgtaatccacttcgacgaggattatctaggtctttatcaagtcgacagcttttccgacgatccaaaggtcagactacgaatatctccgtttagaaagatgtctcgatgttgattcgattactcatctttgccgtcgttattgtatccttatgagcgcatgggcaaattctatgaccaaagatcaaatagttcaaaaattgtccttgaatcttggacttctaatgaattcatagagagtttgatgtagattatactcataagaatattttacaggtaaattatcaacggtctcgtttatcatctgaactttggaagctttgtgattgaattgttttactcaatctcaaaagggctctgacatgacaatttcttcattttcctatggctgtcttctgtttttatttgggttgcattagggaaatattatttcaactctagtttttgttaga

SEQ ID NO: 59501 - DNA, 927 bp, Arabidopsis thaliana landsberg
ggtcgtattatcccctaaactaaactcaaagccttgctaagtttgactattgtatataacacacaaatattatatgttacaattttattttcaaagaacacataattttaaattagtggaaagtatatcttattagcactcacaacaacaacaacaacaacaaaaaaatcaattattcatcaattatccatttaaaaaaattccaagtcagcaacaaaagaattctgccaccacaagttttctcaaaacaaacctaaacaacaagacaagtgtgaaattaaaaaataataagcaccaatacgaactcgccacgtacatacagttgagcagagttgctctctttcggtctcgatttctcaattctcactatacaataccgaccatttaagagcaggcaaaactaatctgtatgatcgatcttgtgctgaagatatcgaaaagatgtcatctttgggtaggattttgtctgtttcctacccaccggatccgtacacttggcggttttcacagtataagctgtcttcttcactagggcgaaatcggagactcagatggcgattcacggcgttggatcctgaatcttcctcactcgactctgaatcctccgccgataaattcgcttccgggtattctgaatttgctttaaactacagagcttgattgtttgcgtattcattgataatgaaaggaagaatcaattttttttgttggattgctcaaggttttgtataatagaagggcctgaaacagtacaggactttgccaaaaatgcaattacaagagattcaagataacattcgaagccgacgaaacaagatcttcttgcacatggaagaggtacttacttactagtacacaattgtttcttaaagtagaaacctttcttatactgttcctttttttttgtggtaggtcacaggtctcagc

SEQ ID NO: 59502 - DNA, 109 bp, Arabidopsis thaliana landsberg
tttgagtaaatggtttgagtaacatttatagtaagtatgatataacacaaacttaaaaaaagcaaatgaggaagttggattttgttcttttactgtaatataatgtctg

SEQ ID NO: 59503 - DNA, 1340 bp, Arabidopsis thaliana landsberg
aaaaaaacaaatgagtttattagctggaccaggttgtgttattggttgaaaacgatgagaaatcaaatgacgttaggtaaattccgttacatgaaagtaagtgacgatagttgattggttatcttgaaaagttaatcaaacgtattttcgttttagtcaatatgaccattaattacaattgacagcatgtataaactcatttttggataaactataagatatataattgagtctagtctaagaaaagcgagtttgttgtaagttttattctaaaaatttggtcatctccaaaacaagtgagtgaaacactggctagtcgtaactggtaagataaaaaactgtgatattacatcaacaagtttcactatggagtgagacatcttcaagcaataatcgagaggatattaacatcatcagttaccacctcaattttcccatgcattaaatactgacgtggcgccaagtaggacttcacacgtgtggggcatgaactttgggatcgcactgtgggacaaatatttgtgttcccgaggcttacacatggaactgccgacttggattcttttctttctctcgacttacatttgtattaaaagagtatctatcttttcttttcttttcctctccctcttttgatttttttccctcacatatcacataatactccatattactaaaacacatgaaattataaagagaataacaattgctaatccaattatggaaatttatcaatagctaaaaaaattagaaactgttgtaagtgagtactaatatttaaaccaaaaaagaaaagaataaaaaagtaagtgctcatatgattctctcatatggtacaaattgctaaaatcttattggtagcagtaaaacagtgaaaaggtcaaatgatgatacttaaagctgattaaatagttaaaccccaaacacattcgtgattaaagctgatacaatagtcaaaactgatctcatccgtgaaaactttaattatttttggtaaatactagtaaaatcgaagctcatttagttattagtattttttttctgtcttcaccatgttttaatttagttattatgcattttaccatgttacttctacccacattggaagaaactttaaaatttctagttgataggtgaaattaatttccaatttatatggttaaattggtatgactagaaccggtatatatatactcaacaaaattaatatccggtttgatgaaataaataaaatatacacaatctgttacaatgttcatatcttttgtctccttttaatggcagtgatataaatgatggatctggtaaaaattaaatgctttttctgacagacagacgcc

SEQ ID NO: 59504 - DNA, 1348 bp, Arabidopsis thaliana landsberg
tagatataattaatatacaatttataatcttaattgtttaaataatataacattttttttttttttataaaataataaaataaaataaatgggaaaactataaaaattaatgaataaccagttcatttgatccaccaacttctcaccaataatgacagctttaatcaaacaacctcctttttgaaaataaactattgtgattagagccgtgacaaaatctttgtataaaataaggcaatggtcttgacttttggaccccatccattacgaacaatatcagggacccaacatttattctaattagtgatatgaataaaggttttgacagtgtattgattattctgaaaagaatatgagtaaagttgtttttttgttcatttggtttcattttataataatctatcgtgtggtgatatttttatataatgaaaagagccacaaattttttaaaccgcttatggtcaaaagtttttaagcaagactcgagaatttaaaaattattatgaacaaagattcgttatcacttataaacaagcaagcacaacagtaagattcttgtttctatgtgtacacactacacattcataaacacgaaataaacaacatttaaattacacacatttacacttcaaatcataagttaaaaacacaagcatcccacacattcttacaacaaaaacataactctcagtttgttctgaccaaaaagactctttagcaggcaaaagcagtctctggttccaaatttcggttcatttctttatggtttatctggtcagcattccgtgtggtttcatcatcatggtcttctttagagatcactagagtctttcgagtttcatgccgcctcgaagctccttttgctctgtttccttctttcgggttcctccgccctagttttggcgactttgctcgagttggaagaggctgtgtatgtacaccattatagataagcataatataacattaacaactcgaagcgggttttaaagtttacgggtaatttttctttttgtgaatgttgtagacaaccttgtgtgttaccttcttaagttcaacctttgggggaggcccttcatgataaaattttggcattgggtttgctttaaacctcaaactttttcttaattgtcttaaagctgcttcggttgcttcctttagatgttgagtaccgggcatacaaagagaaggagaacaatatgtcaaaaaaacataggaaaaaaattgtagctacacaaagtataggaaatgcatgatcatcatgccaagtaactattgtacatgtacatatgtgattgctaatgagcattttatagactcagcatatgcaaaaaagatacacttgtct

SEQ ID NO: 59505 - DNA, 195 bp, Arabidopsis thaliana landsberg
attgtgcacgagtactgttagaccgatcaaaagttgactgatgacaatggccttagtgcttattgaaacaaaaaaaactgcgtttaaaaatggagatatgatgaagggttgctccaaattgctgcgaccactatttacatgatgagggcccatattaggttccagatgtgaagagccaatgagagaatgagagct

SEQ ID NO: 59506 - DNA, 1179 bp, Arabidopsis thaliana landsberg
gtcgagaaatttttgttattgattgttttgttaattgataactaaaaattattataaattttacataaaaaaagttttgtcggaaataaaacaaataaatttaattatttaaaagcattatcgagaatagagtgagttaataatatgtgttactcaactatggatcattttccatttaacttaagagttaatagtcgacgataaaatgaaagatattaaaaacatatctataaatttggaaatattaattacgtaatatgtatgtgaaattatatagttgtcttcaaaattgtcagatacaaagaatatagtttattcatcaaaaaaaaatcgaaaatatagagaatcacaatgtttaattagtaatacaattataatgtcagatttttaaaaagatgattgcactaaattcattacaaatttgacactaattttttttttaaaagtatagttcaacaaacacaagaaatagttcactgaacaaaaaatcaaaaacaaaaacaaatattggtgtttataatgtactctctaagaaattgaaatggctatttccaaattatttgtaattagtagtttcagttttatattacttgatatatatctgaatataattcttttcataatatgataacatatttgagatttttagacacatgtcatatctaatctgataaattctaccatcaaatttaatatctaagcaattatagtattatcatataccaaatactgtaatctctcatagtcaaatatattcaaaatgactcatcaattaattccatatattaaaattcatagtaaagacagaattatatgaccgtacatcgtctctatagtctctgccaagtgccaatttaccatttgaagaagacacgtgggtcataatctaggagacgttatatatggttacgttttttaccctaatttgtttcaatattatgatgatctgtattcaaaccccattcttcttgatgtgcatcactttaattaaatagatccaaaatagcaaacaaaatctagcacaaataaataccatttaccaacggctaacaaatggtgaaaatatatgaagattccatattttatcgtttttggtatatctacatacgtgttcacattttcaagattgctaaaaacttctcactgatacacatctccattttcggatatgagtagatt

SEQ ID NO: 59507 - DNA, 534 bp, Arabidopsis thaliana landsberg
tggggatatggggttattctcaagtaaagtctcggaaaaactctgataatgactggtggctggttaataatgtaaagaggtttaaattactttctacgccatttcttgttatttttgtgcaataaaaaataatggtccaaaacaattgaaatttctagggtaaagcatgatagaggaatactacctgctataatttttgtagtacattttgaagtggtcgagtagtattcacaatataagtccaacaaaatggtatgcaagggtttgaatagttataagtaatctagtttcacttgtgacttagtctgaaatgatttagaaaataattactgttgtgatagctagggtttgaacaaaatccatctcactaagagatagctaacttttaaaagaaaagggggctaaatgaaggatattgcttagtgtgtctacaccaatagatgtaaggtaactagaaatacatggtaatgtaacttgtgttaagttatgtgggttatttaagtgttagctaggaccaaccaagaaaagacagac

SEQ ID NO: 59508 - DNA, 1510 bp, Arabidopsis thaliana landsberg
taaggctgttaagtatctacaagcagttttcgcaattaaagatgctattagtaagagggaatctcgggagataagtgctttatttggcatcacagtcgcccaggtattgttcttctacatgatatgtactcttttttgccatgcttttagaattccatgtcagtttagatctgtcatgttgaggtactcatgagactttggtttgtctctttattattttcttcaatggcaggttcgagaattttttgttactcaaaagacaagagtgaggaaacaggtgaggctttcaagggagaaagtagttatgtccaatacgcatgctttacaagatgatggtgttccggaaaataacaatgccacaaatcatgttgaacccgttcccttgaactctatacatccggaggcatgttctataagctggggtgaaggtgaaacagtggcacttattccacctgaagatattccacctgacatcagcgattcagacaaatactttgttgagaatatattttctctgctgcgtaaagaggaaacattttcaggccaggtgaaactaatggagtggatcatgcagatacaagatgcttctgtgctgatctggtactagttgggggttctctttcacccactgtcttattttattttattgttattatattcccgtcttgacagtcattttctatatgtgccacaggtttttatcaaaaggaggggttttgatacttacaacatggttaagtcaagctgctagtgaagagcaaacaagtgtcttacttcttatcctgaaggtacgagattaatttacttgcagctggatggctgtaaaaatatgcagattgttttattatggataattgacatttaacacgcaggttctttgtcatttacctctccacaaagcatctcctgaaaatatgtctgccatattacaaagcgttaatggacttcgtttctataggatatcaggtgtaatttctgaaaaacctaaatgctgcgtagctttcatcaatgccaaagttcttgttgtgatttattcgatttcatcatctgatttgaagatcagacatatcaaacagggcaaaaggtttgttatcaaggtggaccaagttatttgcgaaaatccaagctatgaagaaacaaaatcgtaacagttcgcaaattgattcgaagagtcaattgcttctgaaacagaggcaagttttggtttatgtgtcgaataatacttattttacctctcattttgttgtttagtgacattttactcatagacttctgtcttgttatgcagtattgctgaaatcatgggtgatagtagcaatcctgtaagtggtgcaaaacatgaatttatttctattacgtgcatcagttccttaaaaccgtttttcgtgtcgtaacaggaagatattcttagtctctcaaatggaaagtcagagaatgtcaggtatcagtttgattgttaaattccatctagaacaggttcccttttgatagttaggtggtttcataataa

SEQ ID NO: 59509 - DNA, 1034 bp, Arabidopsis thaliana landsberg
aaactttctaaattagttggaagtatgatacacaagtatgatacagaactattgaagcctgtttttttttcttttttcggaaattattcaacatccatccaataaattagttaacgtgtgatgtggggtgcaaaaggacaaacaagaaagcgttaagaaaagcataatctttacaatgctctctccaaaagatgagcctataaaagtaaaaagaataataataaaattgctatcaaaaaaaaagaaaaaacgtttgaatgatttactaatagacaaaccacaaaatcgaatttttgtactttttaaacaacacctaaatacttttacttccatacctatggttaccaaaaaggaaggatcccagttttgttttacacgattgaatataaactaagatagttaagtaaggctgtaaaccaaataaactattttatacacaaacttgaacctactaatggttcatgtaaaactaaataactatttttttacactatgaatcaagtcttaaaccaattataaatgaactacattttgatgtaaaaaaaaaaaaagaactacattttgattgaaataaagaagagtattggtttattaatataggaaaaaactaaaccaatacacttatgttaactaagtattttctttgattttataagtcacacagcatattcaaatcgtggattagttctagacgataatacaataaataaattactaataagtttagcctatttgagtataaaagatgaagactcaaatattcatgatacattatttgaaatttgttggtgcggacgatcatagtgaattgaatttagtgtatgatggtaactttctttttggggtcaaagttacgtgactttgcttgcgtctgattttgactgtcagaaaatatataataattggtgtcacggaagcaaatcttttgccaccctactcacacatcatacaatttaatttctcattttttataatcaaaaacagaaaaacattttagtatttttcaaaatccacaaccaaacagattctgaact

SEQ ID NO: 59510 - DNA, 1642 bp, Arabidopsis thaliana landsberg
acaatggctcgcacttcttcgatccccttcttagttcctctcgtgttcttctttctctttccccaacatctcttcagcttcaactctgcgtctcagttcctcattgtatagcttccttccatttagaatgatgattagcgcgtcgtccctctcttgtttagtcttctccaccattttcctctgcttcgctaatgcttctttaccttctttccttagcttcgcctcttcgttgtacatggcctcgtactctcttgccttttaagtaaaaggaaacaagtctaagcaaaaacacattttcaatgtatgagattatgaatttgtgcaggtgttttacactgcgaatggcctcaacggctgtattttcagctttaaaccgcctgacacattcttcgtaagcttcccttttcgattcctcaacttccataagtgcttgcttaagctgtctatacagttgatcattcctgtcgctttcctgcaacataacagagacacaggaatatattggtttttgcacaaaccattcgattatgcatctaattcacaataccaacaatatttagaacatacagattgatcctctgatgcatttggctccaacatatctctgtctctccttgtgtcaatgtaagctacaattgcagagactaattctgcagagcatttcggtgaagcagaggaatagagcttcggtttggattgtccagcttcggattctgtttcacccatacagtcttcaagattggcttccctgtgtatttaatacacagagacaatcaggtaatttcttcaaagacaagacacatataagtaaagagagtattcaaaattctcactttgtgtagatgagatgtccatcacacataaacataacctcgcacgagctgggcgcgtgttggtaaacatactttgcctttcttgatttgagatcgaacatcttcctgccattttcagcaagtcaacgagtgaatgtcttgatgagatttaaagttttcctaggtttccaatacgtactctgaataatgatgatctgatgcagctcccatgacgagcttcttgattttgctctcatggatgagttctagtatcccctgcttcacatcgttcatctctatacatgatatgtaaatatcgtcctcattcacctgcgatcataatgaattcaatatagggtattataccaaaccatttgaaagcaagaaaagacagaatttaacagtataagaggacaacagattaatataccccttcttgttgacaaaaatcaaaataatcatgtaatgtctcgtacatgatagcctccaattcttcaagcttgcgagctaaataatcaaacataaaataacttatcaaatgcgacgcatgtaatcacttttctagcctttaaaaacacattagaaaatggcaaacatctagccacggaaaatcatataaatctcgagcttttactcaaatggggcttgaagatcatgaagcttaccagccggagaagctgtttttggctgataaacatggaggatgcagactttcttagccccgaggttcctcaaagcccaaagaagagttgatctgctctctctgacatcactcttcactgcaacatgaacaacatcattgcccatggccatgagttccgccattgatg

SEQ ID NO: 59511 - DNA, 1598 bp, Arabidopsis thaliana landsberg
ttggtcgagagagataagaaaatggttcacgaagaagacacatgattttcctcatttactttgtttcgtatcaataattaaagttagttgcaagacaagaggtcgttcttcatgatacattttggttaatgaaatgtctagcatattttaaaatttcaaatggtttagttaagacaatattaaaataaattatggatcaaaatgattccctttgtttttttttgttgcataggcttgatgattgtcgttggttcttaccacgtgggctttcgtagggcatgccaagaaaagtggaccaaaagatcataaaagaaaaaagataaaagataaaaggagaagaagaaaaaaagataaagaaaaaggttaaaaaaaagagaaaaattaaaaacacattggaagatgttatagatttataatgcacatcatcaattggataaaacattaaaacgaaactgtaaccgaatattcgaggattctttactgcatgcatatataatttggtggtttcatgaagcactttcttcagatacctggtaggatttgcagctatgcaaaattatacgtttacaaatccaagctagaacatataaaatattcatttacatggtacattcttttctttgggtaccatggattgatcaagaacaaaaagttttaggcacatgtatgaagattatcattaaagcatatctatatcaagctacatatttgaagattaccatctcataaactactaacacggattaaagaaagtaactaaagatacattgtgactataaattttgatttgagtctcatattttgtagtgtgtaaaacttttctccatcaacattttgaagataatgtccatcaattttgtatagaatggaacttcttttcaataaatattcgtttgagtgttatttcctttgatatgaataataaaaatgtttttaaaaaaaaacttcaatctgaaaaatcaattgatagttaataaaaagaaggtcttgcgaaaaacttatttgatatgtctattgccaaatgttttcaatatgatgtgtctcaaattgactcatcgatctttagtttagtcctatttcttggaccatatagattctttggatttgttggactatgatatgaataaaagtatactaattagttcccttaagttatggaattaaaaacacattacaatattagagatcaatttaccccatacttacaatattcagaatttttattattatttttcattttaggacttatatcatccatcatgttaatccagtggtcaacaaaaaaataaattttaatcgattagattcattcaaattatcgattgaactatcatcatttctaaacaaatttgaccaatggctatagacataactcataagcatccaaaacataggctctattcaaaacaacaccttcttgcacaaggaggtaataatgaggtccacaacaatgaaaaaaggaaaaagagaaagacatttagcctttctaggagtcaatgctttgccttttttttctttcctcatcttctcatgtttttctcaactttagctagtactttgtgaaatttctatttgatttgattacttctatacactaa

SEQ ID NO: 59512 - DNA, 472 bp, Arabidopsis thaliana landsberg
ctctttacagagcaacgaatagacagtttgtcgcggtttgtgctgcaccatcaggttcacgctttataattatatcctcttcttttttgttgttttagcttcttttttttttttttttgtgaacatgtgtttctctttgcagatgtagagacttcttccaaggatgaatctgttttgattacgaaagtggagactgaaaccagcaatgaggttaaggtatgccgttgtttctgcgccaaagaaacatcatactggtgaaatgatctaattatgatgactttgatgcttttccatcttatgttctctattggcttgagcaggtgcatgtacaagtgtcaggagagaagactcaaactgtattcaatcatgtttttgagaaaatggatgctgcagctaagccaatcccggggttccgaagagttaaaggaggtttgactttacaaatactgtttaagctatgggaagctatgta

SEQ ID NO: 59513 - DNA, 985 bp, Arabidopsis thaliana landsberg
cgggtgtatggaatgtttcggtttcataataggatgaaacctttgttttaagacaactgagtacaacggcctaattttttcatactagtatatgtatttaaattgtaaattacacaggctttggtttttgcaagaataaactgggggaaagttgacattaagacattaactggaaacttgacattaagacattaagtggaaacattgtgactaagacattacatggaaacattgtgacttgcatctggattagattcataaggcagaaaatagtgacttacacatggaagaaacaaacataagaaccttatgatcatgagactacaaatatatagttaagagtttctctcttaagtgaggtctgtaaactcctacgcgtagttcaaagcgaagcattgtgggcaaacatcgacatcagtaaagtggaccatatggcaagcagggatcccattcaagcgcaagtaccgacggtaggcatgatttcccggtgttcccatatctttaatctgagttacaacctgctctgcaatctcaagtgcttgtgggaaatgtggaaccttctgtagaaatgtcccaaggacccggtcacctacatcataattgccgcaacagataaggaaaatactgaaagcaaacctagcgtataggcaatcttgtgccgctgtccccagcatgtcaagcgattctgttgaagggcctagctgtgcagcacgccctaaaccttcaacatatgtagcagtcttgtttccagctgccagacacctaagtaggaaagggcggtatggagataatgcattggttaaggggctaacaaatataaactcatccaggcaaacctcagctaagacttcgttggagaaggcaatgcttagccactgaggtccgacggcaatgaaagggcctcgttcacgaaacccatcatgcccaacgcgatccacaatgtcagtcaaaataggaatgagaatgtaagacatgggagtaaagt

SEQ ID NO: 59514 - DNA, 1388 bp, Arabidopsis thaliana landsberg
agaagtccaggtaatagcttaacctgaatccaaagggcaaggttaggccgaccagatgtaatatcgacgttcatcacatcacttaagataagccgaaatctctctatgaaaggagcatatgcaacatcaacctatagaaataaacaccattttttttctcagcagcaagagttgatatgggtatggcaaattgaatatagaaatataatcgacaataccaaactaaattgaccaagaaagaaaggcccttcattgaatttggaaagagcctgctcgatgtaatcaaatgcaacatctgaaaaaatgaaagacaagattcatacacatgccaacataatgtatctgcaaacacagaagtaagataacaacttcatcttctaatcacctgctgcattagtgtcagtgccgtttaatgtggatcttacagccttggagaaggagtcagtgtaagagagtaactcatcagctacaacttgcttctctaaacactgttattattccatccatggatatctctcttctaagtataggttcacttaatgtgttaaaattgagctcaataaatcaaagatgtcatagatactcacatcgggtgtaagcgaaggcccttcaaaattagtgtcaatgtacttaatcagatcaaggctctctcccaatactcggttattgtgctctaatgcaggcacctgcatataacagagaacaaaagccataaaactctaaatcctttcacacatatatatgcattaaaatagaaaagttcacaccttgttagccgagtaaactttctccttataccaagcaggcctgtttttaagatcgatcggtacaagttctatcttgttttgcagaccctacacaaacaagcaacataaagaaattgatatagatatatagaaacatcgataagaagaatgattcaaatttgaaaccttgtagttgcgagcaatccacgcacgctgagcaaatgggcaagtgtaagatatgtacaaccttaaaatcacacaaaccaaaagttgttcatcaacaacttctctaatatctatccagacatgaaacaaataaaaaaagcatttttagaaaaccgaaaccttgttgatccatcgaatacttgaactggttctgaagaagaatcaagctccggtactcgactgcaaaataataacctttcaatacacaactaaacttgtaatcactcttcatagaaggaaaaacatatttgattgattaccttgactctacaacagccaatattggttcggttcttcgggatttacaccaccgtctcccggagcctggtcggagaattttccgatcaagatagagagaagatgatgaggaagagagagagacatctctcgaggataacgcaagcgttggatgtaaga

SEQ ID NO: 59515 - DNA, 771 bp, Arabidopsis thaliana landsberg
ttttaaacacataaaaatctgtctatgaagtgtatgaaccaagcgttcctgtttcaattttttcaacaatatgactagtatgtgagagcataattgctatatgaggctacaaccataagctgaaaggagcctcgaacaagattcagaaacataggaaagttatacactttctcaattaatttgcagacacaagaaaatgaacaagactgtagtgtgttttcattgtcttcaaaagcattccaaaagccagcttattgccaaatgctgtaatgagaatacacagctaatttatgatattctgtttatgtgtaagatgggcctcaaagggcctactgtatgaaagtatactaaattggttctccactgaatatcataaataaaaaagcatttgctttccagatcatgtctaccaaatagtttgtagattagcacattgctgtgttttgtacgatcgaatatttctatcttaccagctcgattgaataatttagtgtaattcaaagaataaggaatttgctagattaggaaaacaatatttggaaaatgggaatacttgaagatcttacaaccaaatatcatatctttcccattttgttaagtgtttttctttccattttactaaaatatcattttacatttttgtctttgaaaacaataattggaatttatcgagtctattgtgtgggtcaaggtcatgatttactttgacaagaagaagtcgtttcaatttcaaaacacccaccacacacgctcgacggcgagagggtcttt

SEQ ID NO: 59516 - DNA, 1736 bp, Arabidopsis thaliana landsberg
acggtccatctgaaatgactatattacccctatatgttcctttaactcgtttgctcgtggtttaattttcaatgtgttggttcgatctcagccgttggatacaaaccttgtgggaccccctctattcttcttctttgtttgggaaccttatttaataaaaattaatttttttttctcttattgcattttaatttaaacaaatgaaattatgctgcctaaaaaagctattatatgttaattaatcttaatagagttaatactgaacttttcaattgtataatgtcatcttaatgtagtatttattttttcataattaataactcaacatacttttctaaaataatttatttctagcacatagttttagcactaaattcaattaaaaatagtgataaacttatgatttaatatgaatgtaaagtgattataatttcttaaatgttatctctagttatcaacatattctgatctttttatatataagtctattagtgttgtaaattgttttttttttttggccaaattaaggtttgttaacatttaatatgcaatcacacatgacacacctattttgaaagcagtttattcgcgtatctaaatgacggtgcgtgggtccttttcttaattattatatcttctcactaaaattctacagatttccaactatattatgctgaatgaataaaatgtatttattgactcctgatctctataaacaaattgatggtatcattaaaagatacttaatgttgatccaaattgtaactaatgctgtaaattaattaagacttactgtataactttttttatgaaaataattatgtctcattgacatataagctcaattttttaccaagatgttattatgagaacaaacagaatataatgaaacatgtatttgattagagatgaaattatctaagacaagtttgtagtctattacatcattattatattttattcttctacaaatgaatctactatttgataaacgactctaattttgtttagcatttgaattataccccattttacaattgactccacaacaaatagttttattcacaatacaaaaaactacgttgaaacttgaaagtagaaactaaactatttcttctatgagacattataaattcagaatttaggggaaatataaatatattattattaagttaaagagagagaaagaaaagaaattgatgggtgttttcgtcatttagtgtggagtaaaggataaaaaggaaagcgtgagctacacggtattttatttaatgagaaaggtaaaaaatactgatttataaagattaagggagcttttttttttaataaaatagagcctcatactaaaatgttcttcgtacgctaatctgcggtttggaccagtttaattctgctgtagggcccacgctgaatccttccttaatttgtagctgcttaatgaccaatactgttgtactcagtacgattgattaagaatgcacactaattgcaaaattcaggccaccagtttgttttcttttacgtgaattttagtttagtttttataatactttcatataataagtttatgtttatattagaaaacgttatgaaatttaacatgcaagaaattagattgtaagttaaattatttttgtgaaaggaacttaactcaaataatcatgaactataatattttggatttctatccttcagttcgaatctatatctaaatcatgagttcaataagttcgctt

SEQ ID NO: 59517 - DNA, 263 bp, Arabidopsis thaliana landsberg
  unsure (1)..(263): unsure at all n locations
ccccccccccccctcttttccctcccccccccctttttccttcccccccctcccccccccccccccccttccccccttttccccctccccnccccccccccccttttcttccccccccccccccccccccttttgccccccctcctctccccccccccccccctccccccccctcttttcccccccctccccttcccccccccccgccctcccccctttcctctcccccccttttccccctcccccccccccccctttccccc

SEQ ID NO: 59518 - DNA, 275 bp, Arabidopsis thaliana landsberg
ctttctacaggggccgttcgggtgctctatgaacacactccatgtgtatgcaacctccaacatccacataacccttgctacaagcactagctgctcctcacttcgaaacagccggtcacgactatcacaccctacaccttatccagcagccgacaagggtactctcttgctttacgaccaagccttgctctggaaccgggcactcatgcgtttacccttactcatacatatctaataccgctgcactcttgaaagactatccctgctgatatagg

SEQ ID NO: 59519 - DNA, 840 bp, Arabidopsis thaliana landsberg
ggtagcgtggttaagtcctcgaattatgtaagtaaaaatcttagatcatacatgatatgcataccatgtattagtttttaaaaattgttcttttgacatttttttatgtggtttcatgcagagatgattttagaaactttgccagattttgtttccaagagtttggagacaaggtcagtatgtggacaaccttcaacgagccatatgtttatagtgtttcgggttatgatgcgggcaataaggcaattggtcgatgttcaaaatgggtaaacagtttgtgtatagctggtgattcgggcacagaaccttatttagtctctcacaaccttcttcttgctcacgctgctgccgttgaagagttcaggaaatgtgacaaggtaaataggaataactatgttatcctaaaatatatataattactttcaatttcaagagtttttaacacaacacaaaaagaaaatgatttggttcgtgtcattttatctattagaaaggatttataagcaaaaaagtaacattttgacttatgatatttttgaaacagatttcacaagatgctaagataggcatagtgttgtccccttattggtttgagccttttgacattgattccgaatctgataaagaagcagttgaacgagcactcgttttcaatattggttggtaagttgtgatatgtatgatccatttcttgttattaaatcaatatctaaagttagaaaaaaaattattatctaatcttctttatcttacaataatatctaggcatctcagccctttagtctttggagactaccctgagacgattaagacaacagctgcaaatagattgccttcttt

SEQ ID NO: 59520 - DNA, 1542 bp, Arabidopsis thaliana landsberg
cccccccaaagttttttttgattatcccaaaatttttatttttattttttgggaataaccaaaaggaatccaacgtaaagggattataaaaataactaagtactgaaaattgaggtggaaacagcacaatcattacttcaggggttacttttgataaatattgcagtttagttgaaaataaatgtttcttcagtgggaaaaaacgactcgcgagtccagtgagaaaaaaagaataacaatccgacgagaaagaggaaagatcaaatcatctaagtgctggtgccttgattctgcagttctccattttaatccaacaaaaaaagaagctgaatcgacggtataggtgaatacttcttcacgactttttcaaacactcagaaacttctcttcctttcacattgatttattcctaattttagtgcgattttttccttttttttctcagaagtttatcaatcttgttaggtagatatttactactagtttgttttttctactaatttgctgaagaaagtgttaatctttggttggtttaaggtataaatttgcttacatctactcaaatcagctaacttttattttggtttggtagcttaaagattcagtcaaaaaaaactttaatctttgttttcctgcaaaaagcaaaagtgtttctgtaataaaacacctttttgcagagaatgttaaaagattctctagttttaggctttatgtaaaaacgatttttttgctgggtgttctgtttttggatctgtgtttcttttttgggaagatccacccaatgaaaccaaatctcacattacaaaatgacaagaaattgtctcttcttcccaataattccaaaactttgatttagtaaaaaataaaataaaataactgggtgacttaacaaccagaaagattatgtgtaagatattggtgctttctttgcttgtaatagggtttatctttggtgatttgatgaatcacattgacggcaacttcttttctaattacacttctaaatattttatatatttggaattgttccaaatcattacaatattcatttgttgtctctttgctttcgtttggtggtaataggagtctctttgaagctaaatgtgtaaatattattcttatgtttttttcgtacacttgcttaagctttctttcttccctgagtttggttgtctatatgcttatgataagtttttttttttccctctgttgcttctttctcacactttccattggtcttcatgtactatttgtcagattcttcaaagaagcaatcataacgcaattgattatatccccaaaagaaaaggtttttaaactccaaaaatgcagactccaaaatcaaggtgatgatcacaactctaactttgtgttcttgttgtgaatgttgttggagttattgatctgtttcaaagtgattgtgattgtgtgtgataggccaggatcattggagctgccacaaaagaagtctcctttaccaggtcccaaagttgttaggagactcaaaccaagcggagcagaatccgatccaaaaaccaagac

SEQ ID NO: 59521 - DNA, 1252 bp, Arabidopsis thaliana landsberg
aaggcaaggactgatctgcgtacggcttaaaagataacacgaaagagctgctaactatcaatcagtcaaagcaatccatctagtctgctacttctgagacgtgtaccttcttaagaagtgaatccacagagaagaaatgaatatcagcagcaacggtgacagcgagaatcgaatcatccgctgagagagacaatatacgaacgtccccaacaggaacatcgacgaggctcaaatcctggataaaaaccttatcaccgttcccgttactgttcttcgatgcagaaattacatcattagtcctcccaacaaaaaaccctaatattccacacaaaacggtcacagtaaataaacagcacagagcaaaaacctctaccatcgccgattacgaaaactaaccggaggaatgtgcgacaaagaggacggcgtggcgttctgagatagcgagaggctgtgacggagggttttcgagatcgtattgagcatcatcttctttgatactgataggttcgccgattctctcgaagtagtaatcgttcgttgagatgcgatctccttccgtatcttcttcaatctcaactctgctcatctttcaaactcttctcaaggttgtttcaatggctgaatccgaaggattttgagcgggaagtagagaggacgaaactcgagagtgagtctctctgattacaagtgccggtgataccacactggtccgatgagccgacgacggttcatggtttgttaatttaaatttatatgggccgtaatgtgttaatggcccaattggcccttatctgacacaccagaccggttcttttagctgaaccagattcagcgaccggttctcttactaaaccagaccgacatgtattgtgatatatatatatagtaatttattttgaaattcagactctatttacaatatttctgccgcacaagatgtgattcgcttataccaaaggtctcgaaggaacataaatatcgtgaggcttgatcgtcgttctccttctttccgatctcaactctttttctttgtctctttttctttgtctttttggttttatatttcttgtttagttgatcaatcgtgtgatcttgtttagttgataaactaactctatcgtatctccaaatgaacatggtaataagaaatgagctcaaattgaattccagtagttcaagagttaagaaatagcaaacgactttcgggggatttgggggtgaggatttaaaaacaaaagagtttttttttccc

SEQ ID NO: 59522 - DNA, 1526 bp, Arabidopsis thaliana landsberg
  unsure (1)..(1526): unsure at all n locations
gtgtatatttttctttgcttcttctcactatatatcctatactataacttgaaaagttctggcttattgtattaatgatattgactagcattcgttgcaacaacttattatataatgtggaacaaccattgccattgtcaatcacaaaatctaatttgagttgcagcagctacattcatcttcctcttctccacctgaacatactgaannnnnnnnnnnnnnnnnnnnnnnnagatataagaatctagggtgtgagcaatttgtgccggcataggaagtagcataactccatggagaaaggtttttccttactgggagacattagcttcagaaacttggtagaaaattgcttcatatagtcacaaaatttatataacaaatttgctacgactagctatgaaaaagattttgttctactttagaaagtttcaaaatgtttatgacaaagtatttaaatttttgaaaatacgattcttgttggcgccaatttgttagaaaaaagcaagttctataaatcgtgtaccaaatagttgataccaaaattaatagattttttcatattaatatcatacgttgtgtcaaacattcaaccctaaaaatcaaacccaaaagcaaatattcaacaaagttttgaaagcttatgaacacatttaccagtttgattagctttctttaagctaaataaagcccgaattgataagaaagaaaagaggttgtccatcagagaattttcatcacgaaatggcaccagtattgtctttattatcattgttatcttgctggttgttctcattgcagacttggttcggttcggaatgatggatgtgacttcagccaatgaagatcattagatccaactctaactttttggtagaattgtcagcattgttgttgaagcaagtggccgagatatataagtttatgcgccttgtgtgggctgagcagagcggaagttggtagttgctacttccggcatatactggttcatgtactcgaccaaagtggccagctactgctgcaaggtagaaacttttcgttctaaggaaattttaaatattacatcaacatagtttttctctttgctcatacatcgaatgatgttcttcaaaaccaaagatccttcattttcttagccaatacgtaatgcaaaaaacagacaatttacaatacattttcataaactttcatttaattacaatatgtattcataaacttgactaattgggatataaaataggagacaaagaaaatcagtattgaaaacaaatgattctcatactaagtatctacccaagttcattcctttataagtatacccaagttcattcaaagaacacaagaaaacataactcttgaccgtttatagaaaccatagaacatacatttcatcctcatcaagttgtgtgacctatgagcattcactgggtgtcccattagaagcttgtgacctatctgcctttgaatttctacattaaatatttgtgcccttctatcacataaatttcatcacgtctacgatgagtctt

SEQ ID NO: 59523 - DNA, 786 bp, Arabidopsis thaliana landsberg
ctgacttttcatccgtgatgcaacattggattcacgtttaagagtattttggtgtcaacaatataaggaaagtgactgtttatggaggccacgaatttctcagctgttgaaggaagaggacccacaaatttgctgtatacatgtgcaatatctgtatcagatgaacaagatgttagagttaggcatctttaagttacaaaaccttcacaaacgtatagagaagcaacttgctagtttaccgaggaaacaattgtgaccaacgatcaactttttctctgaagcaagcagatcaatcacttgacggaacccgattgcagattgtatttttctttctgccaatctcttgcgttcgtcctttgcctccttctgtgaaaagagacagtaatggtatctaaatcaaagaaggcctttaagtagaagaatcagttactacactatagctacatcatctctcgagcctgaactttgctatcatcaaataattcacttcaacactctcagttaaaatccaaaggacatgtaatgtttagtaacaaatctttccagcaacgtaaatgctaccttaccatgaggttttccttgtcggaatctgaatcagtatacacaacaaagtctcgtgaagaagaacttttatcatttgaatgtatgtacacaagatctccaaaatgctttcttaaaacctacaaagccaaatccaaaaccaactgattaaaaacaaatagcctgaagaaaagatgtaaaacagagagcattaccgagttaagaactctgagctgatgagaagtg

SEQ ID NO: 59524 - DNA, 1032 bp, Arabidopsis thaliana landsberg
cttaacaaatagatacgggcgatagagtacgccaaagacataataaacgctagataatgacaaaatcattgagaaacagcttcaactgctctccttcacaaaaccaaaccaactatatgtccttttcttttcgtgcagtaatggcaaagaagaagaagtcgtcattttaaagaaatatcaccggacgatgtattgagactttttcaatgtctttagatcattttctcacgtcttttacctacgttcagaaaatacagatcactaataaaatctcttcatttcataggcccaagcatcaaattatgattcggcccaaggttaagcccagcaaaatggggaataggagttcgaaaacaggcctaatcccatcttaacatgtacgtctacactctactacactaattgtagtgcgttaacggagttcacagtggacgagaggtgtaacacaaactaagcagaagaaagtagatttatatagatatgaaattacataacacaaacatctcagaacataaaaagagccagatgctcattacacactcatgtaagtaaacaacacacatcgcaggacgtacatacataaaaagcacacatacaacgaccgaatgcgactgcgttacaaaccctcattatttttatttaatatgtatacacgattgttcgaagcttaacggccaccaccgggaagcttttccttgatcttgtccatcatccccttcttctcgtggtgctcaccaccgtagccaccagcatcgtaaccggatcccatgccgcccatcgcttgagcttgaccagactgatcatgatgacctggcaacttctccttgatcttttgtgttattcccttcttcctcctccctccttgtccatcatcctcctgttatacatataacattcgaattacgcttcacatactaaactaaaacatcataaatcttctttatacaccttgatacgtaccgagctagacctggatccatatccggagcggtgaagcattctccctaagccacaccactttccttgtggagt

SEQ ID NO: 59525 - DNA, 126 bp, Arabidopsis thaliana landsberg
  unsure (1)..(126): unsure at all n locations
tcccccgggctgcagggggggggaatgactaaataaatacatccccnctacccgcatagtgtgggggttattaatatgtcaataggaccatctcaaatttggttccttgatatgaacaccaattac

SEQ ID NO: 59526 - DNA, 1503 bp, Arabidopsis thaliana landsberg
catatctctttcaaaatctattgcaatgtgcatgatttttttaaagagactttagttttttctttttttcaaaaactttctttagtaaaaaatatgatattataaaattaattcaaaataagtgttataaaaaaaagttagctatatactgcaaaaaatgcaattcctgagattccctagttatatgattatattcttgacttctaaagtttattataaaagttggaccccccactcacaaatataagatctgctccacaaccaaaaagggttggttaccatcaagtaaagtattcttcgtacgaaaaacattgtaatcattgtatacaccctcccttaataattctatatactattgtattatattaatttggcttctagaaccgttttatgatttttatgaccgtaagaaagcactccaagatatatacaaggatttcacgttttctaccttcattagtcttgtatctgactgattaagtatgcatatggtgtttgtgacgtttcaaaattatgttctgtatttagtattatagatgaatattaactattggtaatgcataacgtgatgaaaacgtacactgtttatgttcaaacgattttttttgtatataaagaacgataaattcaaacttctaacaagtaagtcgtttttttcttttcaaaagattgaatgcatttgattacatcaaaccaaatcgtttgtttaaagtaatcatattgacactataacatgtaaactgtttgaatcgaagttaatcacacctaaccttctttttttgtagactatcacacttaacctattcaaccaatatgagaaaatttcgcttaagtatatgtttttattagtaaaaagttaagtaattaaatgtcggcatgtgaaagttttatttcgacacttgttttcctctatttgctccgtccattttaaaccctttatttaactcataaagtgtccgaccacgccgccatgcttgtaagagtataatattcaaaatttgtttaaagcgcaaatttttaacaaaaattaatcaaaaaacgagtgagaagaaaagttagttcgttcgtgagggaggagaatcaagtcaaaggcactatcgccatcaactcaaccactaactcctccctaccactcactctttctttgtcgtttgtcattattattacctttaacttaagtggcaaataggtttagagttttgactgaattttatataaattaacagaattttaacatgtacaatcaagattactcagtacaattttatttcgatttccatctatatgtatgtcgatattttctttaaagaaaaacatatatatatagtttttttagaaagcgcaaactatattttcagtcttaaaataatgtttaatgatagaatacatattatcatcttcgactcacctaaataccacaaaataaaatctatatatttaatcaaaatgcatatttatgcatatgtatttcgataagcacttgttttcagaaatatttacatg

SEQ ID NO: 59527 - DNA, 1127 bp, Arabidopsis thaliana landsberg
ccgagatcgattctcggaacgccccttataaaatcattttttttttctgccaactaaactttgtttttggggactttgcaaaattatccggtcaactcagcatccattagactcaaattgaccacttaactggataaatgaaaatcatcatcagacataattttcacttcaatggagcaaatccaaatcttgttttatatggtgaagctatagatcttacatggtgaataactatctatatttgaatacaaactcttcatgaagcattataactccctgaaaagcatcagcacaacacaacaacatatgaaaacactcttgacacattctttgttaccatcatcatcatcatcacagaagattccaagtttcagacttgaatgttcggacttagacccacatatcttcacctccttcagcccacattccccatttccatctcactctcgggttactcatcatacatgtcgatatcagattgcttcttactctaggatctttgtcctggtgaatcatcagtctcatgtctgtcaaacctctgtacttattaacaatagacctgatgaaagaaactgtttgatgaacattggtatgatctgacatctgtacacgtgctgttatttgcttcaggctgtctgttcccttcatatcacctaggccgccttggctttggaaatgtgtttcgatatctgaccaagtcctgggactcaaactaagagaagtaatgccagggaatgctttgaggattgttgccagtccaagttctaacctctcagattgttctatagactttactgaatccactgcaagctttttgatcttgttgccaaaactgatgttgctgattaatctgtacatatcaggagatacgagctctaaagtcttcagatcttgaaactccccaaaactaacaccttcagcgtcctccacagaaagatggcattgcaccaacttgggcgtttcaactagaagagatttaggcttgttgcattttagcttcagttcaagcaggtttggcgccacgatagccaaggaaagtggagcattcgacacagtccaatgacaactctttaggtgaagaaaatggattcttggttccttaagtcctccaacaccaatcaaattca

SEQ ID NO: 59528 - DNA, 1349 bp, Arabidopsis thaliana landsberg
attgtgaacaaactgcctattgtttgatatagctcttatttttttttagctcatttttttggcctttgaatcaactgcgcatatagctcttatgatgtgttatgttgttttatgttgactctcgtttcaaaatttacttctattatagtacattaacattaacattattttctaaaacctacgtaccaatgtaatatcctctcatcatgtaaggtcaaatcctctcatcatcctgatgctaaatcttctgatcttcctaaggttcactttaccatcttatctctaaattatcatttatcagctctgctaatttcccttggtctttagtagatttgacaatctctcttctttttcccatgttgtaagttttaaaaaagaaaaaaactgccgacaagaaaaaaagaagcttctagcggtaataagaagaaaagtatggctgctaaagcaccaactggagctgaagaagctgaacttgccttgctcgcaagaaagaagctagtgacttgctcttgcgaagaaagttatgtacaggaaggtgaacaaggaagagtactgcaacttttatgcttatgaagggtttcagcgggatctctagaaacttttcaaagaaaatgtgactgcggctcttgctggtgacaacccgagaactcgaaaggagagggaaatgaaagagaatttgaaacgagccaaggaagagaagaggcaaagtgacactctcaaaatggccgagaaccggatgaagaacacgagaatcaagcctccatgatgatggtggtctggcaatgacaaattgataatctagaatctcaagagaactctgatcctagacatattttacgagtttctttccgatgaatattgttttttattaataaattttactatatctccagttttagacataattgtttcttttattggtcaacctcagtggaatattcttatgttgatttgtttgttgcgattatttgacaaaatcttttacagtcttctaaatatttagcttggtccatctataatactataaaatgacccacgcaatgcgtgagtttaataatttgtttttaaaacttaaattatacattgcatatgtatttgtagaaaaggttgtcgagttgatatcagatctcaaagagaaacatttattcaacactattaagcaagaaagttaaatttaagtatgtattgttgatattgggcgacattattatccaatagggattgttgtcattgggcgacattattatccagtgacaagtatacgtgataacgtgtctcagcatgctagctgcgggaacaaaacgtcggtcactttaatcgtttattgattcggaaataattggtttatg

SEQ ID NO: 59529 - DNA, 1339 bp, Arabidopsis thaliana landsberg
aatgtgtataatatttttattcaactgtcctgaaattatgggtctataaaaagattacacgtctctgtctccatgtcagctatgcatggagtaacaaatatcatattctgacaccacataaacaacattttctagatcattaagaaatctagaatgtgttaacaagtttgaatgattataatgaggactggattatgatatagaacatatctgattcaactaagaagtaagaaccattgttcgtttacgaaatgaaggtcttgaacaaaaaattattcattttttcataatttaaagtctgaaaggttcgtgagtaaaacagtgtaggagagtcaataagtcacagcgagttcacgagcggagcataaattatacaacatatatgaggaaaaatagtagggccactgtgtttatgaaaatgattgagctaacacatggaccccatctagtttttctattcaacaattaaattaaatacaatacttaatgattaaccccataatagtaaagtttaatttctttaacagtcgcacctaacttttcatataagtttttttttctctggccgacgtcgttttctatctcttacattagtaacatgcatagcctcaattattattttttaactagtttttcattacacgttaaatagttctacagccaaactctaatagctacaaatcttgaactttcaaaagaaagacataaaactcaattattatttttgttaatgagaagggataatgcaatttcgagggaatcctctactctaatgtcaacttcggtaatagacacgcgtgaaagcgaccggtcgaggggaccataccggaccgacagagacacgtgtcatgagataattgaattgtaaccagaacaaagccatgcaatctggtcgccgacttggcagacgcccttatgaacacatccgttcccgtgttttccgttcctggtcttcctcttgccactgtctctattaaaaacgtcaccgtttctgtggtccccaatcgaaccagactgatttcagccatttatttaacccggtttgcgaaaaaccaaagcttataaccaaatcgcttacattgaaaattttctaggtggctttgtgcacatataacaggtcattacaaaaaaggaaatttattttatgtatataattataaaccggttataccagggaaaaaaggaataaaccgagttaaattgagattggtacacgaagaccatcgtagctcagttggatatcgaggccttctgtgttcctaagtttctccagttcttcgctcaccttctcgtggtccatcaaatgcatcattccttcatttagagcgagaaaaggata

SEQ ID NO: 59530 - DNA, 268 bp, Arabidopsis thaliana landsberg
  unsure (1)..(268): unsure at all n locations
cccccccccccccccccccccttttcccccccccccccccccttctttcccccccccctcntttttcccccccccccttcccccttttcccccccccccccccccccccctttttccttcccccccccccccctccccttttttccccccttctcctccccccccccccccctccccccccccctttccccccctcccctccccccccccccctccccccctttcccccccccccccccccttctcccccctcccccctcctcccctc

SEQ ID NO: 59531 - DNA, 947 bp, Arabidopsis thaliana landsberg
atctcaaacgttttttctcttagataattgtgcctggatgctctggattgactcctgaaggaatcatggaatgtgttgaaagcttgtctaagaacaatcataaactagagacacttcacatcaatggcgtcaatggctttaccaaacaacatctctcagcactgtatacttacctttcttccgagggaacgattgacctcgaggtctgtcccaaatgcgatgaagtaaggatgattccgtcttgctcaagagaatcatgtgtaagtataactctgtagataaagatcattgagagtgttttgtgattcttagtactaatatcatgtttttcttggttgaagaaccagaagcaacgcaagtgccgtggatgctggctttgtatccctagatgtgcagagtgcgcagtgtgccttgttggttcagatactgagagtcaagaagcagcgtgtggtaatgatgatgttctgtgtcttgaatgttggcttgtgcttcccaagtgcagattctgcaataaaccatattgcactaatcacagtagtcgtcgacatgagattgcaatcactgatgctgcatctcggccttcgtttgaatgtgaagcttgttactatagggcaggtacaaacccatatgaagtcgactatcaaatctaaacaaacactttgttgtctgcaactttgtctattttgtatatgacaagcttggattgtgaaatattcagccataaaaaagaaagaatcaagctttcaacacaggaaattagttacaatcatccatgatcttgaagccgaacctacatgctaccctcaatgaactccatgttaaaaggagatgatcaacaaaactgggtagacaacttgacacagagagaacaaacccaccgagctcttttgtctcaagtgttgcaaagaaagaagttaaaatttagagaaacaagaattgagagttgt

SEQ ID NO: 59532 - DNA, 767 bp, Arabidopsis thaliana landsberg
tcccaatctgggtcttgttttgtaggtagattggggcattgaaatgtgggattttcacattggagagcttgaacacagcatctccctcacaagcatggagaaaagttgcaacttctgtataacaccaccaagaaagaaactctatcataacagagacaattcacaagtttgttccttttcaattaacttcaaaactgtcacaagaatccaacaaaatcctaataacaggaaaacaaatcatcaatcagaatacaaaaattttctttgtgtcaaatttcagcaacaaacgctcattaatgtcaaagctgacaacttttttcaataatttttatctgcttgattggtaagaatgagagaatcgtcaaagagggttgaaaacgaaccaacgacttcgctgggaggtccttcgtcataattaccaccaccaaagcgtccacgtccacgtccgccgttatctcttcctccccttcccctgaagctgccgccgccacgtggtggtctcatctttttggtttttgtttcttctttatcgctctctgctcctcagaggtttttatttagggtttcagcgagggaagcaattgccaattggagtgttgaagaagtagttgtgactcttaataacgaaaagaaaaaaaagaaggtaaaccactagggttttcagcaatcccagaccgggttacgactcgttaaaccgggaagagataaaattttcttttactaaatttgtcaataatttttgtaaaaatttacaaaagatttaatac

SEQ ID NO: 59533 - DNA, 1718 bp, Arabidopsis thaliana landsberg
  unsure (1)..(1718): unsure at all n locations
aggagaagctctttgagaaggagaagagcaagaaatctttctcataatgcactcaagttgaacaatggaacacctgtttttgatatatcgggaagtaggaaaaacaggacagcagcagtatcatcgaaaaagcttagaagttcggtgctaagtaactcatctccggtttcaaatgggataagtatcattccaatgacgaagacaaaagaggaacttgattctatatgttgttctgcgaatatattgatgatacattcagacagatgcaccagagaagaaggatttagtgtcatgttggaggcttcgtcttcgaaggagtggttccttgttattaagaaagatggggcaatcagatacagccacatggcacaaaggactatgagacctttctctagcaaccggattacacatgccacagtatggatgggaggtgataattggaagcttgagttttgtgacagacaagattggcttggttttaaagatatatataaagaatgctatgaacggaatctattggaacagagtgtgaaagtcattcctattcctggggtcagagaagtgtgtggatatgcagagtatatcgataatttcccctccttttctaggccaccagtttcatatatatctgtgaacgaagatgaggtttcaagggccatggctcgaagtattgctctttatgacatggattctgaagatgaagagtggctcgaaaggcagaaccagaaaatgctcaatgaagagnnnnnnnnnnnnnnnnnnnnnnnnngggaagcttttgagttgatgattgatgggtttgaaaagtatcatttccatagccctgccgatgatctcttggatgaaaaagcagccactataggtagtatttcatatctgggtaggcaagaggtggttgaggcggtacatgattactggttgaaaaaaaggaagcagcgaaaagcaccactcctcagaattttccaggtaatgtcatgatgcagtgtcctagtatcatattctttattttcagttttgtttttatcatcaaaactgatgtttgcatgtatataaacagggtcatcaagtgaagaaaacgcagctactttccaaacctgtgtttcgtaaaagaaggtccttcaaaagacaggggagtcaactccatggaaaagccaaacagacaagcccttggatgggtaagtttccataacctaatgactcagagacgcctggttattgcagtgaaatgttgaggcttgtgttacatttgtttgcaattgctgaaagttagtgcttagagtgtactcttgagagttagaataatatggaacagtcttgccgaactacaattaagtagaataggttaccacagaattagactgaaaatcatttctttttggttaaggtgtactgtattcgatttgaggttagataaagttttaaactccagtatcattaggagttgaatatcggtgactaagctcgatagaagtttgatttagctccagaaagttcagtatagtgaaaatgatctgattcgtttgttgtgttaatgtgaacagtggctgtaaaggcggcagaaccagaggaagaagacgatattctcagaatggaagaagccaaagttttggctgataaaaccatggaaactgccatagcccaaagaagacgagcacaaattcttgcagaaaacgcagatcttgctgtttaccaagcaatgaaggctctcaggattgcag

SEQ ID NO: 59534 - DNA, 345 bp, Arabidopsis thaliana landsberg
catccctggggggatattgggggtgttacataggatgcgcccttccattcatcaaatgtataagctgcgtatccaacatttgttcatttgcagacacactccgacttacacgatgaagacgacacatgctcctgcaaatgtgactcctatcaccacacacattatcgacaaatacgcggaagctttcaacatcacattgatgaatcggcatgatgattccatttgtatgagaggcaacacacgtgtgaccataaaccacatgagaattcactgccacaaactatgggtttaagacgctctcctctttagacacacaaaactgactgaccaagagacccaggtatt

SEQ ID NO: 59535 - DNA, 116 bp, Arabidopsis thaliana landsberg
aaacccgataacgatccctaagggagagcgaacaatataaaccgaggcgaacattgcagaaacgagagaggaagagtccgcagacaaggagcaaaccactgcgtgccaaagaacgc

SEQ ID NO: 59536 - DNA, 1011 bp, Arabidopsis thaliana landsberg
gtagagagatctaattggatggtaataaaaagggtccactttgttcttggggaaagattctgcacgcccacatggtgagattaaaatagactaatattacccttcatcacctacttgtgtccagagagagagaaaaaaaaagaacttgtggtgatgatactatcatctatttgagagctaaagaatttttccttaagctttttttttttggttcagaatcttttcatcatttatgtgtctgtgtaccaataaacatagaccaaacaaacaaaacctcttaataactgaaaaacagagcaaaacttttgtttttctgtcagttaacttacttcttctgtgtgtttgaaacccaaagtcaattcttttttttcttcctgaaattctctctacttgctcaaggaatcttgataaagtaagtaacttttttctctttcaagatagtaactatttctgggttttttttggatacttgttgtgttatggagcatcagaagatttttttgttctttggaaactgatgtcatgaagcgcatcatattcttaattttataattccattatctttttttttcttcttttcttgtgtgtggcatttattgtctgctggaatttttttgtatgaattgtctttgaagggctcaataattggccctcttggagtttccatgtccattggggaatattgtacttgagaagctgatgttagtacttgatgaatccttctttcaagtcaactctctctagcttttatatactctctctatatatgatctcacatctcttaaaatctattatatacatgttgaaacacacttttgatcttccagttgacaaagactgagttttttttggctcttatcttgtttcttgtttggttcttgatcatgtttctgcaacctttgcagatcggttatgtagacaacgacgaaaggaaccttaagggacctcaagacgcttggtctgctgttcttgaatactacaacatcaaagacaagtctttgataatttgat

SEQ ID NO: 59537 - DNA, 298 bp, Arabidopsis thaliana landsberg
gaagatctatcgtctaactcgaggatttctactaaatctcggctttccttcacgtgaataaccattgatcatctcagagatatagaactagtcgtttttattcttggagcatcatgagcagttatgttttcaaagggacttgtctaattctcatcacttctcacgacaccaatcttttttttttctttcttttttttgcgtccaaagttattggtgtcattgccatcatgagaacatactttgttttcagaattgagatgaatcattttttttttatataacatttcagaatttatac

SEQ ID NO: 59538 - DNA, 347 bp, Arabidopsis thaliana landsberg
aagggaccgtctacaaggggggtgtaatgtctatgaacaacaccaacggtctcgccttgaagatcatagggatgcttgtggattctgaccgcgaagagctctcacattatctgccatggtacatggggcttaaatatagcgctgcccgggatggaggtgataaaacggttcacatgtgtcatgaaaagatccaacagcatgcagctcccgcgtgaaatcttggaaagcaccgatgccatcagcaccctgtagagtatgctcgactgccaacagtgcaaagtggaagaagagcttcagaaatcggtcataatggttctaacacaaataacatcgatggaaacattttt

SEQ ID NO: 59539 - DNA, 1648 bp, Arabidopsis thaliana landsberg
taattatgaggagttattcaaattaattggaatttgacttctaatacaacttttctatatgagttatagatttacacatatttagaaattggtacatataccattaaaacttgagtgaaattgtgaatcaaaagccagaatctttctgtaaataaaggagttatacgtcgttctaaacacacgaccttaatatttggaagagactaacaaaagaaaaaggaaaataagtatggaaatagaaagaacagcagattatgataaggtgtggtttacacgtgcgagagtgaccatcatcaagaggcatcgaggcaacagtattgagtctattgactaaattattaaggatgacaaatgtaagagaaggaagaaagaaggtccacggtttatgattgtcgtgttgtatttttatacatgggctttggcccaactaaatcttgggtcattgttatgtattggaatgggtttccaattaaaaaaaaaaatattttgtcccaatatatcgatgtctataagcaaacccaaacatttgcaactacaacttttgaaaattgttaaaaagaagatacatattttcaccaagtgtattcacgttaactaaataatatgcgttcataggattatctagtgtaatttttagaatttggtttatggagaattctttgtcaaccatgttttcaattaatctagtaattacttttcacttggtatgacaattaatatgtgtttatgtactttatactattgcgagccacaaaatttaaaagcaatgccgagtaccgttcaatgattccgttagagcaaaacttgaagttttttatatctttaaagcgtgttcatagaagaaagagagaatagtgaatgcaattcaagttttcatctagaagtcgtataaattaggggtgggcattttactcgtatagtcgtatttatgtgaaacttctgattcggttgcctaccaaatcgtcaacgtgtcaaagtgtacttgatgttaattgaatgcatcttcactcgaaggttaatgttgtgtctgtacattcgctttggacatttttcaaacctagaggtcgtatattttccaggtatagttcccgttgttgccctatcataggattaggcattttaaccaaaccttaatcttgactctatgcattattcgtttggttatgcttttcttcaacccaaatggtttgtttatgtatgctcatttaagtatgaactaattcaataattttattaacttgatccatgatccgtcataagatatatccttcagttcttaattcttagatttgttggccctgcttttctcctaatcaattatttcgttggtcgatttaccacgttgattttattaaaagatatatgatgaagatcaatttagacaatggttagagaagaactaaaagaactgaactggaacaacttgaactaaaaccattagtgccattagtgaataaccattgagataatgtcaagtcacattaatgccattaggcttgtgtataatggcttcaaaatggcccaaatcttccaatatatttctcttatagcacatacagaaccgcccggtgtttgcatgtgtcggttcatatgagtcacgttgaagcaaattccatcagagtaggaccccttttttactttagtcgac

SEQ ID NO: 59540 - DNA, 218 bp, Arabidopsis thaliana landsberg
gcgatggaacatcggcgaccactccggctgcgaccagtggccgacgtggttgcgccccacgcgcagggcgttgctcacccacagatgggggtcctgcatgaccagcgaatagaccagcggcgcgtcctccgcgccgggcagcgccgccggctcgaacgcgacgccacgcagtctcgccagggcagaagtgtagactagggaatgggagtcggtttacg

SEQ ID NO: 59541 - DNA, 1269 bp, Arabidopsis thaliana landsberg
catctccaagtgagaatatttcacttcttggtaaaatctattgttatatgtcttttaactttcaacacgcaaacaaagtgttggaggtttgtttttttttgctatgtccctagttttgtgacctttgtgtttaggtacaatgacatttttctgtgtttgctacattttttcagtttctaatcttgcatatcattaaatgagcaaagtaagagaactctcactgaagatcattaaagccatggaataacaacaaagttcccaaatttatcgattattattatgccaagaaggacttgcgatacatgttaaacaagcaaagatacattggtttagttaatctctttataaaaaaaatcattagcaatgagaaagcctaattgagctaataagctcttattaacggtatcatcatccatcagcttattagatggaacaaactgttccaaaacagacttggaatatcactcactctagtctgtaaaacagcttcagcaccaagtgcattcaacttctcaacgacctcctctccttcttcttttgaaagtcctgttttcaaaaccgtaggagccttcaccaccaatttcatagcttccttaagacccacaccaatgattctccttacctccttaatgatcttgattttcgcacgtgcctcgaaagactcaagtttaacctcaaacacagtcttctccgctttagctccctcattggcaccaccaccactttggccgtccctcagtactctcattttgtttgatctttgatacgtgcttgttccttggctttagctctagacctaatcacaaacttaaaccccaaacctactctctttttttttaacattaagatttttctctacatttttattcaacttacatatacgttatatattattaaacacacaacttgctctccaagcaataattgtactagatgtcagaaaaaaaaaaaaaaaaacattaagtgtagagtttgtatctagctttttttgtctccaaatagctccccaagcaaaaatgtccctttctcagcacagattatgttcataactttatcatcatcatgtgctattctttgcctctcactgttcatatccttaccacgttgtctacaatagctaaaaagctcatatttcgaattctgttcgaaatgatatataacttccagtctcctaacgaatttaacataaaacagaaagaaaagtcaaagaaaatttgttgtaacttatagtaacttacacaagtcttggccaaaagaaagtttgaagat

SEQ ID NO: 59542 - DNA, 297 bp, Arabidopsis thaliana landsberg
ttggggtggggtgcttactccttactattactgcacacctttgtggcctcactgtttctaaggagacaacaaccacccctaccaattcttgagcatgaaaatctgatgaatggtgaaactgaatatgtttcaggcacctgccagcagcaagctgcaactgaatttgttcctgtcgcctgtgcctgtcgatttcaaacagttggttgtaatgattcctgtcgtctacaactacaagcagcaagctgcaactgaaacagaggctgtaatgcttcagcttaacatagagcctgtgcctgc

SEQ ID NO: 59543 - DNA, 662 bp, Arabidopsis thaliana landsberg
ctatatgttgttggtcctatgttctttaagtagccaaataccacacatacatatacagtatcctgcttaaaaattttactaatagcaaatttctgaataatagggataaactcttgagctcacaagattaataataatccatttgtttgtcacaagattaatcaaaatcaaatcatatttttaagtaattgagttagttataatttggaacaaacataaataaattattattaaaagtaaaaataaataacataaagctggtagtaaagtaaaccaaccatacaactaatcatacaactcgtaccactagacactagtatagtaattaatagaaaataatgaaaagcttacgatggcatttttgaatacaagagccttcacgagtcggttgagcagttgaggcattttgctaaattttccaaactattgtggttatttcttgtgtgtacctctcagccgaattgtcagtgacattaaagaagcattattgacaaaataattttattaaattgactcgactttttaattttgttttgagaccttttaatgtgtcatggtgagaatattcgggacaataaaagagagagattggagatgttagctgatgaccaaatatatatatgtttttcttattctgattcccttaattgaataagtcctga

SEQ ID NO: 59544 - DNA, 839 bp, Arabidopsis thaliana landsberg
ccgcatgaaactgaaaccatttgtcatttgaaatcttcctattctttctttctcagttggaggacagtgatgcagtttttactcaatcgttttggggaagttctgctgcagaacaacaacaacaacatcaacaacagcaacaaggcatgagctcttatcaatcaaaccctccaattcaggaagcaggtttcttcaagcctctacaaggcaatgtagcattgcaaatgaggtatctacaaacaaatagtcaagacccttgaattattttacctaatcagaaatacttaacatttgtttgtgcttctttattgttttgatataattagcagtcattacaatcacaatcctgcaaatgcaaccaactctgcaacaacatcacagaatgttaatggattcttccctggatggatggtctgaaaacaatacatatctatatatgtacacatatgtgtgttttatagatcaaagatcattgcttgtgtcatttgatttttgccagagaaacatagttcattattacaaaactttgttatataatcaaggctctaatgtcaaacaccagattattacttttttgttctttgttttttggctctcttgaaatataaaatattgttttgggagcttatttttgttttatttttgaacatcatatgaatttgttagattatgacaaaagttctccggattagaacatgtctcaagaattggattctgaaacatgtagtgctctgcatttgtattaagatgtgatgttgataattaaaacgactaaataatttttgccaggttggattataatgaaacagtccaaaatggtattttaattttattttcat

SEQ ID NO: 59545 - DNA, 1002 bp, Arabidopsis thaliana landsberg
ggactaacactgtataatatagtcatcgttatcgtatgtacacatattaaagggcctccagtttattatttacctattgtgtctcatgtctatagctaattaacacttggttagtagaattactcaaacctcaagcgtgcagcccaatagttaggctgctcagaaaccctatatgaaacacaaacgggctaatctaacattaggcccaaatcagattcctagcatcgtcgagaagcccataagagggtttgtatgcaaatattaaacattactaaaaaatagtgataatttgctaggtagcacattttgattgctaagtacttgaaaaaaaaaaaaaaaatttactttatcgctagctacctcctctctcactcgtcgcaaaggtagtcttcacccagatagagaaaaaaaaaagacgttaaaatgttgtcatcatattctaataagaccttatagaaaacccctctaagcatatattttctgtcaaaaaaaacatattactttcttataccaaattataaacaacaatgttgaaaattatagaatattataagcactggtggtagtaggtgtcggtgtatgtgaagagcaaagatgacttttcttggggaattttgcttgagttcgcattcccacggaagaagatagcgacaagtttaagcggttacagagacttatacacgtttcatatcgtaccattctctaacaatgtgaatgagatgattttgtagcatgtttacacattaaagtataagggggcaggtatatttaaccagaaaaattaaagaggatagatactagaagtataaacaatgtgatattcaaatttcaaatgtattattagaaaaggagtataagtgacactactatgccaaaactaatatgtaaaatctaaattaatcgagcatggcaaaactaactattatagaaatgaaacggcgatagataagataagtatgttgtcgatatccacagacagctagtgcagcttttagtaaccga

SEQ ID NO: 59546 - DNA, 622 bp, Arabidopsis thaliana landsberg
ttggaggaacaagaaagatgataatctagaccacaacataaactatgcaataaaatgataaatgtgttatagtcaatgaataaagaataagagagatggtgtgatgtttacacgtttggggcctaaaccaaaaaaaaaggatgggtccaatatgccaactactactattgtattgagagtaggaagagagagaaaccttaatggagacagagggacagtggggttatgtcaattgtcatattattcaaccactcaccaatcactcactccaaatctatatctctctttttacaaataattatgatagatttgatgataagttggttctcaaatcccagccgttcaatttatccagatatgcaagaaaatattagattttaaggaatcggcctttccttatttggtaagactaaatatctctgttcattctagttccaataggtaaaagagtaaccttttttcttacaatattaataacttgcattgcacaataacgtattaccctataattcacaatgataatgtgttttgaagtcatctacacacttcagagtttattactcaatcgaaaattgaaatattgtctaccactcaaatttcttgaaatgtgttaaaatacttg

SEQ ID NO: 59547 - DNA, 921 bp, Arabidopsis thaliana landsberg
gaaaattaaaatatcattttttttactttttatctttttattgactccccttgggtacttgggacttcttctttttttttttggtctcctctcatacttttgactttgtgtgcaataccaatagtagaataacttatgtaaaagactcaactaacccattttcccttctttaaaatttttacactttattagtgaccctaacctttagagtccatagtcatctttctaaatatttgtaattgatatttgataaaatatatatttttgtagatagtgctatgtatttattaaaataatgtatggtttcgcactatttacgggtcgaaattatttggcagcaaaagtagacgatgtttaggtatataaaactagataaagtaatctagggacatacacatatcgatataaaataatgcgttttgctataattagaagaacattaagattacaaacgaaggcaaattaaagagtgaagagagagcacttgactaagacaagaatggccgtgaagctcatttacctctttctcttcttatacattgctcttctaatttcaggtatatataaattgtatgatccatggaatatattactttatctccggttaagatctttttcttttcttttggaaaaataccaaatcttttggatatgatgatgcagaagggatggctactactccaggccggactatgagcacaaccgcgggaagacgggatgggaagagtggtcggacggaatggctgtacgtagccggagaatgtgcgaaattaccacgttgcaacaaatattgcgtctctaatgggtttcatcttggtgggttttgtgagaaattgtctcctcaaccttcccatctttcttgtgtctgtaaatataaaaagataacatcaaactcacctatttcctctttcttggtgtggg

SEQ ID NO: 59548 - DNA, 463 bp, Arabidopsis thaliana landsberg
gagtatccatacttctaccggaaagaatagagataaagaaaaatgaatataattaataaagctctaccgaggaaaagaagagtgaaggataatggagaaaaataagaaaaagatgatgagatctgaattaagattttattattcacaattacaagaataggtacagtcctggtttgtgctaaaccaaattcgaatatcaaatataaattacttataggttcgactgtaaaatgagatatgaaagaaagaaataatatatgatgatgtaatgcatgagaaagtccaaaatgatcggcatatgggattaagcgattccatatagttaagtcaagttactatttcagataaatggataagtttgtcgtctatatgttctgttatctccaaacccaaatctataacattgcgacatttttgaatcgttaacggcaaaataagtgggggggggggggggaaggaaaaa

SEQ ID NO: 59549 - DNA, 741 bp, Arabidopsis thaliana landsberg
cagcagctgcaatagcaagggtgttcttctcatcctttttagttgttgttagaaacgcacacgataatccgattacataaatcgcagcctgcaagtaaaaccctgtaagagtttagctaaaaagagatacatatctcacagaacaatatcaaactctttaaactaatgctacacaacttcaataacactacgatttcaattagaacaaagcaacgaatgtgatattgcaattatgagaacctgatcatatactaaacatgaattgattaattcagtgctcaaaggatgtaacattttgaaatgcatcacaaaatcgaattctagaccaatcaatccaaaatcaaagagattcaattacctgaacaaagatcaaaggacggagacgagctttttctttagtgaccttcgtgtaacctaaaacaaagcaaagcacatggatcaagaagaaattgagagaaaaaggatttgggacagaggagatttggagttttggaaactcacgagagtcaacgaccatgcggtatgagaaatcggatccatcggtaccactgggtctacccgccgtcggcttcctctgctgcatcttcgccggcgaaattggaagtatgcgtttgtatttgatcggagattgaaagagggaggtgttagtagggtgttagggtatagtccccacagtttattagatttttgttgttttaattttacgataggatttagcatttaaccgaactaaaccgaacc

SEQ ID NO: 59550 - DNA, 504 bp, Arabidopsis thaliana landsberg
gagctccctcgaaaagacctgattttctatctgagaatgtaactcgaaggttggattgattgttcattttctatgcctctatctttttacggccaaaattttttttccccattttctacatgttttggataaagaaagagcgaattgattgtattaggatcttacacataccatgccattatttttcttatagactcagattccccggttcatgtatctattgagttctacaaatggaatgtggattactattcttaatccttagaaatacagtcatacattacccttctcgtgagataggacggtttacacattctatcactcacagtggtatgagagtattatagctgggacacagtctattatttatcacataactcactactaggtctgcttgaacatgatggcgaggttgtctttcatatatccaatacctgattctgtaacgagcacaaatatgactatatacatagaattgactagatgggtaaacaatcctatacg

SEQ ID NO: 59551 - DNA, 206 bp, Arabidopsis thaliana landsberg
tttttttcccccccccccctctttctccctcccccctccctcttcccttctcccctctccctctttttccctcccccctcccccctcccctttttccccccccccccccgccccttctcctccccttcttttccccccccccccctccccccccccctcttccccccttccttttccccccccccctccccccctttccccccccc

SEQ ID NO: 59552 - DNA, 493 bp, Arabidopsis thaliana landsberg
tgaggtcgactctggtgccgtgagagatgattgggtaatcttcgatgtcaagaccgtcgatgagttcccaacaagagacaaagagagttatagaagatgttggtatctgaagaaactgtcctagacgtttcttgacctccaacacagattcttgttcgctgatttccattgtgaattcttgtgtgtatgaaacaattgtcactatcatattttcagagtaaaaaaatgtgttctgatatgcttatgttatggtgaaaaaggactatgattccacaatgcgtaatgtaaatatagacgcacacatatatatacagtggagaatgcaagttgttgaaatgcataagatattcatgataatattctgatgtttagttgggtcttgtttgtgtgtgtgtctgttatataacactatggttctcgtcgtgatagtaactgaatttggcatgatattcgattgtctagtttagcattcacagcaaataaaatgaaaact

SEQ ID NO: 59553 - DNA, 230 bp, Arabidopsis thaliana landsberg
agaaaaagaaaaaacgtgagcggtgattggattgatgataaacttatatactgggtttttatttgtgcttcgattgatgataaagaaagagaattcttggttcatgttttcaccttaagggcagaaaaatggattgtccagattctattgagtctgtcttatacttgttgctatgatcattcaaactaatgtcaaatgcttaacaaggttaattctaattcctatccaaa

SEQ ID NO: 59554 - DNA, 1118 bp, Arabidopsis thaliana landsberg
gagaaatccaataattagtgtatagtataatctaaccattatttacttaacaaatatggatttggaagcaaaaggaaatgactgtaaccagattctgcatgaaccccttcttatctattcaatgtattcaccattaatgccaatataacaaaaggacatatattttggacttccaagatttttttttttggtcgaaatggactttcaagattttatattctaagattttgcaatcaaaactcagtagaacaaaaatgaagattgtaaggatagtgaaatcaccttaccttgtcatatgttgccttctcttgatcattctttggttattgtctcatcatgatcataatcatcactcttgtactccatacacgaatactatcagaggaacacaattctcgcatcttcaacctgtaagaacaagattatgatccaattatgatgctttttattcaataacattatatattgataaatttggtatttctggtcataggaatcttcaggcttatcgagtctactaaaagaagcagctacagaagacaagatagtgattattaccatggtcgatcgagaatgggcaaaacctgactctattcttgatctattcctggagagtgtgcggattggagaaagaaccaaacacttgctaaaccatttgatcgttgtggctttagatgatcaagctcttcgatattgtcttcgtgcccacccacattgttaccttcatagatattctagaaaaaaatcagaatctttaaaaccagatggtcttgttaccggttggaacaagaagtctttggttaaagagatcttagaactcggctaccacataatgttcaccgtaagttctcttaatgcaaatgtttccctttctacaaccagtttttatagaacaagtatgactttgtattcaagaacctaggttaggtacttaggtgggcacctagctagattggcatatcccgctccatgaataaccttagatggtggatttatgagttttttccacctaatatatatttttttttattcaaatttattgtttttggccatctaattcttcagaatcattatttctaattattatatattgcttagaatagtgaaacaactagagt

SEQ ID NO: 59555 - DNA, 410 bp, Arabidopsis thaliana landsberg
ttattctgtgaggtacagtgtttgtaggagccagagaaaccacttttgtcatttgcaggcgagtgctactttaatttatttatctaatcgtttttaagtgtaattaacatttctgttttactctttcgtcgttattctttgtctgcagattgttgttcaattacgtttgatttcatattgttttcctcttttttccattgtatttgaataaaaatttaacacaagacgaaaattatggattgtgttaaaatgaatccaataaaaaaaaataattagaacgaatttttttccatgacatcattttttgtcttctaattcaggtttcacgaggcttttgtcagatttttttcttctgtattttgaatcctccttctctattttgttcaaaccatgatctttttttggccaac

SEQ ID NO: 59556 - DNA, 307 bp, Arabidopsis thaliana landsberg
ctttaatgggggtggggatgcatacaaatcctaaatcttcctttcacggaacaccctactttctatctgtcatagcgagcaagtacttctgttaatctttaacaccatctgcaccaaccatactcacagtgatccccatcaatgtgtgaggaatgaaaaagatcctcattgtaatctcctacaaaaaaaaaaccaatactctacgacatatcatctccatcattactctctttgctaagaaaaatggtaatactcatatatgacattggctccatgcgcccattcacaactcctctactacagctta

SEQ ID NO: 59557 - DNA, 930 bp, Arabidopsis thaliana landsberg
catagctaagaacgacagacagatgcaaccgcgatagaatctcgtacctggttgagccattcccataatactgccaatcaaagagtcgagaattcccatgttgttcccgttattatattcatcaaccccgaaatgaacaaaaaccaagtcatataggttcacatccaagcactttcctccttcaaatccaagcagctttagtagtttagatgatgtggcatcagaaggaaaggaatcactctcttggcatatttcactaagctgtaatacatctaagccaatcagttttccgaaagaagtcagagtagaactgtccgtaactaaagcagctttgagtcccataaacctggcattaaagtaaatactagcatcaacatatggatataccagctattgattatcaaagagagtataaaactatagagataagtgaaaagtataacctttcagccaaagttgagatatcatttccatttccctttggttttagtccactctattaagaaatcagatcatggttcgttaatctctaattcgtgaataactatgtaaacacactgagattgttaaatattttgccacaaaactcggctcacatagaaattaatatagtagagagtaaagtatctcacagctatggaataagcttcggatgcatccagcaagtgggagaattctcgaactattctttcattctcagtttctgcaatattgaaacagcagagtgagttagatcaatagcaaaatgtcaaagcaagggcaatgtaacacaagtgatctcaaatctttgtttcttaagcaattgggtcaattgacactgaacaagaactctaagttggccagttagatcaattgcatactggagtttcatattggactattaaaaaaatcacaataaaatccaaacgatatggatcaattctgatcaac

SEQ ID NO: 59558 - DNA, 1564 bp, Arabidopsis thaliana landsberg
gaaatagagaattttaatatgttccattgttcccgaaaaaaaaactttcttaatagaaaacattcacgttcacatttgcattagcattagagacgaagaattagtggaaatcagttgcttacgcgaaactaatcatcaaaccaattgttaatttgtatccaagttttatttcgtgtatgatctaatgaaagatccacgtgcttgacaattatgatttaaattggttggagttttaatctgacaacaatggaccacacgaattactttggacatcgatctgaaaaattcctgtcatggaaaaatattgtgtaataatagtaatatcattggctattggctcaaccaacagtgttcttttcctttgatccttttttggtcccaaattttttgtattttttatagcctaatgtgttatacatttcttatgagattttttgggtgaaaggaaggaaattactataaacgaaaactgttgggcctagtgggcttaaaagtccaatgcattttcttcggctcataacggatttgcttcgcacccacttacccatttagttagaactaataataattcatgtgaaataaattcgatttgtatccctctaattgtacaactaccgaatcagagagcctcgacccaactcgagaacccgatccgagagtttagagaacttcactgatcctatgaatttctcaggtcttataagggattacacaaatcttaatactctcatcaaccaaaacttttacatacacccctgaacccaccatccatctaaacaacgcagggtagtttgtcattacttgcgacggaagctacccgaatatagaatcgtatgttatcgatcaccggtttccgccaatgtcttctgataattcttcaaccaaatcctcaaaaatctcaaactcgatatccaaaaccgtctctgagacatctgcgtcgttctttgagctccataatcccaatctctctgttctgaaatcatgttcgaccatcatatcgattgtgtttgactccacatctctccaagatctcaatctctcgcatacccttttggctacaatcgcggcttcagcttcaccgtcgatgtcgcttggcaattcctctgctgcaaggtctgagatcaatgcttctacgccttccggaacttctaccatctcttcaaagtatgttttaagaactctctgagttataatctcacaatgataaagacttttcatctcttcttcttcctcctcctcctcctcctcggtctcttgatccgacattcgtttctcgagttccatgggatctaaacccgcaagttgctcgaatctacaaagcttctgtagtagcagatgctttgcttctgtaaattcagacccaaaaataaacattagtataatattatcaaacgatcgaacttgtcagaattcaatatgttttaatatgttttttcattcattcaaaaccctaatttaacttgcaaattcggtacataaatatgagaatagggaatgtaccaatttaacaaaaagaaaacattcccaaatttaatacactagtcacaagttttgtcaaccgaaa

SEQ ID NO: 59559 - DNA, 1089 bp, Arabidopsis thaliana landsberg
atctttctgatttaactttctatttcgaaggatttttttcatatatcaaaagaaagttttcaatcaaggcaattatattcacacgcttatacagattctaaatatatttagaaaaattaattatataagttgtggtcatgtatgtatgagtgtgtatgcgtatcgatattttattttctttgaatgaatattgctcttaattatggttactctgtatcattcaaatttaattggatatatctctaaagaaccatatttatacgttaagtactatatgatcatgcatgtcaatttcactataactcactgtaatctatcaaaattaatgacctttatcgaaaaagactagtctatcaaacgtgattagtttcgaatttcacaatattctcttgtgctccagattaaatccatatttgatatatggatagttattttaaaaaatctgaagatccatttctcacagtttataacacattaaaaagaaaactatacaaataaagatgctatagttatggaagaatgtaattgtgatttagtgcatctcttcatttattttatagcatgctttatgttttcttattttaataaagtttgaagccgataaactataaatatatgcaaaagatccaaatccaaatttgatcgttcattacataattgcggtgcaaacgaggatttctctcaatccatatgacataaattgttgctcactagtcactaccaccccaattgtatgatagagtctttgtaaacatatatatgtactttgtaaggcttggaacgcatgaaggcacgggcctcagctacaaagcaaaggaaggagacatcaacaacatcacattccaaatttatggtatttggatactaaaaggtaaaatgaaataattttaaaaatcattagggagtttgtttgatgaaattgtaatcaagcgtgtatgttagcaaaacatcggaaataaagagagaaaaagatcagcaatgtgaaagcgaaatcagcaacgacgtggcacgcaccacgcggctcccagtagtcaaaacacataacaagtggcctgttaaactctaaatatcgcaacttgtatttgacta

SEQ ID NO: 59560 - DNA, 476 bp, Arabidopsis thaliana landsberg
tacctcccaagtggttgatgagaaaccatccgagcctaacatgacacgaaagcacatcagtgcagcacttttagatattaccacctcgctagctaaagaaattaagaaagatgagctataaaaaggacatttctctttttcaactcataactttctcgtacttttgactaaattaaattatagtatatgcagtttaatatctagtatgtgtgctatatgtccatttaattttaattttttgttgggagggtctatcacactggcttgcaactgaatccctgggtgtcgtatttagtatgtgtgccatatgtactaatgacaagataatgttaattggtattttagttttcttatgaggtatttaatgcattctcaatatttttagtacttaaaatcaaacaggatagagactaaactttagctgtctaactaaactctagtccatatactaaaagctaaggtaccaaacagaccat

SEQ ID NO: 59561 - DNA, 468 bp, Arabidopsis thaliana landsberg
  unsure (1)..(468): unsure at all n locations
cccgttcataaataatgtttcgggtttgggccacaatagaccggcccattaagcccatttcaacccgttcataaattctaaatactagaaatccaaattagataacgtttttgtccatcctttctttgggtctcttgaagaataacgttttatgtctttcttaatttggttgtatgatcaaatttgtgatccaaattcttaaaaactgatatgttaatgaatctattatcaaaaaaacgtctaaaacaaaaagctgtaacgatttgaaagtgcatttttccccaaaactatataactaattaaagaatttagtgtcatttatctaatggatatactttaataaaatcttataaaactaaaaatatttaagacaaaagtgaaatggagatacggaggtggattgtaatgagctgtccccacctgcanaaatacgcacgcttcactgtcttgaagatngctatctctctc

SEQ ID NO: 59562 - DNA, 552 bp, Arabidopsis thaliana landsberg
gggggggggggggggggggggggggcgaggacggggggggggggggggggggggggggggggggggcggggggggggggaggggggggggggggggggggggggggggggggggggggggggggggggggggggggagggcgggggggggggggggggggggggggggggggggggggggcggggggggggggaggggggggggggcggggggggggggggggaggcggggggagggcgggggggggggggcggggggcggggggggggggggggcggggggggggggggggggagggggggggggggggggggggaggggaggggggagggagggggggggggggcgtggggggggggggcgggcgagagaggggggagggggggggggggggggggggggggcgggggggggggcggggggggggggggcgggggggagggggagggaggggagggagggggggggggagggggggggggggggggcggggggggggggggggcgggggacgcggggggggggggggggcggcggggggggggggggggg

SEQ ID NO: 59563 - DNA, 608 bp, Arabidopsis thaliana landsberg
actaaaactattaaaataaaaagtcggttaataatgagtaggtgtgaacaaatgagagaggaggaggatcagttttgcttttgtttccttttctcgtctctgcagcttccttgttgtcaacttctggaagcctttgattgattgcaacttctatctccattctcctgctcatttaatattccaattaatagtcaatctcgtcgaatcttcaattttttaaagcttttggtcaaatcaaatgtaatgcaaagacagaccaaaacctcctcttcttcttcttatatacttcctctcctacaaaatctctatttacttccatcttctctgctaaagacctttcttcaccattcccaattttccggtaactctctctttctcatgtgtatgacaaaaagtttatagctttgatcgtaaaattcggtgcttcattgttctagctacagagattttttgtgggtctgctttgatttctcaataacgatgttccataataaagttatggttttttgtttgattcgagttattgttgtggcctgtggggattgtttggcacagcggtttatgtatatgttttggtaaagctgcctcctttggtttctctctctttt

SEQ ID NO: 59564 - DNA, 955 bp, Arabidopsis thaliana landsberg
agacgttccaccttgcaattttagcaaaaattaccaaaacataattcaatcttaaccgaggttagtaatggatgtatcgttttaagtttattttttcaagttaattcgctcttaaacttgaaaaaatccttttcattaaaacttattgctccccgaattcaagatatgcaacatgatcatttttaatcaaatctatacattctattaattgttaatatgaacgatggatacaacaataacactatgttaactattataatgcatctcctgttacatgatcatttcattaccttttttctctacagcacatgatcatttcctttaaagagaataatttaagttaaatcagggggtagaaaaaattaattcaaccatcaaatatattttattaactaaaataaagtgggagaattcaagaatactatatagtttgaatgtccttaaactattaaacctttttattcaagccagtacgggtattgaccaatatagaaaacaaaattatataaataccactttttgtaatgaaacgaactaaaataaaataaacgacattataaagtaaatcaaattaaacacgaatagtaagccgttcacttaaatcctggatttcaacatactgtgaaatgaccgttataccctttgatatcttcttcaccctcttcctctttccctctatatatatgaactcttcctcttccatttttcctcacacccttaaagcttcaacaaaaccagatcaagcttctttcaccattttcactcttctttaagctttctttcttaatttctctcatttcgaattttaaacacaaaacctaaacgatgcctgaggcaccaaagatcgcagctttggaggtttctgatgagagcctcgctgagaagaacaagaacaaactccaattcatcgaagacgtgaccacgaacgcagatgatgttcagagacgagttcttg

SEQ ID NO: 59565 - DNA, 228 bp, Arabidopsis thaliana landsberg
gaccaattcagaggctttccaggttgacttgaacacacaatttaaaacttattaaaaaaattatataaatacacatgtcttttaacaattaatattctcaacacgacaacatggaagacgcgtcggactagaaggggtggagcgctggggaccactggggaagcgacagtgaggctcaccggcagtgtggactaaagatccgagagcatttgggcggacgactggtgt

SEQ ID NO: 59566 - DNA, 1543 bp, Arabidopsis thaliana landsberg
tgaacacactactgaatcataaaacgaatgaagaaaatactcaagttaaggaatttttcgttcgctctagatgataaaaataaattgtggaatcgtgatttaaattataaaatggtggaatggaactacagtatgatgaaaataaatcaaaactttgactcattttagccactaattacacttgtaaaatcacgaaatagttaaacaaaattacaagtctacataagatacgaaaattattccgtaggttaaatataatcccatatattagtcacaaactagtaaaatcatctccgttaattcccatttcaatataaaaaatgtaaatttcagtatattatatagaaagagatgattatagactatatatatgtacctgcatcaaaacccttgttacgtagaaacgccattaagtgacgcttagaagaactaatatctccgacgaacgttccagcaacctccatcgtcgctgacagtattctcatccgctcttcgccacaggataaaccttctagaagcttccgtaacctctcattcacatcttccaaattgttatcgtcggaagaagtttcttcttcttcacgtaatactatttgtccctctttctctataaaagatgcgaccaaatcggaaagatccggcgaatgatcgcttccgctactgttatcacacggtggatgtacacgagccgcggctacgttgaaagccgactcaattcttttgaatcttccctgaatctcaaccatctctttcttttgtccttttgataaaatctttttgacgatacacaaatgattcgaagaatttataacgtatatttataatacctatacgatttaatagagagagactaaacggagtaaacgacaaaatgttaaaagataacgacagagtggtgaaattatgtgacaataattaaaaagattgaacgtcgttgatgtaatgttttttataacttactgaatataattgtgaaatgtggatggttaaattctcagttttatcgcacatatagcgtctagattcactttgtatcaaaataaaatcatcaatggttatactctttattataatttcatgcttaaaaataattagtgctgaattaaattattcagatttatttctatgtattttatcacttaaaagtttattgatatacgacaaaacatgtaaaaaaaaaattgaccaaagaaaaaaagaaacgacaaaaaaaagtttactttgatttgtgtgttgtgtttgttgttcttatttctttaaccaacgtccacgtcatagtaattatcggttatcagttgctgacgtgtactaaagaccttgcgtgtttagtctaatgtgccggcgcgtgagaacacgtgccagataacaagtgactcaaggttaacatgtgattgtcacgtgataatatgtggttatcttggtttttttgccagatttttggtattatcttcagacgcggaaataagaagcaggcttataacctaagaaagtctagcttcaatgtatttagtgaatagcgttttcgtttgttcagggcctctct

SEQ ID NO: 59567 - DNA, 1455 bp, Arabidopsis thaliana landsberg
ttttgaacacatctcctttgcttttccttccaaaggacccaaacaaatcctaaggaggctaatagttaagggaattaaatttctttcatcttaaccacaaaaaccacccaattaatttctctctaaccagccttggccttttaattaattaaccaggaaattgaggaaggaaattacagaaaatctcattcgttaaggaaagatgtaagggcagtgagccaatcagcaccactttttcccgagaaccgcacaactcctccttcagaaaagctgttacggatgcgatcaactctgacacggaaattcaacacttatgcattgccaactcctgtggaaacaacgagaagtccctcatctactacaagtccaggtcacaaaaacgtggggtcatctaatcctacaaaggcaattacaaagcagatttggtattcatccccacttgaaactcgcggacctgcaaaggtttcctcaagatcaatggtagccttgaaagaacaagtcctgagagagagtaacaagaatacatctcggttgcctccgcctttagcagatggactcttgttctctcgtctcggtacactcaagagacgatccttctctggtccactgacaagtaaaccgttaccgaacaagcctctctctacaacatctcacttatactctggtccgatcccaaggaatccagtttctaaattgccaaaagtgtcatcatctccaactgcttcccctacatttgtctcaaccccaaaaataagtgagctccatgagcttcctagaccaccaccaagaagctctactaagtcctctagggaattgggatattcagctcccttggtttcgaggagccaattgcttagtaaacctcttattacaaattcagcttctcctcttcctattccacctgcaatcactcgtagcttctctatacctactagcaaccttagagcatcagatttagatatgtctaagacaagtctgggcactaaaaagttaggcactccctcgcctcctttaaccccaatgtcattgatccatccaccgccacaggctcttcccgaacgtgcagaccacctaatgatgtccaaacaagaggtaaaccattaattttacttcttttcactgtctattagttttttgtgtggtttagagtaaaaaagtcatcatgtgtgtcacgtttaagtagatgtgggcaatccgatttttggttcccttcatgtgttccgcaaagttctgcttaagtgtaaaatctagaattgctgatatacgttctaattggtgaatttgcagaggaggatttaagatgtaaggtgtaagacgtttgtagctgcctaaaaactgtaggaggaaggcattccctatagttgcagatatatgtaaatatcctccaatatttaggctcatggatgatcttagatggatattacatatagtaggtgatcccttttgagaaagatg

SEQ ID NO: 59568 - DNA, 185 bp, Arabidopsis thaliana landsberg
  unsure (1)..(185): unsure at all n locations
ccccccccttttctttcncccccccccccccttttccccccttccccttcctccccccccccccccccccccctttttccccccccccccccccccttttcccccccctcttttccccccccccccccccccccccctctcccccccttccctccccccccccccccccccctctcccccccccc

SEQ ID NO: 59569 - DNA, 918 bp, Arabidopsis thaliana landsberg
aattttcttcaaggcctgcaaaaggcaaccatagttgaataaactttattacctcaatattaaagcaaaacttattcgactcaaaaataaagcataaaactgttgcaagacaaaacataagaaaattttgaagtaacaacacagaataaggtctcaatctaatattttccatcttgggatcattctcatccactatacaacaaaataaaagaagttcttcctaaagcttctggacagaatttcatgaagtatgaacaaaagtgatagagcaataaacacaccaaacttagaagaataatgacttgaaatatccttctctaaaaactggtttgagagcagtatccgcagtgaccattaagttgcaaatgtcgtaaatgcatttagctacttgctaagcgacaggatttagtaacaatctagagttttcattagataccttttcaaaaacctcaagaatggcagccttttcctggaaagttaccattgctgattgttcagctttctttgtttccccaagtactagtttcttctcttctaaagctccctgtctccacaacaaacgtttatactagtgtataccaaaagtttatcttaggactagtactagttggaataaaaatatacctgcaatttgtccggtgattgaacaatttgtgagcggaggtttgcattttcttggacagtttccacaagatcaaactctgctttggaaatctgtagagagaaatacacatgtcaggagcagaaaacgcctctcaagttcaagcatatgcaaatcacctaattgacaaacaaaatttgtttcttcaccaacttcataataaattacaaataacccaatttagcttgaggaaggagctcgacaccatatcctgaagttacgtacctcgttatccatctgtgtactcttctctctca

SEQ ID NO: 59570 - DNA, 425 bp, Arabidopsis thaliana landsberg
  unsure (1)..(425): unsure at all n locations
caggaagagaaagaattttattactatgctacagggggaggaacgtctagttttttatcaaagacgagaaacaaaagttggtgttcgattttttagcaaccatctggggtctgctgaagagagagattgtacttttgatctccctgtttttcatcatcaacaacagcagcacctttcgcctcttgatgggccattttcggaggaagaggtttgggcaactattaaggcaatgaccttggacaaggcccccgggcctgatggctttatggggcgtttctacaaatgatgttgggggattattaaagaggatgtgctccttgccatggctgccattcatagaggccatgtattcaagtttagattgttgaactcagctttcatcactatgctgcccaagaacaggatgctactaccgntaaagatta

SEQ ID NO: 59571 - DNA, 979 bp, Arabidopsis thaliana landsberg
aggacaaataaactaggcgtgacttgagaagagaactgcaactacaatcctttgaacactcgtctggagttcagaacaccttttttcagcttccttcaacttctgtagtgtattattgcaattggttttagcattgagaagctccttctcaagaacccgattcttcttttccaaggagttcatcgaattctgtgaataaaaggtgttagcagatacacatgaacaaccaagacgacaagatttgggtctctaaacacagagggaaaacattattaaaaaatcaccaatatgatgctacattgaaaagcagagagcagtgaacaaagaaaagaataagacaagctgattgaagatgtagtcacttttgagaccattgctcagaatcttttactaccctttcataaacacaatcaatatatatcgaacttcgcattcttccgaacctagatcaagttaaaatagtcgatgggaatttctgtatagccagaaataagaggtgtctatacttcaaactgcagccaccactctttaagcacaaactgagaacaaaggaagagcatacaagcatgaacaaccagtagattaactaaagtatcattgcagttcacctaggggaagaaactcaaagtgtctttatgacgaagaaagctgagatgctattagtacacttccggaaagaagtcctgtatttctacatgcaatatcagattatcaggtgtttcaaaattctatagactttcagcaaagtctttgccaaagagaaaacctaggtaaatatctaacttaaagaaaaattaatgatgtagaacagaacccttaaacgtccctagtcccaaatcctaaaacaacaagctgtttaacatgtgttcaatataaaagaggaaaattaccttcagcaaggcgttatctttttttagttcaaccattccattaagctctctttcaacagcagacttctccttcatggatatgtctagtt

SEQ ID NO: 59572 - DNA, 1057 bp, Arabidopsis thaliana landsberg
aaatattaatattattgtcagtgcaaaataaaatatttcatctagtattattgtgtcatattgcgttctgagtcaacccactctacttgtgagttgtttgttatatccgaggatcataatttaaactaaaatattaaattttactaattactattgcttgttgattggcaagaattatagaagttatctaagacgtaatttggtttatagttttcaatttaaaccaagtagataaataacctctgcgagaccaatacattcttccacctttctccgtccctgtccaaatatttgcttctttctacataagaactcgattgattttctttgccccaactaccttttttcgggagcctacgctctgctctttctccattttgccaacccaaagtttgtagtattatgtgtactatcgttttaaattttgaaatatttttactttcacttcagattttaactatgttaaacagattttgcatttgtctggtttgtgcattatatcatatctttagtttcttttgattaaatatcggggagggggaagcccaaaaccctccatgttaacttagttgggttttcaatacaagttgaagctcaaatatagagggaagtaataatttgaaaatcatctatcaaaaaataaagttatttaatttttaagtaaagttgattaaaatttgtggttgtgttattcaaaccatgagaagtatgatagagaagatttatcataagcacttacttctaactcctgcttatgccggttgaagatatttataaagtttttgcggatgactttgttgaactaggcgattaaagaggcaaaagattgagaggatgtagcaactgaaatttcaatggaaaagttggttcaacgcaaccgtaatctccctaaatctaaaatttattaaatatcaccatatatataatgtccaaagtaccacacaaaatttctcatttcgatccttaattgaagagaagtagataggttgaatactaatgcggtcctttggtccagcactacttgaaatacattactaagtggtattggtgaaactat

SEQ ID NO: 59573 - DNA, 1083 bp, Arabidopsis thaliana landsberg
ttaaataagagataatggtacacataattgttgtcaacaagtgtgtttgcatgttaacaataattggtcagttagagaacaaagactctatctatggttttcattaagtattattatatatcttgacttaatgcttttatgagtctaactcctttcttggatcataaccggcaatccaccgttaaccgtcgcagttaaaccaggcgcaaaccggagtgtctcgcttgtttcaggacttgcgacccgtgtttcgaacctcctaatgattgccacagctatggatttcatctccatgatagccatctctttcccgatacaaaccctagctccggcctggaaaaccgggtacttaaccggattctcgggccggaacttaccttcgttatccaaccacctctctggtttaaactcttcgtaatccgggccccagatccggtccatccgacccattgcataagcatggtacgtgactctagtcccactattcacaaatgtaccatcagacaaaacgtcatcgtttaaagcgaatttggaatcgaattgaaccggcggaaacaatctcatgctctcgtacagcgacgcatgcaaataatccatctctctcatttcatcgcaacgagcagtgactgagtcaaaaccggtccccataacccggtccagttcttcccggatccggttctccacttccggatgacgggtcaataaccagaaaaatccggttaaaccagcagctaccgtatcccgaccagccaatagaaaactcacaacgatgtctcggagatactcatcatcgtcctccgccacaaccgccatgaatctagaaatcaaatcatttttacccatcaaaccggttaacctccgttgcttgattaaatcaccagctaaccggtttatcacattgatagattcttgaagctttttctcagaaccaattcttaaaagccttttggttttccataacagaggaaacggagctaaagctcgtttcgccgataacaacgacgccgtatcgaaagcgacggcgaattccgatatcggaaaaggtaaccggagacaatctgggtcaaacccaaacgacaattt

SEQ ID NO: 59574 - DNA, 696 bp, Arabidopsis thaliana landsberg
actcaaaatatacataactcaagtttctttttgattattagaaacttcaaactttctaaatcttgatataaggtttccgggtataaataactctgttgatataatcttgtctatattggtgtgctaactaaaactaaaattttctcttctcttgttgtgtttacagggaagatctaaagaagttaaaggtgagatgactagattgatcagaatgtttttaaaattgaaatgacttgtttataggttagtacctaacttgtttatggcctacattgatgatgatagggtattggggacaagagagcagcttacatagttgagctccgcgaagaatctccatttaaaacggtaagtgccataaagtgttacaaatgagaagttgcatctctatcatgatggatttacaataaactgttgatttttgtagcatatattcactagcaaataagacttgaaatggaatgcttttagcatatagtcactagcaaattcagttttttcaatgtgaagttcaatattgttttggtttgtatgtaagctttttgtattttctactgcagcttgatgatttgcaaagtatcggactctcagcaaaacaggttagcttatcatcgagtgcttcagtttctcgttttctcccttaaaacaagagtcaatagcaaaattgttttgatcatgctcagagagtttgagtaa

SEQ ID NO: 59575 - DNA, 1122 bp, Arabidopsis thaliana landsberg
caaatactgatgaaaaagagcctgtctttgcgtgactatctctgaaatacaataactcttaagagtctcggatttggccctacattttgaatttgaacaattaggtctctggttggagtcagaagttcttcgaacttgatcaaaaactgatccatctctgcgtgatgtgtcctgacctgaaaattttggtttcagacagatttatataccaaatgagacttcccattacaatcactgtacagaaatttcatgtccaaatctacgaaggctttaattactttgacgtttgccatggataagagcttgtgagaagctacataggcaacatctgagtcatttggtctcttttccacaaaatagattacctcagcaacaccagactgcaagaaagaaaaccgaaatgacaaaagtccatatgattgtgatgatctacttgcatcaaattggttaattggactaactagaacattttgttttctatatgactgcttagctgaagacattgaccataaaagattactagagtagcttattaaggatccaaatttgacaaatcaagccaatggtatatagaacaaacctgtaaaataatcttggcacattcattgcaagggaacattgtcacataaagcttctgcaagagattctgaggagcacaaaacaaactcatataaaccatccacacacaaatacttcggaacagaaactgcagcagagttccctaagttttctataccaaatagcatttccaacttattagcttttgcgcagaaacctaaaagagaatattctgacaatgatcttgtgtaggatactttaaaagttttaatcttttcactcaagccagaaacaccatgatttgtgagaaaataaacactgaacaaattccaaagaaacaaacctggccagccgccgatgcgtggtttgtgtttagtatggcattgacttcagcgtgacaaacatatctacaaaatcagagtcatgaacatcagagcttagcaatgagcctaaacggatgagaactgaaacatctcaccgtattacagattcccaaagaaagtgtgcacaatactcatcaaacaagaacttaaagattcagccatagtttgcatcactaagatt

SEQ ID NO: 59576 - DNA, 1125 bp, Arabidopsis thaliana landsberg
aaccttccgccaagcggtgtattcaagaatgcactgaattgcttcgtgtactgtaatgtaaagaaacgcatgagcacaaggttgccaatagcagctggaatcaaaattcatcaatggccaaagtcacagaacatataactctacaaaaccacccaattactttccacttatatagatgagaatgattcaatatatcagagtgtatacataactaagaactggcttcttcgctcggaatagtgaaatgaagtattaccttagggaaatttcttctgaaatcggcagagacagtcctaacacgaggagtaataccaaactcacgatcaatctcacgagcacggtcagcggctgagctagcagcggagctaaagcggcgagaaacagcgtattggcgatcaattcgctcagcggttttcttagcctcaaaaacgaattgctcgaatccatcgttagcgcttctccacgcgtctctccatgctttacctgacttaacgttatcagccaaacggtcaaagtcgccgcgttggaaagctttcacctgtaaggaagaagaggcggcgcgtgggtgtggataaggtgtggtgatggtgaatctaggtgatgtggaaggccacatagaaaccggacaagggaggataaatcccagttctctgtgaattccaaggaaggagaaaccacaagtctagaagatgaattgagaaaatagaattatcacctcgaagatcctgggctcgtttgagaaaattgttctttttgattggttaaacttgtaaggctataaagagacaaattgaaaacctaaatcacttaaccggttaacaagacattaaaccggaaataaattaaataaaaccaaattacatatcatgttggtttcttctcttgcaacagatgggttccatgcttctatgtgtgtcttttgtatattttacatatttgatttctaagatttttaatgactaaactcattcagtaatctgatacaaaaccatgaacatgaaaattatcgattgacaataaaagttttatctaaaactcttcaaataacaatatatatgcaattaaaagttttcttatatgaaaacaaaattaaatggacttgcatatttatttacaactttttaa

SEQ ID NO: 59577 - DNA, 625 bp, Arabidopsis thaliana landsberg
gctcgcttcatcggttctagcctgtttcgacgagacattgtatctggtttaggcagagacgagcttcttcttcacatgtcgcagctgagaaactactgggatcaataggtagcgcgtaaatttcgtaaacaaatgttcgaaaaggtcggttttgaatcattggttatgtcaaattgtcgttctgtaatgtaacagtcacttttgtatttaaagataagatcataaagtgttactactacagttctaattctgatgaaacaaattcatgaattgccgaaaaattggcaagaatagcttctttctcgctaccatcttgatagattagcaggactaagcagagggaaagcttcccagaaccgagatgacgaaggtgaaagatcaaacgcgaacggattatccttagctgttgttgtatcatcagaaatcttgactggtttagcttcaacttgatgtacctcttgctcaacgtcttttgaccaattagcctttgaactaacttcttgaagttaacaggctcgactctgtaaactttaggatgcttctctgtagcagcccgttagggtttttttcatggctttgccggttgcttagggtcgaatgaagtgaggagttatagaaaaaacat

SEQ ID NO: 59578 - DNA, 190 bp, Arabidopsis thaliana landsberg
agaggcataatgcgaaagaacactaaatttcggcgccacactaatgacaagaagtgagaataaaaggtcggtaagagataagagtctttccaaagggtggttaaggaatttagacattgacatgtcatgattaattactttatcttgtattcccgatgttgtcagtaccattgattctttttttgctttt

SEQ ID NO: 59579 - DNA, 617 bp, Arabidopsis thaliana landsberg
gtaccatgaccactatggtgtattaaataactatcagtagctcttttctatatgccccggttctgcaaatttccggtgtggtcgtttccggtccaccgtttacaaaagtagctctacaatatttgcttgtgaacttggttggtcctaggccatacatttggatggctttaccgtttacaaaagtagctctacagtgtttgtttgagaacttgcttggtcctaggccatacattttggatggtttttccaaactaatacggttttctcttaacgattttctacgacttacaacaccatttatccgccacgatgagttacatttacttttattgggcttagggtcccgcttttctctgaacagggcctgcctgaactaacaccttaagttcttaaacggatagtttaggctttgggacgggttgtacccctatgactctttccttttctttggcttctattccctggtcttttaatcttttaaaactttggttcttctttttaaaccaccacctttttatagtctcatttaaacaaccccagtaaatgtagtcttaacctttttaaaaggcccatttttggaaacctttttttccaacttgggtcacccatatttttta

SEQ ID NO: 59580 - DNA, 106 bp, Arabidopsis thaliana landsberg
gtggatcccccgggctgcagggggggggaactacaaatgaagcgtgcatactaccaccatctattccagaccgacatgactataacccttcctgtgatgaatactg

SEQ ID NO: 59581 - DNA, 460 bp, Arabidopsis thaliana landsberg
  unsure (1)..(460): unsure at all n locations
ccccccntccccccccccccccccncntnnnccttttccttnncccccttttcccccccccccccnccccccccccccccccccccccccccccccccccccacntcaacccccccccccccccccaaactcctcttttggttagtaatgcccncncccngcccgcgcccccccaaaaccaataaacccccccccccccgccttttttctcccccccctctttttccccccccccccctttctcctcgtccccccttcttccccccctcccccccccccccccccccccccctctttcttctccccccccccccccctccctctcccccctcctcttccccccccccccccccctcccccccccctctttccccccctctctctttccccccccccccccccccccctctcccccccccccttctccttcttcccccccccccccctccccccccccccc

SEQ ID NO: 59582 - DNA, 468 bp, Arabidopsis thaliana landsberg
  unsure (1)..(468): unsure at all n locations
actacccggagaaatgggctatccacgatttgggaacgcactatcccaatgctactggacatccagacggtgctgatgagcctatgccactagaggaatgcggtaacaatgtgatcatgatgctcgcgtacgttcagctatccgnnnnnnnnnnnnnnnnnnnnnnnnnnnnnnnnnnnnnnnnnnnnnnnnnnnnatacctcgtcgatgacagtctctacccagccctgcagctgtccaccgacgatttcgctggtaatctgcctaatcaaaccaatctcgcactaaaaggcatcatcggactccaagctatgtcgcaactatcgcgcatcgtcggcgaaaccgatgacgcaaaaaattataccgccgtagcccacgattacatcaccaaatgggtagacctgggtatgaacaagaacgccactcctccgcacgccattctgaattacggcaacgaggacacccatg

SEQ ID NO: 59583 - DNA, 1068 bp, Arabidopsis thaliana landsberg
actgagaaagatatatcaaaggccttgttcaaccttgttgaaccaaacagagatgaggcactggcagtagatgctcgtcaagagatagatctaaaagttggtgtagcattctcgcgatttcaaacaagttatttccaaggcaaatatcagaatctagactgcagagttatctcgtcagtttcctcttgtctccttcctttcctctctttttgttctgtgtaaagagtcgctgaaaagtagggtcaacttctttctttagtccaaatgcattttttttcttttttccttggggtatttggtacaattgatcatataagatgcagctatggaattctgttgtggttatctcctgtcattttgagtgtcagagtaatgcatttcatgtaaatactaaaaaagagtacagacatagctttgtaagacttaggcttgtatgttgtttatctttgtcgaagcacctctttatttctcatgataggacaagaaatgagttgtcgtgattcaatcatggttctggttctcttgggggtttaaattcgatcatctgtgttttccttactaagtattcctcagaatgctcgaaagagtgtgcgtgattttctgtccattccgtcagatttcacattcaatagtagttttttctgttaactatattgtcaactagattttcccatcttttttatgatacaagtcactgtatccatctggtttaagtcttttaactacttaaagatccttttgaatgtttatttcaggtatgggccatgccagacacctactcttgggttttgtgtgcaacgctacatgcatattaatactttcaagccagaaaagttttgggctctgcgaccttatataagaaaggatggttatgagctccaactagagtgggagagacgaagattgttcgacctggaagttagtgtctcattcttgtcttagaatttctttgacattcttgactgttgctttctaatcttatgttgctgatatatatatgctttaacaaattataggctgctactgagttccaaaattggtcgtggaaggaagaactgcaaaagtatg

SEQ ID NO: 59584 - DNA, 552 bp, Arabidopsis thaliana landsberg
agactaaaatgagatattaatttctccatttttggactgcctatttaagttttttttttggtgtgggaaagtatagtttaagtcttaaaatgatgattatattttccattttaacatataagtgtgatgagcctggctatttcatatttttggatgtgtaatacttaaataaaattaaatagttacaaactaatctgatttcatctgaaagttaatatataaattagaaatatgtcataatttaaaaaatatgtataaactataaatgttttttctcttcctcaaaatataaagattgaaaaatacatatggaaatgaatatatcaagggcatacctgtaatatattaagggcataactgcaatatatttctaacatatagacttttttcatatttttatcagaggaggtattatattctctctagtgtgtgacatcagcatcttatgtttatatttgtccacctcatcttttaatttataaaccatgtcaatctttcaattaggataaccttttggtccggatattcgataaacatgtctggcgatttgtt

SEQ ID NO: 59585 - DNA, 489 bp, Arabidopsis thaliana landsberg
  unsure (1)..(489): unsure at all n locations
tcgttctagggggagccgggctctaaccgtaatctggcttcatcacacacatagttcatctttccgatcgtcccatctctgcaatcaggaaaatgcaatctcgatccaaactgcatatcacctctttccttaatattctccataatatctttcacaatcacaccatccatatctcctttagaagcaacccatgaaaccttaaggagcttgatattgtaactaaatagtcacaagagttaatcacatgttatttcatctatcatttttaaatgtgttttcaaatctgttgttattaaagagaaattactaactaactcaaaataataatttcaacaacaaaagagattaattatccaaaaaaaaaactcaatcctcaactaaacattctttcaaaagtaggacttaataatcttagattgagatnnnnnnnnnnnnnnnnnnnnnnnnaaaacttcccatctttcataatttagtggggagatggcaagt

SEQ ID NO: 59586 - DNA, 1105 bp, Arabidopsis thaliana landsberg
aaatctatcgaaaacgattttggtaatcccattcccatgagtgagttttgacccaaaacaaatttaaaaaagttaccatttcattagtaaaacggtaaatatggttcataaaccttttagtggttattggtcctgtacactacactcgtgtgtgtcaacttcagctatgagatttttgctgtaactttttggataacggttcaattattacaaaggttatttcttacgtatgagaggtccaaattacaattgaataatatttgatgacatacaaagttaaaaaggattaatcataagaaatgaatgttggaatggaatgcatctatcgatctgactactttagatagcttgatgttggacttggtcagcaaagaccttatcatactcttgttgtattgtatatatcgtatcacacagtgactggttttttctacttttctctttggaacatatcaatcattatgtataaataaattttgtccaaattaatggccatttgtctcaaccataaataaatatttattcacacacctatatgactatttgagataattccatggtgacttggtcagcaaaaaccttgtcatactcttggtgtattatcacataactttgtagattatattcttatggaacatatcatatatatttgtccaaattaaacccatttgtattattttcccctctcgagtttaatatttcttatttagaaacagttaacaacttgacatagctcacataatcactcacagactatatatgtataagcaactaccattttaaatattatttagttatattgttagactgcaactattatttattttctttgccaaacaaatttatattttttcatgttaatacaatattatatcttgaacaaatgtatgcttaaatatattgacacaaaacaaaaacatataggggtttttaggaagaaattttgtacagattaattaatcctcatcatatttttattttatatcttatttttagaagtgtatgattttaaaactagaacacccaaatctctagtaaatttcattcaacataatttatatgttaatgctaatctattgaatgttaataagaattgtattagacc

SEQ ID NO: 59587 - DNA, 1053 bp, Arabidopsis thaliana landsberg
tactagattatcaaaactagcattaacctctatgctaacgtcaaaagctaacatgtgttttctagaacttgccaaaagtcgaacagaacacgggtttaggtcacaatttaacctcgtttgatcggattaagacccgactcatttcgtttttgattagtattttttttttgggaaataatatgaacgtcaaaagagttaaagacaacgtactacgtactactataaagtagcattgttttcaacaaacatgaatatgggtgacatattttgaaataaatgaatatgcatagacaaggcaagatacatgagccaagaaagtataatccttttttcttatgttttaggaaaaaaatttgtattgaattagatgatgtttttttatttttaatgcaaaattgattagtttttgttgattttgacgatttatatcatgcagattgttcaattatgattgaatagtgtttagaaagatgatatatagtatttttgtttaaatgcgaatatttgttatacacaatccaaaaacacaaacagaaatataattattataaatcattttcgtttaggattgaatagttcttcattttatgttttaggattgtgtttataaacttatggcttttgtctagagaggtaggtattaagatcaatacactaaaattttacagacagttgttataagttattggaattgtcgcacatcgaaactttgacaattttgacactaatatatatagtagatgttcaatcattgctaaaaatctctcattaaacaatcatagttacacaatgaatacatggttttagatttttggattcataaaaaaaaatattgctgctctaaaacatataggatttttagaatgtaaatcagacataaaatttcctagatgccttaacgattactactatccaatcaaaattcacaactcaaaaccaatgattgtctctatactaatttgaacacaaattttgtgattggcatatccccacccaagacaggcacatgctgagtacaaataatagtaaatacttatggaacatcccaaagag

SEQ ID NO: 59588 - DNA, 1259 bp, Arabidopsis thaliana landsberg
cggaggaggaaccaacgtgggtggttcgtgtgctgacgtggcgacaagttgttcgtttgacggtttagtcgcctcacacggttttgttttgttcttaggattcgcaaaaagtaaaaatctttcgagtcactgacacaatctttaataatctcacttatcagttatcaccgaccaaaagaaattagatgattattgtttaatttatttattattattgattactctttattttaatccattgttattgaatttttttgacatttaattatggtatatgcaattaatttcttttatgtcaatattgtatcatcaagatctatagatgttatatgtatacatcattgttatatttttctatttttatttccacattcttattggagaaaattacaatattactgaaaataaaaagatttgcatgccatttgttgagatttagttattattgattaactcttcattttaatccattatttgtttttgaaaaaaaaaagaagatttgcatgccatttgttaagttttttttttttttttaataaatatggacttctcatttataaaggttttccccaaatatgggattggatcacggtaatacacaacgagaaacacagttacaaaaatgcaaattggagaataataacctggcaccggaaaggaggattgtatcctggagacaccgtgaaacagagagtccgacacactagcgacggcagatgcgcagtccacagctttgcagtccgacacactaatgacgacacatttattaagatttagttatcaatggttaactttcattttaatccattcttattgagtctttttgacattttcttatggtatatatgcaattgattttgttttaggtcaatattatatcaagatccaaattaagcttttaacaaataaaaaaatataagatatgcatgcataattgttatatttttctatttttgtttccacaatgttattgaaaaaatacgatattatggaaaaaaatatatgcatgccatttgttcatatttttactaacttattggctaatgtaaggatatgtttaaagtatattttaaaattggtcaatttgttttttatttctcaataaaacagtaattaataattaagagatacaaatattacattaattaaattgacaaaactaattaaattaaattatatatatatataggattgaatttttgtacctaagtatggtatatcatatttataatttacttaagttatttactgaaaaatca

SEQ ID NO: 59589 - DNA, 142 bp, Arabidopsis thaliana landsberg
tccttgcttgggttacggtatagtgcaataagatatagtacagactttaaataaatgatcattcggtggggactgatccgatctactttggaacgaggccaaccgctgcttatcacaacctctggtgccggtggaggttagt

SEQ ID NO: 59590 - DNA, 1654 bp, Arabidopsis thaliana landsberg
ggacttgtctccattggtcacgttatcttcttttctcagaatcataatcctgtgttgtgtagcgtctccgtgttcctagagcaaatttcgttgattgtttagattttcattaatccattaatacgattaacctagaaaattgttgaaattgcttagaagagtttctaattttgtcaaattgatggtgttttataggctgtggtttggtcaaaaagaatgcggcgcaagagaagatttgtgacagtgtacagagcttttccagaaggttgtggtgttccttcagaacctatagccaatggtgatgaaagttttatgcaatctaagttccataaggtaagagatagtcatcatcatattgtactcagactttgtaatgttttgaatgcttagtgattaattagaatcctgtttgaaatgttccaaggatggaattgtcctgcaggctcataaagacttctcagagataacaaaggagtcatcgaatcattcggagaccgagaattctagaactgaagatttgttggatgaaggatcggttcttgattctaatggaagtgttactgattgtcaagagaacagagaaagagagatgagctcggtgaagaagagatgtttgagttcacataacttaacaagtgaagttgagacagagaggataggtatagttttgggacttgcagctaaggcgaaatgcccttggagacaaccgaagatccgaggttcaagacaggtgaatggtttgaactgagtcaaattgagtctgagtttatgtgtattggtttcttgtttgagaagtttgttctggtaactctgagaacaagactctttgcttggttattatagtcactaggtttattagaagtaagtaaagtaatctcataatttagcaaacttgacgacttattttgtcagtactttggtacttttctttcatcttaatttttgttaacactgacactcaatgaaggggtgatcaatttggataaccaaaacaaactaacggacaaaatcggatttgaaacctaaccaaacataaattgaccaaaaccagtccctactattttagttttagtgtggtcagtggtaactattttccccaaataaaaaacctgaaaaatccaaaacctacttaaccagaaacggaaccgaaccgaaccgatgttaaaacataaaccatattgtacttgttctttatccaaattgagaaaataaactgaaatttcgaagcaaaacctattgatcctattcgttaatcacttgagttaatgcaattacttgcgtttggattcgattcgattagattcggtttgactgatacagcaaaaatatttatactgaatgtaaccggaactaaaccggttttcattcccgtctctttcaataaacacttcgttgtaggaggattctcaatcggagacaaaaatcaaaaatcgaaatgcagagatcgattgcgatgacggcgaagagatttcttcatcgcaatcttctcgagaatggtaaacccagaactgcttcttctccttcgtttagccattgcagttcctgtcgttgctgggtacgagcttcttcaagcgtcagtggtggtgatttgcgagagagaataagaaaaactcggcttcgtgatataaagttaaacgatgcgattgagctattg

SEQ ID NO: 59591 - DNA, 432 bp, Arabidopsis thaliana landsberg
ttaagtctatataatttagatctaggccgaatttaaccttcagttgaagtttacgtgtgacgcagggacaaactttatatcaaaccatattcaaaacaaaacaaaccataaaagtttgtgtctatgagaaaggaaaacattactactcacagagcatacagaaatgaattttgccactaatttgtcaaatcctgaaaattattctggttatctaattgctagaacgataattttttgtcacaccagttgagcaaccatatgaacatcaaaagaattaattatttgcactacatataaccactaatcaaactgtaatatatatcaattaaagttcaggaactaaaatacatggtcagaggagccaccagaattcagcttggatggcaatgggtggattccttgcaaaaaagggtttgggggggtccaaactgg

SEQ ID NO: 59592 - DNA, 250 bp, Arabidopsis thaliana landsberg
  unsure (1)..(250): unsure at all n locations
gtccggtttcagacgggcaaggggagcccacagccaccccggacacctgatgccgagacccttggcgcgtgctgaaccacgacacgtacacgtttcacnnnnnnnnnnnnnnnnnnnnnnnnnnnnnnnnnnnnnnnnnnnnnnnnnnnnnnnnnnnnnnnnnnnnnnnnnnnnnnnnnnnnnnnnnnnnnnnnnnnnnnnnnnnnnnnnnnnnnnnnnnnnnnnnnnnnnnnnaagccttttatcttac

SEQ ID NO: 59593 - DNA, 165 bp, Arabidopsis thaliana landsberg
ccctgggaaaggggatcctaatcacttaaatgttttatctaataaaataaaaggatcctcttgtgcttgtctcgcttttaccgttttggtgtaacgtctacttttttgaaggggtccaactgctaagttgggtgaacaacagacatctcctacgggcagggcagg

SEQ ID NO: 59594 - DNA, 1516 bp, Arabidopsis thaliana landsberg
  unsure (1)..(1516): unsure at all n locations
tgtttcgccgcttctcgaggccctcttctttctagtcatctcattgagatttaatgaatcgtgtcttttagtcttaagacggtttgatgttctcaggatgttggtgttggattctatattctcattgccaaagttatcttctttgaagcaagttttcacttcattaggcgtagcgtttgcaacttcagggaattctctagttgttgccatttcctgtatatgcttctcttgctcctttagcctcatctcaagttctttgatctgcaaacaaacaatacaatttcttttaaacatctgctgatatcaggaattcagaagctcgaaaatcccgagataatccatgaaactaaccttttgtcgtagtaacactgcttcttggctctgctcgtctttgtgttttatctccaactctttaatctgggacaccatatcgaatagaatatcaaaatggtgatattaagatgaaaagtttgagactgaatcagtcctactcctaaccttctgttgccacacaagagagtttccttcagactctttcaacttattctcgtaatccttaaccttctgttgccacacaagggagcttccttcagattctttcaaattattctcaagatccttaacctgcaggcatcattttgagaagtttggtaactctcaacaaagtatagtgagatttgtgtaacaataaatattgatctcaagataccttctggttgttagctgcagaatctgattggtgtctctcccgtagcttgcactctagctccttgacctttaatgggaaaaaagatttctgttagccataaaatggtaatcgtggaaatgttaagcagaaatgaaagaaaagagaaggtaccttttgttgaagattgctacaaatctcatctctgctctttagtctctcttgaagctgtgcatattgtttttctgattggttgtggactgaatcaagttggttttgaaggtctttgtttttttcctggagacttctgtatgagttgtctcttcctttgttcttaccttccagattctgaatgttctcctccattttctttatggattcatctttagatcggctttcttgtcttgctttctccacctttgaaagtgacacacgaagcaataatgaaaatctgtgacacaattcaaaaaggcaaatccaagaagaagaaaaagaaaaacttgcataagccataccattgctttcaacttctggatctcaccggtatcaacttgcttccttgcaggacccaattcaacccctcttacacgagttgcaaagttaagtgaacttagagtttcactcannnnnnnnnnnnnnnnnnnnnnnnnnnnnnnnatcaatgtctttgaatcacctcctgcatcatttgcacatacacactagattaccagaagcacagtgtaatcacggattgatgatacttaaacaaaggaacatgaagattattacctagtgaatcttgaagcaaatgtgttaattttgagttcctgaaagttcataatggaaagc

SEQ ID NO: 59595 - DNA, 135 bp, Arabidopsis thaliana landsberg
gcggtgaaggtaatgatgatgagcagtaggtggtggtgatgatgcaaccggttgtggaggtaaggattatgtagctttaggttatgatgatgatgcaacaagcgatggaggtaacgatgatgatgacggaggtgt

SEQ ID NO: 59596 - DNA, 535 bp, Arabidopsis thaliana landsberg
  unsure (1)..(535): unsure at all n locations
catagtaacagaggaggaaaccaaatgaattatatggcaaccagagaggaaatatatggtacaagcatataacattagttctaaataagcatctgttcttgttctattttcaccctatttaaataagcaacacaaaaaaaccattcaatcacacactccataattcaattgtcggataataaaaaacaactaaaattactacttcaacttggtgaagctgcaatcagaccttacatttaagtatttaaccaaatctatatgtaaaaaaacatttgtactaccaatgagcatatttaggtaacctgaatcaccaaacaaaaacaactcaatacaatgaccacgagtaccctnnnnnnnnnnnnnnnnnnnnnnnnagcatgacaaatctgacaagttataacaaggagataagtgtttataaattcctggaaaaattgcagggagaaccgatatactttaaacaaacttagtacttccaagttaaagcaatattggggtaattaacaaggacaggctggtattgtcaccatacact

SEQ ID NO: 59597 - DNA, 1534 bp, Arabidopsis thaliana landsberg
cctcctcctggcatacaaagcaccaacacctttcggtccatagatcttgtgagcactcatagacatcaaagcaacattccacttcttaacatcaacaggtatcttcccaatagcttgagcagcatcagtatgaaacggaacattatgctctttgcaaatcataccaatctcctccataggttgaaccacaccaatctcattgttcacagccataatagaaactagccctgtgtctggcctaatagcttctctcaacatctctaaatcaaccaatccatcagttttcacaggtaaataagttacctcaaatccttcttgctgcaaatgcctacacgaatcaagcacacacttatgctcagtctgtgtagttatcacatgtttcttcgtgtccttgtaaaagtgcatcactcctttcaccgccatattgttcgcctccgttgcaccggacacgaatacgatctccttcggtgaagcttcgatcagtttcgcgacctggtttcgtgcgttctcgacggcgttctcagcttcccagccgtagagatgcgttcgcgagtgaggattcccatactcatggatctgtgaagcattcatcgcatcgaatactctaggatcaatcggagtcgtcgcttgcatatctaagtaaagaggtctacctgaaattcgaactcctttcatcataatcgattcatcctcgtaattcacctccgtcgcagcagcggcggttgataagtagcgacaccgggaaaaagtgccgtgtggtttggttagggttctgcggattgtggcagagattaccttagacgccatgtttctaaaacctcggtttgtgtttcttcttccgatttttgtctagttgattgattctcttcgattgcttctccgtgaagaagaagaagatgcgagaggtgaatatgttacggtcactggcggtttcatgacggtggtaacgtggtcgtctctgaaaccctaaattttcgagtccatgaaagtatcaaaagcctatgagaaactggcctgttaatatacataatgggcctataagttgcccaaaactatttttatttttttctttaagaggctcttgtatatttgtctaacctggtccactaaaaaggtgaaaatagagtctccatatcgccaattaaaaaccgtgaaagttcgtctacatatcgaatacaccttatccgctttgatctacaacataccaacaaataacaattcaatcagaaattacatgccagacgaacaaaaactactacttgaagctatttcctaatcctgacataggaatttagaaaaaaactctgagaatcagcagctttaaccaatttgaactatagctagacgaatttttggatctaagaaagcaaagttgtgacgaatttgataattaaataaaaaccataaacctaacttactaagtaagagactataactatacagaaaacatcaacaaaaagaaattttcatccggaaccatttgaattatccttttatatatgaacattgaagtctgtagaagcttgtgaagcaa

SEQ ID NO: 59598 - DNA, 1532 bp, Arabidopsis thaliana landsberg
  unsure (1)..(1532): unsure at all n locations
caaatggagaaatcaaaagtattattcacttgaaaagtgatttgattctctggtcccctacgcagatatataagaagaaagctcaaatctgaatgtttggtgagcttacaacaacaatctcttataagaagcaaacaaaaaggataaagaaaacaatattatttttttgggtctgcggtggagaagatttttcaacagataaaggtggcaagcatgacaaaagcatttgtctctttctttcttttcccaccaaattcatataaataaagatattatgttttgctaaaaaagtacatattactaaattctaaacaacttcaaataataagcaacataatatgaaagggagagatcatcttctcttatatatgaattgcgttaattagtattgcagagtatttgattttacctgcacattttcaatcagagagtcgcaatagcatctgaagagaccatcaccacctgtctatatcagtgaaaggttcagggtttgcgatttaaatctgaagtatgacaaaaaaccatttgtttataaagattatctgatgttagcattcaatatgtagcttgagtgtggataataatctattaaggatttgaaggtttcttggtttgaagtaaacatcaaagaggccttactacgtacaaaacttcatttaaaaagacatagtttgtggcaatccgaattagtaaactagacttgttcttcgacttatctaattcataaataatttatcacaataagctcacaacttatcattgattacttgcattatgcaatctagaaatactaaggattataaagaacaatttgttgaagacagctatcaaatttaaaagccatgaacaacaaaatatagaatacaaaaacactaatatatttacctgttcctttttatataatcgttgtcaactcttctgcttttggctatttttcccaattcgtacaacaagaaacctataatattgttttaaagacatctttgcatcaacacacaattgacatttgatcaaccaagtcaactcttttttaaaaacatggcaagatgatgatacaaggacatgttaaataagttctacaaaataccaaaaaaaaaacaatgcagaaaaagagaattcagatgagtaaggcagagagatcatgttgaaacagagaaccacctgcagctaatagctgggcagtagttagtctcatattcagccactactgtttcatcataatcccaaattgagctaaacaatagcaatnntcaaagctngaaaaaatcttctcttttaaactcatgcataaaagttagatattgaaacagaaatcctttcgagaaaagtaaaacancgaaaagaatcccaaagattaattaaaaaatgacaaagttgctttaactcataaagaacagatatacccgaatgtcaaaactcgtcgaagaagccaaaatttcctttcagccatttcgtcgaacacttgatgggcatttttcaacagaaaggatgatatgatgatgacctggggcagtttcgagaatccttttgac

SEQ ID NO: 59599 - DNA, 488 bp, Arabidopsis thaliana landsberg
ggaattatagaacctgattttgaatgctggatctttgataatgagagatcattgatgttgatgaagttctgatcattgtatctatgtcgcttgagcagttattacttaatggccatgtctctctattttatgatttaagaaaagaaagaaaacaaattaaggacaaattgtatttattgatgtatagatgccctaaaaataaaataaaaatcactacacacaaattgcgtttttttgcaacttgctatatgaccacaatctacatgtcatacttatgaagcaaaattcgtttatcctagtcttcctagatgaatcttaagaacccaaaccaaattataattaaaaaaaaaaacttggtaccatataattaaagttcatcagccataaaccctaaccaatttcatctcattgtaaccaaaaccatcactcaaattttttccccttaaactgaacgaaaacaaacttaaaatatcatctaaaaactattt

SEQ ID NO: 59600 - DNA, 1052 bp, Arabidopsis thaliana landsberg
gattctgtgagcaagaacaatgagaatctttctcctctgtgattttatgatttggaaaatggaaaattttgaatttcgaatctgatgtttttattctacactccacacgtttatgtattttattcgtcaatacttgcaattaattagagccattcgattcagaagcactcatcaaatcgaacggttaaaacgaaacggtcgaggaagccgaaaacagaggtaggcagaggtagaaccgtactacgagtctcgtagtagactagactttatcattctttaatgggcttaaggccccattttgtttacaaaagtgtaagcccatgtgtagggggatctgaaaccctagttcactttaaaccctcagaatcatttacatattagattaaaatttcctcacaggctagagagtagagagtgatccctgtgatcaagctatcgtcgacgttatattttctcctcaaagaacaagggcacacacgcttaaagcacaaaaaacaaatcagttgttttggaaaaaaatgacatcgacgtgttgaagctatcatcgacgtgtctattatgctatgaccttatgaaatacggaagtgtgtccagagactatcagtcatgtcactccaccgatggactctttatctttacacaacattgatatgtctaattcttttccaaattcctctcttccttttaggtcttatcaggtaaaagggcccgttagagatgtattgtatatcttatgagagttataaacgtacatcaaattttcattaaccatcacacgttgaacacttgagttaatctaacttggtttcgcctatgtggtaatgtcgaaactatagtaaataggtctatatatatgggtttaaattggtcaaaggaacttaaatgagaatcaactgaggagtaaacttaaatgggtaaaaacctcacatttttagtatatgtttacgtctagtcatctatccattctaaaactgtatatccattctgtaaaattatcacaaggaacactttttttttttcttcaaagactttagttacgagtaaacaaccca

SEQ ID NO: 59601 - DNA, 1448 bp, Arabidopsis thaliana landsberg
  unsure (1)..(1448): unsure at all n locations
cataccaccatatttttttcaccacgacaacttttacaacattaagttccacaaaaaaaaaaaatacaaaaaatgttaaaaactttttaagctctacttcttagatcttctattgccagcttggaatctcgtcgatggaccacctaccttttattaaaacatcaatggtcaacatcggtttcatgataattctgaattaaattctacaacatacattttcatttcaaaagtttatttttgttatatacatatatagaaccacaaagaagttataagaaaaggaaaaaaaatcaagcagaaagagtataaaactaaataccttactagaacttatacaacaatagttgtcatgaccgttaattttgttgggaatatcatttgaatttgataaatcatcgcaatggaccaaagtcgacgtgccactaaattgcgaacatgaagacgaagatgaacgagttttgaattgattcacatcatccttcaacaattcttgaaataactcttcaaattcctctaaactttcgtccccctgctccaagatatgcaattaccattaccattagcataatcagatataatagtaatgactagtatagatgaagcaaagtagtttgttaccgtagattgagtttgagccataagcgtcaccatttcatttatgaaatcagccattccctacaacgcaataagttgacattgatttagacatatcggtgatttaaataaatcaacattctgactcaattaaaagagaaatatctacaagaagaacatacagtttcgtcgtcatcactatcataagcaccgacgtcatacaaaagcctcttgttggaatccgacaaaactgttgtgaatacaatagattaataaactggagaagacggataaagaaccagacccggtttaaaagaaaaccgtgtaaattttaccagaataggctcgttgaatggactgaaatttcatcttagcttcatctttctctatttcttcaagaaaccgatctggatgccatttctacaccaccaaacatacaaaaaaaaacacacaaaattattcaagaagatcggatcacattcagacaaaaaaagaagaagaagagaagagatgtgaaaacgaaccagaacaaggttcttgtaagaaagtctgagatctccttgtgtacattcgttgttcaaatccaagacagcgtacaagtcttctctctccattaatgatgatagtaagaatgagaaaaagaaagagctgttctttggagtttattggaagcaaagagataaagaaggatcaagattaatgtatgtatagagatgtgtatacgcgtaaacgtggaagaagagaagaagagaagagaagggaaaagaagaagagtttgatattttgggtatcgcgcttttgtattgtatataatactatntatatatacgagactggngtaacaaagaatgatc

SEQ ID NO: 59602 - DNA, 271 bp, Arabidopsis thaliana landsberg
acctcaaggagcatactctactatctgtgtccacttatcccagaccttaacgctcccatactttcttgggcgatcatcatataactacatacacctatatagcataaatgattttgtgttagagcatccacattggtgggctctcaaaaatataatctctcacgttggatgaaaagattataaattgtcattctctagaattaaatacgtgacagaatcatatgattttgatatttaaaaatatttattggtctgaccaataatatataca

SEQ ID NO: 59603 - DNA, 1067 bp, Arabidopsis thaliana landsberg
taaaaaaaaaaacagagtgtgttaatagaaagcaagggtaattatggaaaacaatgattaacaataaagccatctgtatcaaattcgctttttgctctgaaacctcggattatgtttttgatttttttaatagtactgtctttcagattgatcgttatctaacgcgcctcaacagttctggactattgaattacttactgtaagacaatcaactaataactgacttttttaggtttttgggtttcgacaattcaatttattttctttcttttcttcatactcctattacttatttagtttgatctaatgaattatacactacatgatcccatattcttaataaataagtaaataattttgattattttaagtatttttacgatttcgctctcagaatattttttacctgtaatttcaaaaataaatttgacacatccttttttttttgtcaaacatttgacacatcctttaagtaaacaaatctattggtttgaagaaaaaagaacaaaaatcttttggttcattttcatttgacccttgacttaatttttatacatatataatgaagtatatttttactatcatactatttaatataaaacatgttactgcacatatatattaaatcacccaattgctatttcactaaataacaaattattttacaagatgcaagtttattttataaatagaacaaaatttacgaaaaatgtagaatagtaattttgtcgatatgcataaaattcattggtttccttgtttttgttttcctcaatccagtgttttccttatttattatgttgtcatcatagtaaatttagtcaatttatgattaaggctaaatttattcgattaatgacactttgatttcgattttcatggcttaaacttatataatcaatgatctcttggagagtaagagtgacgcgccgtaagtgcgagtagggttagaaacgatgggatataaaatgagtacagatgtagataagtaaatctacagacacaaggcaccacacacacaggaaaaaccaaattccttacttaaaaaaaaaaaaagagagcatttt

SEQ ID NO: 59604 - DNA, 232 bp, Arabidopsis thaliana landsberg
acggtttatccgagggcgaaatcaaccacatatgtagatgatgaatccccataacacgacattcgagaaatgtctctcatacttttccctttatataattgttttgcaataagtttatgatgtaatatgtttaaaaattcccaccacatattagaatttcattatccatcgttataaaaaataacactcaaactgagtcaaatgcatttactaatgattccaaaagcaattt

SEQ ID NO: 59605 - DNA, 522 bp, Arabidopsis thaliana landsberg
aatcatttctggttttctaacaggaaaactaaagtgaataagaaaattcagagcagattttggatagggagaaggaacagtatctctttggctgaacaagcagatgagatctatcttccttttccatgggacccatccaaaccttgtcgacccttgtgtctattttagaactctacatcacttcttttggattttattctttcttacccaagaagtagttaggatttatgattaggaacttaggttcttagagactctagatattataagaaagaatcatgagatattgagattgatctcaagatataattacctaaaaattcaaaatgtaaattaattttttttttgattaatggatctaaatctcataatatccttgtgtgggagactagagcaggttaattgatgtaaaagaaatttatctaagctaaaacacacacagtacagaattagttaaggaattctgagttattagttagtatcttaaaattgttagctttaaaataacaaagaggataataa

SEQ ID NO: 59606 - DNA, 680 bp, Arabidopsis thaliana landsberg
atctgtacaacatcatgacatttatttaccgttcgctgtaactaatgctaattgttactcttctgcagataacttacagcgtcccatatgcgtgatttccatacgtattgaatccctgggcctaggtcaaggtgtgcaggcttatctttgggtgttgtttcttagaaaagttctgttgtgttgtttcttagaaaagttctgctcaatgattttactctacatatgagtgttgtttcttataaaagttctgttgtggcaggcttatctttgggtgtgctaaatttggcgatagtcatcccacaggtacacttctttcaaccatccttttagcattatatttgccgcaactcaaaatcatattcttctttgaatgtttctgcctgtaaaaggaagtctataagcataacatgcagcagagttactgcattatttgtcaattgtcattaataaacgattcgtttttttagttatggtcattggccagtgatgaaagtacactttttatttctctatattagttgattgatgaatttcttccctatgttggttatggtttttggcatcaaactcaaattctgttgttcaatcatttatgtgtttgcaggtaattgtgtctgttggcagtggcccatgggatcaactgtttggaggtgggaattcaccggcacttgcagtatgag

SEQ ID NO: 59607 - DNA, 280 bp, Arabidopsis thaliana landsberg
cccttgtttggtccgggattactatgtgctcatccgaataaagcgcaggcaatgtaatcttcttgttcggatgtactcagactttaacgcacgagtacgggaccgctgatcttaatcgccagaaactaggcccgggtatcaatccgttagagactggccacagaggatggtagggagactctctccatgcgactaggtatcccatagtgccgaggacagagatgagccctgcatggcgatgtgacatgagcatggtaagtgaaccgagcgtcatgggcac

SEQ ID NO: 59608 - DNA, 1433 bp, Arabidopsis thaliana landsberg
  unsure (1)..(1433): unsure at all n locations
tatctacaaaacacatgggctgcggtatagagatagagacaagaggaatttcaattttaactcactgagtttttacttttctttgaatgctaacatattgggttcgctgtgtgaaaattgaattttatctgaaaatctttcaactgcataaacagtaaaaggataagaaaagtaaaaaaaaaaaaaatgtcccaagggttgcgtaattgcgtttcgttcctcctttcaccggtccattttgtcaacatcatgtttcattgtgttttgttgattttttttggtcatatggtcctatgagtgacgtaatacatgaggtggacacatattattatatacacatgaaatatagagtttgattgagaactttcttgtctattatctaaaatctttcgtaaagttaacgatcacaatgaccacaaacttcaacgtacgtaagtttgtgtttgtattttgaaaatcgatgtttggatcttttgaaacgttttgttcagtaatttggaagtttagggtagaaatggtcacttattatatgtagctaaatacgatttcaacacatacaaactacaaagatttgttttcgtgttccacagtgtaacacgtcaggctgacttggataattttaactaactttaccaaggttaatataaaacataatcactaattgcaacataaatagaccattttaatttcaggttgcaattagagattatggtatacacagccacacaaaatcaagaaaaatatggcaacagaaaatcgtctcgtttcaaccctttaagtagtttcatccatccatatggtgccattttaagtacacatgcaagtcaccatttttcctcatatttttttggcaagtctcattgctcgcctctcgttgtagcttacaaaaatgaccattcaatatggttataaaccatcttcatgcgactggcaaaaaaaaaaaaaaaaaaaaaccatcttcatgcatgtcagttttttgttgctagaaagttcgccgtacatatttgtctctcatgtaaaggtgaaaatggctgtaacatggattaaactattaaagattcattttatgaaatataatttccattcattttgctaggaaataatgaggaaagaacaaattaaaagaaatttgtgttcatcacaaaacgatagcaatgtttacggaatggaacctaaaagtaaactacagttagaaagtgaaagaaaataagataatcaaaatgatatacagtaacttggtcttaggagtctaaagagtgaaatctatctgataattaagacaacatgaaaaagatgggctatagaaacgttttgaaatcaagtttagtgggggcagagacaaagtagaaccaactcatcaagaactcaattntaaacatctaaatggatctccatgcaacattattacactaataaataatatgaaaagtttg

SEQ ID NO: 59609 - DNA, 431 bp, Arabidopsis thaliana landsberg
  unsure (1)..(431): unsure at all n locations
cccccncccccccnncnccccccccccccccaaacccccccccccccccccccccgaaggtccccccccccccccccccccacccaccaaaacacaaccctcctcccccccccacaccccccaaaccccccccccccaccaaattctctccccataagtaaccgaaanannccgcccgccgccccccacacctagtaaaccccccccccccccccccccttttctcccccccccccgngtttccccccccccccccccccccccccccccccccaacccccccccccccccccccacctcccccccccccccccccccccccccccaaccccccccccccccacccccccccctccccccccccctatcccccccccccccccccaccccccccccccctccccacccccccccccccccccccccccccc

SEQ ID NO: 59610 - DNA, 1248 bp, Arabidopsis thaliana landsberg
acaagaacgatttagtcagtgggtgtctaaatctcagatttttctgagtgatgtaacatctccatggaagagaaagagtcagagtctcaaaaccgattgatcttgaggatcaacaagattttgaagacttggaggaacttcttacagttgaacaaactgttcgaagtgatacaccaaaagggtttctttcttttgatgctattatctccattgagcagtttagtaggtgagctaatttaaacaacaggatcattgaatcatcttcactttgtggttgttgttaaagtattcatttttctttgaccctttataagcaggatgaatggaatcactgggaagaaaatgcaggatatatttgaaactcttgtttctccagctttatctactgatgcccggtacttggtggagtattgctgtttcaggtttttatcgagggatagctcggagtttcatccgtgtctcaaggtatctggaaactgggttgctttacacttattgtttcagaaacggagagtattgtttattggtttctgaagcattgaaaattatctcttcataggaacctgcattccagagacttatattcatcacaatgctcgcgtgggcgaatccatattgtaaagaaagaaatgcacgcaatgatgcctcaggaaaaccttcttttcaggtatttcttagaccgttcatctcgtctgtctggcttatatgaagacaaaagttctttattctcgaattgaatcttattgttgctctgaaggttgatagtggtagtagtataaacaaacaaagtttgtgatattagattgtattctgctctttgggaaactatgattgatatgctggggtagcagatcaatactgatgaaggttattgatgttgaagggacggtttgttggggaagaggcatttgttcgtattgctccagctatttcaggtttggctgatagggctactgtacataaccttttcaaggctctagctactgccactgatcagaaaggcatttctttggagatttggcttgcttacatccaggaacttgtcaagtgagtatggcatttgggttgctttccattacttgtttgagtttcagatagtgtgaactgtagtaaactttttggatagcgtgcatttaaaatctttgtgcattcaatgatatctttagtttgtaaacacttaagagtttaagtgtatgatgtccctataaactttgctttctgtttaatatggactcaatatagcttttc

SEQ ID NO: 59611 - DNA, 1266 bp, Arabidopsis thaliana landsberg
agagagagagattccgaaggacaaagagcaattactctgctaagtgggaagaacaatcactaatctgagtcatctggcattcataaacgcacctttatataagttctatgggatcgtaatctgagtacattaattacttctatgttcctttcacattttgttctgttaaacaatttcataatattgttttgaaatgtataattttagccaatattcggttttaatatttgttactgcctttttttttttttttttcaccaatttgttactgccttgaaataactatttaattgtgtgaaaataaaattcggtccaaactatctactgtagttgccatttctgtcatacatgatactacataataacacggacgccgtgttttaccttttctttggggtcaaatttcgtataaagaaaaatggagacgaatgtttttcttcggtgcataatcgcaccatttaaatatatgtctattacataatcaaaacgaaataatgcaaaaagaaccacatcacgacaatacattattagaatccacgtcacatatttgtcttccacataacactcacaccagaaaactacacttttctaataaaaaaaaaacagatgataactaagctaaagacataaaatttgtaatgtttagtgtcccacaccggactttaattggataaattactccataaaaacaaaatgcaccagatagtttttttataagaaaaacaaaaaaggtacattccagggaatataccttatgattctcaaggattattgcgccgcgagcactcggccacgtacgaaagcgttttggatgccgttaaagaactttccgtaaaaagaacgtacgaaaatatcataatgccttcaatttatctttcgagaatttgttctaatttgttataattttccaaaacattgaaattttcttacggaatataaaacattaatatatgaattaatgtttttccaaagcatacgtaatcctcgctataccgttgcccattccgaagttgcgtatcaaaacgcaaaaggattacagtgaattaacaatacgagaagaccgttcatgagagtgagtatacgcacattttcaattgaagttattggagttgttaattagttgcatgcatttaacgatctaagtctacgattgtgacgtacaaagatatggtccattattggcgatgttgcatatcatacaaatttaatttggtcatgcatgagatgcattcatccatgatcatcaagaatcaaagtcgagacttc

SEQ ID NO: 59612 - DNA, 121 bp, Arabidopsis thaliana landsberg
tccttgtgctgatctgaccgtgtttttcaagctctcgaagcgtcgacaaggtctgctacttcagagtgttatgctgctaaaaaacactgaatcaagtaataaagctcgcggaagagagagt

SEQ ID NO: 59613 - DNA, 1365 bp, Arabidopsis thaliana landsberg
aagattatcaccgcatggcatgaacataaaaattatcatcagttttatcgtattaccactatcgatctacttcaaactaacaattaaaggttttataacatcggatcggagtgtatttttcagaatcacggagaagaacgaagacgaattaaggaacgtacttgtaatttcacaaggctcgccgttgggaaccggagggagaagaagtaaccgggatttggttacatgatcgacggcggcagagatgattccgtcgtcagattcggggtttgcagtgaaggaggattcaaatgagatggcgtctgtgagtgtgccgtcggcgagtttccagttcgtcgtagaattgaaatcgttatcgttattgcttgcatccatagctctttctcgctttgattgatttgggaagattttgggtttacttattttaccaaaacaaagaaaaaggattttgggtttatatttgaggaagatttttggatccaataaaatgaagatgattatataaatttacattagaatttttttaatatgttaacttaacttagatactatagttaaaaattaattttaaaaaattgaagatgtactaaattctgtcaacaaataccatccaaagtctaccataattaagtgtgaaaaacatagaattaagtggatttccgaaaacttttcttgcaaaacatctgatacaacatttgatccaaacatattacatatctcttgctttcttctacgttttttcttttcctgatctttcaaatccagtgatcaaaatagattcaaaataacatcacatctttgtagctgcatgcacaaagtcgaatcttcatcctcgtgatgtttcaagtatggctaagaaaaaaatagatttgtcattcctcatcaagaatcacaggtctcgttggcatcctttccaatgctttgaaggattcttgttcgtacggaggaggcaacaaacgttgtacatctgcaaatagatcttcacgtccagtcgcctctttgacagcagatgaatcgaggacatagtcgggtattgctggtaacacttcgtccaagaatgattgtaaggtctgcacaacataagaagtgagttaacacggtgacaagagtttgatagcaagtaaaaaagaagagtgtcaatgaaataactcacggtgcaatgcaagagagcagcatcggtcctacgtttccactggccatttccagactccgagtggaacaaattaatcaatggctgcagcaaagttgtactcatgttataacgcttgtatcatcggaaatataacttaataaatcgagacttagatagaccattaccctcactatatctcgaagatttggtcggcctttttcatatttcccgag

SEQ ID NO: 59614 - DNA, 1032 bp, Arabidopsis thaliana landsberg
  unsure (1)..(1032): unsure at all n locations
atcttggagagcaagtgcatggtttggttataaaggaaggttatgagtgtaatgtgtatgttggaagttcgcttgttcatatgtatgcgaaatgtgaaagagttgaagatgcttttgaggcttttaaggagatttcagagcctaactctgtttcatggaatgctttgattgctggatttgtgcaagtgcgagatatcaagactgctttttggttgttgggtttgatggagatgaaagctgctgtgactatggatgatggcactttcgctccacttcttactttgcttgatgatcctatgttttgtaacttgttaaagcaagttcatgctaaggttttgaaactcgggcttcaacacgagatcactatatggaatgcgatgatcagctcttatgcagattgtgggtcagtatcagatgcaaagagagtttttgatagcttgggtggctcaaaagacttgatctcgtggaattcgatgattgcaggtttctctaaacatgagctaaaggaatctgcttttgaactgtttattcaaatgcaaagacattgggtcgaaaccgacatttatacttacaccggcttgttaagcgcttgctctggcgaagaacatcaaatttttgggaagtctttgcatggtatggtaataaagaagggattggaacaagtaacttctgcaacaaatgcagttgatctctatgtatattcagtttcctacannnnnnnnnnnnnnnnnnnnnnctctatttgaatccttaaaatctaaggatcttgtctcttggaattcgatcattacagggttcgcccagaagggtctcagcgaggatgcggtaaagttctttagctacttaagatcctcagagataaaagtcgacgattacgccttctctgcacttctcagatcatgctcggacctagcaacactccaattaggtcagcagatccacgcgctcgccactaaatcaggcttcgaatcaaacgagtttgtaaccagttctctgatcgtgatgtactcaaaatgtggcataatcgagagg

SEQ ID NO: 59615 - DNA, 1118 bp, Arabidopsis thaliana landsberg
caaagctcgacgatgcaacatctcttatagcaagaattacctctgtttacctttcattctcttgctcttacatccggctcggcatcttgtatctttttatcatgcatatcttgtccatctttcaataagaaccccagggaacttcagacaggaagcaagtttttaaagaaaaggtgccctaatggacagagcttagctgttggtcttcaaagaagaaaagaagtgtaaaacaacgtattattggaaaaacagtattggaatttgtccaccgaagaaaagtaaacgagatgagacgattggacatgttgttgggttgtagaaactatatagaagagattttctagctctgtctgaatctcttcgaagatatgagttcacactgttaacattattttactatcttatgatttgatgagaatgtctaaaattttgacctttctagtcaacattacttcattttcttctcttcttagtcaacatacttgatttcattgtagtctgtgtataaatatatcacatgcgacatgtatttcattttgttacaagtgaccaagagagtatatagtcgactgggtaagaccaaaaattaattttaagcaaacataagacaaatgatggacaataacttagtatttaaaataaacaaagaaaaataatttgacatccacacatgttaattactttttctttttgaaaactaacttaaaatgctacaaaataaaaaagaaaactaacctaaaataaacaataacctatcaatgaaaatttatttgcatcatatatttccattggaactcagagaacagtggaagtggagatggtgcatacgaaaacaaatttgtttgagacttttaatcctaatattaagtcatcctcctcagatagtgggagaagagatgatatttttaaggagttagatttgagaagatatcttggtggcatgcaaaacattttttgggtgaaataaactaaacttccacaagaaaatattacttagcaagaaatgaacttcacagtaatcaaactattatatggttaaaatcgtgcaatcacgttctaaggcctctcaggaaccccaaaataaaacccgacacactgtgcttcccgctccataacac

SEQ ID NO: 59616 - DNA, 388 bp, Arabidopsis thaliana landsberg
agcgttgtgtgtaaaatagaggaaaagaatagagacatgcattggagatagtgatgtctaaatcccacaaaatatttgtcagacagcgagttcgaacaatattaagaatcttgtagctccacaaaaattaatatatatctcatttcaaagtacttcccaaaacatgtaaaaacaatcaaagattctttccatcattcactacacagaaggtaaccaaattctcacaccataatgtacagggtaaacctccaaaagaacataatctctcagtggcccttgcttcgtggatcttcagagtgcatagcgttgtagtcttttgtgtaaacccggtgcctcctctctctcgcatatataacccaaaacaccaaagatgacattacagaagccg

SEQ ID NO: 59617 - DNA, 1112 bp, Arabidopsis thaliana landsberg
gtttgttaccacaaacgcaattaaaattggtgttacaccaggactttaacgaatcattaaccacaagtctggtcattgcaattgttgatgaaatattcataacactcataatcactgttttttcatttttgacttttgtcgatttttataaaatataagaaaagagattctatgcttaattttattttgttagattttctatatattattgatattatatttgttacaaatcgccgattaatgttctcaaatattgaaaaactgggcagtaactactgagctaatcaaggaagccttctcatttttgaccatatgtccagaaacagcagacatggtgatcaatattctcataactctcttcttctcaagcagaggctccttgtaaggaggaataagaaaatcgcccctacactcttctaagatcttggctgtggacaaaatggcttcatccataagttcgtactctccttttgaaaatagaaagcgaatttctaagaaactattggtctctctattataaactgcatgacaagtcttgagaccactcgtctccttagggccaggccatttgcggaggatgttatcgatgaaaatgtaagtatcactggcgtgagccatagtggtgtatattatgagactcgtgagttctttgatagtagccgttggtgtcttcaatttttcatggatgattttattgcaaaatccataatcttcgttttctatgcaaatactattgatcagtgcttctgttggtccatcggcttcgactccttcaatgtgaggagtaaaaatataaagaacaagaacgatcatgagaaaaacgaagggcgcgaaattcataattttgtattctaaattttagaagagattgtgtgttgcatagattcttgaataacatgtataaaatatgtgtggtagcttacccatttatgctttactttgttaattacgtttccaaaattagtgagtcaataatgtaggaaaatgaagaacttaccaattgcataaatagaaatacaaatttatcacattttttgataaataaatattgaatataatttaaagtttctaagtcaagtatattaaattcaaagaattaaaaaaaaaataga

SEQ ID NO: 59618 - DNA, 1403 bp, Arabidopsis thaliana landsberg
tgacactgagaagttggacatctcgatacttttggaaaccccgatttgttgatgactcttgaatctatgggacggtgaatcctaaagaatggttccattttaagtttgttttgtattgttggtggaggctggatgattttgagagcacttgtacttgagctttgttctcatatcttgaattagacagtggaatagaaaagatgacaactttgtattagtaagatgatgaacacttgtagctcttcttgctagatatttgattagtggaattgctgttttccctttttttgagttgcagtggatttcaggattgataatggagtagctgctgggatgatgatggggattcctgttgagcttgaggttaccacggttgagaatcataatgaaatgggtgaaagctctggtcaagcaatgattgagcaagatgatgacaaccataatgaactcggtgaaaattctggtgagcaagatgagaaggtggatcttgattctattcctctggctgttgcagatatgacagaggctcaaggagatgagccttacgttggccaggagttcgaatctgaagcagcggctcatggtttttataatgcgtatgctactaaagtagggttcgtcatccgtgttagtaaactgtcacggtcaaggcatgatggatctcccataggcaggcaacttgtttgtaacaaggaaggttacaggttgcctagcaagcgggataaggttattagacaaagagcggaaacaagggttggatgtaaagcaatgatcttgattagaaaagagaactctggtaaatgggttatcacaaagtttgtcaaggagcacaatcactctttgatgcctggcagagttcgaaggggttgcatttatgatcaatatccggttagttgttactctctttcgttggtcaatatttctttatattcagccattgcatttgaaaatccaaattggcgtttcttggttagctggttaatatatatatatatatatatatatgctgatgtgatactggttcgtgactagttgctatatagcatattcatattcatgtgctggtgttttgattttgcttatatatcagttgttactagaaaagacttaaattctaaaactttgctctcctcatttgcagaacgaacacgacaaaattcaggaactgatgcagcagctagcagcagagaaaaagagagcggctacttacaaaagacatctggagatgctatttgaacagatcgaacagcacaacgaaagcctgtctaagagaatccaacacatagtagacaatgtgaggaatctggaacagagagatcatcaacagaaccaccaagtatagtcttttggtctctggtttttcagcactttgatttaggagatagatctgcccttcccccatt

SEQ ID NO: 59619 - DNA, 390 bp, Arabidopsis thaliana landsberg
  unsure (1)..(390): unsure at all n locations
cccccccccccccccnttnnccccccctccccccctcccttttttttttcccccccaaaccccaacccccccctttgtctcccccccctcctcctccccccccccctccccttcccccccccccccccccctcccctttttcccttctcccccccgggttccccttttttaccccccccccccccccccaaacaaatccccccccccctccctcccccccctcccctccctctctccttcccccccccttctctttcctcccccccccccccccccccctcctcttttcccctcctcctttccccctccccccctttttactcccccccccctcccttctccccccccccctactcttttctcccccccccccccccccccccccctcct

SEQ ID NO: 59620 - DNA, 1638 bp, Arabidopsis thaliana landsberg
  unsure (1)..(1638): unsure at all n locations
actaatttatgctctaagtttaggaatacaacgtaacttatttatccaagaagagctcaattgttttatgtggattcgtttcatagatgagaatctaattcactatcttcattttcatatctcaaatcacaagaaaggaaaatgtttgagaagaagttaacatttgagataaacatatattagaacataactgtaaacttgttaaggcactttaaaactaaacctagctttaacgccaaaataaaatgaaactaattgtcggcaaagattggtaaatgtgatggtacaaaagaaataaaggaaatgaaaagggggtgggtttcagtcattcattgatgtgaataatgccattttgaatgttgacagttctgttcttgaatttatttctatgaaagacttgtaatattacccatatctaagggcaccccaacgttgaacaatcctctttttttatctcttcatttgttctggtaggagtgcccaccacctatagaataaatatacattgaatccacaaatcttacattttgattatcatattgtatagtatatagcagcaatcttaccattaaaaaagatcgatcataatttccgagccaatattgctaagatgtagcattttatcactatatagtgttaacaattcaattttgattgatattccataccatttttttttctgtagaaaactagtattgatgtaatagtgatgtcacctgaagagaagataggtcacaataatttttcttgaccgattagcttccgtcaattgagttacaaatattttgattgatatcaaatataaaaacaaaaacaaagaaacaaaagaggcatgtggtgataatcataaaaaagtccagagacatgactaactatgagtaccaacagttcatcaattggttttatgtactcaagaagtattggaattattgacacacatcttaactttatatattcggaatttgatgatttttggaagaaaaaaaatcccagaaggatttagacattaaaatccatgaaaacgagaagtgttctaaactatgacaaatacaagaccgagtttattaaggtcttgtgtattcttgttacactctgagccctgagggccgggcctttttaggtgaaagatcgggacactgcgagttcaaacttcttacgtagctgggatttaattacgatttcaaaactatataattcatatatagatttcaaaactgtaaaaaagagagtgaaagagtctggccatacttaccatatcaatctctcaagaaaacactaatacagctaattaaaacaagtacatctagaccaatcttttaacactgtttcgtaggatctagaacaaagcagttaatagattcagcaagattcgaaacaatattacagttttcatcaaatttcataaaccaaagtaatagagagcagccagtatttggtagcaataaaaaagcagaggaatttgggatttttttacttcaaaatataagctgctttaaacaattttgatatatttatcaactntttttttttttgatatattccaatattaccttcttattntactccacttgtcccacagacaaaaatgtacnntttatcgttttttttggtaaatcaccttatagatttggtaatggt

SEQ ID NO: 59621 - DNA, 1066 bp, Arabidopsis thaliana landsberg
tggaggcgagattcctgatgaaaccaccctcgtctgtgctcgttgtttttacaggtttggaactcatattcccggttagggacatttcctctctacagttgttttcaaaattctttctgggaggttttagcttcttaaaagttgttgaataccgcatttcccattgatgtttaaagaaaaggaaaatactttggtatacggctttttgttgttgggtttattgtgcagtgccctggaactgttatcgacctgcaagcttgcgaatttaacagtaaaagcagagctcgggtgctgtttgcttcataggagtggaaggctaacgattgatggatgtgtgcttcaatgtgagacaaaccctttggatcatctctcatacccaatcgtgagcactgctggagatgaagacattgaaaatatcttaagccatgtggaagtgaaagaaactgttactggaaagattaaagcaaacagtgtaaccgttttgcagacaagaatcgagggaggtgcaaaggctgtttcaacaaggggagacttggttctgcagcgtgttcgagtcatgtattccaaggcttacctctatttctggtttgatgtagattatgaatgatttttgctggttttatttatttttcttcttctgtctgtaacattagtaatctgtgtgatgatgggaaatgatccatcttcatttgtactttgtgtttccccttaagaccagacaggtcctttgttgtatgcttattatgttcagaaataatgtcctttttaggacgaattgccgaattcatttcaattggatttttataatttctgcttagtgtatcttttgtgataaatggtttctttcttcactgttatcaaaatattagagatttttttctctcaaaaaatattagagagaatttcaaacaatgcaacagaaaacagctttattatagtaaaagaaattgcaacaattgttgtagacaatgacttcacaaaaaaatattctatacaatgaaaaaagattttctaaaatgttaaataaaatgacatatttcagagtagatattttttaggaaaataa

SEQ ID NO: 59622 - DNA, 343 bp, Arabidopsis thaliana landsberg
ggggtcgggcaagcctagcgacgctcataagaaactcttataaacaagtgcaacgtatgtgacaccgtatgagcatcaattactcaatcaacatcagttactgtatgcgatcctataacctatcttgatgacccaaacacttatgacaattacctttaaaactctaaggagcctttgcatttttcatgacccatattatggtgcgcttaccaatccatcgtgagctatggcctcataaatcttcgcacacatatgaacatgccttgcaaacaaagccaatagagcctttgagttacatatggtataacctgtactcggacttgcgttattaaagacatacacc

SEQ ID NO: 59623 - DNA, 1064 bp, Arabidopsis thaliana landsberg
ttacataggttagttgggattccgattattaagcatagataatcagtacagatgagattgattaaatattgttttgtgaatggagttttagaacagttaaaatagaattcctaacaatgttgctatttctatgattctgatattgttttagaaattttttaagcctaactctttatccatctgaattgacaaaaactttaatcgtcttcttgttttaattcacaattaatctgtttagcttaatttcgaaactgttagatttatgtgtgaataaaataactttgtaaatcctatttttaattataaatgacaatctctttatttgaagcggtaaacttgaggtaatttaactcatatcagctaaatataatttctatggctcaaaagccaaagatgaatttgtgacttagcattgatccgtactgattatggtttacaatggtccagagccgacgtgttaaatagatttaactcatatatatacacagcttagcctagctaatgaaaaaaatatacaaagttgctacatgcattagtatggatagaataaatctacgtgaatattatttcatttataatttaaagtcaaaagagtcaagtagggctactcatatcaaaatccacaagaattttatcacaatacgatttgattagaatattaagaaaatgcacatcgatagaggttaatttgcctgtcgtgttacataatgttgaagacatataataatttagatagagaacatgttctagaaatgtcagtttgctttggtacaaacccaacagtgttcatactaattatgtttctttgttgtaaatatgctaaagaaaaaaagcataacactaattgtttcatagaacatgtacttcttgacgaacccacaaacccttataaacaccaacaatttggtcacagccaccttattgtttccatgtttggcccactgacgaaatatatacaacttgtttttgtcttttcttaaaaaaaacatacgatatatatctatataataaaatgctataaatgaagtacatgtttatggtttagtacatgatactatccacat

SEQ ID NO: 59624 - DNA, 518 bp, Arabidopsis thaliana landsberg
  unsure (1)..(518): unsure at all n locations
tgaagaagtagctacgcctgatgtggtttcttggaacgggttggtatctggtttggcatcaaacggttttatttcatctgctctatctgcatttgaggagatgaggatgaaagaaaccgagcccgattcagtaacgttcctgatattgctctctgcttgtagtaatggaagattgactgacttgggccttgagtatttccaagtaatgaaaaagatttataacattgagccacaggtagagcactatgttcatctagttggtatcttaggtcgtgctggacggctagaggaagcaacaggagttgtagagacaatgcatttaaaaccaaatgctatgatcttcaaaacgttgttgagagcttgtagataccgtggaaatctgtctttaggagaagatatggctaacaaaggcttagcacttgcaccatctgatccagccttgtacattcttttggctgacctatacgacgaatctggnaaaccagagttagcttcaaagactcgaaatttgatgactg

SEQ ID NO: 59625 - DNA, 490 bp, Arabidopsis thaliana landsberg
tggatatatatagtgtccaaccacgaattttaatgtgttaaaaagagttttaatttatactaaataattttaaaacatctcaaaattgatttaaattaatatttggtagttagttcgtgtattacatttgtatatttattaaaataatgaaataagtatgactagtatatatttttataataatattaaggatttattggtagtttatcttgaaaaattaaattttgtgaatttagtcaaaattcatgcatcaaatggttttatttgactaacatgattttaattactttatcactacaagatataccattttttaaaagtcatagcatagttttttttttttttaatttatatacaaattactgttattaaaaactgtttgttacgtttgattgtatattagatctttaattataagacataaagatatttttaaaaaatcattaggaggatgttacaaaatattcaatttatatccataatcatttac

SEQ ID NO: 59626 - DNA, 525 bp, Arabidopsis thaliana landsberg
ggtctccagtggcctggtggtactagaagatcttcatacattttggtggtatacagaaagaggtcaatgatagaaccagtcctatacagtcggcccccatagttagaaacgaaaagctgagggaagctagaggcaacatattcctctcctcatcttttaggttcgaggtttagcgtgtaactcgatttggacggattatcaggggtttcccacgccaccaaatattgattgacgccccaatgaaaattccaacccaatgccatttttggaagtaagtatccgtcgggaaatggaagctttgccataagaaacctcgctgtgtcgttatcccctgtgttcttgatagcgaagtttccgtcagcaagcagttttttttttaaatgagtacattacatacttacacaaattacagaacaacaaatcaaacgaccgagttgaaataactagaaaatgaatagaacaactgcatcaaaccaaatagaaccgaaccaaaaccacataatacggaaattcccactctcccct

SEQ ID NO: 59627 - DNA, 560 bp, Arabidopsis thaliana landsberg
gtaataagtctccttgcgcacaagcagggaccccattaactgcattatatgaacacatcaagcagctagctttaccatctcttatacaagtctcaaatgggggctgatatgtgtcttccatgtcctgttctgtgacctactaatacagagtaagctagactcagtgttcgacacagaaccatggagataatgcaaaagccagaagcaatataactagttaaattctgtttcatgaacaccaaagaaaggtgcattcaataaagtctatagatttaattctattttaggtcaaacctgatccactaaacctgagagttctcaattaaaatccaattgaagttgatacacaagctacacatagtgaagaaaagagttcttagtcttaccacagcattgaagtcgtatctagtgaaattcccccatttttccaaatcataggcagtgaaatgcttacaacaagcagataacatgagcttcccatcagcatcaaaatcatgacgatcatcatcaacatcatcactaaatcttcttttcaaaaccttccttttcttctgctctta

SEQ ID NO: 59628 - DNA, 499 bp, Arabidopsis thaliana landsberg
  unsure (1)..(499): unsure at all n locations
ggttttatgcagcgatgtttttattcctgatgctgtttggatcaggaaaatccacccctggcacctcagttcgggacatgcagcgggccatcaacatggtgtgccgcatgaccgctgccgccggcccacacagtgacggctatgagccccatcctgcctaatttgggattcggaatgcaagagcggcgctgactgacgtacatatccgaaataggcccggtgttattcaagtaccctttagcctaccttcgtgccagtacgacaagtatgcaagacgaccttttcggagacgcgcttctccagccttcggccaactcctcgaaccatgcggcctctcatgcgaatccggatttttccgtcctccggggcatggccaaggtgcttcccgctcccgcgggccngggtgggggcgcgctcgcacggcagctttccgcgcagctggcccttggcgtctttacctggtcatactcgggctgggacgggctggtctgggatggcg

SEQ ID NO: 59629 - DNA, 521 bp, Arabidopsis thaliana landsberg
ggtattgtttgatttgttcaccactaaaaagtgaaaacttggcagtagtagtctctgaaattaatgtgacaatggtagacatgatcatttgcttcaaaaagcgacggctgcttgtattgatgaataaatctcctattaacatattttgaatgaagtactttggttgatgtctaggatactcaagttatatatttctttagtcagatatcatacaagagtacaaatgagattaatggtaaatgcataaggatagagggtatgaaggaagattgtttgctctgctaagaggtctgaatactcgaaatatcagctttactgctatagtgattcaacaaaaaaatattctatagtgctaattttatatgggaagatgatttctagatggacattcacatgtgaatttggatagtactccggatataaatgtccaaatgaaggttattgggttctcatgtacaacattccataagtgctcactttatttatgggtacaacattcaccacattatcttacacttagt

SEQ ID NO: 59630 - DNA, 334 bp, Arabidopsis thaliana landsberg
  unsure (1)..(334): unsure at all n locations
nnnnnnnnnnnnnnnnnnnnnnnnnnnnnnnnnnnnnnnnaattatgggtcctatacggaacgcatttgcggtatgcatagagccaatgctataactatcatgggtctgcttatatcttgggagggctgttgtgtgcttgcgaactggtgaaaatgcctgcgtgaccttacggcataacatacaaggccggatgcatgttagtgccaagcctgaggggcctaacgtgtgagatggctgccattcattgacttgcgctgagggcaccctttctagtactgatatctgtcaagcccgctggactgatgaattctctacgatccgggagaggcgggc

SEQ ID NO: 59631 - DNA, 1291 bp, Arabidopsis thaliana landsberg
tgcgtaattcctgcagaacctacttttactctctcaaccattctcaaagctacattcctcaaccttttcagctcatgttctggtacaatcctctcagcttctactgtattactcttcctcgttctccatattcccttattattccctgaatctatcatccctcttttaccatcatctaaatctgaatctacagctctatcgctagaatcgttatcccttctatatctatctacagtagtaacatcgtagaaactcgaactttgaattccttgctcggagctagtcgtaaagttaacacctttagacccaccattgttaacccatggagcagacatgtatccgcttggtcttgggaaactcgacggctcattcgccgaatagagacgattggaatcggttctcttatcagataaaccattcccagaagaaagttttgaacttgattcatctccttcctcatcttcttcgtcttcgtgatgttgaatttgctcttcttgcttctgccatggcaatttctcggttttggggctgatacgtgaagaccatttatcactaatttcttcgaaaaaacctggtttaggttttctcttcgtcttcttcctctggtgagtgtcgatgtcaatggtggctgtgatgacactcaattctcgggtgtgaaaccgaactgggtgattgaagctatgaaatctgagtctacgaacaagaaaattgggctttgtagaggtatctagaggttgaagacgacggaatcgaggagatgaagatgttgatgaggagatagtgtgaagattcagtgggaattgacaaagcgccatagatgcatttggctaaggacgagaactttgtactaatttaaaagcgacagcgttttgaatttttggcccatgaagagaactttgtactaattctaaacgaaaacgttttgaatttccaaataacacacagtttttttgagaagattttgtaaaaaggaaaatagttaaaaagttatgggaattgtttttttttgacagatattatcgaaatttttcttaataaaacaggttcttaatttactttcaaatttagaaaattttgtatatttcttagtaatttttaaccacataaaaattcttaataaaagaaataattggttcttaatttctgagaggcctataccgctataacaatatatttttctttgtcttttaacttatacaacatatttcatacaagaacggaaaagattaacgtaagtagccctaaccaaatcactaaactataatatttgttagttagacgatgaacgtac

SEQ ID NO: 59632 - DNA, 481 bp, Arabidopsis thaliana landsberg
  unsure (1)..(481): unsure at all n locations
tggggagggcgagaatagttagtaatggacaaatagatagaagattttatatattacaagaaactagatgtattacatgtgggaccaaatactagtagtgagataaattactatttttattcttctttcggatctatattagctagctatttgagacaaccatcgaaaatgcatgtagtaaagacacgtaacctaccatttttgttgcaacgttctaaaacgtccacaggcagctacagactacagtatcccggagcagcagctgcggctctctctcgatcgacctggacggatcagtcgcggagagctggaatcgtcttgttcttgttccgtaacagataaattaaccagtaaccggccgtcccgacggcgacggagcgaaagagatagcgggcggagccaataatttctctagcttgtgccttttcccaacgacaggcggacagctgcgcgtcgaacgcncaggaacatgtggtaaact

SEQ ID NO: 59633 - DNA, 1424 bp, Arabidopsis thaliana landsberg
cttacacgatagtcttgactaaaaatgtaagactcatcctaattttagctaagcaaaggcatcatcagtgagatcatgtccaataattagaggctaatctttgttcttaagagagccgaacataatggaagaacaaaatagtggcagttcttctcacacaaaccgaataagcatatatctttttttttcatacagaacatatatatatatatatatatatatacatatccacatacaaatctcaccagcttcttcttttcatatatgactgatatggaggacttacactatgcttgaaaaagtaaacaaatatgctgctatccatgattagatcgtatgtatatgtataaggaagactgaaaacactaatcttactcacttactctgttgcctcccgcagaaaaggcaaaaacgttttttcataagagaacagggattgagggtttgaaggattttattttcacaaatgatgttgaagccactcttgaatcgcagaacgaagagcatggttagctattaggctggtgtgagaaagcttgacattggtcattggtgaagtatcatgctcactgtccagccacgctcttatagcctctgcttagtatgtgaaaccgtctgcagccacgtgtggatcctgcatgacttcctgaaatatttgaaaacaaagcagaggaagaacgggttgagtaccattagactgcaacataacggtttgagacctcagataagcaaattttaatgactttgtgatcgaagtcttctcagattgataataatactggaaatccatactcaaatatacagattagttacctggaaaatggggcaaatgaagtatggaggggctatccggtgctcgttacggccaagatggaaagatgaagatcctccactagaagccctcataggttcaagtaccctccacacttcagttccaagatctggacgattctcgctgacagtctcgcagcatctcaatgctaagcgagcaagctgctcagcctgaacaaagggccagtcccctgctaaagggtccaagaggtcgttcaatgttccattatcgagggcatatttcacttcatttgatatccgtaaggcaggtctcccggtcaacaagcgcaataagataatcccaaacgagtaaacatctgacttaggagttagctctccactactggaagcttctggatccaaataggcaactgtgcctgtaacgtcagttctcacacttttgcttccgttaggatgaagtagtgagcaggtcccaaagtcacttaacttgctaacgagattggaatcgagtaggatatttgccggcttcaaatcaccatgtactaagctatgagccttattagaatgaagaaagacaagcgctgcacatatctcagtggcaatgcgcacacgattttgccacgacaagggtg

SEQ ID NO: 59634 - DNA, 276 bp, Arabidopsis thaliana landsberg
gatgccggtcatgccgctgaagttttcatgcagcgacttgccggcgactacttccaggtgcgcgcgcgtgatgccgatgcgcttgctcacgccttcgacttcaatgtcgagatgaccacgctccacgatcggcaggtcggaccgggagatctggtagcccttcggcataaaccgatagaagcagtgcttgggcgcgaacacgcagtgtttggcgattactggattatacgtcaggccgaactataccgtcatctttaccgtgtcggcattaagaac

SEQ ID NO: 59635 - DNA, 521 bp, Arabidopsis thaliana landsberg
tgtcgcaagtatagttaatgataattacattaggggaattactcaaatttttataatagaaggtatgatatacgcaaattaggcgtatacaaaagtaaggttaaattgcaattgagtttcaatgcattgctggtgggaactgaggaacactagactatttatgaggattaggattaggatatgtgtatttaaaaggcgatcgagacaaagacaatttttgttttacaaaacagtttcgacttggataactatgtaacactgggctttcatgatgtaatacaatgcattgcttatgtggtaacacagtaatattggtaaaactagtagaacttatgacaaaactgcgataatactggtagaactagtataacttacgaaataatttgatattaattttttcctccaaaaccaaattttacaatgtgtacttaagaaaactcttataaatcatacaatattgattaaagtagaaaatacaaaattatatcatattagattggtatgaaagaatctacacaatc

SEQ ID NO: 59636 - DNA, 1150 bp, Arabidopsis thaliana landsberg
aaaaaatcatatggagattttttcaactttaaatttccttttgacttccaataaatttaagcctaatactatttaataccattagcctgaatgcaatcacaatctctagctcacgtactgctcagctaaacatgattatactagatataattttgaagtacaaatactagctaatcaaaagaatttagaggtagcctagtcgaagctccaaatcaagaacttggttgggattcctcaaactcatcccaagctccaaccccatgacttgatcatctttcttattcatcagatccccacggcttatctcacatcttactgaatgacatgcatcgatggcacttttcttgatctctctgctacatacattgctcttgttcttctctctgtccatcatcaaacctccatagctagtagtactgtccaaaagatcaaaccgggaagaaggaaaaggagtggttttggatctctggttggttagggaaggctcaagatgagctgttgttgttgaagaggaagaagaagagctaaaattagggttagggtttgcaataggtgtgtggtggtgaggttcgaagagccaagaagggatctgcctgagttttgctctgtctcttctatgaacattcatgtggcctccaagtgcttgagcagatctgaactctctcctgcagaagctgcaagtgtaattcttgggaggccatgggatcaccccagcttcgtaattcttgtagtgattcatgatgactctgttgtcaccattaccggcttctccttcttcttcttgggttttgtctctgttactaaaacttgccaaatgtgttctcttcatattttccaacagatgatgatcaatgctggtggtgaatgatgaagatagtatgatactcccctgcatgaaataaactaagatgttatgtatgtatatattaattcaaaagtgagaaagaataagagtgggggatgatgaaaaccgtatagatagagatttttgagtttgatgaggaactaaggaagaatgtaactacggaggagttactatgtgttatatagagtcaaaagggaaacaaaaacagaaggtgggttttatccttacttgaggaaggaagtgcatgtaccgatgatcatttattaagggttaagtctgttacat

SEQ ID NO: 59637 - DNA, 1437 bp, Arabidopsis thaliana landsberg
tgcaaccaccgcgtcatcatcatcattctccatccctcagccacgttacttgctgactcaacatcaccagccctacaacatgtacaacaacaactctctaagtatgatcaatagaagatcatccgatggcactttcgtaaatccaggtccatcatcatcattccccggctttggttatgatatgtctcaagcttctacttcaacttcttcttccattagagatcatggattgcttcaagatattcttccttcgcagatcagatccgatactattaacactcaaaccaatgaagagaataagaaatgaagaagttttttttcccggggcaattgtttttttcttttggccggatccggtaggtaggtttcatgaggagtttttggtcggtttaggtaaaccgatgttgatggctttctaatgtttttttcttcattacatttagcatcggttttgtttcatcaccacgaaataagcaatcgacgctaagttggaacagaggtttatgtagcatatgtgatataggtataacttcattttttgtttgagtattaataaagatgtatcgttaactttttatgacttcggagagagaagagtttaatctagttatatagtatgtatttagttgtattatagtgtttctagaccatctaatttgtaatcatgctatcactagcccggctcagaatcttacatttattttattttcatatatccatcctaatcgatgtagatttacataacatacagtatacacaaagatacttcgaggtttgttgctattcaatcatctatatgcttaccattgctcacaacaaatatattattctagaatcatgtatattccttatagttacatatattaacttgatcagtttttgtattatagtcatcaagatgcaatgccatcacacaaaacaaaatcttatatgacctaatgtgatccttggctagattagatataagatatttgaaagtaaattaatactttattggacgttcatatatattctcaattttcataactacagtaatttcacatcatactattcataagtaaacatatataccataacgacatctacatataacttttaaaatgataacaaaaagcctaaataataaaaaaaaatatttcatatctatgaatcagtcatataggtgctaaaaatgttagctttatattctcatctttatataaagattcataaagagagaacttttagtcttaaactcaaagtctcctttatagttttcttcactgcgacttttatgttagtcttcaatcatcacaaataaaattcaaaaagactttcaggattaatgagcacactgtttatatccacatgcgtacttgacccacccattacttagatgtagatattgtagatatggtcatatggaccatatttaatttttgacattagcaacaacct

SEQ ID NO: 59638 - DNA, 387 bp, Arabidopsis thaliana landsberg
cactatgggggggggcaccaccacatcacataccaggtgggtgactgggcgctccttcgcctccgacaacacgtggcgtcatcgcttccccaagctgtcaccggcaagctcaagccatgcttcttcgggccgtaccgcatcaccgagctgatcaacgacgtcactgtctgcctcgccttgccgcctcgagcccgcattcacaacgtgttccacgtggggatgctcaagaagttccaggggccagcgccggccactcccccgcccctaccgcctatgcatcatggcgcaagggcccctgagccagaacgcgccgggcatttccgtttggctcgtagggtgcatcacgttcttgttcagtggaagggcacgatggaagtctgctacttg

SEQ ID NO: 59639 - DNA, 223 bp, Arabidopsis thaliana landsberg
aacaattaaggcgtcgattttccaatcacatcatacaacaatttctagtaaataaaaaacattttatgcatgttgatttttggatcatatatcataaacactgaataatttgctcgttaattaggcttttataattcgttttagttaattttatttatctaaacttgcaatttattttctcaaattctaataaataaaatacatgtatctttttgttacaatg

SEQ ID NO: 59640 - DNA, 577 bp, Arabidopsis thaliana landsberg
  unsure (1)..(577): unsure at all n locations
tgctaaggtttctcatcaggagctggtataagatggtgaaatctgatcaaataaacaaatattaagctacttgtaagttacgaagacaatataaaagaacaccattgcattggatattataagttactacaaagcgggctttggatactaatatagcatgccttggatagaagataaaatgtccatgtcaagactgatgcagaagtctcatgaccagnnnnnnnnnnnnnnnnnnnnnnnnnnnnnnnnngcttgctggagacctataacagatgcattgaagctacatgaggatgagcaagctaaaataaataaaagaacttatttataggaaaggtaaataaattatagacaaaagatatggtttatgtagcgtagcgcccaatataggccagatatgtccccttagcactctccaatgcctttatccaaatgaaaccgatcagaaaggttaaccaatatagggacatccttgtagatagaagcatatagaaccaccactcttcacctaaaaaaagagatgcatacgtgatgaccaaatcttcaatgggtaacaagttagggaaaatagcatgac

SEQ ID NO: 59641 - DNA, 1750 bp, Arabidopsis thaliana landsberg
agatttttgtcttctaacaatgaaacttgctggccctgttaaacaactccagatggatttgaggtagctcatgcttccctacactgctctcagtcttaaggtctgttttaagctcttgttatgtttcgagggttgtgattttgattgttgctaatgctagttgttccattttgttcttcatcttcttaccaggagaagaagcggaacactttaagggactttttgaatgtatcaggtccaatgggtgttacacatttccttatgctttcgaaaacagcgtcttcactgtctcttagagtagcaagaacccctcagggcccgactcttaccttcaaaattcatcagtattccttagcatcagatatagctcagtctcagcttcgacctagatgtcctcaagatcttttcaagagtcctcctttggtaattaatctcacttctctaacgccaaaacttggttttgtaatatgttgcctgagaatgtcaaacttctcttggtttagattgtcctttctggattcggttctcaagagttgcatctgaaactggcaacgattatgtttcagaacatattcccagctattgatattaacactgtaagtttgttgcctagaactgaaaatatatgcttcgttattgattgtaacttgtttcagcaatgtgattttgttcttctgatggtgaaatatatcaggtcaagctctcgacctgccagagattagtactcttgaactacaacaaagacaccaagctcattgatttccggcattattctataagacttcagcctgttggagtatctcggaggatcagaaagtttgtgcaaaatcatcaggttccagatcttaggaatctgcaggatgttagtgattttgtcaccaagtaaggatctacattggttcagtctgtttgctgcatcgatgtggatggattaatgtgacatttcgtctttcttttttgttgtccctttttgtcagggctggttacggatcagagagcgaaggagatgaagaagcggcaacagtgacactatcatctgatctaggccgagttaacaaaggtgccaccaagagcgcagtgaaactgcaagaaattggaccaagaatgactatgcaactcgttaaagtggaggaaggattgtgtacaggaggaatcatattcagtgaatatggtaaatgttgatcttatttccttacattgtggtttatatctcatctattacaggacaaaacatctgacttttgggtttgtttcagaaaatgttgatggaaagaaagaaaagttaaagaagaaacaggatgatgaagaagaagaagaagaagatagtgaagaagaaggtgaagagggtagtgaagaagatggggaagacatggatgaggattttgaagattgaaaagagttaaaatagagtaacactgttttcacatgagacttgagtgttgttcatcaaattttgttccttggatctctgagtagcgttgcatctattgtctgattaaactatgagcacaattacaaagccttttgtactattaaactaaatgtcttcccggaattcgtataatgaccgaattatttactgttcttgtttacgtacttgtcgtttgtatgaaatccgaagacaaaaaataaaagagtatctcagattgtcaatttttgaagtatcttactaatggatttgtatgacattttgatgtgaagattccatgtgttctttctttataactcgaaaaatctaatctcatactaa

SEQ ID NO: 59642 - DNA, 339 bp, Arabidopsis thaliana landsberg
  unsure (1)..(339): unsure at all n locations
ccacaccaaaaccaacacncnaacaccgncgngagaagagaacanaagcaacaccccaaagggaccnacggacggaacaaaaggacgacgaaccagccnaaccgganggaaaacngaccaaccngnganagaaaacaaccagcgagccggccgaaaagcaccagccaaanccncccagcacnnnccacggcaagaccgaaacccaccancaagaggcacacacggaagagnaccgacancaacaagagcacccnganacagagaaacccaaccgacagaacgcaaagggaaggangcaccgggaacccccacacacncangaccagaaccaacacccag

SEQ ID NO: 59643 - DNA, 453 bp, Arabidopsis thaliana landsberg
  unsure (1)..(453): unsure at all n locations
ccccccccccccccccnncccccccccccccccttttcttccccttcccccccccccccccccnccccccccttcccctttcctcccgcctgtttttcccctcccccccccccccccccccttccccccccccacctttattcccccaattagtaattcnccctttcccccggctcccccccaccccaccttatcccccccccccccccccccccttttccccccccccccccgttttttccccccccccccctnccccccccccccccccccccccctcccccccctccccccctccttcctccccccccccccccccccccctctcccccctcctttcccccccccccctcctctcccccccccnttcccccccccccttttccccccccccccccccccccctcccccccccccttctccctctcccccccccccccctcctcccccccc

SEQ ID NO: 59644 - DNA, 1328 bp, Arabidopsis thaliana landsberg
cacagatccttcactgtttgacttccttaattcattaacaacagctttcaactgttctttctcctccgtgaccaaagtgagctttattacaaattaaagctctgttagtaatagtgcaacaaactgatagaaaattataaaaagttacctccaatgagacactataaacttaattcccttgaattgtgatagattcatgattaaataaaaagttgtttgcaacaaattctatactacacacattatctcttatcctgaaaggacactatattatggataaatcaactcatcataaattcgtgatagactcatgtttggatacgaaggaatttgcaccaaaatctaacaattgaatacactcattaggaacaaacagactttccccacatatatagagatattaaatctgtactaattgataacaaacccaacgtgaacatccaaaaatactagggatattatcctatgaatatcgtctctaactatattacttctatcagcttcttatgaatgcatagatcaacaatcaacatgaaatacagagctgagctagtatatatccaagcaaagacagtgaacctagagaaaccaagcaaacaatcaataaacaagaataatgaatataaaatgatgagcatttgagtgtcaccaattgaaaatgctatcctttatctctcgagaatcaaaaatcaacttaagaggctttaattgatgccagcaaaataaaagtgcatttgtgaccccttacagagcaccagcaacaattttcaaacttaccattacttcaattctcttcacgtctgttttgagagcctcagatttctctttcgctaatgcagcctcacttacagcattctgtctgccaagttgtatagcctccagtgtctcctccagttgtttaatacgggtacttgcttccccaatcttcatagtgctttgaaccacctcacttcaaaggcagaaacacaagtcactaggaagtatcatagatacatgtgttaactcagagtgcttggtaaactagaaatcaatactctagatgctcacagacacattagacctgctagactagcaagccagaatatctgtaaaatataaagccatatctggacaaagtggtgttacagatgtctctgataaatactatctagttcacctataaagtcaggaaaatgccccgtaacaactacctcagtctctccgacagaatatttcatggcaggcataattatttgaaacaatatcagaagaagactctagtgaaaagataaattctgtatagatcatgttgacatacttctgtagcaccgagaatctcataactatgt

SEQ ID NO: 59645 - DNA, 1274 bp, Arabidopsis thaliana landsberg
ccaatgagtgtagaactccaatttaaggcaggcactttcagtttacttttggtcttgggaaagtcatgtaacgatcctctgggatcgaaccttgatgcaccgcggacaagattatgcattcgaattgtactctagaataacacgtgaattcaaaacacatgagataatcttgtggatttcagtgttgaatttgtaaaaggtaaattttgatgattgtgaaaactgtgttgcaggttggaaggagaacatgtggcgttgggaaaggtgatacaaggaatggacaatgtattcgccattgaaggtggagctggaacttacagtggcaaacccaggaagaaagttgtgattgctgattctggagagatccctaaagacaaatgggatgaagagagatgacaaagacaaacctaagatacacagcactacgacaaatctggttctgttcctgtgagattctgtctctgtattttctttctatttatagttttgcacatgtgatgatctgaattctgaacgcaatgccactgtagttagtgtttaaagctgggcctggaagcatctgtagcttttcacttgaggtttttctagactttatttatatgatttttagttcactctactttcagttatgtagatatatttattatgagttgaattattgtatacattctatcattattttcacctcttacgtatgatacaattctgacatacataaacatccaaaagtatcaaaacaatttgccaactagttcttactattcttctactcgcttttccgggagaaaaaaaaaataaaaaaaaattcgttgattaacatttttaataaaaaaaattgttcctgaattatgcctttattagttgggttaaaatataattatattgacatatctaattaaacctctttacactcaaatcaagacctacaatttcacaagtttaaggttgggattactcgatatatagaatgaaactattgcaacaaaaaaaaaaaaaaaaaatgaatgaataggattgatggtgtgataaaagaatagatgaatacaaagaagaaaccaacacaagtattgtgaacaagtcaaagcctaactattgaacaactttagaagacaagccaccaaatgtacaaacaaatcctcccaataacaaactacaaaagagaaattaatcaattagaaatcataagacatatcgacacatgctaatggtattatctacttacacctcatcaaactcgtgcatgggcgattgttatccacatatgtatacagtca

SEQ ID NO: 59646 - DNA, 489 bp, Arabidopsis thaliana landsberg
catttttaactgaagagttagtacacaaaatctcaaatacacttgccatgaagagttgggttgaatgaggtatgaatcatatttagaaatatatccgaatatttcaaattagctctaagttatgattaaagaaaaaactaatttctttaattatttaaatgttaattcagttaatcacaagagaaactaaatgtgcaaccctattatttagttagtttatgactgttctttgttctaaaatgtatataaatgtttatcttgaattattattttcaatcaccactaaccattgaaaatcacatccaaaataaaattgaaggtaaacatttatatccattttaattttcaaataaaatattttgattatttttctcctaatctcctatattagtgggtactaaaaacaattatatttcatatttttggttatcgaccttttctgttgggggtgcaactttgaaatattttttttttacgattaataaaacg

SEQ ID NO: 59647 - DNA, 1172 bp, Arabidopsis thaliana landsberg
ccaagttttgaggaggctgctactaatgctagaagatgtttaaatacatcttctataccggtaagtagcggttctgcttccgagacaaacagcggttctgatataacgaagcaagattttaagaacgattctccttcggatagtaagaaggttcagggttctagtactagcaaatctgcaaaaccgaaggtaatcaaggtttattctttcgtggatctggttactacgacaaagaaaggaaacattcaaaccgaggaaagttctttaaaccatgagaagaaacttggaactgttgtggatattgttgagccgatgaaatgtgatgaaaggagtaaggaggttcagggttctagtactagcaaatctgcaaaaccgaaggtaatcaaggtttattctttcgcggatgtggttactacgacaaagaaaggaaacattcaaaccgaggaaagttctttgaaccatgagaagaaacttggaactgttgtggatattgttgagccgatgaaatgtgatgaaaggagtaaggaggttcagggttctagtactagcaaatctgcaaaactgaaggtaatcaaggtttattctttcgcggatgtggttactacgacaaacaaaggaaacattcaaacggaggaaatttctttgaaccatgagaagaaacttggaactgttgtggatattgttgagccgatgaaatgtgatgaagggagcaagtgtgaggttactacgacaaacaaaggaaacactcaaaccgaggaaaggtctttgaaccatgagaagaaacttggtattggtgtggatattgttgagccgatgaaatgtgatgaagggaccaagtgtgaggttactacgacaaacaaaggaaagattcaaaccgaggaaaggtctttgaactatgagaagaaacttggaattggtgtggatattgttgagccgatgaaatgtgatgaagagaacaagtgtgaggttaatgctgacacatttgatgtggttattgttgagccaatgaaatgtaataaagtgaccaagtgtgaggttaatgttgacacaactggtgtgaatattgttgagccaatgaaatgtaatgaagtgaccaagtgtgaggttaatgttgacacaattggtgtggatattgttgagccgatgaaatgtaataagagagcaagtgtagg

SEQ ID NO: 59648 - DNA, 556 bp, Arabidopsis thaliana landsberg
  unsure (1)..(556): unsure at all n locations
tgacaacgaactatattatattaaaaaaagaaacttatatcttgattagtnacttaagtttagtctcaaaatctaaattgacaatatgaaaaattggagtaactaaagatgaagcaagagatgagtatatgcgtcggaaaaagtgttcttgcaaggaattgtatccattgtaacagtgactaacatgaacgaacagaataatttatgggtgaatccgattaatttaaaaagttaagagaccacatcagcaagttattacaatattgtaaaataaagaagcagacataaactgatgttctagagaggaaaagaagacaacccatgacttccgcattagttggattcaattagaggccaaaacttgaagctaatcattgtatttggatgataatattaataattatgggctcactaattataagcatttgtggtgattatctgtgctaaacatacgtggtttacaaattaaattttattctccaattagataaatgttatcatgaaatattcgtttcataatgttttcttggtatcacatcgctccaataattagtcc

SEQ ID NO: 59649 - DNA, 315 bp, Arabidopsis thaliana landsberg
tttttggacagacagtatacagggctgagctttgctttcagatctgaccgcctagccgagcggctgataggggcagccacggcggggctgtcggtggcggcgactacaggcggcgcgagaccagcaccggcgtgtgttcgtcgaccgtgacgatcagatgcagctggaaaccgatgaccgcccggtgttacgacctgtgttcgaacaggaccagaagcgctgagaccaggcgtggtcactctctgacactgtccatgacacccacgtgactgctcggctgttaatggtaaccgaacagaacgccgcctgttttgg

SEQ ID NO: 59650 - DNA, 250 bp, Arabidopsis thaliana landsberg
cccgagggttaatgcattgagttcaccaagcatattttttttagtaccgttatggtatctacatgcgggggacatactagatcaatatagacaactcaagtaaacgaccctgtgaatgatcctctacagataaagggacatgaacagtcattggatccccaccaaagtccgcgatgaaccactgacaacctaatggatgcaaacaaacccggcggcactgcactaaaatgggcaagattgactgtatgcc

SEQ ID NO: 59651 - DNA, 422 bp, Arabidopsis thaliana landsberg
ctgcagagtcgactctagaggatccctttttgtttgtttttgtttgcatcagatttgatcggaatctaatgggtaaaaccaccgggaacagagattggactcagatctacgctatttacggaatcgaacaatggcagacactcgtcttccttctcttccatgctttcttcttctctcttctctctcttctcttcctcatctacttcgatcagatttgcttcttcctcgattccttcttcctctccggcgccgtccagattagccgcttgtttcacacggtgctgtaaccgctctctccgcggtttgtctactcttcgccgcagctaatttcggttactcagatgttccgcttcagtacgagatggctcaacgcatggttagctccgtcggtgactggtctcgtgtcaaaactgctctcgatc

SEQ ID NO: 59652 - DNA, 450 bp, Arabidopsis thaliana landsberg
taacagaaccgagggggaagtaggtcattccactagtagttggattaagtgcacagccagtggaaataacattccacttgcagttcacttaacacaaccgccagtgtaaatagcttcttttcactggccattgatttatgtgaacttttaggtgaaaccgttagtataaatttttgtgtgtcgcaagtttagagctcttttcttctagtagaccagaggacccaacactgacaccgtaaaattagttgcgaggtgatttgtgcaagagagaggacagaggagtggcagtgcgcggtgcggcaacatttgatcccaagtcgctgtcagcctccttgagaccactcgtttcctgctgccgttagttagatccggttgattctggtgacagttggtgtcgttgcctgtcgctggtccctcgtcatgcatgcatggccgcatcgtggcccgagc

SEQ ID NO: 59653 - DNA, 1211 bp, Arabidopsis thaliana landsberg
gcagtttcaaaatatctagataatggatttacgtatatatggatcaattgtgatagtggacttaaacaggtaggcacatttctcttcatatcggagtataatttaaaatttcgatttggtcgagagcccaagggttctactagtaacaacattctgtgacgcttaagtagtgccacgtgctggaccctcactagtgactactatttccacccacttcctctattattacacacttagcacaaaaatgcatcatttgatttttatataaaagcatcatcacatgcatatgtgctttgactatgtatctctacgcgtttctaacattatattggtaacaaactacagatacgtcatataattatatctcttatgactattgcatattcttaggaattaatgcgtgacagagatatttaacaaaatttgttcaagaacacgctccatcaaaaaaaaaaaaaaaaaaaacgctccatcggctagatcctaatttggaatggagggacgacatgcattgttaaacacttgaaaagctgggaacagatactttgttcaaacaaaaggtttatttgtttgggaacaggaagagatcactcaagccaattaacttcaaatcaaagatcagaagagggagttgcggatcctcctcattgtaatcaccaaattttagaatccaaaagattatgagaagaaaatcggaaaaaaatattcgaaaaaatatttgaagtttggaagaggagaaatcgctcagttcagcgggattatcgacacacgcaagactttccactaggaaaaatcctacattacggtctgttgagcttgaatatttccaagtcatcaccacgatttctctttccgaattaacaaaaaatcataatagaagaagaagaactaggaaaaggcgattgctaattaacccaggaattggattgatgatgaagattaattgaaattaatatttataggttaattgcctagggtttctccataacccttgtttgattagggcttaattgggccgaaatatttaagtaggccttactagttagaaaaatgtttataaaacccaccaaacatttagtttaatttgattcggcccatttgtatgttcacttaaggtagtgatttcaaaactcatggcctatgtattcgttttttagacgtaaaaaattcatcaaaactgtcacatttttaaggctaatttggtaatagga

SEQ ID NO: 59654 - DNA, 160 bp, Arabidopsis thaliana landsberg
tttgacgtgtacgacgtaatgacagttgacggggtggaacgagagaaaaacatgcgtgggtgaagcctttgagacatatagatcgataatgaggcctgggaaacgtaatgaagtcaaagtgcgacacgcacagaacttcttttactatggactcgaatca

SEQ ID NO: 59655 - DNA, 1422 bp, Arabidopsis thaliana landsberg
ggctcattttactatgggtcactctcacttatatatggggcctgtagaaacattttgataaagatgggtcttaccttataataagttttaggcccattattagtaatatcccgaaatgcttaacagttaacactcactattacatctacttctcttgtggagaatggagatagtcgcatactatagcattacaaaatttaattttatctacgaactttcgcaattttcttttaaatctatagcaacgaactctttttttaacaaaaattgagtaaaaaaattatgtatctgatttcgtgtcactgtaataattagatgttataaattttgtatgatttttctgtttttttttttttgtcaaaataaaaacaattatgtatgattgcaattaaaacagaatcaaaacttatgtgtattaagaaaatatgtttttaaataaggagggccaatatagtgtagagtgtattcaggaaacgtaataaatagtatacggcgaagcctcttgttgttgttcgtaacgaaatgggaattgctttcttgtcttcttcatctaataaatattcttatcaaatatacaacactacaagcacgaattcgttgcctttttcttgttagctgttacaattcaatggcaatatacatatatattatttcctccaaacaagttagatgagattttatataaaaaaaatgtatgtgtaacaattaaatgagcagtttcattactctaaagcgtgaactagagttcacacgagtttcaagacttcttttaataattcggataagctgtgatatgtacatgtacttttttttactattactactcatcatatatatagtgaatcaagcatgaatatattgtcgataacattaatggttatgtaaattgcaaacagtacacaactaacacaacggatatgaatcgtaagagttaggtggctgatcattttgttgtactctattccttcaacgaaccattttgtattacattttgtcaattatataattttatgagtatgtgaaagttaatatgttatattcaattattcatagagttttatattctcttgctaaaaccatgatgcttcccacctaacacttgttagtcttttatacaccaaaacgtaaatcgaaaaaaagaaaaaaatttacttatccaaaatccaagctgtaaccaaagttataaatcggacacacgtaaatagaaatatttggtcaaagtttgactgtcttggaatcgtaaaaaactttcacacagtcaaaggttccacttagatgggcaccaagccccaaagaaattcaacacatggcacagactatatcgtcactgtaattatttatttaaacctttttttactcttataggaacttactagtagtgcatgatacataatttatattatacatatagtttttggattg

SEQ ID NO: 59656 - DNA, 1433 bp, Arabidopsis thaliana landsberg
cgtgtttgtcccttttagatcacagggcaataaaagcaacatcaggctccaaatctgtcgctacatccattaatcgcggagataacataaaacagaaagaaaatccgagtatcatcaatgtcgcttgtcagcttttccgacaaatcactcactgaataaaaaattccgaagacagaaagtggcaaaaattctatgattctgtcagatccaaatacctgattacgaaagcatatgcagagtttcaatataatatcaatttagaaggaaagtaagaggaaatagaccttgtagagaagaagagcggtgaaggagaagaaggagagagcaagaacacagagaaggagatacgaaggtgtacgaggagagcttttgtgagggagacgaagacggagacgaagacccattttttctcttctttttctttttcttccttctgcaaaactttttctcttttttctactttcctttcatttttttgttttctctgtttagtggcctcaagaaatattctctggattttattggttatacagtacgccgctcgacgcggaggttcacttttctttacatcagtttgtttctattttaattcttcgaatttatctttcttttttttctttttgttaaaattaaaagaaatttattatttatcttacaatatatcacacagtgcaatactgcaatgtgtactactactacagaagagaatatatctacttgcctatagtcaccagcatgggccttgtcgattttgtgttctctaaactcatttattactttggccttttaggacactttcctaaatgtcataccaacagagagaaacagagttaaagaacactaaactggtgaaaacagagattaagaacactaaatgttttgtaaagcttcaagacttgatctaaatggattgattgaatgcttcccctgcatgtctaaccaaccttaacgtcttgagtttggccaaaacttttgttttttgttatattttcttaccatgtttctttttaagtaatacggaagagttataggatgttattagatttgaagtttggtaggtgaattaggtttgtaaaaacatgtctcatgtagtgtttgttttatttattaaaacattacatgatggaagttagctctatggtgtctcttacccatcaaagtgtctttaagtttggccattatgtcttcttctatgtaagttacatatttgttcgatgcaaacataacaagccagaagatatccatccttcttcatttcatgcactttaaacttcaacatccaagaaagagctgggaggatcggattagccaatcagattggcccaatctatatataatacaatgattctttgtctattttaggataaggatacattttagtattacaggaagcctcgatccattccaactatggagatggaggccatacccga

SEQ ID NO: 59657 - DNA, 1480 bp, Arabidopsis thaliana landsberg
ggttaaagtgggttagtaataaatgtaggcaaatgaggagatggacccaaactcaagaacaataaccaacaaaagtaagtaggtttccatgtttcctgggagcttttctttttgttaaccaaaacttcatttgtttgcaactcttaactcttaatcctttgccttaatcatcattcattttgtttctataaagtctaatcatacaatctatcaccatcgcatcctcttagtattaactttaattttatcaaatatttccgcttcagaactttcctattaaatcttatactgtcttgataataaaactttatagatactttcataaatatacatgtaatatggttttaacacacatatatatacataactatttatatgatctgtattagtttcttgaaacgatattgtcaagtgttattcatgagattttacgtttcagtaaaaatattgttcgtcttattcattaacatgttattcttaagtttacttacatagagataatataatactcatgtacatttgatttagacttagaactcaacatttcgaatatagtataatatcatctatgattctatatatgtatggaaaattgaactacaactttagtgtcttgatagttgggcatgcatcatccaatccaaggtttcgatttgcttttacaatgtcgagaagagctagatcctatgtaattatgtattggctaccaaacaaatcacattcatattcgctaaataaccagttaaccactaactattttgttttgtcggtgaatgtcaaggattacgcaaataaagaatcatataagaagaataagattaagggagacgaactattatagttttcaccaaaagtggatacattctcctcgactaactccccgaaaatgtggagagaagcacccagaccaaatgggcccacttacctctccttagggatacttttgtctttttcatagcaaacggcaaccaacattcaacgtagctgcgccaaaagaataaaccttccctactagtaaattaccattgcgtgacctcgtgttagcccggacaacctgaaccggccagctcagattctaatttatatgttagggagatttggaaattgattacaagtgaaattgtaatggcaaggaatctatacaatgatattaaaagtaatcaaaccaagaaagttataaagtcaatattattcatatctaaacaaatacctaatatcaaaaaacaaatgctgcacatagctaattgaataagaaatcaatattgatcataattaaacaattaccaatttggtcaacaaacaaatgatgcacttagttatctaatttttttatttgtgtttaatcataagtttttagataaagtggttccccccatatactgatatacgcacgtaaagatttgtatgttgattagccaataagcttacttttatataaagtataaattaaccacacaaacaacttcttcacaatagagaa

SEQ ID NO: 59658 - DNA, 204 bp, Arabidopsis thaliana landsberg
  unsure (1)..(204): unsure at all n locations
ctttttccccccccccccttttccccccccncntnccctcctttttcccccttttccccccccccccccccnnccccccccttcctcccccccccccccctccccccccccccccccccccccccctccccctcccccccccccccccccccccccccccccctcccccccccccccccccgctcttgtttctccccccccccc

SEQ ID NO: 59659 - DNA, 465 bp, Arabidopsis thaliana landsberg
tgcaaaatataagggatgaggtaaaagtgcttggatggtagtagtgaattaatactgcatcaagacccattggttcggtttaatattctaaaaatttgaaaaattatattaaacctgcagtttggttcgtaagacctgcaacggctttgaccaacaattggctttaataattgcaattgtttattgtcaatattattatgtctatgcaaatcaaataatgtgaagtgaatgaaacttccagttttgtttgcttgcaaataataataattaagtattaagttgtggtttactcacttgagtttcatgaaaaatcaaagtcattttagactttatgattactgtattttctatgaagtacaaattttaaaacaaattcaaagaatacttgataaacttcaagataattcaaagtggaagaggagaaaaatatgatgaatttttattagagtatatgcattaaactac

SEQ ID NO: 59660 - DNA, 1320 bp, Arabidopsis thaliana landsberg
  unsure (1)..(1320): unsure at all n locations
ttattctctaaactaaatttcacatccaggactggtgttaggaaatcgaccgaataagtagtcggttgaaaaccgagaacattcttcaagacatcatccattgaaggctctcctttgcattttgcagtagttacatttgaactctcgagctcgtgaatcagggaatcaggttccgtgggtttataactgaggttttccctttctgtgtaacaatcagcttttgtgcttgatgttaccgtctcttcatctaaagcattgtcgctgacgctaaccactgtctcagcttcctcatctcctccaaaactatcatccagttttttaaaaactccatacatcgttccatgagaatcgtctggagtaattccgggctctttctgtgacgaagtggagctctccaaggaagaagagtacctgttttcagactcctctgctgcaacttggctatcgtctggatgggcactcgtcccaggtttctcttctatctccacatcatcttcacttgaaaattctggggctgtaattacgagggcttgactgtattttccatcggtgatcgaatgtgaagacaataacccagcaagtgcagatgctaaagcatcatttatagacaacgaatgttttggtttctcttcaaatgaatgaccaacctcctcattactgatctcaggttcagcagaaatcatctcattccctgagattgagctattttcactctccagttccacagactttgaaagaatattatcaagcgtgttcttcggtagtacaacagcacaatcttcactgttgtctatactagaggagtcaggaacaacatccgtgtttttagtcaatccatcactctcatcggtatcaggagttttatcagtatcactgcgcagagaatcttgattgggtattttcgttcgaaaacccaaatcagattcaaatgatttctttcctagctgttcaagtttcttctctactaattggagccttgcatcaatactattaataggtttcaacatctgatcttcaaatcttatcaagatagtttctatcatacttaccttgttaacaagctgattcagaatagtctccacattattgcaagataaagcaggcttgatttctgctccagatactcgtgttgctgcatcaaccggctttgcaacagtatcaactaaaactggtgagctcactcctatctgatcagtatttcctatagctactggatttgtgctgttagacttgtcggaaacttgtctatctcgttcttttcctcgagataggctgcaaagtgcaggcatanacatagccatcaacgaactactagatgaa

SEQ ID NO: 59661 - DNA, 860 bp, Arabidopsis thaliana landsberg
gtttctccatctcgtctctctttctgtcttcttctttcttcggcagctatggaagcgtgttggcagatacagagaccagcgagtctcagaccgggttttcaggaaaagggtcgggtcaagatcaatactttttctgttgggttttttcctcgctccatttctagtgtaaatctcttttgtttcttctcgtctcaatttttttcgctgatatgtatgtatatctctttagattctacttatcgggaatttaagtgtaaagtgttctactttttcatagtgcgatcgcctttccgattagtatatctttaattgaatcaatgtactatttttaaataagattcaactctggtagggtctctggattgggattctcatgttagaacctcgtttgaaattggtaagagtataggaattgacttaatttctctaggaaatgttcaatttcttctggtcaaaatcgtcacctcattgagaataccaactcgaggggagagaaatgattttggggactatgagctagaagtaagagtcagctgaagattcacagtagaatgaaaatgtctcatcttttatagtttgattttaatatccaccttgttttacttatagtgtgattagtttaggtgttcttggagatgaaaatgtctcattcaatatggttttgatttataaatggctaatattcttcttgtttattgctggtgtggctagtttatgtatttgttagagcttgtgaaccaggtgactgaacagttttataatcgatttctaaccatcagacatgtttggctttcagattgcttcattggaaagtcaatacaaatcaaatgggtttctgcatcagatcacggcaagtgcag

SEQ ID NO: 59662 - DNA, 237 bp, Arabidopsis thaliana landsberg
cctttaattttagcacaccaaactgtactttctttcttataccatattctaacaataataaaccttataaatgcttattcccattgcgaaggaatcaagaacctgatgctgactttgaccaaccttgcgcctttgggttgtgagagagcgaaccgctcaaacaacctccgcgatcttcggtttctttacgaataaaattcccatagagttctgacaagggttaggtgatttcaaacc

SEQ ID NO: 59663 - DNA, 336 bp, Arabidopsis thaliana landsberg
ggaagattgtgtgggcatgttcatcagaaaatactgattatcagaaaagttggtgaggattctgagaaaggagctccgactttaaatgttccaaatgaagttgcaggaccttcgttgagtaacattcacgtgcatgatgccttacataaggatagagaatgctttgaggggaaacactcaattcaaggaactactgctggaatggagaacttcatgcagcacgaagagttgaattgtgacagagattgtgtcttcaaagggatcattggtgtgctccttatgtgaatctggagaccaaattggtgaatcaagagaaaagtgagttgtgcacagaaa

SEQ ID NO: 59664 - DNA, 526 bp, Arabidopsis thaliana landsberg
  unsure (1)..(526): unsure at all n locations
ttgagtctaacttgttcagcttattttgacttttcttgaggggttccctatgacttagataaatatagttagctcataaaacaattgagtaagcgtaggaactatacctattcacatggtttctccagggtttgcaataaggctcaaaacaacttcaaaaagcaattttcttatagaaatgagttggtagccaaaaaaagttctagaaacatgtagtggggtatgtgcaacttattcaaacacgtaaacctcatgtttttgttgatttgcccaaagttgcacttttggccctcctttttagctcatttagacttgatctctttaacttgccttcaagtcatcctgtgctcattctcatatgaagacagttagttcaagatggtgtgttgagcacttaatcaccaaaacgggtagaaatgaacatgtgacacacttncttttcatttatagatctacgccttttattgtggtgttttttattcgagtcatttgaaaacacaagaaaatcagataaaatgattttagt

SEQ ID NO: 59665 - DNA, 356 bp, Arabidopsis thaliana landsberg
tagaaacatagtcaggatgtgtaatttcatcaaatgaaaatagaaatatactatcttttaagacctatagtattctataaaattgttttcttattgtgtttagtcaatatgtatacaactctaagtaaataaacgactacagttattttattcacatttttttctatcaaatttgtagtccattttcttttgtttgacatgtttatttttttgcttggtaacagtggaaacatcaaatttaacgctaactttcgaatcttacgtcataacgtgattgttggcgtgaacaataattctttcccagccttaacaatttaattttcggcgaatctataatctttataaataatgggaaa

SEQ ID NO: 59666 - DNA, 1257 bp, Arabidopsis thaliana landsberg
ccaatccagagaccaaatttgatatagtaagcaagaaattgaaccaagtactaagggatattgatggctgatcatgattatagcaacataatggagcaaatccgatagagacaaacaccaaattaagtctatgaagctaaataggctaatttaccaagttcattgaggaattcgtatttggtggttggatcttctctagtaatgctatccggaagagacgtagtcgacatcttactgttttgctgctgcattttccgattatcttcaccgtgaagtttcgaagaagaagaggaaggatccaatttccgagtcttaccaccaaaatttgatttctgcatactcgcaacagctcttcccatagttgtcatatcaatctccttgtctttcttctttccctttttatccttagatttcacaacaaacgtaccgtagtctccgtcgtcgtcatcatcatcttcttcttcgtcttcttcatcagaagattcctcatctccgcctctcgctctcctcctaggactaactcccattcgcggtttggacgagtacggactgttcttcttactatgactactccgatctgttttcacaatcatcgtaccgaaatctccagattcatcaccgtcgtcgtcgtcgtaatcgagcgacgcgccgcctccgaaatccttgggaagacgcttgagaagaggaggaagcatagaatcgtcatcatcatcttcctctccttctccgtcactatcgcctttgtagaccattgtagcgtataaatcgacattttcgtcttcctcaggtttggctttacgtttgtctcgatctcgaccttgatcagaatcagagtcggagtggactacgaaagtggagtatatgtcaggtttgggctccggtttccggctccgacgagatttcggcgagttatgatccatctatggcgactctaaaccgtcgtcgccgggagagagagaaagagagtcaggcaaagagtaatacgtctcgtcgttaaaattaatgatgacaaataatttttaaaaattaggaatgggccaactaaaatattttgcaagctggaatattaatttaattctctgttttgtctatgacctctaaagacattactgcttcttgcataatctgtataggattcgattggtgaaatatatcggtaaaaaaaaactaacgatatcagagactgttatcgttcgaagacatacacaattgagcacatatgcgtagacattagagatatacagatttatttttgta

SEQ ID NO: 59667 - DNA, 665 bp, Arabidopsis thaliana landsberg
atttgtataaagaaactagaccgcaggtgcctggacccaacgggataccaaagtttttttcattgctttcgcggatcaaccgtcatgggcacaacgctcagatgcggtcggagtgcgccatttacgctgggccagaacatggccgccaaagcattctctgattcagtaaatgcatggcaccaagtaatgccttgatcggacaatgaccaaagcgcggcagaaatccacctcatggacgttccggtcgcgccttccgagttgattcctctggaccccaaggcggccagggcctttcctcgatggactcgcgcatcaatcgacgcacgacttgagaggccttcaagtcttccgatgcgcacgttgttcgcaggtctccttattgcacgggtcaacgagaattgcatacaggcggcccgttcttttgtgttcatttaatgataattaaatatacttaagacacacattatatgataatgtttttatcataatgaaaccagcctaattcgagcattcgctccaagcattcgccctgacagccgcaataagcatcaatcaacatcagcacccctccccgtcccaaaaaataagtaaggatctctctcatggactccatgcaaactcatcaaaaatacaaagttcactcagacgaagttcctttcaaactg

SEQ ID NO: 59668 - DNA, 151 bp, Arabidopsis thaliana landsberg
gcaacaatatgtaacctttctacgttaatcatcagcaaaggaagctagcttttaataattaccactctgaaatagattccaacatactacctcaaactaccctaatatgagacagcaataacacaaaatcctaataaacaaataaaatacc

SEQ ID NO: 59669 - DNA, 191 bp, Arabidopsis thaliana landsberg
tctaggttaggtttaattctttcgctatctattttattgtatctccaccaccagagatgtaggctggggtatatatggagcatgcatgacatagccagaacctgctaatattttcatcctacccatattaaattcctaatctataattgaaccagagacctcttccgttaagtaaaatcatcttcctctaa

SEQ ID NO: 59670 - DNA, 505 bp, Arabidopsis thaliana landsberg
ctatattaagtaagatgatttttcaactgttgtaaaaacgtgtaccactacaaattgttaatttcgcatattattttataagtgaaaaaaaaaaaaaaaaaaaaaaaaaaaaaaaaaaaaaccctatgcatgccctctgaagctttctcttctctatttatatgactggctcattactcctagactcatcctaaacctcccgtcctcccccttcatctcttagagccttttaaaagtaaccaacgccatgaatatcttccaagactggcctgagcctatagtccgtgtccaatccttatctgaaagcaacctcggagccataccaaatcgctacgtcaagcctctatctcagcgtccaaacataacccctcacaacaaacacaaccctcagaccaccaccatccccatcattgacttaggtcgcctatacacggacgacctaactctacaagccaaaacgcttgatgaaatctcaaaggcttgtagagaattgggatttttccaa

SEQ ID NO: 59671 - DNA, 225 bp, Arabidopsis thaliana landsberg
  unsure (1)..(225): unsure at all n locations
acacattgattaagggggtgnggtcatcttttaacctggaatgaagccatcccctgaagcggggtgaaggatccgcagtattcgaccatcacttttgcgtacaagcccgggtttgcgcggtcggtacgaacagttgcgaagtcttcttgcgctgcttctatcgtacattccattgcggagcgcagttcagctcaacacttcctgtatcatcggaactcctttcgg

SEQ ID NO: 59672 - DNA, 1900 bp, Arabidopsis thaliana landsberg
atgaagaagaagttgtccaaagcagataaggagagacaagtttgtcctggaactttgaaacgtctcaaaaggtacgacctttatttgcttatctttgatatttgggtattaaactttttatcgaggttttgagttatatatgtaacagagtaaagaagatgacataaatgacagagaaagtggcgaatggtgtgctctctggcgttgttaaagcttctggattcttctcgagttcagtgatgaatagcatagctgggcagatgactctttgggcttattcctggagaaatggttcttgcaacacttgatggattcagtgagttgactatatcggatgtctcttatctatctttattaggcttctgatgatcgaaactaataaagataagcttacccatttgtgacagacaaggtttgtgatgctgtcgaagtagcacgatgactcgttatgaaaacaacttcagatgtaactactgaaatcgtcgatcacaagtaagtaactcaaaaagtttacaagagaatgtgctcataccatgccaaaaagatagttaatgtttgcatgttacttgtaggtatggagcaaagacagcacaagcgacaaacgaagggcttagcgcagcagggcatgcttttggaacggcgtggactgttttcaagattagacaagctcttaaccccaagagtgccatgaagccatcatcactcgctaaaaccgtagttaaaacggcagctaaagagagaaagaaggggaaaaaaagttctaagtaggctaatggacgttgtgttgtttgtatatcaatatcattgccttggtacataagcattaaacagaccatagaggtttaaaaatattagattttgttgtgttgtgttgttgttgatgcaaaagtgttttgcttcttcaagaatcatgagatttatacaaatattgatacaattttagataatgtgtttgaattggtaaccgctaaatagcatataaagtgagtattatttgtccctggtctcgcaagtttccaataaaattgaacaaacctttccaataagtcatctgtatttgtatatactgactgatccgatttaataagaacaaaatcaaatcttaaaaccaaaaagaaaaacctttgatcaaaaacatgataggacaagtaattgtgtgatgatgtcacaagctttgtcgtttttttatgcgaccggaataaaatacacggcgttttacagtaagtaaaatagtgtttatttcactttcagccccacaatttaagagaaattatcaatcaaaccctagtagtatctgaatagtcctacaaaatagaattcgaaccagcgagcttggtgtttctcgaattcgaagctgagatccaaattaggtgaagtaggtcactttgtggtagctgtcttctacacaagaccagaagagagccaaacagaggaatacgcttctccacaatgacagaagaatacgaggtgcgacttctgatttctaattcttcagctttattgaattttttctatgttttgaaattcagattattagggatcaaatcggatgtaaaagctgtgtcatttttaatctgcgccatgaaatcaagatgttgaatcatggaacaagtattcaaattatggtttcttcaatgttactggaatggggaaaaccaatttataaaaatctgagctttaggattattagtgaatggtatcacttcctttttgatcaataagaatcatgattagtcttagatgagtcctttggcttttatcttaaatcagaatcctgtgtagcttcgttgttctctgtttctgattcttaaccaaagttcatgacttttggagtttgttgtgcaattgttattgaagagttgagctgatgatatctcataggttgatgagcagaagcaag

SEQ ID NO: 59673 - DNA, 1542 bp, Arabidopsis thaliana landsberg
caaggctccattcaccaaagaatccgccatctaacttgcactgaatgccctcaaggaacatgcaaatctgttttgcaaacttctgtgtcacagattcttcatttcccaaacctttcttacatcttagaatctccatcctgaaaagaatctgcagctcgtatcttatagcttattaaagaaaacagaacaacaatgccaaacaattcagcttagataaatgaaaagaaagcatcagtaaatgaataagttggctactgtaaccaaacagaaagtaaaaggatactctctaacgatcctactgggtccagcttcatcacaattccgctcactagccactgatgatgaatctttcttattgaacttggcaactaaatctttcggatctttcagtaacatcttggttagctcgtcaatgaccaacaagagggttccactctcacagctatagtccttctcagctctttgagaggagtagaagacacaagacttgacaagccgctcggcaagagctgacaagtctatttcttcagactctatcccttgcttgattttactaggaagactaacgaagaaattctctgatgattctgatgcatgaacatacgtattactttcctgctttccggatatacgatttccactcaaagcaatgtcctcttcagctagaggtaaaggagaactagctttatctgtctcttcagaggagttgttcttttcctcaattggatttgcgtccacatcctccaatgcattgcaattactagccacggataagctgcaacctctgggtttactaatctgtttcatccagcatttcagaaacttaagtttcttcgacttgctatacttgaagaaataaacatcttctagatctatttgaccataatctttcactgatctgcagaactcctcccagctaatgtcattaagagaattttttcttggttttcttttatattcgctacaactgactttcttcctgctatcttcatgatccacagtttgaggagacactccattgtcaaaaacacagattaaggccgaggaaaaagtgaagggcttgaggattcctgtccgcaaactaccattgctatttgaaaaagataccaatgctgagaaaccttccctatagagataacttaataagatctgccaaatgggtgatgatcttttggctactctctcacccgtctcctttcctaatatctgaaaaaccaggtcagcccaaaacgcactctcctcctcctgatcttgatcagagtcctgggagacttgatgaacaacaaaagtatcgcaagtatacctctctagttcaataagatcatcacacatcctcaaggccttaatactgagtttggtactcccatcacaaaactgttcaactagagagtcatgattgactggctcagtcccactagctaagttgataaactcatcacacctcttcccactaaatatttcagaagaagaaaactctaactcaccaccacacttgcattccataggtttaccattaatatctgcaatctcaagactagcctg

SEQ ID NO: 59674 - DNA, 340 bp, Arabidopsis thaliana landsberg
  unsure (1)..(340): unsure at all n locations
nnnnnnnnnnnnnnnnnnnnnnnnnnnnnnnnnnnnnnnnnnnnnnnnnnnnnnnnnnnnnnnnnnnnnnnnnnnnnnnnnnnnnnnnnnnnnnnnnnnnnnnnnnnnnnnnnnnnnnnnnnnnnnnnnnnnnnnnnnnnnnnnnnnnnnnnnnnnnnnnnnnnnnnnnnnnnnnnnnnngcgtgtctcaaataccggatcctttgcttatggcgtgtgctgcactcgtgccaccgtgctatccctaccatgagtccaattagagcatggcgtagtcttggacatagcagagacctgtgtgaaatagccttcgctctcttttacacacaacatacgatcc

SEQ ID NO: 59675 - DNA, 1811 bp, Arabidopsis thaliana landsberg
tatacacaagttcttaaacaaatcaacctattaagaaaataaaggttaggggttctaccggatttctttcttttcatttcttccaatttcgtttttctcctaacacatagttggtctctgtattgtagcgtaaactggcaacatagataatgtgttcatagcatcggatttacttctttgttaactgatcaccactacactcccaaccccctcgtcaaaatcagtatatgaatgatcaaactctagcctataacaatacggatattttgatgttgatttcatggaaaagttgtatgtatgaaagagtgtcatcaactacatagcattgagccagttttctctagtggcgactactccatctcccaccgctgtaatatataggatatatcagttagaacaattttttttatagttttgtatattttcggctgactatataatctaaacaagatctcgcgagagtatattagctcatctctaccactatcactatcactatcactatcactatcactattactatcactatcaactataactttaaatatctatgtctaatcaaactacatatatatgtagatccatgcatttctaagtttgaattgtttctatgccaaaaaaaaaaaaaaaattggttaatgtttgacaaaacgactgttcacagcctctctatggtagttgaacatataccatatactttttgtttagataaaacatatgtaataacaaatttaggtaaacctactcttgatcttagctaggtttgagcaaagcatttcatttcaacaacgtacaataatacaatcacgaaatgaaatgacactcgcatttgggccttccgctttttacctgtaggcctttagccttagcccgttaagggctttgctaaatattgtaaaatacaaaagtaccctcaaagattagatcgattttcatttgaaacctagataaacggagtcaacagacggagttttgccgttaagagggaagacacagtcctctcacaactcttccacttctctctttcctacaaatttctcgttcctccgacctctctcgccggtaagtcaattttccggtgagaaaatgattaaatcttcctgaaatgtataataaaatcctctttgtgccatacacttgtgtttttagtaactgctttatcccaaaaactctggaatttttactttcatagctcattcactcatttttgtttttatctgaatttggttcaaagtttcgttttttattagcagaagtcatctctaactacttaatttggtgaagatgatctttttcttactttaacatgtttatctttgtacaaacaggaaattgtgtagcatttgtctataaatgggtttggattctaaagaagctgatttggaggtaataagagatgagaaatctgaagcaaacactgtgtgtttacatgcgttttcagatttaacctatgtgtctcctgttgtgttcttatacctactcaaagaatgctataaacatggtaaatccttgctttacttctttttcaagttctcaatttgttttctagtttaagtaaatgaatgggtatttcaggtagcttgaaggcaacaaaaaagttccaagctttacagtatcaagttcatcgagttctagctaataaacctcaaccaggacctgctactttcattattaattgtctcactttacttcctttatttggggtatatggtgaaggctttagtcatttagttatatcagctcttcgccgcttctttaaacagtatctgaaccaactagtgaagagatatttgtttgcgagaaactagctg

SEQ ID NO: 59676 - DNA, 1737 bp, Arabidopsis thaliana landsberg
taacccccgctttttgattcactatttccgaatgcgtgatttttatttcttttttccagatttttttggtcattgatttatgtgtagtgtctgtgtgttgtagggttatcagttttcgctaagtgatttggatgagcttggatgtggaagtgaagctaagaggaggttcactcttgtcatcatcatcgtcaacgtcgttgtcattgtgtccttcatggcacagcaacaatcttcccgactcaatcgtctccttactttgttggacagtatcctttatttttcctgattatttcctttgttaccaataatgcttcgtttttattgttgcgtttcttcgtatcataatctcttaagaaggtacatgttctccttgattatcatttctttgtagctggttcaacacaagctactcggctaactgcagccaaacagatcggggatattgcaaagtctcatcctcaggacttgagctctcttttgagaaaggtatagtcatgggatttactttctatagattacagagatacagggctgtggttgattgttatactgatgggaatcaatgacaattgctagtgaaagttacataaattacgcgtccctagcttagatgctctcttggtctttggaataaacctactattcttccgaatgtgctcaatataggcgggtggacagagtagaatctatgatgtgttgtgtatgtcctgagctttaaatctcaaatttattgctgggaacaaaggtgtcatcccctgttcgatgtgtttacttcttacatgtcttatatacatcacaagtccctgcatgactagagaaagttgtttatagagctatacacatctatgattcctaaagaatgtcgaagcttaagacaaagaatctagtgggcttccagaatgaaaatttaagtagggtgaccacctgcgtatcttagtttcaggtttcaacttgcaattatagagtttctattattagattgaagttcaagctttgttaggacatctgatcttattcataaaataatatttctaatcaggctagggtttgtgttctggagaccttgtttctgctgcttttttaggtatcataaataactatttcgtcttggcattatactttaggtttacatctttctaaactgctaagtcgtcctttacattaaattcatctatttgttcctttggcttaactctacttcttcgggaattaggttttgcatcacctccgtagtaaaaagtgggatacgagggttgctgctgctcatgccattggtgctattgttctgaatgtcaaacatccttcattgagtgaactgttaatttctttagcaacgaagttgggtgaggcagggatatctgataatgtagatgaagtggtggctttccgcaatcttcagtcaaagattctggcaaatgcgccctttagaaggttattaatagctctattacacaatacatatgttttttatagcatctactgttaagacttcttagctggatttttagatgtctttctcatgttaaggttgcacgatgtatgtctctaacatttggcatgtgctaacagctttgagatgaataaggttttagagtttggcgctttgttggcttctggtgggcaggtaatttattatttgctattggttacttgtctaggtcatgttgtaagatttcagccgatttatctctgatgtaaattcttcattgatatatttgtcgtaggcctaatcaaaca

SEQ ID NO: 59677 - DNA, 241 bp, Arabidopsis thaliana landsberg
aaagttgttatcttctcttcatgtatgtttcatacaaatagatatgttaagtttcttgtttcataacgtctatatatatttaacaacatatggtcattggccaagatattagatatacacaaaaacaataaatttatataacaaacaattaatgccgttatattcgataaataatttatcattttggttaaaacttctataaatatctatataacatataaatgtagtagcacgagttctt

SEQ ID NO: 59678 - DNA, 294 bp, Arabidopsis thaliana landsberg
  unsure (1)..(294): unsure at all n locations
acctaacctaaacaccctcancttctcaacgaaancacaacaaacaacagggggnggtttaatttcaacaacggttccgacccccccccacaaaccatcaacgatccattttaaactaaccgatccagccaattattcacgctaaaccaccgccagctttcaactatattcctccacatcctcacccacaccaacaacatccatacccatattcatatccacatccaccccatcatccatctcacaatggcgaccatgatgctgattacttcaaagactagaacacatcaacct

SEQ ID NO: 59679 - DNA, 389 bp, Arabidopsis thaliana landsberg
tttattcacaaaagcacatatctaatggagaacttggaaatttatatgaaactgaccgctaaaaccgaacaaacgagactaaccaatacacaccagacctacacttataaacctacgcaccgacaagcaacgaggaaccatagcaagacaattaaaccatacaaacacaattgtacaccgaccaacactaaataactattacacataaaaaaagcctaataaatacatacgaacaaatcatctatctagcatgctgacaccttaccaccccatacatacataacataacatcaaacgtgctcactcccgtgcttacttgacatacacattcaaccccgggataaacacgaacaatcgacttttgccacctgccaccaaaacaagcaatg

SEQ ID NO: 59680 - DNA, 244 bp, Arabidopsis thaliana landsberg
ttttttcacatactcaaaatagaggagggataccatggatcagaatgcctatggataccgccaactcacataaattgcagaacacagactgcgcacaatgcatgcaaaaaccgagaacgccgctgaataaatgaatctgacaacgcacactgagaggcgacttgcataatgatagctgtttctcatgacaaatacatgactgagagcactgcgccgaatgactagctggatctgattcatgtta

SEQ ID NO: 59681 - DNA, 425 bp, Arabidopsis thaliana landsberg
  unsure (1)..(425): unsure at all n locations
tattagtaatagcctagcgatgatggctcgaggatgatgcagacaactttgttgctcgcacggtgacaaggggagttaacgtgggtaagagaagggatttaactgttggagacatggacggacctacgtattagcgagtgagggcacatgcgtacctccgttcatttctttgttgtaaagagtataacctagattcttaccattaaatcttaacttagatgttcttgatctaacattttgatgattgttcgtgtaattttgatgctcgntattgaaattgtaccctcgttcctattcattctgtgtctgctcttggcagacagctacagtgcctgagtgacgggtaagtggaggcaccacanatctaacacttttttttataaaaaagaggaagtaaaaaatgtctatcatcaaatcaattaatc

SEQ ID NO: 59682 - DNA, 1314 bp, Arabidopsis thaliana landsberg
  unsure (1)..(1314): unsure at all n locations
aaaaagggccacgagaaaataaaataacgattacttttttttactcataaatgaagtgtcctggcccatgaagaatgcaagagaatacggggtagggagcatttctagggaaagacgggcgacaacaaaacgtcaaaccctaacctataaaaatattaaacgcgaatcatatatagtgaaccataatgaaacaagaaaaaattaatagtgaagaattcaagataaaaccaagctagctaccaaaaacaaaaaaaaaagataanccaagctaatgatgagtcttttgaaaataacatagtttcacatgtaacttaacacacacaaaaatatgtttgtaatgaccaagaaataaactgaaataaactaagggaaacttaaatgatttcttaggacatatacatgatgaaaactgaaaacgaacaaatgctaggaagtgcattagcaaacaagagattcttaggaaaacatgaataacttagacattttggtaaagaactaaaactcccaaaagtcattctttttgggcataatctataaagtttaagaacttaagaataaataaataaatcatcaaataattgaatgcacagtaaaactaaaatctacatctcttgatagttaaaaagagagttgtgataaggtggtggggcctttcatttggccttcttttttttgagtccatatatagagaaattggaagaagttgatcaaaaggttcaaaacaaaaccacttttcaaacattggaactatctaagtattgaacacaaagatggccaaagtgttgacactacttgttcttcgactactcatgaacctcttacttatcggttggatttctctctggatcatcaaacccacgaccatatggatacaatcttggcgtcaagctgaagataccgccagacacactttcttcggctattacggtaaagtatatatgtacttaaaccacaaatctctcttattgtacttaaatataactctgatttttgcatttatgacttgtaaggtctcaactttgccgtattttcattccctcctattgctctctctatcgttggactcatttacttgagtttactgccacaacatcatcatccaacaaggtaaaaatagtttcattccctagtcaaagttgaaagtaagtaatgatcaaaactttgaagtagtgttttgtcaacttgtaaaagagggaggggtgcagcctatttctggctcaaggaccagcccattattcaattagctttcaattgggaatttggggtcattggttttcgaagaaatactttgggcttcttttctttttttttttg

SEQ ID NO: 59683 - DNA, 192 bp, Arabidopsis thaliana landsberg
catgtgtcaaaatgttttgaaatgggttgtgatcttgttacaattaagatcaagctacttgtcagattttatgtgatgggttaaattttacaaaatcctagcccaaatataaaatacctacgtcctcaaaacttaaaatgcaagcgataataatacaactttagagtacaaagaggttaaaggtagagaatg

SEQ ID NO: 59684 - DNA, 1340 bp, Arabidopsis thaliana landsberg
aactagacatgccgtgcaagaacacctcataacagctgctgccacaaccgggacttttgtcaggaagggtataactgagacaaaggaaaaggtttctgttggaaagatcaaagtggaagaggtattctagacacatagcttctcgaagttactcgacaagaatgtatgtatctcgtttcattcttctaacttctgacagctaaattctttgtatccatgttttctctttaggcggccaaaaagactgcacaaaagagcaagaccattttgacggatatcgaaaggtggcaaaaggtatttgactattagagtctgaaatctgattgtatgccgttgatttgagtttggtctctaatatctattctttgtaattctgcagggagttgccagctcagatggtaagttgatcgcaatatatggagagattacagtttaaacgtttgttaatcgaaaattcaatggattctttgatgtggggatacttaattatattaccgttcttgagataactattagtgattgcgtgtctgaaatgctgtgactttctctgtatgacaaatgtttttggcactcagtgtttggtgttgcgattgagatcactgtccagcggcaggagtcaagcaggcctattcctctgatactacttaaatgcgcagattatctcatattaacaggtgataatgtttggaccaatggagcacataacacttttattgctcacaccttctcatatcgagttatcaatgtgatattttcctcttacccaggacttaattcaccgaacttgttcaaggccgaaggagatagaaagttgattcaacacttgggttctgcttacaatcaaggtagcaagatttcttttcgactcttatggctcatggagaaattgtcatttaattgaatcacttgtttggcagatcctagggcgtcaatacctgagggtgtgaatccagttgatgtcgctgcactcttgaaatactatcttgctagccttccgacaccactaactacttttgagctttataatgaaatcaaagatgcacggtcgagcatacacagaatgagacagtcactccagaagctttccaatgtgaattataatacattggagttcataacagcgctattgcttcgtgtgagccagaaatcacttcttaacaaagtgggaataagttgttataacactaatctctgattctagatacttaagatgatccttttttcaggaatcatataagttatctgaatattgggaatcatccgtttgcattttgcagatggattcacatagcctaactatggaaatggctccagtgatcatgtggcgagaagacaacagg

SEQ ID NO: 59685 - DNA, 601 bp, Arabidopsis thaliana landsberg
attgtatcaccaaaacaaaattgttctatttaaaccaaatgaaaaaattgactgaagaagttaagagcacattcccacatccagaaagagcagcaaactttatctcaaaatgaaacctttcttgagaataaccacatggttctgagaatagagagaggctaaggatttagagatttaattagggttttataaagtgatagactttgaagaaagaagataaagagagagagagagagagagagagagagaaagagagaattgcaggtgggttttggatgtgaaggcacttcttaaactaagggcttagagtattagtagtgaaagcctataaagcatgagaaagacacatgagagccatagccatagctaattatttcctcacttttctacagacaaagagaaaaaagatcattaattaattacacctagttttcattttattaattcatatataggatattttattcaataatgtctctaccaaattaaaatttgggtgataatatatagacaaaaacaatacaattgtgatcaaaatatggaaaagaaaaagtgtagcttaattatttgaaaaaaaaaagctacattatttattaaaatt

SEQ ID NO: 59686 - DNA, 1182 bp, Arabidopsis thaliana landsberg
  unsure (1)..(1182): unsure at all n locations
tgcgatgaaccctggtccaagtatatatttcattagaagcatagaatatatcgatacagtttcataaacttttttatgcgacgatgaaacagaaatggaattttggtgatttaactctatggattagatgttcacgtgaanagaatatggaacagaattttggaagaagaaagtacgatttagattcttaaatactaaattaactatacaggaaaagtttacaatagtcatattcataatatgctatagagttcatttttaactcttacctctgtgatagtgtatactagtcatttttctttcttctacttctaaaattgtctttatcccaactttggctaacagtttttataaaaattttggttttctatttggtaatgttgctgaatattgagattgaacatagtttaacataattattggtatgggaacaagaagcatacatgatacatgtgtcttgactcgagacaaacaagatattacaaaacctaataaaccactgtcccacaaattattgattaaataaaaattgtaccaaaacaatccaaaaattggaataaacactccaaatgtttgatcaagagtcaagactttttgtttagtagctttgagctattgtggtcgatgtgtcatcatccgaattcatatccatatattacatatgttgtaatgaatgatataaattcttgtaacttttatgtaaatggtaaaactagaagacagctatttttaacaacaattttctagaagccaactaatttatgcggacttagtatagcatattatcctnnnnnnnnnnnnnnnnnnnnnnattcttcttcctatattagttttcattagctcaaatcgtattgtataatattttgttaaacaaataataattttggaaaaataaggaagggtcgtgtcgctttacaccggcaagtcaaaaaatgtctatgtgcatgtattaaaacttatggtattgctaataactctcacttactgttcaacccaatcttttgaagatgataactcccaaaaaccaaaacaacatgtaaataaagcctaaagaccaggaataaagaaaacaaagtcgatttgacatttgtgtnttcattatcctctcttactatccatcaccaatgacataattgttactatgttaatagtaacagtcatttttgttctatagaattacag

SEQ ID NO: 59687 - DNA, 1343 bp, Arabidopsis thaliana landsberg
gaaaaatacataaacgtataatgattttgattggctttttttattgaggaaccacaatacaacaattaattatgcgatcacgtaaatttttatcaattgcatgttcttgttacaaagaaaaatgtatattttttttattctacaatttaaatgacaaaaaacattaatttcacaagggcccattttacaattagatttattctctccaagtttattaacgtgttagattctttctagaatttgtccaaaatataaaccgagtgaactaaactatcaaactaaaataaattaccgattggagtcaattttgctaggaattaattaaccaggagagtatatatattatacacacggaagccacttgatgagcaaatcgaggagtgatgctaaaatatcctatagtatttttttaggttgtgagatatcaattttcttttatatattgactatatacgtacctatcatcactatcaggagattacgaattacagctgcgttttaacgcgttaactcgtaatacgaactttccaagaaagtggccccatttatggtttaattattggttgtctatgtttattctttaccgattaaactagtgtgtatatttgtagttatacaccaaatttatatatactgtatcatgtttatatatttttatgaaaaagtgactgtaaaacctgcaaacatacgtgcacgaaaatgttattacttgtaatattttttattactagaatattgatccatctaatctttttattagatttgttacgtgtatcatcaaagtctaaagaaaaatctggttttaaacctagctatatgacaacttgctattgaatttaacattttaacatcgtggctcatcgctttgtgaattgtgagtaacttacgcgttaacaaaatggagatgtcgtacaaaacagtaattagtataaatacgtttgatagtattataatcatttggtaatctttaattatacaccataacgtaacatgttacataatacatacaaatgctattcacgaagaacgatatcgccttttagcatcttgttttcttacatcattaaacaacatgaatattgttagtaatatggaatacttacgaacaaaatgtcgataggacatagtaaatgaaaatagcaaagagtgaagtcagaagagtgtgggagaaggtgatgatgctaaattgatgagtgacttcgaattacaactgttctcactctggctcttttgctacccagattccaacccgggttttccttttcgtcaaaactgaactccgtgtattttatccttgcctaaaaatttttgtatattcttttaaccaaaaaaaattttaaaaa

SEQ ID NO: 59688 - DNA, 571 bp, Arabidopsis thaliana landsberg
aggatggctggttgagcacaggcacaacgccagccttgatgcgtccaatcgtctggaacaatggcggtttttgctgattcatctcctgttcacatccctgcagcaaaactcatcattacccaaaaactcaacaaaacacttttaacttctttgttacaatcattcattaaacacaaagtataaactattaagaaacagactgcattccagaatcacaaaaatgcaaaaagtaccagaaactcagcttaaatggtaaataaaacaagtcacagtactagcccctagatcacatattaataagctcaaacctccataaccaaaacccaaacgcaccttggtgataataatggcaataacacttttctcaaaaactttgttggcctccattgttgtttcatctctaagcttttcccctttatgaataagtatttgttgtgcagaaggatgttcactagctcccatcacagtctctatgtttttcttcacttcagcagcctaagtaacaaaccatcagctcatggaaacgaacaatcaaaaattcacagaagaatagaatttccaatcgaaaagc

SEQ ID NO: 59689 - DNA, 399 bp, Arabidopsis thaliana landsberg
  unsure (1)..(399): unsure at all n locations
aaaaatcgggtgaagacgaagctgtcagggtgatatttttcaagtgctcgacaaaagctcgaacatcctgcgcgactcaagtttgattcgtcaaaattattcagtcgaggaaaagatcttcagcaattgattaccgaagaaaagaaggcccctggatgacgtcaaccagaacccgtagtcgtgcttctgactatctcgtcaaattagtcagggtaagcaaatttgttattcatgcgagtggattaatggatgatctgactaggtctaatatttattagattgcctgagtcgctttggtaaattggtcgatgtcgtaggataaaagaggtctcaataggtctcactgttgcgggactgtangtgttaaaatggaaagttttattaatatatatgatacac

SEQ ID NO: 59690 - DNA, 536 bp, Arabidopsis thaliana landsberg
  unsure (1)..(536): unsure at all n locations
gatcttggcgcagtgagttctttcttccttgattttctgttttttnnnnnnnnnnnnnnnnnnnnnnnnnnnnnnnnnnnnnnnnnnnnnnnnnnnnnnnnnnnnnnnnnnnnnnnnnnnnnnnnnnnnnnnnnnnnnnnnnnnnnnnnnnnnnnnnnnnnnnnnnnnnnnnnnnnnnnnnnnnnnnnnnnnnnnnnnnnnnnnnnnnnnnnnnnnnnnnnnnnnnnnnnnnnnnnnnnnnnnnnnnnnnnnnnnnnnnnnnnnnnnnnnnnnnnnnnnnnnnnnnnnnnnnnnnnnnnnnnnnnnnnnnnnnnnnnnnnnnnnnnnnnnnnnnnnnnnnnnnnnnnnnnnnnnnnnnnnnnnnnnnnnnnnnnnnnnnnnnnnnnnnnnnnnnnnnnnnnnnnnnnnnnnnnnnnnnnnnnnnnnnnnnnnnnnnnnnnnnnnnnnnnnnnnnnnnnnnnnnnnnnnnnnnnnnnnnatctttggcgcaagataaaggataatcccgatcatctgcttgttctattctctatttt

SEQ ID NO: 59691 - DNA, 737 bp, Arabidopsis thaliana landsberg
ctttttgatcttatcgtcgtttcggtttaatttttgttgttatagttttacatgttaaaatcattaagcttgtgtacggatttgagttttgcgagtgtagtaatgtaaagtaaagcaatgggaattagtagaaataggtttctttgtgaaatatgttgttatctttggtgagcaagcgctcactagaggtagattccaggtaaaattatatttctctaatcatttactaatctcgtgattaagatcataacatttatttgatgaattttgatttgcagggacgcctatggatttgccttgagacctcaacacgttcagagatatcaagaataccttagcatctatacagtgagttcttcttgatcatgcttcatttgctttttctcagataatttagtagttgaattttttttcatatattagctatgattgcattattagaattcatgtatgtcatgtccaaaattgcttctgtttatcaaatcaaatgtattttttgtgttactaaattgaatactactggaataggaggaagagacagagagggcagagaaatggaaaaactttcttgaccgacaagaagacagaaccgctgaaccttgttgctcagatgaggagtttcacgatacatcttatgcctgaggtttggaatctggagaggatagtgattcagaatcagatgagggttcaagaaacgggaaacattgagaattgtgacttagtggtacatgtgagca

SEQ ID NO: 59692 - DNA, 139 bp, Arabidopsis thaliana landsberg
aggaaccatcaatggaagcggaggatggaccttttattccaatcctaggacccggtcgagggggttttggacctggataacgattcccaacccacgttggtctatcctctcgcaccacaatggatatcatcgcccatac

SEQ ID NO: 59693 - DNA, 477 bp, Arabidopsis thaliana landsberg
cgtccagacttgcaccaacaatgggcaacatatgtccggcacgacagcagtgcgtcaaccggccactactcttagctatagagaggatttggggatggtcgacgtaagtccgagtgctgatgtaaaaaagcaatgtgcatcttcaatatgtgcttttttacaactttgtagcaagcagtgtatcgatcaaaactgagctttccgtcctttgacgctgacagcgctttggttgattgtggaaaccatgcataggtgctagcttcctgctgtgcatatatagttcacatccaaagaaatagcaatatggaagaaaaagagggacgaaaatcccaaacagaagcaaattatgtagctagatctaacaaataatgcaagatgtcctcgtcgtcaataagaaaaggtccatattataacgattaaaagaacaacccttattatatatcttagtataagctcccatgctactacttatcttaa

SEQ ID NO: 59694 - DNA, 624 bp, Arabidopsis thaliana landsberg
cccgagaaatgacccgatcaccaaagtactctcctttggggtccagcagcttggccatctgtcgtgcataattcctatctcccattgtgtatatgtacatcacaaacatctcactagcttcttttagaaatgagtgaacaaacggcctcagtttggtcatcatttgcataaattccagtaggaaaagactgcctccggaaacattgcaaccatctagatggaacaaaaaaaaagacaaatactagactgaagttccatgcacaaagatcacatttgaaaaagaagcaaaacaatgtagctgaatgtatcaccttgaagagaatgagtatgacttttcaagtattcctcctctggttttaggtccctcagtatggttgtatttagcagtgtgtggtctagatcgagaactaaatacaacttccgctggcgttgcaagaatctcgaatctgaatcacgcaaccgggagatttcatcttcattgagcctcatttcctaagaaaacagatttcccaaagctcattaaataaaaactaagatttgatttaagagaagctattctgaaatcgataccttgtgtatgtatctaaatgaaacaccagtttcttccagtttttgtccacatac

SEQ ID NO: 59695 - DNA, 1832 bp, Arabidopsis thaliana landsberg
  unsure (1)..(1832): unsure at all n locations
cgcgtctcgtaaggcgttgaccgtaattttgacttttcattagatttaggtacgcgttttttaaatattattatttccttaactattaaagtctagatgttgataatctttgattcataaaatcaaaatttttacaaacaattacaagcacaaccacacaatagtgataattctatggcatggcaccattaaagatatagattcacgacaatcaataagtaaataaatatagatatagcttcgctttgttatttgctagacaccacttgttatcttgtggatgatattataaggtgtggctgaagaacggagaccaaaataaagggaagagtctttcttatgtatttactaggatgcgtccaatggcatgatggttatagattatagtgtagctgttgtaatcatcttggttcctttgaaagttctaatatcatcagatgacagacaaaaaaaaaaaagtttccccttggaacaagtcatccaaatataaaggcagtcacctggaaatagctttctttgttcgtataatttttgttcaacgtcgcgccatttcaaaaaattgtcgaccaagagaaaatggaccataaatccgatatgttgttttcttgatacagttctattgcttggtccaataaaaatcgaaaccaacttgtctattgcttggtacttcgatttctcattctatttctcaaaatcagcaagtaaatgattctcaactcttacaagtctagatgaaatttagctacctattgcaacctctcttgttataagccaatccaagtttatatagtaactcaatttctcaagtaatatatgaacactaagagtcccttaaactgaatatcttgtacctcatattatttccttctcctttgaggaaatcctagccctacattcccagtgttgcccactgcttgtatcggttcaaccaaaccttttgtattcttccctagcgtctcaccctgcattagcatttccccagtaatcataaattacggtgacaccaaataacatcacaactcacaagtgataagatccacaagttacctccttccaacccatgtttcccattatcctccttgcataacttccagatccaaatgatagctccaatgcttctgctacagtatcctcttcagaaccagtgtcgggaactgaatgctcgtccgtgttatggtccactgttgttcctttttgacctggtccaacaccatatccaccatgcaaatttcttctctcagcggctctatctctgtatgaacagcttctctgctgataaacaacaaggagcaacaatgaaaatactagcttactagggttctaataacactaaactatgccttcgaaatactcttaacagatttaagtttctcactgaatttccccatacacagagctttagaaaaatgtctcctgctagatattgtgcagaagttcaagcagcaggatgtttacatccttcacaaacattctgaaacataaaatacaagaatccagccatgaaggtgaggtccgagtacctcttcaatcatgttgacttcatctcgtggcttcactgtgagtttgcagtcagtttttggtttcaccttcttagcttcgcgttttgtctcttgctagatatttggcaaaaattcaagaagcagggtgttaatatccttcacaaacagtttgaaacaaaaaatagaagaattcagccatgaagatggatttgcagtacctcttcaaacatgtcgacttcacaaggcttcaccgtaagtttgcagtcagctattggttntaccttcttagctttgcgttttgtcttctgctagatatttgacagaatttcaaga

SEQ ID NO: 59696 - DNA, 499 bp, Arabidopsis thaliana landsberg
  unsure (1)..(499): unsure at all n locations
tggatgagatagaaaatggggtagggaattagctggagatagtcttataactggatccaagtttgctaatgttttcttcattaatttatatctgatcatcatccatcttataagtgtatcttcgatgttatgaattgaaacacattgccagaggccagtactggtatctggtctgccaaaggagaacagatggataattcattactgagaattaattactgagaacagatggccagtacttccgagtacgatcctctctgtggtccgatgtacagtggaccgtgatggccccgctagtgacgagggacaggattcaaggattttcttagtcgataccatgttccggtgtcttcttaatatattaagaggagggcggtctttcccccgggtcaagacgtcaagttttttttgtatataattttggacaggacgaaataagtttggcacgtctaaacannnnnnnnnnnnnnnnnnnnnnnnnngtcggatatttttaggc

SEQ ID NO: 59697 - DNA, 1356 bp, Arabidopsis thaliana landsberg
aattctttttattaattattaattaatttgagttggaaacgtacatttaataaattctttatttcataaaatcactatactttaaatagatatcatatacgaaacagactatactattagcagagtatatcatttaattttcaaaacaaacaataattcggcataaactaaattttctttacgtaaaatggtccatacttgatctatatagtactacggattgggatttatgatctaatccataacggttttgtcgatcgtggccattcaaatctcatatctatatttggattattaatttgcagaagaaatttatcatttactgaaacctacaaacaattaattcgagacaacaaaataaaataaaaagggaataatacattaattaataattttggcagaggtggtggagtgagaaactgggaaaattcaaaacactctgtttctctctctctctcctctcactcttcgttctcttctctcgtcacatcaatccacactgtgaagtatctgttttttttttttttttttttttgagtttttcaagttctctgctgctactattggtctgtcttctctacctaaatcccaaatcccaaatcccaaatctagtatcatctaaccttacttcgtcctcttttgatttaacctctttctctgatctgacccatttctcaagaatctctctttcttcttaattcattggtgttttaaccttttcatcgattccaattctcaattgttgtctgtttgaggaacacaagacccccccttcccctagtgttgctcgcttctagggctagatcttctgggaacgcgaaagtttaggtctttaatcgattttgtgcgtaaacagtccgcagcatttctgggtttttgttcccgttgctacattttgttggtaacgtgtcgaattcgagaatttgattggtttcttcacaagggtctctggagttaacccaaaattggaatgagctcataagttaaagttgaggtctttgtaacctttaggtaaatttgggttcatgtttgatctgatttctttgaatttcttaaaccgattcaagttttggtctttcacagctctcttctgtattatcctgtggtggtggtctcttctgaatgtgaattcaaattaacctgtcttaatctccatttagttcagctagaagttgggttaatttattgaggtttatgcaattttttggtccggtttgttttggaatcaagattatttttcgctgcatcttgcagtccaggacagtgattcagtgattgtgttatctgtagatgaactaaaaatggaggttgttgataggaaacgatccacacgagggtttttaactttatttgatt

SEQ ID NO: 59698 - DNA, 525 bp, Arabidopsis thaliana landsberg
  unsure (1)..(525): unsure at all n locations
ctgaagtaaaacgtttacggattgaggtcgaattcatagtcgaaatgattaaaaggaaatgccaaccagccatcttggagattccggtataaaaaatataccgatcgtttgaaggatgcatggaattgcacctgaaccagaaaataaaattgaaactgatcaacaaaattcacttgttgatattgaaataatattgtaaacgaggtatttcgttacctataacggccataacccgccaattaattacagtcccaaaaaaataaatcagggaaactccactgttttgaagaagctataaaaccaaaaaacattgggttgttacaatagaaaaaaaatatataaggcaataagggtaacagatttgaataacttcttagagaaataaaataaaagaatagactttataaaaatataaaataaaaagagtataatagagtttacctggtttgaagcagtaaatgcgccacgaacantgtttgnnnnnnnnnnnnnnnnnnagactgggaccttntgtgatataaaaat

SEQ ID NO: 59699 - DNA, 1759 bp, Arabidopsis thaliana landsberg
tggagttttcaatggtaatttcttcttaaacgatttacgtacgtcacaagaaaatcaaaacaaaatcattcgatttgattttgaatcatgtttttttgttatagattttgagcgacgaatgacgtctcgaaagaaatcggttcttgacaacacttctccaatgatttggaagactgtttctggtaaattgatcattttgtgatgattttttctatgtgtggttgagaataatttgattttttgggtaacctacaaagaaaatttgacattattcacatgattacgaaagcgatataaatcgtactacattgtcaaagatttgtgtatttttttctttattttgatattgacttgtctcttcgttaaggtctttaatcaaatctagggttttcttgatcccaagtttcattgctaagcaatgtaaagtattgattttgattttctggtaaatttgttagagagaaagtcaagtcctggaattgaaggcttgaatctatcgagttttgataggcaaatggcaccaactacagagattcgtgaactcaggtttgaattatgatcaatctctctgtttttgttttcagattcaaatactctgtgtttttttcaatctcagggtgtttctagctacgtggaacgtaggaggaagaacaccaaacaatgatcttaacctcgaagacttcttactcgttgaaggcacagcagatttatatatctgtggctttcaagagattgttcctctaagtgcaggaaacgtattagtagttgaggataacgagccagcagctaagtggttagctctaataagtcaagctttaaacaaaccgaaacaggaatctgtttattcgaatgcagcttactctgcttcaagaacaactacttgtagtagtagtagttgtggtagtgaagaatcaagagcaccaagtagtctaagtttctttcaaagaccgaatcttaaggtcttgagcagaaattatagagtcgattcaagtcttttaaagacttgtaattgtccggttatcgatacttcggttggttgggaagcgaggagatcgaaaaggtttagtgatcctagtacagatagtagtaacaatgtggagcctgagaactttagggttcatgagaatttcttgtttgatgatgttcctgcgactaccaagatgccaggacaaatgagttatcgattgattgcgagtaaacaaatggttggtttgtttttgtctgtttgggctagaagagagttgattccacatatatctcatcttagacttgattctgttgggagaggaatcatgggtcgcttagggaacaaggtaaaacatataccctaataaatcaagattctgacacaagcgaaaagagaatctgaacctcttgtgtttttattgacagggatgcattgctataagcatgtcattgcaccaaacgagcttttgctttgtgtgtagccatttggcttctggtgagaaagaaggtgatgagctgagaagaaacgcagacgtagctgagattctgaaacatactcaattccctaaactcaccaagaaccctaattgtcacgcacccgaaagaatcattgatcatgagtatgtttccttgaagtcataatcattttcttattatactagcatatagaaactgctaaaagactctgttttggaatttgcagccgagtgctttggctaggagatttgaattacagagttgcattaacctatgaagagacgagagtattactagaagacaatgattgggacac

SEQ ID NO: 59700 - DNA, 1311 bp, Arabidopsis thaliana landsberg
atctgcagattgttcttgtaatggccatttttttgcttcttcttgttgtgatgtatataaagagtaaacatttcaaatatagaaatgctagactagcctacttaatgctcttcttccatgtgtactatttttaattgttgttaatgtctgcatcactagtaaggttttagatattatctggcattacttgatttgaagaattttttcactagaagtcctcaagaatagaaattacttgggattagagattggaactttaatgtttgtttcttggttagagagactttaatgtttattacatttcactgtgtcttgttttttgaggtatgggagcagcatctctgtgtatctagttgatgttagtttcttctaattcacaggttgttgaccaattgcaatctggtagcagctctaagaaaaagaataagactgaagtattgccagtaaaaggtctaggagttgaagttttagagaaaatggagaatgagaagaggaatgatgctatttggcaaggaaaatgctctggcactgtgtatgtctctggtagtttatgctttttttaatatgttctctggatttactttgtggttttggtggagatcttttttttttttttacttctactaccttttctcacagatacataggtggagccgagtctgaaggacatttttcattgataaatcaagcatgttcaatgtaagttatagcgagattgtagttcctattttcatggattggggacttttgctgttgtgttattattgggcatgaaagcgcattcaagttgctatgtgtgatggcatgtatgaatgatgctatccaggtttgcgcataccaatccgttgcatatagacgtattccagagtgtggtgcggtttgagtcagaagtagtcgcaatgactgctgcgttacttgggagtaaagaaacggcgtcaggaggtcaaatatgcggaaacatgacgtctggaggaacagaaagtatagtgttggctgtgaagtcatctcgtgactatatgaagtacaagaagggaatcacacggccagaaatgtatgtttcctccatcactttacgttgatcaagtatggactactataagcttaattgatggaagaatatatcatatacaagtgtaggattatacctgagtcgggtcattcggcttatgataaggcggcccagtattttaacatcaagttgtggcgagttccagttgacaaagacttccgagctgatgtgaaggcaacaaggcggcatattaacagaaacaccatcatggtaatgttttgaggtgccagttacaaaacgtt

SEQ ID NO: 59701 - DNA, 947 bp, Arabidopsis thaliana landsberg
tcttcgcttattgaaataattagaccgatagttgtcaatatttgtatattttactttggtttaaagatttaattttaagttcttaaataagaattaaattagatctatttaacaaaacgtgaagaatttgcatttttatttcgttctttccttttacaaaatgactatgttttctcttattgaagaaaatagtcagaaataaaatattaataaaaattatttattatacaagcatattttcttgcagaacatcatgtaactttttttaacacaaaaaaggtcatgtaaattttatttgtactattttttgtcgtcatactaatcaaaatcttctactctgcttactaattgtgagatattcacgtaaagtacaacaacaacatcaaaaatcaagataattagacgattttattgagaaaatcacatccccggaaatattggagttggttcttgactttcttaaataaaattaaaatcgcaaagtgaaatttaattttattgttgaaaaaaaatattatttaattcctataaaccccttaagcatcgattgttaatcaaattaatttgtgttcttaacattttagcaaaattgttttatgttttttcggtaattgtggtttctagatagtttctagttaaatgatgagatatacatacatcaagatatgatatcttccatcctcgaacaaattggagttagttttgacattttattttcttctaacatattaaatccaactgattggtttttttttcttcttcttttctttttcaaatccagaagcaattataacaccaagaattaaacccctaacgaaaactctaagaaaacacataaataaaaagctaaagaagacgattttctatttacctaccaaaccaagaaaaatcatcaacatcatctagataatcataattaatatcttgttgagggaggtctgttgggg

SEQ ID NO: 59702 - DNA, 487 bp, Arabidopsis thaliana landsberg
cacgccgacctcgtgcacctcgccgccataaatcttggtcgcataagcgtgaccgagttcgtgaatggctttgacgatggggtagacaaaccacagcaagagaaggttctgcggtgccaagacgcgatcgatcacgttctcggacaaggccgaccagttaagtcctgccagcaccaaacctgctgcaaccactgaaagccagatcaaggctcccaatcgaccaaacaacgggcggacaagaaaagccgtgcgctcaaggaaagaatcggggtcgaagagcggaattcggatggcgagcggcgtccacaggcgctggcgccatgtttgcagccgttgacgctgaaagcgacgaaagagctcgcgcgtgtccggcggaacgtcgcagatcagcgcatccgccgcatggagctgtccgagaagcctgacgacgtcatcctgtgtcggtgcgttcgtgccggtgcgttcgttgcaagatcccagatgttct

SEQ ID NO: 59703 - DNA, 213 bp, Arabidopsis thaliana landsberg
  unsure (1)..(213): unsure at all n locations
cagaaaaagggagaggggaccaaaagggaggccgncnaaccgcggccgccgcagcggactggcccatcgggcaacatacaaggatgcccttagactgacggtactgatttaacacatactgaccacacgccgacgaaccgacctccacaggaatatccccgcagggaagcaactggaccccatgctcattgggagaccgctctcgctctctcc

SEQ ID NO: 59704 - DNA, 394 bp, Arabidopsis thaliana landsberg
  unsure (1)..(394): unsure at all n locations
tttataggcttttgcgtcgtggtcacgacacgngtctatangactaaanngcccttaccatatctggtgtgattgtgnngattttcattttaaaaggataaaacgataattcagtctgttgtcttgtccaatgatttttgttttttcttataattgatttcttatgataccttatgtattttggtttatttatttttggttttttgcaatgtatgaagtattatctgaatattagtatggtccaagaatgaaagaaaacacttattcaagaatgactaacaaaaaaatgaaaaaataaagttgaagaagtaaaaagatataaataaaatagaaagttagagaaaaaggtaaaacggggaatcgagatgctttcacgagagcaaatgacaaaaaa

SEQ ID NO: 59705 - DNA, 354 bp, Arabidopsis thaliana landsberg
  unsure (1)..(354): unsure at all n locations
cgtacggaatgggggggtcgcgtcgatacgcgtagtgtggtggttgtacctacccaccctatatngtttatgagccatggaaatactggcgctacccagttccatcgattagacaagattttgaccgaataccaaatcactgaagctccatctagggtaatttagatggacattcagtatatcgctgcatgagaactatacacgatcactgcagttccttttcgaagaaacagaagacaatccgtcgcctaacggtaacagggtaggctgagagaagagtaagtcaagagacagactttttaaaaagaaacaaatatagaatgtcttgtgtgaaaaaaaacctcaaaatttttt

SEQ ID NO: 59706 - DNA, 505 bp, Arabidopsis thaliana landsberg
tacatgtgtttgcatgtatttatacacgtattttagtagtggggtctctacttttttttttatggattcccatgattcacaatttcaaatacaaggatttaactactatcccatcaaaattctaatcttaagactaaaacctttgatcttggttctctacatataatgagaaagatgagaaagcttttaattcatttttgcctccgtttccacttccaacattcaagctttgaactgctcatttttgtacaagagctagagagatagtgatggcacgatgaacgagggttgaaatggaaatcgcagattaggagattttatttcctatacatcttgattcatataaaaaacacagtactaattgatatcatgttatttgttgatttcctagataagtattgttttttagtaaaattgactaacggtaagaccgataataaatagttgattttgtgtatgaatgatgtaagcaaaactactaaccggatacaataacataaatttt

SEQ ID NO: 59707 - DNA, 401 bp, Arabidopsis thaliana landsberg
gctgcctaggctggggcttggtccccacgggccattgaactattcctctctgactaggaagaaacactattgcgacgcgggcctcattcagttattactgaccctgatgagtgacgtgtcatgccatcttacgttacgtcttggtgggtgaacatgactacactcgatgtacaacagccaccagcgaatggtgaagccgtccttgcatgatcaatgaacatacaccttctgagccctatggcatgacgcatgccagttatacctgtggtaccatatgagacaccactttgcttcgattccaaacagttaaagggtcgaacagtcacgatttgacggatctgattcttgcagtgaacttcattcagacgagctactaccctctggcagcacagagacacatc

SEQ ID NO: 59708 - DNA, 1287 bp, Arabidopsis thaliana landsberg
  unsure (1)..(1287): unsure at all n locations
tatgctccattaaatcgatcacttttcatgtaattgaacctgttccagtttagaaatatgcaatttcaatcacaaataatttgtcttacatattttacattttatatagtctatactaattattcacgctgtgaaattatgctgcaatagtttcattctactatattataataatatataggttaattgtatttgttttaaagatgttaaaactataaaattaatttaaagacatacatatttttttatataaataaactaacatttgtaagctttttctgtttcaattaatttacaaacctacaaaatattataattacatttgattttacaaaagaatgcatgttaaaaacaacttaagataaataaataatacacacatttgaaaatgtttgcattgaaatgataaaaaaaattgatgtgtacaaaatatacacaacataccaccaataattttataatataaaaacatctcataaacaaaagctatatgcagatacctaaactgccaattgaaagctatatgcatggattttaacgactaaattatagcaatctaataaacaaaataacctcccaaaatcttgtgtcttgatatatattttcgtttcttttacatctcgtttgtcaaaaatagatataaacatctaatgtcaaagcatacacatctactacaattttaaaataaaacatagaaaaactaaatattcactctatttctcctgaattcgaatctgaacaccctcccacgtcacgttaaccacaagatagtgaggagtcccgtgcacaaacttgtagacttgtccactccggtaaatctcgagatgagtgaaagtgatgcggtcagcacaatggaagatgattctgaacaccttggcattccagtcacacatctcaatgctcggtaaaaagttgtccatgttgcgactaagaagaatttgaaacaggttatgtcgtaatgcaattgcaaatatggaggacaaattataaaattttataattgaatttacaagtgtcaaaccaaatttaaaccatctcactattacagtgtatgatcttaacacttccatttaactccatgtctattctaatacttttaaaaaaaaattgatctcataaatattctttaaaaaacatcaactaaatatcttttaaaatttagcttattttatattatgcttttgtcatgcacatttgagtttgaaattgaccatgatagctttgctcacaaaatttatcagcttattagcccaaacgaagagaatacaanatcatgtttcacaatac

SEQ ID NO: 59709 - DNA, 1072 bp, Arabidopsis thaliana landsberg
actagtcataatgtacgtttttttttctttcatttttatatatcctggttccactcttttagtctctggagggagggttctttgaattctgcaatctaagaaagaaatattaaaactttctctgttttgtttgatgtgatctggagaaaaagaaagcacttttatgtttctgggttatcaaattcttgaaattagattgtcttggagtttgtgatgtgatgtaataagaccaataaaaactcaacctttatgtagctaaacccaagtcaagcttaacaattgattaatataatgtatggaattagatggatcgtttttcacattgctcctcacgttcctcacacacagtgaagaccaccatcgtttctccaactcccttcacgttttttccctctccactcacaaatcacaatgtctcaaacattccatttaaagagaattgaaaaagcttctctttttgataaatcaagaaaggttttttttatgtgtagcatctgatttagcaactttctcttttgtgttcttttaaggcttttgaatctcaagatgagtgtggaccggcgaaattggcttaaacatggatgtaatctcagattggttatcttagttctgtggttggtttgttatgttagtaatggtcaaactattggggacaccagtgacttcaacaatccagctgttcttccgctcgttactcagatggtttaccgcagtctttctaatagcactgctgctcttaatcgcgagctcggtatcagagcaaagttttgcgtcaaagacccgttagttttcttactcttcaactatattctttcaactttctttaattgttgagtttcatattttttggaaacttgtttcgctagtgcaaaaaaatgtctcattttcttctaaatatttcagcttagtgttttgtttgtttggtaagatatcatattttctaatgaggctgtgtaattttcaattcttggagcttagaatagttgatgctttgatagcttcatttgctctggaggtgctttaggtgaaatgggttcttttattttacataagtcttgagagataatttgct

SEQ ID NO: 59710 - DNA, 206 bp, Arabidopsis thaliana landsberg
atttatttttatagttgcgatctatggttagggttatggtttaggtttaaggatatagggtatggttcaaggttaggtttaaggtctagggttaatattataagacaaccccaaattacacaggtttttctacactaacaaagcatcatctcctaaacgaattcccaactttacactagctcgactcttcacgttaaatgctatta

SEQ ID NO: 59711 - DNA, 1625 bp, Arabidopsis thaliana landsberg
accggccatggagagctgtcttgcatacttccagtaaaaccctcattgcgccatttattcctaattatgatttatgattgcttttgtttttgtttttgtgcctaaagatgattgtttgctaccatagtgtcgtcctcggatcaagtgggctctaaaaacgtcacgagtcggcattataacaccatcggcaagtgtgatagtccaacatctaggtgttggcgacgagtccacataatagaattttggtgcatcttttttgagattgatgggatcagctgaccgagttcatatatatatatatactcattatgtctcattaagatagatttttaaagaaaaaaaagtctctcacaaagataaacgttttatgttatcaatacaaaatttagaatcttttttctattttgcccttcattaatcattactacatggtttctaattttttgtaaaaaaaaaaaattcagtcgtaagactagttttttacattaattaaaagacacattccaagattctctcttccctcaatgcaccgaatatataattacaatcttctgtgtcatcaaataaaagaatgatttttatgtaaaaaaaaatatataaggttaaaataatcattatatattatctcttaaatgacgtgaaatctctaaaaacttcatctttgtaagacggataaagtatattttttaactaatcactaatgagtttccacacaaaaaaactgatgggcacaatttaccactaattctatatttggaaatcttaattactctgctgtctccaccccatgttgtctctattcttctttccatgtgtttctatcttttcacttttgttctgccccactaaacttatcttgaaatagaagttgtgttattcaattatccataaaaacgaatttctttttatgtttctcagttctcaaattatcaagaatttgagaatgaatagtatccaactatccaagaatgacacgtgttgctttagagtatcttaatccaagatggtgacttcgcggtgccaagatatgattgattttccatacgtcgaacttaaatgcatgtacgttttacaagttgcaaagcctgttcttttagctcgttattacttctgatgtagttttaaatagatgaattattcgtttctgtaaccaattttttaaaaacattttttggttcatgctttcactagaccccggcggttttgccttttaacaatgtgtgtggtgaattcacaaacacatatctcattaaatatagtatacaagactcgatttcagcatcatcccctatataggttcataaatgtattaaatcatagtaaactttgtttttccatttcacattggttttcttaaaaccaatgagtctttatcttcactgtctagttgtatgaaaaacattactgtacaacgcgtagaatgtgctgtggagtctctacaacatatcgtccctgcataacgaacatatatacagtaaatttattgataaccctcaaagtgtacataattatttgagtggaaagcataaaagtcaataaaacctatagttatataaaaggaatgatataatgttaattttaaacaattccacaaatatgcgtccatacaatagtatttctagtag

SEQ ID NO: 59712 - DNA, 1063 bp, Arabidopsis thaliana landsberg
agacaaatattctaacacaaaaaatagaaaataaaaatagtttcacttctactctttcttctacctttaggggctaggtcctgtcttcatactcctttacactcctctccttcttctttacacctctccaatggtaaaatctctcattcactaactttctctgcttctctctatctttctctgtgcataccaactctaaagtctctcatcaatggcggctcgaaaactagggtcgttgttacgtcaatactttttctctctatgcttcctcttcctcggttgcttcttcttccctaaagacgcagactataaacaaaagagaagaaagaagaagcttagaagagtttcttcttcttctggttcatctctatcctcttcttggacgtatttaaaacgagttttcttatccacgacaaggatatccaaatcccgtaaccaaacacatcctaacgttactttaacatccgcaagatcatctcaaaactccctcgtcactctcgtccaacccgataccacaaaccaacccgacccggaaacacgtattcatcagcaaaccgaattcgagatctcctcttccgacgagattttcccttgtaactcgtgtggcgagattttcccaaaaatcaatctcctcgagaatcacatcgcgatcaaacacgccgtgtcggagctaatcgccggagaatcaagcacgaacatcgtcaagatcatattcaaatctggttggccggagcaaggtaattacaaatctccggtgatcaatcgaatcttaaaaatccacaacagttcaaagattctcaccagattcgaagagtatcgtgagttcgtgaaagctaaagccgctcgtagcaacggcggtggaagacggtgggacgatgaacgttgcgtcgccgacggaaacgaacttttacgattttactgctcgacgtttatgtgtgatttagggcaaaacggtaaatcaaatctctgtggtcatcagtattgtagtatctgtggtatcatcggatctggattctcgccgaagctcgacgggatcgcgacgttggcgacggggtggagagga

SEQ ID NO: 59713 - DNA, 140 bp, Arabidopsis thaliana landsberg
cccccccctatatactactaaaacacttcttttttttactgacattaccttttatcctctaataataaacaccatcctctatccttcatcacatagactattcatttttacttcaacaaaacctatttaaagccaatgaa

SEQ ID NO: 59714 - DNA, 508 bp, Arabidopsis thaliana landsberg
tgaagcagacggaagaggggacatttgtgtattaagacaaatacacaaaggatgtcttgaagaagtttgacatggagaaggctaaacttctttcaacttctttgtccaccaccgcaactcttgatgctgatgaggacggcgaggccgtacatcagaaagaatataggagaatgattggctcccttctatactttacaactacgaggtcggacatacacttcgctgtgtgtctgtgcgctcgatttcatacttccccgtgcacttcttacaagtaggcggtcaaacagatcttgaggtactttcactgcactcctgagtttggaatatgatattcgtcgtcttcaatattatctttgtgtgggtattctgatgctgattttgcgaagtgtcgcttggatcataaattcacttctaagacttgacagtttttgtgatcttttttggtctcgtggtcttgtcgtaaacaatctaacattgctcacagaggctgagtatgtacctgccgtta

SEQ ID NO: 59715 - DNA, 782 bp, Arabidopsis thaliana landsberg
tgtcacccatataatctccgtattcagagaattgaagagttcttgatcactactgttgtatcataaaaggagctctaagaactaagattgtttttctttatttgatggatccaaggaagctactatcttgttcatcctctacgtgtcagtgagaatgaaagaagagaaggggacaattaggtgttgcagtgagtgtaagaccaccaagacaccaatgtggagaggtggaccaactggtcctaaggtctcttcttctacctttaattactatattcataactttgtttgatcttaagataattcatcaagtgttcttaagttgtttattttgatttgtggtgggatttgcagtcactttgcaatgcatgtggaattagacacagaaaacagagacgatcagagttattgggtattcatattattcgcagccacaaaagcttagcctccaagaagataaacctattatcatcatcacacggtggcgtggcggtgaagaaacgaaggagtctaaaggaggaagaacaagctgctttgtgtctattgttattgtcttgtagctctgttttggcctaagtcaaaaaacagaatatctctcgctagaaagttaaaaaaacacagttttgtcctctcctttgttgacgttctatatctattttgggtcactcttttgaatatgaataatttaagatttaatgaaataagttgggcctaaaaatgtgtcgaaaggccacaaatgaattttaaatagattggagtatttctgtttggctttacattactgg

SEQ ID NO: 59716 - DNA, 308 bp, Arabidopsis thaliana landsberg
ggctgcggttcctcctgtccatgaatggggatgctgcccgtaacagcctggacatgatatctttcaacaaagaggctgatgaatgcatacaaaaggcgcctgctagagcaatgtataatgtggctatcaagaagcggtgctggcgaccttcatcgaatgatctgaaaagcgtgcgatccccgctcactgtggggatggctcattgtaggcaacccgccgtctttatacaatgcccttgacaaatactgcgactttggcaaagctgaggaggcacctgctgtgctggcctgaagattcagcgagggcaa

SEQ ID NO: 59717 - DNA, 501 bp, Arabidopsis thaliana landsberg
gtgtggaacaaatacaaatcgattcaatcgatgagcaaactgtaccaccagaaacaagagtcacacaaaagaaaaaaaaaagagatttgtgatggagattattaccagagacgaatacgtggaggtacactgtccaaagaaacgaagtacgaattttcttataattctctcaagtacttatttggatgagaaaaaaaaaaaaaagaaataaaaaaagcggaaccttcagaagaaaataagacagaagagatgggcttttgtcggaaagagcagaagatgtaaatctcaatatctattgtccaaagaaggtgttaaaaagaacctcgtatttcgtataggcatcgacgaattatagttatcttcgaattttttaataagttgaaaagttattttagttgaaaaatgacgtgttcatttttggtgccatgtttaaatgcaattgggcacaatattatcaagaacattaactggacttatatttagatatttttaaattttgcc

SEQ ID NO: 59718 - DNA, 296 bp, Arabidopsis thaliana landsberg
cagttgcgactgaccggccactatacctgtgtgctaccacatctacaatgtctcacaggctagtgacttgtgcaaaagctgacgtcattactggactagaggctgcgctctacgacacgttcccgtcagaggtggttctcgtaagaacgcaaccaaacgagccacttcttggtattcttctgcttgctctccttccaacagtagccaaaacaagaagacgataaacccggatccggatcctgatccacgtaattctcaaaaaccggatttggatccgaccgggatcctttacgggt

SEQ ID NO: 59719 - DNA, 343 bp, Arabidopsis thaliana landsberg
agctgctcgtacgaccggcagctgagttgcctgttgctcagagccgggagcgcacggactgctgacggagtccatgatcagacgatatgccacatctctaggacgcgtctcaaattgcgctagcgagccagatctttcacaagcgtaggtctctattcgcctttctaggattcatcttagaaaggcgcagactctcacatcgaccgttagtctcgaacgtatgttcgatgatagcccgattctctcccccagcgcaacccacacgatctagactcgcgaacatgccggaactccccgaggtggaagcactcgccgaggacctgcgcgggcgcctcgacggccg

SEQ ID NO: 59720 - DNA, 788 bp, Arabidopsis thaliana landsberg
caccttttcccaaccctatatctctttgtgttgcacaaaccggaaacacagtggcacgtgtagcaacatccggcataaacgcaccatcaccattttcctccatcatttctccaagaagcaagaagctttcttctgagaaaccattatccgagaacactcgaatcatggagttccaggaaaccaaatttctctcaggcattatatcgaacagttgcaaggcatcagtaacaaaaccatgagttccatagaaagacaccaatgcattacccacaaaaacatcttccaccaatccggtcttcaccaccaacccatgaaccgcaagcccgatcccaacatcagacatcccagcacaagccttaatcacacatggataagtgaaatgatccggtaaaagatcagtcgttgagatcatctcgataaacgtctctaatacttcatcgtaaagctcgtttcttgagtaagagctgataacagcattccactggaagagattcttactccgcaaggcatcaaacacaaaccgagaatcatcaggagagccacacatagcgtacatggtgataatacgagtacagagaacgtcatcattccttaaccgggtcgacccagaaaccagctggtggatctttcttcccatttcaatgtcttttctcttcccagaagcttgtaagagaagcccaagagcttctcggacaagaagaaacgcatcggaccagctctcctcatcgccaacgaattcttggaaagttcgaaaggacatgtcgaggtctccggtttcacagaagtta

SEQ ID NO: 59721 - DNA, 497 bp, Arabidopsis thaliana landsberg
aatgcgagcagtcatggagaatgctaagataatatttataaccggaaacactggaaatgggagaggtccacagatcacaatggattaaatcaaaattcttaagagctcgcgaagtagagtttgcaaaaggtaggcgagtgtgacacccaacttaacaagcatgatagatggaatcactagtaattttattacaactgatggcagaagtactagtgagtttggacagagcctcatgtctaggatggccaaggcggcgatgccaaatagtggaggagacaatggcaataagggcacgggacaccggggaacatgttggagcaccgagggtgtagaggggctcggagctattgtacccgacgatcacgctcctggaatgaagatccttcatagaaaggccaagaggatcaaattcgacagaacaactgttatcagaagtaaattgacgaactgaaatgaggttttgaacaatatttggggcaacaagaatgtattaagat

SEQ ID NO: 59722 - DNA, 1405 bp, Arabidopsis thaliana landsberg
cttctcttttgcttattaatctaaattcttgaatggaaaaaatgttgcaaaagatataattttgaagtcttttatgtttttttaagtagttattaatgatgaattgtagatttcaaaaataaataactacaaaattattggtttaaagttgtaaaaaattattaatcacaaaaggaataaatttataatctatttttaataggtgtaacaaaacttaaaatttggaataataacgaacagaaagaataatgtttttttcattatttcatgctataataataatttaatactacaaatgagaatacaaaaaatctcaactttgcgtaaacgacacaaagtactaataaatattataacactaaacgtttggagaagcagaacagctgtttttctctatttattattatttggttctctgataacagctgttttattggtcaactctatttggttaaacttaaatctttgacccgaaaaaaaaaaaaaaaggccaaaacgaggcccttgattgaatttaaaatctcttggttaacaactatttaaagatacatcgccactttggtaatcaatacgcaaaacgttactacaaatatgtgttaagcgaagttagttagatcattactttttaactattcaacattttgatgaccccaaatatataaattccaccacttcttctccaccatcacaaatcacattttaaaaagacacttaaaagactcacttctttacaataaattcttcccgaacgttctagactaataaatgtaaatgccacaatcagatcaaatatcttaatcaatgtgacaacacaaatataaacaatttttttaaaaaattttataacaaaaaagtacggatggagatgggtcagtgaaccctttgcttgaccaaataataatttaaaaaaaaaaactcaaagggcccaaaagagccgtccgtacgcctcctcctccagccaattggggctttcaaatacacaattcaattctgcgttatacatttatacgcagctgtgagaaagagagagagataaagcaagcaacagaataaattcttctccttttcttttttgttgcaactagtgaaagagaaagagacgatcgcttattttcttcttctcctacactctgcgtttttgctctctttttactccgcattgctcctccgttactatcttcgccggcgaaaatttgttttctttttccctggaggtaaacatgcaactgacgattgacaagttgaatgctttggtctgtttgatgtttatgtatctcattattcgagtcaaaagcactgtagatttcagggttctcttctctttaatgtctctgctgaaatttccagttttttcattgccgtttcttaaaatcttgtaatgggttttagggtaactgttccattg

SEQ ID NO: 59723 - DNA, 946 bp, Arabidopsis thaliana landsberg
tagcattatacatcactctctaactcgatccgaccatcagttaatttagatgatttattcctacactttttaatttagatgatccaatgattcatgctttagtgtacaagatctattcaatattaagcgtagaaactataagtagaagaatctgcaatgatgttcctcaaccctccaattgttgacgctaacattatgaacactcctacgataatggagatctgcccaaagatatatatagatcaactgtctagatattgttcatcgtcgcaagaatatacataagtatcgaaagatatagatgtttacccaattgacgaaccaggtgacgctgaatctccttggtttcttgatgataagccacattatacttgggagctgcatgaagcatcatgatcaatcatatatgcatacaaagattatcaaattacttatattcataactttgaacattaatgtagtctatcttaaaaatggacttacgaagaaagaagtaggtgcaaaaccaaatcctccaaagaagcctagaaggtctccaaagaaggggaaactcactccaatgaacaatgtaaatgctgaaaatttccaatcgcaaatactcaatttataattagcttttacttaattagacaaatatttactatctcatgcatgaggaacatcagtaaattaaagtcttaccgacataaatagttcgagtgaaaaacctcagaacaactccatgcttaaaaccaaatttgttaaccatcatcctctccaaaagatcaaagacaggcatagcaaacacttggtagctaccaatgacatggacaacaaccatgagattagcagcagcaatgagccaagctggtctctgtagattcatcagcacattgtcgtccacgtcttgaccaaaggcccaatagcatatcagagccacaggaaaatagcaaacggcgttggccac

SEQ ID NO: 59724 - DNA, 722 bp, Arabidopsis thaliana landsberg
ttgaaaatatgaattaaaacaacatttagaaagtggcatgattagccttgcaaaggatcgcaaatacatacgcaagactaaaaattttgatattattgtcgattctataattgaatttccgcatggtgtttttttctttaaatccggatatagatgtaactctctggttccaaattcagttccagaaaatttcttgaagtaatatgtatatatatactactgacttgctgttgcaggtatcataaattagattttatccaaaaaaaggtaacgtataactaacatataataacgagagggttattgaacgatccataacttttgtagagcctttttgatattgatgctacacaattgtaaatcacgtatgccgctcacgccaatattctgattattaactacttcataatttatagaaaagattcttctcttttcgttaaacatacaaaaaaaaaaactctcttcagtcttcacatatttttctatacaaaaggttctcatcatatatattagtacccaagaatgactctcttttttcttcgatcacaaatgaccccttttctagggttgtagctacaaaatgataataatattcatattcatcaattaataattggtaatagtatagtatacaatagagaaaaaacgtggaagaaatgataaggacaggaaagaaaagtaaagaacattagtggtgtgggaatctgattccttgtcaatta

SEQ ID NO: 59725 - DNA, 953 bp, Arabidopsis thaliana landsberg
ttctacaccattattgtctttataactacctaaccaatcatttaccatctattcttcttaaagaacaaccgcgggtactcctctagccgtgaatctatcttctcataagcctttcgtaaaaaaagttcatcttcttgtgaattctccgcattatcttccaagaccatcttgcaaaggttgtatttagggggtttgcgatgattcagggcaataacggccatatcgtagatagtgaggtgatgttgaaccgcttttttcaaaaaataagtataaatcatgaaagggaccgtaatctctcttggagcatcccatccacatgctttcaaaaataagatatcaccttccacgtcgagcccattcacatagttcaccatttcgttagtgaaagattgttttgacttaatctttttgtacgaaaattatactacacaaagaagaagatattgttaacgacattagtgtgacataaatagagactaaaacataaaaaaaagtcaaacttgcttcggtattgaagcatttttcattatctatgaaagtcaaacggtgtatcccttccgcatctatcagggatattgtgttccgatcatgacaatccgtacttccaaagcgaatatggaaaatgtcgagcttgtggatttcttgagggagagtcctgaattggaattgagtgatgaagtcaccaacaacaccatcattctcaacataagaaaccaaacaacccgacgtttcctttgttcggttaaaaacagttggtgtagcaccaccaaaaccaatgagatccgaagaagtggaacgatgtgaggaaatagggtggtccaactaatagacagctgctttttattttgcgtcttcttctccgtctttgaaatgcttaaacaaacatgacaagcttgcctttatcatcaaatactttccctaggtgctcgtaaggttccatcaaatacagacat

SEQ ID NO: 59726 - DNA, 937 bp, Arabidopsis thaliana landsberg
  unsure (1)..(937): unsure at all n locations
tgggttttggcgactacgttaagaatcgctatatagtcgctaaatggtaagttatgactaaatatagactgaatatatagatttactctaactccaatggagcatgttaaattctctaaaatcataaaactaaaaattgatataatgataagtaatacgtccaaatgagtatgattgaatatatatattttctgtaactccaatggaccacaaataatttatacaagaatatataagagaactccactccacgatatcagttattaacgtaagcacaccttctcactaataagcatagacctaattattggtgaagaataaaaaagcctaagaccatccccaactatctctatattcatttccagaatatagtttttgaaaatataatagcgttagattttcttcaacttacatatctctattttcaattccaaaatagagatcttcaatcgttttctttatattcggagtttttcattttcgatttacactaaattttaaatatctccattttcaactgcaaaacggagtaagattggagaaaaacgtacaactccaaagttgagtactctattgtgagatatttttttggagaaataggttggaaattgctctaagaaagtgtagtaaataactagttaaaaatggaccagagaagccattaatcaaacgcaacatacttgggcctcaactacaagaaatgataaattaaaccgatgggaagtataaaaaaaaactgacccataaaatgttttaaaaacaaaaatggacagaacattcattatggaacaaaataaactttgtcaagtacaaaaaaaatagtaagttttgcaatatactaattgatttctgattctgaataggtatttttgttctatttttcccttgcaataactntcttttaatatatgctntctctntttgagcatatattttc

SEQ ID NO: 59727 - DNA, 1221 bp, Arabidopsis thaliana landsberg
gtttttttttttttctctcagtctctattctatcttggtaattctccttcttgtttcttgattcttcttcctaatggatgataaaaaaaaaagtaacaaggttttggtcattataagttgattccatatcatgtcttcttttagtaaaatatgtcattagttgaaaagtgcatgaaatagtaaagagttttttaaaaaactcaaagataaataacagcttttaatatggctaatgcgttcagtttttttgattggtaactatcaaaatggtaaggtccaattggtgacatcaaatcgtaagatttttttagggcgagcagaagtataatatcgctatttttccgcttttgtgattggtaacaatcaaaatgataaatcattcattgtgaaaatcatcactgaattccttatgttttgttttggtctatgtatagatttagttgaacccaatgtgacaagtttattattctctcaatcagtgctggattctccaaatcactttcaaaaacattgaattcgaatattgtaatacgaaaaacaaaaattgtggggaggggaaatagtcaaataaaagggtaatggtgtcaaagtcacgcaatcatcggttacatacattactcttacatatcgacatacttaacgttaatcaaatctcgtttgacaaatcatcatcaataaagagcacaagaacaaagaagaaggaaaaagtagagattttttgggaatcagaatcatcatcgatggtgaatccaaagcgtggcaataggtttttcaaatacagaattgtgtaaattgctctctatcttcttctctttcaaattctcttccttttgtaatattcaataactttttccccactttgatgggctgcaaccacatattcttcttctatctttaacttttcccaccaaacttctccttttttttctttttttttgggttctgggtctgcttttttgttgttgttgttgttgaatgaaggtccgtaagggaagaagacagatgattgcgaaagagcaagacgaatacaaattacgccaacaaggtcttgtttttcaaatggcttctcttttcctctctttcgattactccttactcttcttttggttgctcttccgcgttttcttatacgagaatcacgaacgaaaactccagattttctagcacacctcttctctcttcttctctctgcatcgccatcttgttttttcccccaaattt

SEQ ID NO: 59728 - DNA, 1749 bp, Arabidopsis thaliana landsberg
acatggcctcataatgtatttactctctgtgtttgagcacagacccatagttttcttgcattttgatcatgttctcatcagtaaagatttttacaaaatctaaccctcaagacatcaaatacagggaatgaacattcagggatttctcctttttggtggccatgagctgtatcttactattgatgtctatactccatagtaaatcgaaagaaaaacaaagggacaaatcttttattaaggagttgaatatatctagttttcagctatgaaaccaaaaactgaaagcaggagaaaagttgttaaagcaggagtgacgagccttggtcctgcgctacaacacaaaacattcacatgtaaaaatgcttttctcgactatgatgattgtttacctttaacctcatcaatggagccaaaatgtctccgcattcctttagcctcaatgttaatacttcagtaacagacagttgcgtcttcaacttgtaacttcaatttgctcgatttcattatcgctgtaatctccccagcacttgcctccttgtcgttctccatttttctcatcacaagtctcatgtgatgtggtttccacttcacctactgtcgaatgtccattttcaggtgtatctgtagtttcttgtccaacggcttcgtcatcctctccagcattgttgtcgttgttgctttcttcttcgcttccgctcttctcctcagagcttccagcaccaggtaattcctctgaaacaagtccatcctgaggctgtgtaacggacatgttacacggatatccacctgctactggtgacaaagggtacccattctgtgttatttctgcaccatttggggatgctaaatagccatttggtgacactggatacccattagaaacccaaggttgactcggtatgaactcagcagcatgggggttcattattcttgggccattgaattgattagcctcaccattggactcggtgctattggggaagcttggtttgttacgcggaaccctgtttccagatcggatgtagccaccaccagagagtctaggcccataaggaactcgagctgttacagactgatgaggagttgatctgcggacatggttaataggaagcattggtggcatattcaatggagaggggaggattccaccgtggtctttgaatcctggaactgcaattgatccaaatattggaatggttgttggggtatacggcggtgcaaaagcagagagcttcttgctcatctctttttgtgcctcacatgcatcttgcttttctccatctgcagctactgatgactttgggcttaagtctccattgggcagattttcggtttcaccatctactgttttcagttcagcatcacataaatccttttgaagcttcactccaataactgattcactgccatttgaatcatttgctgttggtgacttattcaagagacatgtatctgaatcctcagccatttgtgcactcttagattttcctggtcttgcatttgatacggctgtttctattggaaatgctttttcagctgccttttcgacctccacattcttgatttcctttggagaactagtcaactccgatccaccaacaacaactcttccttgttcattgcaatcagtgttttccgcttccgtttctgtagccacatgcttattctcgctctcagcatcctgagcattaactttttcaggaccatctactgcaatttttgccgcatccaaattctgtgggcctttgt

SEQ ID NO: 59729 - DNA, 535 bp, Arabidopsis thaliana landsberg
  unsure (1)..(535): unsure at all n locations
aaaaagaaataaaaaatgaattnnnnnnnnnnnnnnnnnnnnnnnnnnnnnnnnnccagcagaaagttcacatgttgctctaaacgtttttcagaaagtgtatagtggaccataaattgcaacagtatatgtttacatttcttgcggattgattccaactgactatttaccatcagctttgaaacctgaattgcaatgtcatatatctctggaactacaagcttccggttcatgatggccttgagaagtgaaagagtaacaaaggatgaatcagactccagatcaataaatatggggaactgaatcaacattttcaactgctcagatgataaagttatatttatatttttgagaagcgttgtaagcagcttaaggcatgactgcacaagaagactgctggaactaactgcagactgagcaatggttaacaatgctgttttcagttcatctgcttcaaacgtgaaggaaagcagtggaactttactaatgaagtaaacattgagagatgaagatcaatatcctcatcttagaactc

SEQ ID NO: 59730 - DNA, 1018 bp, Arabidopsis thaliana landsberg
ggagacctctactccaagatttgatatcaaaactagagcaatgatcctatattcttgtactaacagggtaaaatttagaactatcataagctaatatatatcaaagctgaaagatgcaacaattaacaaggcaagtacttctcagaagtctaccacaacaataaacaacatttagcaactgagtgcatacctctaaatcttttccgaatcttaaatcaggaaattgctctagcatcttttctatcataaccaatgagtagtatgcttccttccagaacggaagactggcttcctcaacagtatcttgcaactgtaagctggaagcactaattgcagactccaaaatagttctagcatcctccactgtattgtagatatgcttccgaaatgttttcttcatggcgctgataaaaaatcccaatacctgcacagcatccaacaaatgaatatcagtaagaagcaataaacatactacagaaggtgcctacaagcactatgaacgcaatcaggctttatgaagatggtataagccatacattcataataaaacccttcaggtaacaccacttgttactcctatttcttcatatttagaaatagaagttcctacttcctactgtccgacatctaactattgtcacgaaatgagtttaatgaatatacacccacagcatctacctgtgccgccgcagcacttaagttctgctgcttataccaacacaaacagtacaagagactggaatcaacttgatctttactcatgcggcctatcagaacttctatcacagcaccaaccaagggcagcacttttttatcagtttcattggacaaacagacagtaagttgaataaacaatttttgcgactgctggtcaagaacagactgcttgccaagattaggttctgagaattttaagattagggcatgaagcatgtcaagaactgcttctcttccagttggaaactcatacctgaagaacaaattaacttactataagaaaaagaaaaaaaaatgaatt

SEQ ID NO: 59731 - DNA, 504 bp, Arabidopsis thaliana landsberg
tctatcggatatgtctagcgcttgtccgaattatattagattaattcagatgaagaatatacgtaatatctaatcacaatatagactacgacgcaatgtactgatgtacatatgtaaaacaacgaaaaatcacgaaaaatacgtaattttgtttttgcaaaaacaaaaaaccacgaaaaatcaaacaataacacaaatatattcatcttgcaacagctgttgcatatatatctagccaatttattttatttttaaaaatgcgtaccgtatattagtttcaggcactatgataacttaactgaatgatcaaatcgtattataggctgcttgcacagaatttaacaatatatattcagtaaacgctaccaggacgttgggaacacttccaacctgcgaacgaggaagcgcttgatattttgatgatgcaagggcagtccatgagccatgctatccgatttgttgtcacgctttattttatcaacggaaaaatgcctggtttacctt

SEQ ID NO: 59732 - DNA, 151 bp, Arabidopsis thaliana landsberg
ctcctgacctctgtatctctgtttcttggtgattgtgtaggttgataaatttgcactcacttatttcttttgcacggtggaataaataacgataacggtggtatatatatacatacacacattaacaaacatataagtaaacatttcattt

SEQ ID NO: 59733 - DNA, 961 bp, Arabidopsis thaliana landsberg
attaaattttgctctccgaaaccctattccaagatgctttatctgtatatgcgctaatgcgggctgaaatttgatttgtaaagttaaggggacatcaagatgctgctaatcgcatctgctgaaagtactgagggtgtctctccaacaatcaggcgttgctttagccatgaaatacgtatgggttctttgaatgacgaacagagatctgaaatgctgtctcagtccctccaaggcgtttctcaattccttaatgtatgtgagtacaatgctccaaaacttcaagtatttgttttatgatataatttgaactaaattaaattacctctcattgaaatcttagagatactagatccatttattcttccattttcaaactaaagttaacaacttcaggcttgatggatagatattttcacattgtagattagctcagatgaatttatgaaaggattggtgggacagacttctggcttccttccccgggacttgcaagctcttgtagctgatgctggtgccaacttatacatcagtcaagagtccgagaccaagaaaattaactctctgtcagatgatcttcatggagttgatatacaccaggcaagccaaatagataacagcactgagaaattaacagctaaggaagactttaccaaagctttggatcgatcaaagaagagaaatgcatcagcccttggtgctcctaaggtaacattcacagttttcttgctgtggtgttttctcgtttgtttgtctatttatgagacaagtttgcatatttttttgttactggagatgcacataacttaaaggtttatttgtattcgtaggttccaaatgtgaaatgggatgatgttggtgggcttgaggatgtgaagacatcgatattggacacagttcaactacctctcctgcataaagatttattttcgtccggattgcgtaaacgttctggtgtacttct

SEQ ID NO: 59734 - DNA, 212 bp, Arabidopsis thaliana landsberg
tctgcacggggggggaaagcaagccacgttttgtctcaaaatctctgatgttacattgcgcaagaatccagaaatcagggggaaactgtcttgcagagaggttgatcgatatgcctcggcgtatttgtcgttgccttgttctctttgataaatccccatgttaagtctctttccttccttgcaatattgtttttttatttatctattgtttt

SEQ ID NO: 59735 - DNA, 899 bp, Arabidopsis thaliana landsberg
acagtataatcttttcatcgaagttctcacattctcaaattatattaatcaattaaaaaaaaacattctatatacggaggaattaataaagtctagcctatgcatgaccaaccatggattgttgggttccgtttacaccaagcaatcagtcaacaatgtgatttgatcatacccttgaaacttaacaactctttttcatcagatttcaacactcgaaaaacaatctatgtaagtgtaatgtgaaataaattaagaaataggaaaatgtaacaaaaacactgtatattctaaactaaaattagaaaccatagacaaaaacatgacagggtggcagctagcaaaagaacagtaatctaatttcctgctttacccttcaaaatttttgaaatacacaaaatatagatttgctttactgactattcttgtcgattacaagaaacaatatgggcaaaattattaatataatattttttcttacaaatttttaatataaatttattacttttttaacggtctccccacacacaaactttatcgacaagcatgctattctaatttcactttagactaccaatgaatctggtatctctataaaggttgtatatcttgtttctgacatacaaaaaaatagttatttttaaaaataaaggttatgcttttggtgaagtgggctcatctcgatgttgaaatgtttttatactttaaccaaaagttgaaatgaaaaaaggatagagatttggttttttgattattccaatgtcactctctctgtctttctctctccatcaaataccaaattatctggaagctgaaaacatattggaatctgctcattcctctgtttcaacagtggagagtactattgttatgatgatgatgataaaagatcttgcttttgc

SEQ ID NO: 59736 - DNA, 596 bp, Arabidopsis thaliana landsberg
  unsure (1)..(596): unsure at all n locations
atgcatcatatcactatgaatcaattttgtagataatagtgatgatgattgtgaaaacacnaaatatcgtgataatataagtaggaataatatatgtgtgtatctatactcaaaaagtggtaagaaaaaataaaaagtctagtaaactatgtaaatgtggctggccaagtttatacggttggcatctatcgcgggagttgtattttcattttttaatattgttggcgcaataagaatctatctttattcatcaaagaggagaagaatcgattccaattctcatgcaatttgaactttgatttaatatttaaattcaaaagttataaccattttcttattttatcttggtcagaattgtgtgcggtaattgattaatttaatttattgtacaaataattcgtttcacagccaagatttttaacatttctggcaaagaaaaacactgttttttatttattccaagaaattaatatctgaaaaatgtgttaccatgtatagctgcacaatcgtcagtcctacaaaagccaaaaaaggttatagccccagcaagctttaaccaataaattaaaaaattaaaatggagaaaagaagaaaaa

SEQ ID NO: 59737 - DNA, 1201 bp, Arabidopsis thaliana landsberg
ataattgaccataacgacgagacaagatatatatttaaagaacttacttttttccactttgttttgcttttttttttttagtctttggtacatatatattacaaacccttttccagtaaatagttagcacaaactaattatcagatgtcacttaaaccaacctccttctttatataagcttggttaacattgagtttgttatcatggtctatgtgaaacaattcaggaataaaaaaagaaatggagccgagccattcaaacacaggtcaatcaagatctgtagatcgcaaaacggttgagaaaaatagaaggatgcaaatgaagtctctctactcagaactcatctctcttcttcctcatcattcttctacggtttcttcctcttggccctcttatatgcttatataatctaagattccatgtatgggtgatgatcttaatattctaaactcttttattatttcatgttaggagcctttaacactacctgatcagctagatgaagctgcaaactacatcaagaagctacaagtgaacgtggagaaaaagagagaaaggaaaaggaacctcgttgcgactacaactttggagaaactgaattccgtcggatcttcatcggtttcgtcgagcgtcgatgtctccgtgccaagaaagctgccaaaaatcgagattcaagaaactggttccatttttcacatctttcttgtgacaagcttggaacacaagtttatgttttgtgagatcattcgtgttctcaccgaggaattaggagctgagatcactcatgctggatactccattgttgatgatgctgtcttccacacccttcactgcaaggtataattcggaaagtaaaacattttttgcaatggaatttaagaatcaaactttgctactactactatgttaaaactaggtctaatccagcttgtatacacattgggaatgagttcaaagttagggaatgatatttatacttgttgtttttatatttaataaaacttgcactcaaaaacgctaagaagctgcatgttcccatctgattgttaagtttctactagctgattcctattaatatccatatgttagtaaactaaatttaatttatattttatataggtggaagaacacgattatggagctaggagtcaaattcctgaaagactggagaagattgtgaacagtgttcactaatattgat

SEQ ID NO: 59738 - DNA, 1582 bp, Arabidopsis thaliana landsberg
ggactagtaaacatgattccgcaaacattaggattggcaaaaacttcttaatcgcataataataatttgtcgttgtaaattactgatcgtaggcgatttacaacaatggtcgtcttttaaaatttgttatgggctttgcatgaacactatgtcaaagctaggctttgtagttcgtgttttttttttttaattgaaaacttatttgatctatggttctaatatagtagccttctagggtttcaggttaatcaatctctctctagtcaaatacacagtcagttaattgttttttgtttgtttcgcttcgatatatgtcttggaatctggaaaatttaactagtttcatagtaatcaacaagattaattaagcgagataactaaagaggaaattaatgcgaaactggaagcataaacccaactacttctacctactcttctctatgtttctatcgacccttcatgatttctcttatttatttttaaaactttatttaccccttttgttcttgttgatgtttcatgattacactgcggtgaagaataaagacgtatgcactgtgttattgttgttagctattttcaattatttaaaaaaaactttcaaaacaaaggagaaaaatttgtcactctcttcactaattttagtcttcttttaaaaagggtttggttaaaatggttgtgaaacagagcaaataccaatcatagctttgtgtcatccccaaagggcatagacttgtggccttgtgagaataaagtagagaaacaagttaccatgcaaataaactttttttgtttcctttttctttttgttacttttgtagccatgtgtgtgtgagaaaatgttctacataacagaacaaggaagcaaaaacaatcttatgaggtaatatcacttttttgtctttttgtctagtgagtgcatagcaacgccattggctttagtatgtttgtattgacctttacggtgagtgataatccctaaccgaagaaggtacataatcattgtcccaaacaaagccacgaatgcaaccgaaagcaaacgtaccaaaactctcgatggcttaaaagtaaatgactaaaagacaaacttaagagacccgttgtatcaaagaaaacaactaacaattttgctcatcatgtctccaagtttattccactttcaatatacatttgttagatccaaaagactctcaagccgtaacaatatcattgaagaaatacttattttaccttagcagttttgaatcaaaacgacaatagctactaaagaagaagaagtcaatgaaggtattcaaaccctgatgtcaaactcaaccttggggtagtaaatttcgaattaagtgacgatcaaattcgcagtctcaaatgctttctatgcacttcgtattgcaaatgcaatgcttaaggatacccttaattctatttgcgtcagtccactttttttttttttggtgtattttgtttaagtggtgtaagtgtttttttctctttttattgtaccatatccatccttgtcaaagaagaggaggctggagaggttctttgtgatcaataatcaaaaagctagtggttttacttttta

SEQ ID NO: 59739 - DNA, 543 bp, Arabidopsis thaliana landsberg
gtggattttctcatgaaactcttcttgggcttcttatgaggctctaatatcccgagtgagatacaagagctgagtctggaacacatgatccaatgtcaactcttgagtactatcctcgagcaagacctttttttacactaaacttagaaacaaacataatgtagatgcacatctggaggctacattttggatattgagaaacaaacaaacctatattcctcaaagaaaattttcttaataatggctttgaatgggttggtcggtatgttgtgtaccaaactaaagtcgaaccagtccactttttctttcaccattcacatagttgttcaatatactacagaccaaccaatatatggtagggaagacgaaaaaataaccaaccaataatcacagtctctatatacaataatggaaaccaatctgtacctgccaaaattcgaaatgaaagtttttttcctttttttgagtgatttcctttgggaattttttttggaatgaaagaattggtattttacgacaatataaatgttatagagaaaaaaa

SEQ ID NO: 59740 - DNA, 1476 bp, Arabidopsis thaliana landsberg
ggccaaattagtgttatatacataaacagtagcgtgtatttcaagaaagcagtgtgctctttaacttctgatgatctaagtgtgtgtgtcgacgaaatgatggctcatcatttccatagattcttagtaatgaaacatttagacaatgattgtgtgctgcttcacagaagctaatttatcaaattcctattcaactgcaaaatctgctcacttgtctgtaatttatttcattgatcagttacatcttctttatgaggattgaattaggtgtcattgttaacgtaattgccattggaaccggtttaggattctgaacaagttgggacttgggacttaccatactcttccggttcgatatctcccaagagtgtaagactagtatgaagaagttttattttctttgaacttcgacaaattcaagattttaaaactttctaaaaatataaaaacatttgtcgacactcggcaaaaataagaattatatgaagttttggtgtcgttataaacttttatatatcaacgttatgaacatatacaagttggtccatggaatgatgtggtatcatatggcaaatatttacaatgacaagtcgttttccctttaaagattggcggaatttctaagtatatgacgaatcatttaaatatatgtctatatcactaaacatattggtgcccaaaagaaattctcggaccacattcgacgtgtaatattgagattttcggttgtaatgtctttgtcgatatctttaatgttgttataaagttataagaaaaaactgttacaagatttgatccaacaatatactatcatgtgtacaaggtatttatccacgcaccgtgtaggacatatttattttgaaataatttatataacacaataagatgtacacataaagtaaaatgtagcttacatcaaaacagtgtgtttaaacaacttgatattatccataaaagatgggagcgatgttgatattacgaaacaaacaaacacactcttgcatgtttttacagttattggattaacaaataacattaacttcaaaatatacagatgcattgtctgtatgtagcacacacttatagattaaatagatatatcaatcaatttaggagattttttatagtcttcctttcgaattgttgaagcctattatcagacaatctagagttgtaggtagagtttttgtattcagaccaagtaaactcctcgtacaacctctcgtcctcattgtctatcaaacatgtcaacggagcgattctctgagtcaatgaaggtccagcgaagtaaatcatagaaaccctagattttttacagttagctaaaaccctatgccttacgctcttgaacctcccatttgtcatcacctgcaaaacattaataaataaaaaaagcttagatcttctgttctgaaacaggaaccggagaaggaacttaaagaataacgcgacagacctggagagagtcaccaacgt

SEQ ID NO: 59741 - DNA, 974 bp, Arabidopsis thaliana landsberg
cataaaataaatagttttaaaactttattgaataattttaacatttttttaggtagcttccaattatgtatttatgaaaaaattggtgatttggatgtgacaagattatatataagctcattgtttttcttaaattttttttttgtcctgaaatgaatagtacaaaataagtcgttttgattatgataagaagccatttttacgatgagaagaaattttgattatgataaataatgcagaaagcaccgaagaaaatgccgaagatgaagggaaaagatgatgatgttaaagaagcagagaatgtattggaaggtgcatggcaaatgtggcacgtgaacggcacgaggtgccctaaggggaccgttcccatacgacgcaacacaatgaacgatgtgctcagagccaagtctttgtttgactttggcaaaaagcgacggagtatttaccttgatcaacggacagaaaagcctgatgcccttggtaccaatggacatgaggtacactcgattgtaaatctctcttcttacgcggttgactaatacgactactaacttaataatcaaactgattaattaattttactagcattgaaaacgttaattaatttaactggtttgtctcagcttatcttaattctaattttttacagcatatatatatatatattttgttgatacgtagatatgatatatacacgatacctatgtatatgaatgtttaatgtgaattgtctatgtaatcatttaattatggacccatataacagtttccaatgtcagtttcacattaatcagattcataaaatacataaaaacataagcattcaatggattttaagatccggtctcgttatcataattcttgaaagatacaactatcataaaggattaatacagtactaatataaatgcacggcatttcattcgcatatattgggattataaatgtgatttagaagttaatctcgaagtata

SEQ ID NO: 59742 - DNA, 609 bp, Arabidopsis thaliana landsberg
ctcgagtctatggatgtaaaagacttaactttagcacatgtgaagagccatttgcaggtataatctatactctatttgaaattaaattagacacaacaaagaatcaatttttatttgttaatttaggtttaatctagtcgagttagttcgttaccaatcaagattttctataattagggatatttcatagttttcatcaccatcatgtcactctcttctcctttgcgttttgcacaaaaacagctgaatcaagaaacaaggtttttgtgtacgtatatatcatcagagcaatgaatagagctccaattctgatgtgttacttttattttcttgttttgtctttgctttaagtttagtcatattttggaagagatggcacaattgccaagaaaattgaagcagttgaatgaatttaaagagagaaaaagagagagtagttatagctttaagtgactgaaacctttcagagaattattaaacaatggagaattgagatgatagatagaagttattttggattataattcattttttcttttttaaattaggaagaggggacaaaagtagtcatcattactcaatgataataatacaatctttctattactc

SEQ ID NO: 59743 - DNA, 1537 bp, Arabidopsis thaliana landsberg
aaaaccaactgatagtaaaaagtattgacccggtttggttcggttatgttgataccagcctattaattaacttcggttagacgtatttacgacttgatgctatctagacctttttgcccttcacataaactaatgattacactttaattgccactgaatcttccaacacaacaccacccagttaacaccaccgttgtcgtccaccttagtggtcggagaaaccaaatcagtataaaattctgatgaccgggaatgcaaactcaacgtcttcttccctcgagatcggcggcgaaatctttttgaagatctcctaaagatttacatttctcattatctcttttctccccattttcaagtttcgattcatgcaacaatgaaccaaatcaaagatccaaaccctaatctaccggaacgtctcttcgccgtcgattgctatcccgataaagcccgtcttaatatatattcaagacctgaatatctcggtacaattgctaaccttctcaaaggctctgaagaatgggaacgaatcaaaaattcacaatttggtaagctgttcgaattccctgtcgctcgatgctcacattcaggtaagctgatacatggtttattatcccgacaagtcgtaactaaaaagaaacacgagttatggtttgtgtttggtggacacccaatacgtttctctataagagagtttcatatagtgactggtcttagatgtggtaaattaccaacagaagatgaagtaaagaagcatcaggattctaagtatttgtctgtgtggaataggcttttcggagagaaaagaatggttactattggagatgtgttggagatgttacaaaagaagaaactttcctcttggaaaaagctttgtttagctctcattgtaattgtggatggtgttgttgtatgtaatgaccaaagctttgtaactctagattttgtggagattttgaatgatatagacttctttttggagtatccatgggggagaaaagcttttctcgcaactattcgtcgtttcgggccacctaaagatgcacctaatccgttagggaaacttaagaagcgtttgaaacagaagacgagtgcgtgttacggttttcctctagctcttcagttacaagtttttgaatccattccggtgatattggagaggataaaagatccaaacgatcttcgggacttcactgagaggtcatctgaggggttgtcaatagcgtttctgcttcgtaagagttatattcttgatgctgaagttgatgacaagcttgtggttgcacatacattggaacctaagggaatgattaatgaatctgagttggtttgggaaacagaggtttctgatcccaaggtggattacattttgagattgatcaacgagggacattgtttcaaaccatttgaatggccacacttgaaagcagcaaatcaagaggtcaatattccagatattgatggtgacagccttgaagatgtcacagatgttagtcaagcaaggcccaaaaagcctcttactaggtcttctaagaaggag

SEQ ID NO: 59744 - DNA, 1392 bp, Arabidopsis thaliana landsberg
tctggtcttgattttttcttataattttgtacataaattagcaaaacttagttttgtttccttgggaaaaaaccaaaaaaatatatcttacaaacaaaataagggtgcaaaacgtataagaaaataaaagaatgggatcaaagtggaataaaagaatattagggcgtcggtgacgtgaagcttcgctgctgggagaaaaaagctcacatgcgtattatctcagtctcagctatatttagaacaacaacacatgtctgaacacattacagttcctatatctgtttcgaattcaaatctcctgtccttttttcatatataataattcatcataaatatttattgatttgattctatctcttatatatattttcgatctctcctgaaaagagaaaaaagttggaaacttcgacgaatgtgtttataaatctttttattttctatctgtcttgatttagttttatcttttttggaatcggtctgaagttggacaaaagaatccgccattttctcctcggtctctctgctcttctcttcagtatcggatctgggtctccttcgctttcgtttcaaggtaacacaaaaaaaacttcaaattcttttctcttttattcacaccattttcgctttctttttcctttttcttctttaatctttgtgactgttctatatcaatcttcatttaacatttgcattctcatcacttatcagtattttctgatatccaatttctgggttttcgaattcgattcgataagaatatttatttcatttttttttttaatgtagtagtatatgttttttccccaaagtcacggcattggaaaaaaggaaaaagacagctgttccttgcttcaagcccgagattaagcaaaaataattactatttctttcttttaaaaaaatattcgaatcaacgcactatataaaattacctacttttgacagtatctgaattaaacatcaaccaaacttcaaactctctcctctgtaatccattctttttgtattcccaaccacgtgattttttgattcggtaattatccatattctacactacgattattaagcattaaaatttatcgattggtgaaaaaattaaacttcgtgattttggcttttgcagattattttgggagacgaggaggcgttagctgtaattcattgtatacttgctttggctattaaagccgtcacacaaaaaaagtaaaagcaacacacacacataaatagacacacttttttacgtatatgtgtgtcttctttcgtctctgttgggaatagatcttgtcctaagagatcacttcgagtctgatctaaagtgagaaactttggttcttgttttggtttttggaatcttgtctaatctggggagattatgggaatgaatcttga

SEQ ID NO: 59745 - DNA, 1518 bp, Arabidopsis thaliana landsberg
  unsure (1)..(1518): unsure at all n locations
tatatatcatgagataatatacaagcaaacacaattgtaagcatatataaaaatcaatcaagttgttatgatatttatgataactttaaactttgattaacaagaaaggtaatccaatagtaatctttgtcatacggtgccgtttcactaataaatgggcttacgtaatacggaccaacacaaagtgacgtggtttcattttaaaggtgttacttatcgtcgccaatgagatattgtcaaggcccaggcccatttgcttgtatcctcgaggcagcaaattcttgtattccatttctctcctcttcttcttctttctctctctcacatctgtatttgttgtctcgatcgtgtaactgagaacgaaggatgcaagtagtttccaggagattagttcaacggcctctcgtcggaggagcttcgatctattcatcttcttctctcagatcgctctacggagtctctaatcaccgttaagtttctgccattgattttttttcttatatcaattgggatttctaggttacttatgttatgagtctcgggctaatgagagatttgtgtttttaatgattttgtgtgtttcctctgattttaattagtgaatgggactgataattgtcgctattcgtcttccctcgctactaagggcgtgggacacctcgctcgcaagggtactggtgggagatcttccgtaaggtatgccattgctcttttttagggtttgtttcctttagaaaatgtttgagaattcatataggaaggagaaacgatattggtctgtcttatgatttaagtaggcttagtctattgctttgtttagttttgagcttaagagatagctttcatgaattactttccttcatggagaaatgtatcgtctctaatgggtttgcagtagcttcagtttagtgaacttttctcgagagctttctgttccgtttgtcatgggaatgagaaatgttcttgccgtgttatgttaaagcatgcttattctgtatatcttttgttaagtttcgagcttagaggatagatattgtaaattacttgcctttgcggagaaatgtatcatctttaaggggtttttggtagctttagcacagctaatttgtagttttttcgagagttttctgttaagaggaaaagaagtatatgaaaatcttaatttctcctttgctttggcagtggcattgtagctacagtatttggagccacaggatttctgggtcgttatcttgtgcagcagctaggtgagttgggtttatcattggtattaccagttgggtaaatcaatcttgttttttattttgtacatttgttgattttattttgttacttgctaaactcgagtgaatcttttcttctagctaaaatgggatcacaagtgcttgttcctttccgaggctcagaggactctcctcgacatctcaagttgatgggagatttangacaggtaatgtattcttttatttaacataatgctttcgagggtttgcaacaaaaaaacatncttacaaaaac

SEQ ID NO: 59746 - DNA, 552 bp, Arabidopsis thaliana landsberg
tctgggagatacttcgtctcatattgtcctgatttggtgcgcagtgtctctagatatcttttacgtcttgtggcaactaaaatgatgcacattgtttatattcctgtattatattaatcatcttctacatgtattaaactcttctttgcttcaaagctgttactaagttcaaggttcaaattaataacttttctgccgttttatagctcaaatacaagttcaatgatcagtgtacatctgatatagccagaggactgactcttctatatatgttggatagaattctgtgaacttttgacatctttatggttggtctataaatggtgatgattcactgtacctatatgggaagtgcttttattgggactctgggtagtttggtcactaatatggtgggcctaagaagagtcaatgaagcatcaacaacatgtttactagttagaactgatcattgatattcatcacagaaatataccaaaaaaattgagttccatatttacaggagaaacaaacatgactgacccaatttggcaacttataaactaaaatgtt

SEQ ID NO: 59747 - DNA, 514 bp, Arabidopsis thaliana landsberg
  unsure (1)..(514): unsure at all n locations
caaactcaccgggtgtgaagtatttgcagtttgctataaaaaaattcgtgtttcaaaaatatgataggacaaaaaaattagatatacaattgtaaagtaaatctagctagtcgtgtacgttaggtggacgatccgaaatcgaataagataaactaattttaaatatgattgcaggaacaagttaaaaattatgcttaaacatattttttataaacaaatatgaaattactttttaatctatgaaatctgatcacaagattaaagataaacaatctcctttaaattaatattcaaaatattccctaatccctaccattatgcaacaagttaaagttctacagagggaaacaatttgaatttattttcgcctttttttctcaaacaacttgaatttgtttccctctaattatatccaacaaacattggaacttgtgatccggaccggaactagatttcagcatcttgcaatctttttaaaacatgaaagaccgcattctnttttgataattaaata

SEQ ID NO: 59748 - DNA, 1280 bp, Arabidopsis thaliana landsberg
  unsure (1)..(1280): unsure at all n locations
agccaacgactgaatcgtatattatcaatcataaaacttgataccaaaattatctaaacctaattaatcccccagaagaaacagacacnnnnnnnnnnnnnnnnnnnnnnnnctgactagtaataattatacccaagatatttttcattgacaatcaaagacatctgaaactatattcaatagtgatagatgtagaagacccatgatttagtaacctgaaccaaatctttgatgtacagataagagagatctggttgctcacaatcatacaagcagagtaacatttaatattaccacgccaaatatttaagttatacaaaaaccattaggataatattactaatccgtatagtatataaattaggattaattaaaagtggatacacttaatccttactggctttaatggtgtcaggggcccaaaacaaaccctccaccgtttctctctttctgtgtgtctctaaagcaatcatcatatcctaggtccaccatttttgtacacataaaataacactcttctcattttgcgtggttaaaaaaaatacacatatatgagatgtttttttttgataaagacacatatatgagatgtttatttgctatcttttgtgttcttcaattcaacaaatgttctcgaaaaatatgacataataaactggctgaatatcaagatcatagtataatgtgctccaaaatgttggaccgagagtacttatataacatctatatagtttacatatattcacaaaacgcattaaaaatgctacatatcacgacttcaagtcttctagcatgaccgtgttttgtaatgggtttcagagaatattgaaatttaatttccttctgagtaaaggaaaacacgcatgggagatgagttcacattctttaattcttagataaagcaactaagtgggtttatagtataatttaactatttaagtacacggaattagagttatagttgaggaagagctgatcatgttaattatttttaaattttaaattaaaaagaaatttgtacaccttaaaggcgaaaataaaataaaattgaggagcttctaatggccactcccaaatttcaaaaggtatgcattccccatattttcggcatataaattctagcttctgttttatattagaccctttaattggatttgaataatatgtaacgaacatgctattatactatacatgttataactaatatagagcgaaaagcattggatctccctagtggctatgctctactagtgagaacatatatatggaaactcgtacca

SEQ ID NO: 59749 - DNA, 453 bp, Arabidopsis thaliana landsberg
tgttttgtttttggcagccccatgctcagtaggggagggcccttccctacatatccaagcagtgaactgattactggaccccttgatcgacgcatctacccctacccgaatgttgttcacaccattctcatccaaagtcccctgatacttacgtttacactcagaagcctcaagtcttgtggaccccagcacctccataaggttcgagcgctcatcgggaattgaaatacacttactttccatggaattaatccggattttgaattgatctgaaagcttacatatatcattgatggcactctcgtaacgcttctgatattccatgatcattttctctctaccttcaagctggttcttgagcaaattcatcgtgctttccaaggactgctgctgcagcttgagtttggagttctcagacataagttcatccatttgattccctctgcgatggac

SEQ ID NO: 59750 - DNA, 1967 bp, Arabidopsis thaliana landsberg
gtaagaaattccaacacggtttatagcacaataatcgtcgatttgtagatcaattgacatgttaaccttatatagggtaaacataaataatattccgcagccagagacaatccttgccttttcagttctgtggaagatccttatgaattcagtttgtattgagaatatcataaaagattgcaggtttcttggtaactggagccagttcctgaaataccaaaatcgattcaagttacagagtccgctcttactatttaccgcctcttaccgcactagtttctacttgatcttttgaaaacgtatcagagagagaaaaagagagagtacctcgactgcggcagctaaaccaaggacggtagcttcggcccaaggtcttcccattatttgtaatcctataggaagcccctctttatcataaccaacctgcgtttatttttgtttgccaataagttagaaaaagagagtgattaatcagaaagaagatacgattatattgcaagaatgaaataagtaacatgattgtctaagccttggttagagactgataaaaaaaatgtcttaccgggactgatatggccgggaagccgaggagatttgcagctagaacgaagcgcattaaatcagctagaaaagaagcaatttgaatatcagaactctgatgtaaatgtgctatgtattagattgcaccaaaagtaagaagttagagctttgcttgacaaacttgtcacttgaatattggtttctccatttttgagagcatcaggaggtatcactggagctgtcattctgtttgtaaagtgagaggagtttaagcagtaagtaatatacaagtaactatatccgaagacattgcaagtaatatagggatcttcaatttgctagatggtttgataaggtatgaaattatattacgtacccagttgtaggggtcacaatgacatcaacgtctttgaagatattcaagtgatactccatcaatcttcgcctgcaacaaaaattctatcaatattggtttactcttgtgactttagaagcaaaagtgaaagctgcgcatacagtgcattattctattgccgcttacctaagacattgagcagcgatatagtctgaagcagagaatgaacggaaaattgcaaagctggtacgagtgccataactcaattctgaatatgtgctgaaatacaagacaaatgtgggagttcttaaaccaaagttctaatttggttcatagatgatagagctagagacatacccagcttcacagtagggagtaagagaagacagtgttggagacccaatcgaaataacatgggctgcacgcatctcttccagttcaggaaccactatctccaccacctgaaatgaaaacaatagagagagattgtagctgaaacattgtatccgtagattgagagagaagtactgaaatgttcagattactttgcaaccgtgattgtttgataggagcttaaggatgtcttcgcatttgtcagagatgtcacttgaattgacatcattaaaccactgcatggatacaaacaaggcactaaatatgccactgatataacaaatcccaactcagattaactagcaaggatagaatattcacctttgtatatttccctagtcgtagagatcctattgcattgcttccgttgtgagacaataactttggaaaacacggtgggctctacagaataattgcaaagaccaaatcatatgggaacatattgcaagattatatgccattatcacacatgattatctttgcatctagaaatgtttgaaatttttattttgaattatatttctgaaatctttgtggttcagcaagtaaaagagatatcatatattcttgggaacagaagtgagtataaactgagacacttcttcattaagaatttatagtaaatatactatgactgagaaagtttaccggtttcaaatatatctatcagcagatgaag

SEQ ID NO: 59751 - DNA, 473 bp, Arabidopsis thaliana landsberg
  unsure (1)..(473): unsure at all n locations
taaccgatggaaacgggggggggttacactacgccgattccgatacccattccgatagaaaatttcgaaaaccaattccgtttttgaaaaataccgttaccggtgaatccgatcgaaaaatttcgaaatcggtttccggaattccgaaaaattccgaaaccgttttcatccctactcgtagggcatttgccccatgcgaagatagacccaccgtaacctcctgtgccgctcctcccattcatcgagcgacggttttctgatcgcttcatatattctcatcttnnnnnnnnnnnnnnnnnnnnnnnnnnnnnnnnnnnnnnnnnnnnnnnnnnnnnnnnnnnnnnnnnnnnnagggaagagaagcatcatcgtgttcctcgacatatgccttccacctgggtccctgccaaggacgcatgtgcaccagccccagcagggctagtttgggagcgagataatcggaaggattgaag

SEQ ID NO: 59752 - DNA, 557 bp, Arabidopsis thaliana landsberg
  unsure (1)..(557): unsure at all n locations
cgaacacatagtaagtgtatatactcaatctttgcttggtcggggaatcttttgttttgaactcaacgagccattttttgtttttaaatttcctctctttttgaatagttttaccggaaagaatgatgcaccgatgggagccggtgaaaatatgaaagaggcggcgacgaggagctttgagcatagcaaagcgacggtggaggaagctgctagatcagcggcaaaagtggtgagtgatacggcggaagctgtgaaagaaaaggtgaagaggagcgtttccggtggagtgacgcatccgtcggagggatctgaggagctataaatacgcagttgttctaagcttatgggttttaattatttaaataattagtgtgtgtttgagatcaaaatgacacagttttggnggagtatatctccacatcatatgttgtttgcatcacatggtttctctgtatacaacgaccagatccacatgactcattctcgtcctttcttttgtcatgaatacagaataatattttagattctacatttctcagcagtcagtttaatgagaa

SEQ ID NO: 59753 - DNA, 336 bp, Arabidopsis thaliana landsberg
aaggaagtcaaagactttagtgggattggcgtgattaagaatagtaatgatcacaactgccccaaccaaagtaaatgaatattgccaccaaactcataaaaatgaactagaaaacccccccattaacacatggttaacaaaagaataaaagtccaaattttataatatgaatgaggtaagagagggagagagtggtgggggagaaagggaattatgaaagttgacgagagattgaagaaaacgaggccttcattgataatatgacacgtggtatgctaataaaacatacaatctttactcgagacttaacggcttcggccgtaacgaaaacaatat

SEQ ID NO: 59754 - DNA, 1112 bp, Arabidopsis thaliana landsberg
aattatctagtaaaatatatttgttcaagtatcatagcttagttattgaaaaacatacactaataataatcaaaaaccaaaatatatatacctcatcaatcatcataaataaataagaacagtccatgcatttataattcgctaggaaataatatcccacacacagtccatgcattaaacaaataatatcgtattcgtaccacacacacataaatatagaaagagagagatgagaggatgaatactcataatttataaactctcacatgttacctccttgctgatcatgaccattgttccaaggaagaaaagtcccatacgaccctccggtgccacgtggcatctgattcatcaccggacttgcccccgaaagcctataaaccgggttcaagggaggcagttgctgcgacggaagcggctgaggctgaaaaaccaagtccacgacgttgccaggtgctccggcggctgatgtggacaaaccataatgtgccaagtcagcattagctgcgtcgagctccttctgaagcctatggacttgtctctggagataagagatggctccgacgcagccatagacggggtcacggacacgtgcctcggcctcataggctaaggagttgactgcgtcttcacgttggtgagggaggagctcgttgaggagcttcgtgacgttgcttgctccaaagattttgtggacgttggcgaatttgtgtggctcctccggtggaaaatatggcgcgaatatgcatcccggcatgcatttccggcgaagaaacttgcacgccgcgcatggtgagttgtatgagtttgatgacgacgccatttgtttttcttcttacaacctaatattgtgttttaagaacaaaatacaattagaaagaaaagttaaacacacacatatatagtatgtttatacatacgatctacatatatataatttaaatttgccagtaaatgataaaactcctacgtttcgtttagaagtcatttttctataatttctatattgcaactttttcaaattttatattgaatttttttattccttctttcattgaattcctaattatctttccattgatttcccttccacgttttcttgatgtatatgt

SEQ ID NO: 59755 - DNA, 151 bp, Arabidopsis thaliana landsberg
  unsure (1)..(151): unsure at all n locations
cgcaaaaggcanaagcaacaaaaaatcaaggcaatttgaacgacacacaaccaccaaaggcaacggtgactttaacggtaccgagccaacacaaaaaacaagagcaaaggacagcaccacaagcagagcaccatgccggaggagagacaaa

SEQ ID NO: 59756 - DNA, 280 bp, Arabidopsis thaliana landsberg
agaagcttgctcttgccacggttagttcatcaacagtttatttacttgaggctctatctatcactgggtttcaaaacttgggcctttttctataatactcagctccattttatgcaaactatgataacagactcctccgatattctctatgtggtgttggtggattgttccttcttgtcggtttgattgttctgatttgcatagatcaggatgatgctagacacagctttgggcattctggaggtacttatgttcatctcttttcccatttgttctgtag

SEQ ID NO: 59757 - DNA, 582 bp, Arabidopsis thaliana landsberg
  unsure (1)..(582): unsure at all n locations
agccacatacaattttgagtaaaataataacgtccgctatatattatggaaaagttataaagtctcacattacaaaatgagacaaaaattgattttgaggaggccgatttggtcgtggacatcatggctaatagtcccaaagtaagatattctcttctctttatcttctacttatgttgttacttgttcagtaccaactagattaagtggtagctaaatcaattgtttaaagaaaaactttagctcgaagtgtatgactcaacacgattataactttatatccttatcttcgaattttgatttgaacatcattctttgttcatattgcttatgatattcaattattcataggaaacaattttaaagcaattatagtaacataatagcaataatgaattactattgtagatgaatttagcgaggagatggagtctctattggtgggcttgtgtcttggattgtgactttgtgtggatgggataatttgcttttgtcacgagaggaataagaaaaatgagctcttattggaaagtcatacgaagatttatngatagaanaaaaaaaacattattttccctaaaa

SEQ ID NO: 59758 - DNA, 536 bp, Arabidopsis thaliana landsberg
tgttatccaaccaccaggttcaggtagatcaatcattttcagtttcaattatttggtgtttttgttttagatgatgctaaatcttcatttgatcacacaaatatgagataaagatatgctcactaattaagtaattagaaccattcataaccatgcatcaatatacccaaagttgaggaagggcttgacaaaatatctttgttttgattcttgcttgcctaatttaagatctaattagtgggtacgtacatcaaattatgatttaacaaaggattaagaaaacaaagacatgaaattaggtacatattgagcgaactaatgatatatgtcgagatcataatgaagtgcataaagaaaaggacatgaagttggctttgatggaacaaagaacattatccccttcacgtggcttttactttcacaaccctatttcctatttcttgacctctctctctctagctccctctatatataatcttattcaacttcactttagctaatactttctagctctatctcaaaacatatcatcaatg

SEQ ID NO: 59759 - DNA, 1042 bp, Arabidopsis thaliana landsberg
cgttaaacattgacaatttaattacattatctagtgtatttgttctctaaaaaaaacatttttctttgttaagacttcaattacgcattaatacaggactttatgtatttttacttttttgtgaaacatgcattaatacaagactaaaacttgaatttattggtaagaaagaaaataaaattgagtggtctcagatcagaagaacagaaacgtgaaaggctctcattcgttttctctgttagtctgttaccaaaaattccatcgcactcaagagactatactacacgcgaccaaatgacttgacattgaacgtacgggcagattttaacctcaataagacacgtgaacgaccgaaccaatcaaacggagcctagatagtgatgacataagcttgtcggaaagaaaatcgaagttagaaatgtggagaccctgattggttgttgttgttctcttatcaagtgccacgtacatgactaatcttgtgtgagtgttacaactttatttattctcctccctcattagaacttttggctttttctttctttatttgtcaacctttttctcaaccaatgaggcttctccacatgctgaaataagtagaacccacgaagatatcgctttatacatcggctatataagatatagttatatgttttttttttgaataatcaccattacatatagttaaaatacattttgaataacatgtataaatctgcacatatatgggagcttgtatacagtgtatttacacacacatatatatggtcgtcatatggatggtgaatgtgaactactcggccaagaaccaacaacttctaactttcctagttcgtacatatagaataaatggatataaaatatgaattgcaatattatggcatactagtacaaataaattaatgaagctcaaattatagatattcaatatggagaaccggatgctgttatttgtatatataacatataatgtgttcatatcctttgttggatataattaatgattttcttgcaagatgcattcatacataataatacatcc

SEQ ID NO: 59760 - DNA, 1771 bp, Arabidopsis thaliana landsberg
atgtgtaaggtggtaggttacttacaggtaaacttccagcctcgttatgtagtataaggcaatggctgtaacgaaaacacagagatacgtaaggaagttcaccacaaagatgaacttaaggaactccgtggaaccccagacaggttccaggaactttcccataaagaggagagaaacggtgctgaagacaacctgcaacattgcaaacagtcactcgtgaattcaagtactatagatgaaaagtctggattggataggaacaagttgaactagaggaaaaacatagaaacataccccatatactgagagttcaaaatagccgcttgttatcagattccaggcaaaaggaatagtcctataatgaagcgagttcagaattgtaacaagtcagaactatcatggtaataatagttctagcctaaagtagatattagagaatgacaatgtgcaagtagcatcacaatagtttcaatgtaattcgaagaccaatcacgtaatttaccaagcgagcatcaaatttcgcatcctaagtaatttaacagcatatagaacccataatttcctcaaaaccgtgaattagcaattagtttagcgcagagatcacacagaatcgaagcaaatgtgggagcacaacaaaatccatccagtagcaaaatcgtaaacccaagtgttgacagaagattaaaaaaggagatgagacgagacgaagtacctcgccggaatcagagcaaggtatgggacggtagcgggaatgaactgaaccacgaggtgtcccaccacaagtaccagggcaagtcctttgcagagcttagtgaaattggtgaacatactcgttccctgaaacaatgtaagacgaagatgattcgtaagatcagagacgacggtttccaaattcaaaactaatgaaacgtaaaagatctcaggccaatttcgtagatctgctataatatccgtaccggagaactcatgtctccagacttgagcaagagtgtaacaacaaatctgagatcctgacgatagatctcgtcgacgcagctcaaaccggagattattttctcctttcttccgcaattggaattcgatactcatatataaattatagtttaatgtaacaagtaacaacaacaacaaacaaaaaataacacggtaattatttttaacgaaaaagttattatccacttaattatcataaattcttatgtattttgaccccaaaaaaacacttacgtattaaaaacaattaattatgtgttatttacgagacgattatacccccatatgggtttttgggctctgatggaacttggaagtgatgaagggtgtttctttaataccaatctatctgtcaatgcagagagttgatgatatattgattgcttttctttgtatttgatcttccggtagaggaaactaggattggttctgaagaatcatcaaatcaaatcatggtgttgtttttttacagaggttttgtttgaggtggaacaacaagaaagtagcagcatcttttcttcactataaatttagaaataaatcttttaaagaaaaaaaaaagaagagggatgaagaagaaagtatcatcattgagtgagaggaagacattcaagctggatctcaagaacacctctttcaacattttgtagcctaagtgaaatgtcttgtttcactttcccgtcttcaagtaagattatgccatcactcaccaatgtgttctctttgctcgccacccaacttcccagctgcatcggttcctttatgctcgatgtctcgt

SEQ ID NO: 59761 - DNA, 519 bp, Arabidopsis thaliana landsberg
  unsure (1)..(519): unsure at all n locations
tctttggaaaatccagttgtggtgaggctgatcttgttacttggtctggtactgtgtgtcctttttatttatcaatctccacgcttcgcgcctctactaaagccctatttattattggattcacgagacttacgagcatcctgaatgaattgacttaccacaactggtgtatctagtattcccttgtaagatttattaccaatactagagctgctagccttatctgatcccgtatgtgttctaagcaccttctcgtactaagtttagtatcaaatcgagttatccttgaatctatttggcgagaaaccaactcaaactatcccattcgtgcctactgtgaatgtctatacttagaagctatcccgcgaaaagcacaagctattcctcttctactaccaataccaagtagctgtagctagcatatctcgtcgtgcataaaccttacctgcttctaaaacttctacttacatctgtgactgcctattccggnctttctctaaaatagctatctttgaattc

SEQ ID NO: 59762 - DNA, 460 bp, Arabidopsis thaliana landsberg
aagagctcccatactcagttacctcacaaaggcacctcttgtaccgcccggaacagcggtggttaactctctgtcgaagcagcgggcaatgctggaaaacattcttagggcatgtgttgggcttgcgccagagaacaacatgatcatggagtacaagtgaaggatgaggaagaagaagtaaaggtacctaataagaccttaggatatgaagaacactgctccattgtttcattaatatatatcattttgtatgtatattatatgaatgtgtgtgtgagagataatatggataagcttagggttattttgtgtgatatggatctggtcggtttatttggtgagaaaattagccaaggttttggatcaaatgtgtaaaagattaagtaattatgcttgtgtctccttgtaatataaccaaacttatgatctatgattatggattttcaaaatcaaaatctct

SEQ ID NO: 59763 - DNA, 1308 bp, Arabidopsis thaliana landsberg
tttgttacgcaccgcaaccaaaaatttttgtttgataacggtcctcaaccatatatgttgttgttgcattaggggaagttgatattccacagtaacataattgcagatgccatatttcgattgttagcgggacccaaaaaaacacgcgaaaatataataattgattacgtaaaaatgataaaaataggtaagcattatatagcgagattgattgtgacttttgctttacgcacaccgtcatcgtcttaggtacgttttagttaaaaaaaagtattgtgggtaagatccttaaatgcaatcataaacttgagaaagaagaagctccaaactatgttatatccacaattataggtccatcgtattatcatatgattaatacgaaccatttattcgcatttattccaatagaaaagacatttaaacactagttgtaatttggtacaaaatttctaagaacatcaatgtttcaagagcatcagactcttaagatgccgacattttgatatatagatatggattaaagtttgactcaatcaaacacgaaaggtatgagaattttacctcccaatccaaacaaaatcttcttatttgtggcttaccttgtgtatctcttaatttctcttctgttttcttatcttagacttctttttccaaagggaaaatcccaaaaaagaaaaagcaagcaagaaacttgcaaccaaagttcaatgacctaaacggtaccggcaaacttaggtaacactcctaatcataccaaatttcgtgcttatctccaaggtagactactaggagggtagaccatatagactcaatatcttaagcccggaatgtcatatatgtgttatatatatacacaaatacatgtactatatgatagtaaaagctaaggtgatttacatgaaaagatctgttttctcttttcttctatctgaattttcattaataccttcagtgaaatacaaagctctaagaaagcaagactaacttacacaacaaaggtctgaaatcgtaacaaagagcatatgccactaagactaagccacattaagaatccaagactaagccataaactaaagatctgttttatatttcagtgtattatctttggcctcgcttcacgtcaaagcgtaacctctattttccttttccattttttcttttttccacttccacattccagtcccacaagaataattactacaatgtttcacttaaacaaaatcctttccatgacattttgcaaagtaaactcttctcaaagactcaatacacaactccttttttgaatataatcatctttattttcaa

SEQ ID NO: 59764 - DNA, 784 bp, Arabidopsis thaliana landsberg
ctgaaaatgttcaccgtacattcattttgcaagacactaactgcttcagacacaagcacacatggtggcttctcggtgctacggagacatgcagatgattgtctcccacccttggtcagacttgcttccggtgttctggttgctttttggaaacatctccactgctattttgtgtaacagtttgctttctcttttctaggatatgtcccaacaaccaccgtggcaagaattggttgcaactgatttgcacaatagtgaatggcattttaggcacattttccgaggttaatacacttggtatcttattatgagatggtctttaaactgtggttcctttaccccaatgctactgctactgggaacctttaaagctttacataattttgcattaatattattgtttcacgtttgttttaatcataaggttgtgactacaggccaaccaaggcgtcatttgctaacaactggatggagtgtttttgttagctcgaagaaactagtggctggtgatgctttcatattcttaaggcaagctcctcatttcattcgtctggatattatttttgccacatacggctggacatgtgacatagtattatctttcaggggtgagaatgaagagctccgagtaggtgttaggcggcacatgagacaacagactaatatcccgtcatctgtcatttcaagtcatagcatgcatattggggtccttgcaacagcagctcatgccattacaacaggaacaatcttttctgtcttctacaagccaaagtctcatcaaatg

SEQ ID NO: 59765 - DNA, 122 bp, Arabidopsis thaliana landsberg
actgccggggggggcgctgaggtctgccttttgcagaacgagtagatgccccagacccagcctgactgggggcatgattcagagagaaagtgaggcagccacggctggtgagagctttgttg

SEQ ID NO: 59766 - DNA, 1911 bp, Arabidopsis thaliana landsberg
caattgttatttgtttatttacttaaaaaaaaagttaacttttgttagtggaatcttaattaatttgtatcatatctatgattttcagccaagttaatgttttggacattgtaagatcatattggtttatgataatttcttagggcaaaaaaatcatgtaagcgtaaagctaaaattttcagaggaaaatagaaaaatggtcgataaaggataaggcaaaaaaataacggattatcttgcttgtgaaaatggcaaagtcccccacaaatatatgttatattttatttttcttttagtttacgtgagctttgtttcgtatataaagtatgatgaattcatatttttttttgttttggtaaaatcatatatttgatatttctactcgcctaacatttaactaactacagttatatatatatatatatatatatgtttggtatgtaatattgacacttaatttttttgtgaaacgctccattagtcaatactttgatacgtacagatatagattagtaatatcatttactgaattattaatgtagaaataacacaaatattgatctctcaaataaaatcgcattatcatttatcaaagattggtttcttatcgatccacaaaggcgcgacaccttctaagatcgatattcattagtgggtacaagatcccttctaatataatgaattgaacactaaatacaaaggtctgatccctttattgtaattcaactggaaaagtgtttttgtttttaaatatttcgttattcttagttttattttttgtaggtttcttatgtcgttttgtgttatcagtggaatcaaaaagttaattggttggctttacaagaaggctaaattatatggatgttgctcatatgaagataaagatggcaaagttaatttgtaaagatgagaatacgagagacagtctttcgtggacgctaaagactaaatcattagaagcgaggcgctacgaacaaaaaaacatacaattgggtaagttttcttagtaggtaacccattgaaaaaatatttatgtacacacaaacatagaaagattgtgaattttgtgtatactttcctttgcatcttaacgcttaaacgcaaagcccgaatcatgttacagtagcatgcaggtcccacatggtcacgagattctgatttttttttattagcattatagaaagcagtctttttattatgctaatctcgtcgcttatactatccctttttctattatttttgtcgtcatactatcttttattcattattaaacctaatttacatttataattcccattatattcctaaagagacatgctcattgcattgctaaagagatatttaaaacagaaaatgcaaaaaaaaatatttagttttggtttatctttcgagcaaaaaccaaaagagtgacacccatgggcttgcttgcccgcgagctcgcttcagtttcatttgtcagtactcagtagtgctgccacacgcacaaatgacattattcagttcttattaatttagttgtaaataatatataaattaatccacgattgcaaagtactaattcctaatgcaacacttaaatatattttagttgaaatttttaattccattttctacgtattttccaagcataaatcgcataacaaaaagtactaaatcacataatgactcctttattatgttatactatactatattagtaaaaaaaatatgatctcccacttatatatataaacacatctcgtgacgcactcgtagttgcaaacacggatcagtcacagacactccagtagcctctccctcatcaccacaaccgccgccgtcaccaacgccgatacaccatgaaattacatttacaccctccctcacttgtcttcttcattttcttcttcctcttccgaccgacaatgtcgt

SEQ ID NO: 59767 - DNA, 104 bp, Arabidopsis thaliana landsberg
gcttcacgcctcgggggtgggttacacatgagcttgcaatcatcagactcgtagctcttgttttcgactgactatgcactcaacttggcggctgactctaatca

SEQ ID NO: 59768 - DNA, 235 bp, Arabidopsis thaliana landsberg
caccctacacccaagggggggttacaatattaccagcaaggagcattcgagcttccctcactacccgcatctgaggcgccataaactgggccaaaaaaaaatctacatcttgcacccctcccacttgtttgtcgactaaagaattgaaaccgtcagaacttcaagaagccgcttgaacttacggatttgcattaaactgtgacacactctatctgccaaactcaaaactcgcttt

SEQ ID NO: 59769 - DNA, 191 bp, Arabidopsis thaliana landsberg
gaaacactccgggggggggatttatgaatgagccaacacgcaccacccgcataaagcacactgtccgctcgaaaagcgcgaaacaccaaacccaacaacaatctatgactcgctcctcgaccaaggacaggccgcaaacgcatagatacctatccgcgaacaaacaacaactccgccacggaaatgagcgg

SEQ ID NO: 59770 - DNA, 687 bp, Arabidopsis thaliana landsberg
cctagctaaaagatatttgcctcaaaattgaaaaagttgaatattttaacactttactaatatatactttgttaagcaccatttttccctcctattttctctccttatttcaagactacatgtgccctcatagagacacttgcttttgcatttcactttatgttaatctgagcaataaaagacctctaaagaccatatctaagcaaatccctgaacaaatgtcctaatcaacaatttaattaatactagtttcttttcggtttcaaggcgtttaccaaaaaccaaacaactctttacacaaaactagttctattcactttgggatcggtgatgtgcttattgctattaattaatactagatatgatcatagtctcttctattccaagcaacgcataccactttgtttatgtggtacaccagtcatttacgttgcctactcaatagaagttttcacttttgattttgtatttctctccataagtataatattaggaataattaaagctatataagtaaagaatgcgaaaatcttgatggatttaacattatatatatatatatatatatatatatatatctttctagatttagatttaaactcggattgttatgcaatgacgcaactagtataaatgactaggctacatcttacatgttatgggcagctaaaaattgttatgttaaaa

SEQ ID NO: 59771 - DNA, 193 bp, Arabidopsis thaliana landsberg
ggaacaaaaaggggcggaggtttattaaacagacaaaaaggaccccccgcgaagagcacggtgaccacgggagaggcgcgatagaggaaggcaaagaaggggaaaggactcgaaccttacggacggagaggggacacacggataggaagcacgcccagaacaaagaacaaagacgcccgggaaatgagcggag

SEQ ID NO: 59772 - DNA, 1323 bp, Arabidopsis thaliana landsberg
  unsure (1)..(1323): unsure at all n locations
gtcacatcacggtttttgactttcgcgtttctcggattttataatagtcttgattttccgttatcgtcaaaatatggtcgtcttattttaaccttttatacactatgacaattgttcgtcgttgttgttccaatttctttcaagttttcattctcattctaaatttcccactacatttgtctagagaaatccaacatcgctcacgatattggatatctaatttctagattactgactaaccaataaatttgcccacattcattcatcgacagaaaacatagtcatcataaaggagatgcaacaataagatgttgaggctataaaaagcatgacccgtataactcgcatatgcttcaatccttgaaaccaaatgagacccatatatcgatttgtaatcagaggaatgatagacattatatatgagatcaatcttgtatccccttatcaagggttgatttacttcaaaatcaagtctagataattaggttaaagtctgagaaatgatccatataacaacagaacatgtataataaacatgtaggagtaatctatgatctaagccaaacagggaatatgaattcaattaacaaagtgatatcaatctactgatagatggtgaagaaacatgaatgagattctggtatttataaaagtctgatgagtagtgaagatatttccccaaagagtatcagttacaaagtaatctacagaagaagggaaatttcactttaagcttcattcaatgagcaactaaaacatcattattgttcagtacgttgctgttaccattaatagattcgagtatagaatttggagaagggttcaatttcaccatcgcagatctcgcagggccaagtttcttcctaccgattcgatacggaccgtagatcttgctcaagagatggggcatctgatccatagttatcgtctgcggcgtcgcggcaataggactctcggaagatgatgaaggcgggtcgactgggtccgagagagaacgagtcagggggaaattggatctagcgttgttgattctagcgttacggatctgagccagagcccctggtttcatgtaacgatggaaaccgtcgtttcttctcaccggcgatctggagattcnnnnnnnnnnnnnnnnnnngattgtgagggacctgagaaaggatgattggggaaacgaaggggggctctttgtaaaggaaggagtgggtgtgatggagaggcgggaaaactggaattgggaattcgagaggcgggaaaattaaaattaaggttttgttttgaataagtaagaatacgatacgtacgttcgataaccagctaatcctg

SEQ ID NO: 59773 - DNA, 655 bp, Arabidopsis thaliana landsberg
actagaccattccattatctactaattttaatttttgtacacaaaactttttttctcttgggtcattgatgacaaaagataaacatgttttgctttgggaaataaagaaactaatctttcacaaaaaaataaaattcatcaagataaacaaataaactaatccaatttttttttacatttggaaactaaaacctatttatgttaggggaaaaataaatgaaataaaacaaaaatttgattaaaaaacgttaattaactggatttcacctaattattaaaattaaaaattaaaatagtgagaactaaaataaaaatttatcactagaaaattattaaaataagaatttattactagaatatatatatatatatatatatatatataacttatttaaggaagattgggaaaaaaacaagagcaaatccttagtaagaacgtaattaaaaattctgttatataatattctctatctctctcttaagcttgatattaaacctcttccttaatttcttgtagttctctggccgcacaatggaggcttatgatatttgtaagttttggaagctggatatgtaggaagaattttctcaaatagttctcaaaggaaaaaagaaaattatcctcgacatcccgagcccctctcagcagaacaaa

SEQ ID NO: 59774 - DNA, 1401 bp, Arabidopsis thaliana landsberg
ttatgggacgactcctcactctcaggtagaaatcactcttcctagcgcaatggattctgatctgatgcgacgccaataccagaacacaatcttctacgtcatcaatcagaatcgaaccaatcactggacctgtgtagacactacacttcttcagtcggtgaaggaacagagcgttgaccgttcctgttaattttacttgacatgaatcaagatccgacaatgtgaattctccgatcgacgagccttcgaagcttttcacaagagtctctccgtgtttgtttctcaatcccggagaatcgcgtacggggacgagtttcggaggtaaaacgacgtcgggtttctgtatctccggctttttggtcgttgatttgctcttgaacgagaatttcttcttcgggactaactcgccggagaaaatgtcaagactctgtttgagatcggatacgatttttcaaagaggatcgaacctcgtaggaaggaagaaaatacgagttctcagcgagaagcttctcgagattgtcaatggctacggagatctcagcaagatccgacttaagctttgacgaatccgtagaggaggaagcgagtcgtgactcggcgatccgagactcgatggatcgctttgaatcggagaatttagcgagaaacgaggaagtcgattcaagagtggaggacgacgaagaggaagagtcaggtgaatctgattttcgagcttggtgacgagcggagagacgctcgagcatatcatggtgcttcttctgcaatgccggatctagggtttcggcgacggagctctgaccatcgtcttccatatcgtttttacccagttgtgtgattgtgacggcggcgtttccgaatcgaaaactaagaccaagattaacctaaacggtgccgttttaatcaaatgaaaatactatgatcaaacagtgctattgtagttcaggttatcttattacaaaatagcccaaaatcaagagtagaatgatgataagtgataagaaaaaatgatatcaattgatttctctaaattatttcttatctttgaatatttgttaatgatcatacaaattgagaacaatataaaagcggttttagttgttcaattgagcattttgttcaaagatttgatgtctcggtggtttgcaacaacaactcgacttggttctaaatgatgcacaagtccagtctgtgtaacctttcgacttgcaaagctgctggcaatcgtcattgcacggtccaatacaatcggcttgaacagtaattgcagttgcttgatctacaaaaataataaaaagtactaattaaaaagaaatgtaatgtataaaaccaaaggaattgtaagctttaaaatataatatacatgattatatctaagaacgtattttgaaaatgagaaaaata

SEQ ID NO: 59775 - DNA, 1054 bp, Arabidopsis thaliana landsberg
  unsure (1)..(1054): unsure at all n locations
tttaatgctatgagaaagggatacactttagttaatcaaatttatcaatgctatatattactagaaaatagaaaatgaaactgtgattagtcttgatggtttatttatgaatccaagtggtgggtaaataaatgaacatgcaaaactaataataggaggagatagatgctcagattccacatcaaaacatgattggacggttgtgatgtcatcataaataacagtaatagcttcttttttattgtttagttaccgtcagatcattagtagtctagtattttttttaacattctgttgtggtccccgcaatttacggggcttcccctcatatccagccgtgcatcgcgtatcattagattccctcttctcctacaccttaccacaccctatcattgatctccttctcgcgctattttgatagaagccgcgataagccgaccccccctctccaatatctcgtcccgttttctgcggctgcccttctctgcacagtcgataagataatctcccgctttcattcaatcggacggctggtatttgaagcttataagacacgtgtcatcatcagaatcgacaatcacaatcaccgaaaaggctcacatggatatgtttgaccacggttaacttttaacccaaccatggttggcttttttaacttgacctccttctccttccccctatccttttctcttctcttcccactctctctctctctctctatctatcttcttcatctttgtttcagcttctcctttgaaactagattatctccgttaatggcgcctcagatctaaccttgggagttatatatatatacttgttcaactcttcttcgaaggctgtccaacttcttcctctggttcgatcatcgagatctcgaggttatttggccgcaatgcagaagcgaatagccttgtcgtttccagaagaggtactagagcatgtgttctcgtttattcagctggataaggataggaactcagtctctctggtgtgcaagtcatggtacgagatcgagcggtggtgcangaggaaagtcttcatcgggaactgc

SEQ ID NO: 59776 - DNA, 1317 bp, Arabidopsis thaliana landsberg
aagaatgcttacccggtggttatacaaaaaccgaggaagatgagaccatccgatgaaccggtgttaacccatagcttcaaagtgaatgagcttggcaaggttttactcacagtagacaacccaacctctaagaagaagaagctcgtttacaggttcaatgtcaaacctctctaagttttaagaaccaaatgaaaaatgtttccaaactttgttttattttacaaaaaatgttgtttctagacttttgtttttcttgaaacagaagtgagatatcttatgtgtgtttgtatatgtgagtgtttactttatcatatcatataaattatgtgtggtttattttgctcttgtaatcaatcatgtgtggagaatatattactacatgactttatgaaataaagatctttaaatctcaaccaatttattgattgtgtctgtttatgaaatcatgtttatacgacttattaggtgtcgtgcaacatcgaagtatataaatcacaagttttattaatattcaatgaaaaaagattcgtaaggctgttgatttacacgttggaacaacttctcgacactgacataatgttgttgtctcaagactggagtaggtggaagaggttcaatttgtgtcttgtttaacccaaaatctgttggctcttgcatcattcaaatgccaactatttcctgacttgattcttggctgtgataacccttttgtatgagttttttttcctttttttttgttacgaataaaaaaacgaaagaccggtaatgaaaaattgttctcagcttgtttatattcagttatccttgtctagttgtctactacttttgttgtactatttagaggaataaaaaaatgtaaatatactcaaattagttcatactttgacttgatttttaggtctaagatcggtcgtttatgggcttttgatccacaatcacttccaacatccggagttagatttagatattctgattttaaaaacaatcttccgtatcatagaaggatatgattgaacttggaacacgaaaaaactaatccatttgtattaccactagaccaccacccatttggttaacaagtaaatggttttgaaatatagaaactgctaacactaaaaatagtcaaatgaacaaatctataagcgtatatacaaaccctgtttcacattcacacaaatgtatatgtaaatacctacctctctatgtatggaagtgaagtgatcaaccaacaacaattattgcgaaagtgatattttattattattttctttaagaatttatacagggagaaagcacatagaaggtgaatgaagaatt

SEQ ID NO: 59777 - DNA, 769 bp, Arabidopsis thaliana landsberg
tttacaccttctgcttatacctttttaaaaaatcaaataattttcattcgaatgaatcctcttatgtatgctttactctaggtagactggtagactagtcaagggaatcaattgaatcaaaaggttatttattattataaactggacgctactcaatcaacaattatacacacacaaaatacatctagtcaataatttgcacaaagacttcaagtaaatctctataataaaacgaaaaatattatatgtacaagattgatgtctatgacacaggcacagctaataggtgacgtttgcatgttatattttattaatctaatttttttttatgtatttgttttttttttttgtcttcactggagatacattattggaactaaaacagaaactgtgcaaagccggcaaagattgagactttcttccagagacaaatcaggcaaaggtttaaatcctttggagaacaaagtcaaagagtttgcataggtttaaatacattattacttagtctgccgattactaaaatagataaaattcagaattttccttcgattctctggtatatttaaattagaaatctcaaaatgataagatttttgacaatttggatccacgtggaatccttcggaaggtgaacctcaaacatggagcctgcatggagcttggcacaagtagatgttatctaggagcctcatgatactactgcactatctctcgagaggagtgacttcaaaagttatcgttgatttattgatggttcatgaaaagaaca

SEQ ID NO: 59778 - DNA, 302 bp, Arabidopsis thaliana landsberg
aatttaatttaaaataatgcatgcgatacgactgtatagtgcgtgttttggactttatttatacttatggtgggggctttgcacgaccgaaagacgactaaaataggttattggttatacgaaaaaagaagacaaagagattggaacagacattatggataaacgtgaaattgtgaactgctcatgaggccaataagtttatttcattttctatcctgtggacatggaccaatcatttctttccatgtagcttcgcttcttgattcttcttcaaggacatatgaacaacattattgcccgga

SEQ ID NO: 59779 - DNA, 599 bp, Arabidopsis thaliana landsberg
  unsure (1)..(599): unsure at all n locations
aaacacacactatacagtcttatcgcatgcatttttaaagaaaattcacatttattaccaaccaactgatatcaaataattaattaacatgtttactattttgtgagttgtgacctaaattttatatacatacaagaaagaaacattcataaattttctgcagaccacatttagacttatagagttctccatcactaccattttacttcttttattttcaaaacgtatcatttaannnnnnnnnnnnnnnnnnnnnnnnnnnnntgcatttaatgacaacaaatattaatcctttaagaatttacttcgccgctgtaaatgttaaatcaagccgtctcaatagtactgaaattgctattcgtggaggaagaggtatttttaaaaaattataaaaaatgggaagcaataaaacggattatacgaaaacatgtttcattatacgaaaagtatttaaattaaataacatagagttctctcattacgcggtacagatatcagagtcagacaaaaccaggagagagcttttcaactattcttaattccatttcttaaaaaaacctaaaattcgattcgttatttagagatatggataacaatat

SEQ ID NO: 59780 - DNA, 549 bp, Arabidopsis thaliana landsberg
tgaaattgtgaatgtttgtgaggcgtatagtcttttatatttctctcctgtttccctggaccactttcttcttcccatttcgtagtgcctcttgatttttatttcaggacatatgaacaacaataatgcaaggatcgtcgttttcgcttggttattagatttgttttcttcttctgttcggaaaataatgttgccaaatttacttgtccgtatcaagataaatgtatggcagctacaatttactatctattgattttacgaatagacagtgacacagataagatccttaaaggtattggagtattaagaaaactatgtggaggtaaaaagtcactaaataaaaacggaaaccgagttttgctactttgtaggtttgaatgggacaggccatttgtgcactggaacttgaaccagattgcttatagaaattgcttttttaatattatgaaaataacggaaatcgagtttttctacttttatgcaaatgtgaaaattgctttaaacatttttgtccatattataaattcaaatcctgggcctaactgggcc

SEQ ID NO: 59781 - DNA, 892 bp, Arabidopsis thaliana landsberg
agaataaaaagcggaagggtaaaatagtaaataaacacctgtttgcgggcgaaatcctttgcacctgagaaagcaaggtaagagtggggagatttgtccatgacgagacgagcaagagatataggatttttcacggtggttatccccgaaacggcaccgcatcgtctcttcgtaccgtccataatgctagcttccatctcaaccgttcctttctccgtcaaagcagatccacggcctgaattaaacagaggatccgtctccaattctctaatctgtgttaatcaatcgtttagtatataattcaacaagaacaccgtaagaaatcattgtggggaaagagaacgtacgacgagctcaacgacgtcaatggcggaaacattggaacgcaaagctattatgccgaggttgagacaacgagttaaaagctgtttcgcctcttcttgtctctctgccggaagattagggtcgataccggcaccaccgtgtactgcgattgcccacccacccatattatatctctttctctttgttttattatgtgtttcacagttaaaccgagaatgatggaagaaagaagagtcgcattaggtcattatataggccttttacgagcaaggagagacccacattttcttatttattgatttacctcttaatttttaaaaacactttttaattaccccatctgattttagtttttttttcataggaaggaagaatatactttccgtatatttttctttacttttcagttattttgtcaacatttcccttttcaggttaatatttaaccaatttgggatttgtttttcaccatcttctttctttgatttgattcgaccaaaataaaacgttattaaactgtaatgcttttcataatttcaagaaatct

SEQ ID NO: 59782 - DNA, 1656 bp, Arabidopsis thaliana landsberg
aacattaggtacacgtattcaaaggagacaagattactatagcttaaattcaatttgaagtgcatacaacaagattctttgtatcatcatgaaacgtttgtcctgcagttttatgttcacatattatttattttttcggcaaattggttcagattttaagattccaagtgtccgaccaaatttgattacaaaacgcagcctagtcacatctatctaattctttaaattttgttttcatatcaaaattgatttctactattatatattcccagagtgattagatcagaataatcaaaagatgccacctaatttatatacataacttttttggtttttgatgttgaaaagtagtgacaaaagatttttaatagaccatcattttataacatgcaagtaaatatctcgatttaaatatatttttaataacatcacgaaacaaatttgttaaaacctgacataaagtgatccccaccggccaaaataaatcttctattggttgtgtattttctgacaaacatttgttttaaagatttttaattttaatcggatacttaaccatatatttgatatggaaatgcattatatttttgtttaaagtaaaataatagaacatgagtgtaactagacgacccccaacctgcaaacagattatttggtcttgtggactggtctactactatctcacgtgcaaacttgacgctgcaatgtatacatttatctatatgcatctatgtatctaaatagtaattagtaaccatagataatggatctaattccacgaagttggatagatattctaaggtaatatctggtagaattttaattttcaaaccaaaaaaattgttaccagatgtgaatgcgtagaactaaaaattaattggcgtagaccgtcctaactggaaactcaaataactttgtttacaagtagcatgtaactgtatatatataatgctttagaatttttatggtccaaatgaaaatttcacattttcgttttattgtatcactcacttgtccgactgacgtagaattgcacgtcttaatttttttttggcgaaaacgctaatccgcaacaaaaaaatttgttaaagtagtccgtaactttttttttggttaaagtaatccgcaacatgacatattagtactaacgaactattgttttttctattgattttttgctatatttagaattttaagtagtttagccatcaccatctgtgtatccttacactatacatattcggaaaaactcgaaagaggttttaactggttatgatcaccaccagcagtccagcaccagttttctttcactcgaacgtcaatataaattcactgcccactatatcagctttaccatttcttaataaattatttattatttatttgattttgaactaagaaagattatgggttcttaggaatagttccaaacaattaacatcttaataataaaattactatataataaaactaatttatattaaaaacattatgaacaatttttttctttattttcttaacctctaattattatgaacaagttatttaaatacaattgggatgattattacaagtgcactttatatctccttttcagtgttttttatatatattttggtgacaaatacatctcttcttaagtttaattttcttttc

SEQ ID NO: 59783 - DNA, 459 bp, Arabidopsis thaliana landsberg
  unsure (1)..(459): unsure at all n locations
taccttttaaagagatttacacttacaatgttgctaattattatttttagttaaatttgattttagttatggaataataaacttgtctatcgtaccgaacataaaactgtgatgttccagatttgttgtgtgatgtggacgttccagtttttttatataggttatcagcttctggtcataagcaaccctcatctcatcagccttagcaatgtaaggttgtttatggtgggttgtcanaaaatgatgttaacataacaattagttaagctaacaaagaacttacaaagaaatacacttacagttaaagatttgttaatcttttttttcttgtaaattttgttctgaaaaatgtacaacttcagaaattttattccactagacttcactagcttgtaaagtctgcatatctattcaaatttcagaacaagtgccaaatcactcaaaacaattttaactaaa

SEQ ID NO: 59784 - DNA, 350 bp, Arabidopsis thaliana landsberg
ttatctagatttgattcttattttcacaatacagagcatcaaatagtaacatcatatattaataactattttcagaggtatacttcgaaaaatgttcgaactagccatgaatcttttgaataaaaatcatctcaaatggatagagaaagatttacgtggagccaaatcatctcagggaaaaactgaagttgggttgcgatttgtgaaaaactgttatttatccccatttacgaattccgttcacatggtcactatctaatgacgcgttggaagatttaatgatttttgtaaaggaaattgaggcaaaagaaaagaaactgtcatatcaatcataatcgagttaggtctaa

SEQ ID NO: 59785 - DNA, 153 bp, Arabidopsis thaliana landsberg
atcacaaacacaaatagtgagaatcagctgttaccatttacacaaattgttgaattcattaaagttagagtcaccgtgtttagtacttggttcattaattatatagttctatagaggatcatgaaagttatgtttaatctaatgcatataagt

SEQ ID NO: 59786 - DNA, 290 bp, Arabidopsis thaliana landsberg
cgattcggccaacacttccgcccaacgcctagagatatgtcagcatgcatgacacccatctttcggcgacaggaaagatgcccggggacattcggaatatatgcacaagtatataccgcacccctagtcaagaatcatgtcagccacgcatgacaccccatctttggcctacatttgtcagactgtgaactcacacttatacgcgcactaccctaaactaggagcaccaggagcatctctacatcacagttgtcaactgtgaaactgaaaagacaaccacgctaaagggc

SEQ ID NO: 59787 - DNA, 583 bp, Arabidopsis thaliana landsberg
  unsure (1)..(583): unsure at all n locations
tggcagccattgtagcatatgatgggtcaagagagaggtgaaatcatcactatataactntnttggattaaaaaataatttacttttaccaagacaagtgttgattttccagagagtatgaagatacaacaaaggacttaaacttgtttctacatacgagtagcaattagggaaatttttagaggattatgaaagattattagttgatagtatgtgatagtaagtacttgaccaataattagtgccatttattttcaaaactactaaattaatggtgtgctagagaaatgactctaatctttcaagtctcaacgagtagtaacaatgattntgtttgtgtactcttcgttcttccccttttctccatgtaataatctgcaagtgggtctattattgagtttgattatgccacctttttgctccttctatattctntatttcttaatgatttttttttggtttatttatctagtagatatatataaaagaaaactaatataaatattataaattctgaatttaggcagtataacacaattaaacgatgaattttagaattggtcttagatatacagtatatgac

SEQ ID NO: 59788 - DNA, 595 bp, Arabidopsis thaliana landsberg
gacggcgctgccgagcttgaactctgcttcgaacagatgcttaaccgcaaactctaaatgattaccccactgagctatatacccttctatgctctgcacatcgttgaactcagaaaccgagatatctagataatctaagtcaagtgcttgaagactagctctaacattcaagctcctcacttcaacgtatattgaaatgcacttgtcgagtctgttattagctctgagtctcccaagaatggcttgcagtttatgaattacagtaacaggcaactgagacggtgcaatgcaagcctgatcaccgagtgatgatggagacgccattggaagtggtacactgttatccttcaagagcctcctgaactcgttttccagcttatctaaagcagcattcctaagcccgccatcaagacgcaattgagatctctctttctcttctcctcctccacggtcattatgaaattcactaagccctctcaaagatttctttaaattcgaaagatacttctcatcagcgacatggtgatcatcaagatactcaactatatcttccaaccactggatagctaaaacacaattctcccctagaaacttc

SEQ ID NO: 59789 - DNA, 1290 bp, Arabidopsis thaliana landsberg
aagacgtttgattactatataaagtaattgttataatagaatgttaattgagacgtgaaatggtataatattattgtgtaacagttgtgtacacgtagctctcatgcagttttagtggacccatatggcttgacttgtattctgtttttgggctattaaagtccaaaacagagacccctctcaagcccttcctattaatccatctagctaatagaaactataaacgtgtcctctctctcaattaaataagctagaaacatactcaaccattcgcattacgcacttcatagcggtaggtttagatttgtctaaaatacttaaaaaaaattttgtctaagttgttgtccgttacaaagtttttttctttgtgacaacttgacaacattgacaaatagaaaaataaatttcgatgaaacctatgaaatgggctatggcccaactaaaaagagtgggaaattaaagatgggatggttcaagtgtatacttcgaacttccgacattagggtcaaaggatttttaaaaggcaaccatttgttccactttctcgaacaaaaacgagccatttattaatatatagtacggctgaattggttttgttcgtcattgtgtaaacacaaagtcattcgaattatgttagggtccgttgataatatagacggcccatcccacgcacatattaagtgttcaactccatagaatatcatatgggacactgtttttaatttataatcaccatttaaaatgtttaaatgtttatgcaaattggatggcttcttcacacaacatttatttattggcctttcattccatcaaaataaaatagcttttcaaatacattatactctatactcctatacatgtaaataaccatatgcatatatatttttttcaaatataggtcaacgccatttaatataattttaaaaaaatttgttcggaaaatatcacatttctttcactagacaagccttgttaccacacaatgtatcaatatgatctaaagggcaaacgaaagatcctgacatgaaacgtttaattctcattttctccaaattttattttttatgtgaagtagataaattagtatatatatatatataccaaactagtgtgttatgttatggcaaatgttatatcaattcgaaggttccgctattgcaatattcattaattttttcataccaatactatttttctttctcttttaccctcctttttaataaataaaagaaattaaggatgattagtaaggaagtcgcctaccaagagattcacctaccacggtacagt

SEQ ID NO: 59790 - DNA, 174 bp, Arabidopsis thaliana landsberg
cccccacagaatctcacaggggggggttagatcaataaaccaccagattccatatcctgatcattgtctatccacacaccattatatgagctctcacctagatcggtattgcaagtcacacgtctacctacgtgactaaatatagccaaacttcccatgtgcggcagaaaaaaa

SEQ ID NO: 59791 - DNA, 1445 bp, Arabidopsis thaliana landsberg
ataagaatgggatatagtaacatcagtcgtttggctctctctaccaacgggaaaacctggtctaaccattgtatggcgaccatttacaggtaaacttggtgttgtttcccttgtgggcgacggaaggctgtctgcatcatgatccttatgaaggtctagaagaggcagcataggcaacctactccttaagtaggcggctcctcgatgtgtacttgctgaggtcagcctttttgcaggagaagaattccattactcggctgagtcatttgattaacattctcttcactgctggttccagcaaaaactgcaatagcagaacggcttaaatcctgattcatggtctctatctgcaaaaccaagacatgtacttatgtaagacgagaaggcactcatcccaatgtttggaacagtggaaaagattttgacttgtgctacttcaacaggtaaaccaaaggaaacgcacctcatttttctggttgaatgagagaaattgggaaaaatggtcatttacaagagtcagcaatctgcacaagaaaaaccaaaaataatgtgagcaatcaaaggactccaagaagcatctttaatcaaaggctggcacagtaaaaacacagattcacaacaaccttgacatagtctccttattacgctccttggaaatattgttcatcgagcaaaacacctgaaagataatagattagttacataaaaccggaaacgtaacagaagattgagggaagggatcttgagtggcacatacatagttaatggtttgaagagaagcaaatgacaattgaactaaagtatccctcttcggaaaatcatcattatctgaaaccagctctcgcaaagactctaacgcccccaatattctggaacaaactccttcaaatccgctgaaacgaaacagaacaaaacatgaaaagaaaaaaaaatcaaacttcactcatcaaactctgacagatgttttaatttttttcatcatcatcatctgatctctccattctcaggatagtcttacgtctgtgcttctaccaacgaagtactctccaaaaccccacgaattagtttcactttcttctccaaatctctctcctttagaattcgatcatcttcaactttatcagcacttatcaacacaacagattcagtatccttctcaaccaaattgtcatcagaagcattgtcgaccaaatcaatttcaccttcctccaactcaccttcttctttctcatcatcactatcttcaatcacaatcttatcactctctcttggttcataatccattaccaaaccttcattaaaaggtttgttctgcacagctcgagcccaagctaaattagataaacccgaattcgcatatggacggtaagcaggatactgagaaatcaactcctccattgtccaaaccctagagttgccattagaaccaccaccacctccgcctc

SEQ ID NO: 59792 - DNA, 1177 bp, Arabidopsis thaliana landsberg
  unsure (1)..(1177): unsure at all n locations
ccggattatttaacttgttggtagatagagtgagccagacatgtgtatttatgaagcttttacgtatagtgtattcatacaagttattttcgcatacgtgttatagtatttcatatgcattaatgagctttcatctacatttttttttgttaagcttttcatctacattaatagttaagagtaaaatatactgtcttgttctttctagacaagatataggagacattgagacaatattataaagaggcacatgtttttactttcatttgaggtttgggaacttaataaaaatgctcgagtaaatgacgatcgtcatgtctccatcttttttcttttcttacatcattacaacattttgtaacttggctaagaattaaaatgcttgatccaaatgcctccaccacttacattaggcacttaacctacgttgattttctttatatcagctaaattgaatcaatgaagtatatattttaaaaatatgttttttaaacagctaagtacctaacctgcaagatttattagcagaataaatcagtgacatgtatattaatactatactccaataatcacaatcaaaaataaaatcgcaatcttacctgtctatttaggaaaacagaattaaaaaagaactttgtcagaatgagaaaaagaaacaaaattagaaaataaagaagtaattcggatatataaagaaatgggccatttattttctatatataaaaaatacatacagagatgacacaacactgatagcagaacaaacacttttggatcttcttcttcttcttctctctcaatactcacaaatcctccattttctctgagtttagtttcttcttcagacactaagattcaagtcctctctttggtcggagaagatgcaggtagtctcgagcttcgattttcagtcttcgccgttctcacacggcgccggagagattctcatttctccggtagaccaccgagagttatcctcacacggtgacgcgcttgaaggcgcgtgtgatgactcgactagattggcggcggtgaaagtacagaaggtctacaggagttatcgtacgcggcgtagattagcagactctgtcgttgtcgccgnagagctctggtaattatttataaccttttcaactaaaacactgtaattagatatttaatggagaggttatgtttt

SEQ ID NO: 59793 - DNA, 900 bp, Arabidopsis thaliana landsberg
gcctcctctacaatctcaccgttctgcactttcatcttctcctctgccaccacctttacctccaaagaaattgttagctacaactaatcctccacctccaccaccaccacctttgcattctaattctcgaatgggagcccccacaagttctttggtgttgaaatctcctcctgttcctcctccacctgcccctgcaccattgtctcgttctcataatggaaatattcctccagtccctggaccaccattgggtttaaaggggcgtgggattttacagaatcttaaaggtcagggtcaaacgagaaaggccaacttgaaaccgtatcattggttaaagcttactagggcagtgcaaggaagtttatgggctgaagcgcagaaatctgatgaagctgcaacgtatgattaatatctccaatactaattttatacagttttgtgattttctttattatgctaattgcagcattgtgtcttttgaattccagtgctccagattttgacatctctgagcttgagaaactcttctcagcagtgaatcttagctctgacagtgaaaacaatggtgggaaatcaggtcgacgtgcccgacctaaagttgagaaagtgcagctggtaattgattgcaatgaacattctactgttccctaatttcttaagtcttttaatttgcgaagtttcacagcatgaaattaagatccattgacagttactctattttcgtcctctaactttgtctattagttttgcagattgagctcagacgagcatacaactgtgagatcatgctctctaaagttaaaatacctttgcctgatttgatggtacgcacacattccttttgcaagatattgctttgctagttcttgacttgttctcttaagctctactacttggtta

SEQ ID NO: 59794 - DNA, 1421 bp, Arabidopsis thaliana landsberg
ccgactctctttactaataatactttttatcttccttttctggtttatttttgcttctctctacacaataatggaggtcggtcttttcattattatgaactcccacgcttgtctgtccatcacgaagcctttcttctttcaccttttctctactgtctacaataaatgtacgccttgtttaccagtaaaataaataaattatggccacaccaaaagagataaaaaaggatttaagagttacaaaacatgtacataacataagagctttgttacatggttcgaaatggtagagtatcaccagtctttgagcagttctccggcaacatcccggtagctgactttctttttcttcactagaggaggaactacgtctgattctgcgcctgcgttcacagatgtattatcagtctcagcgtcgagttttcttttctctgaagactcacattcaccagaaacattagcctttctatattccccagtggttcggtttgatgtctctgtggttttttgactgggaatagggaacattttcattaacatagcttgtagtggatcctcatggatttgtaacttctctttcatatccatctccgtctttgcatttctagaatcttgtaaggcctcttcaactgctactgtgttgtctctttgctgtgattctgtgtacttcgctatgtcaggctctcgggtttcttcgttttccacagatctaccagctgcattaccctcttccgcatctgctgacacattgttattgccatctaattcatcattttcatcagactcatctcctcctatcttcgcagctttcttgcctctgcgtgatctctgtactctttgggtttgtcccacacgagactttcctctcttcgcacattttcctctgctagagtttctttgagcctcaccaaacgaatccgtctcttctgctatatcactgagtcttgttgaaaccttttcttcagaagcatcactttcctctgtttcatctccgcttatcttagacggctgcttgcctctgcgtctctgtactcgttgcagtgagtttgtagaagaccttccccttttaacagctcgagtatttgaccgtcctcttgaactcgtaattgcaattttagaggaagctggctctttggtttgagcactaccttgggaagctacttccgttgtatcatgttcggatttactgaagcaaacagatataaataatcattggaaactttttatattagcacgcccttaaatagatgagagactaaatttcatatcatttgtagatacggactcataaaaaagtggtgactcactctgattcttcagtatcagactcttccatatacttaggcctcagagtgtagacatcctcgcacagtttttcctctctttgcaagctttcctctaaccagtgcgagctaacaaca

SEQ ID NO: 59795 - DNA, 277 bp, Arabidopsis thaliana landsberg
cccatacgccataacagtggggggggttttagcttaccaggactagattcacatcccctgtttctaacctacacctcaccatacatgaacccatccttgtacctgtatctaagacaccaccgccaccagagcagaatccagtatttgtcgcgacccccgaatactggataccgcactgctgctctacggcggagaatactcccgcgccggttgatgtcatctgctaatcgcggaccgactttggcaatggagcaggtctgcgagagagtggcatatg

SEQ ID NO: 59796 - DNA, 1603 bp, Arabidopsis thaliana landsberg
gtcagtcaacttgagactccatcaatagtgaatcaatctaatgtaaaccaaaaatatagcaaaagactctaaccttctctttgataaagcaggggaatgtctatcacatctaggaaagcagagtatgtgagtcaacatgcacctcatagctgtaaaatatggttcatctgcaaggggaaactcatcaagcaaaggttagcttgggatattacacgtgtgtgtgtgtgtgtgtttatagtactaattgtagagttctaacataaactttcatttgtttaatagagaaagaagtttctacctcgggaatccatcagactcattctcagaattctctacttctgctgagaaaccaattagcaaaggaagaagaagggatgaggaagaggaacccgagtcacctaaagaacatccagtaagtagcaagattgtcataaagttagacaaaaccctatatataatttagtgtcaagattaccaattgagattcttgtcgtgtaaaaccaacagggttggatactagaacctgaggaatcaccaaagaaaggaaggaaggaaactatagagaaatcaaaaagcaatgagagcgatgaagacccacgtctcgaagatttcaagtgtcccatttcaatggttaggatatttgaagtatatatatatatatatatatttccttgattttcagctcttgaaacaaaactagacttgttccacatcatcaacgctgttgttcgatttcatatgtgatgttgtaggagataatgcgagatcctcatgtggctgctgatggtttcacctaccaggcagaggaattcacaaagtggctaaagtcaggaggtcgaacctctccaaagacaaacaagccgcttgagaatcacaatctcgttccaaatcacactcttcgtataatcataaaagattggctggagaagaacccaaattataaacgttgattcatctatctatatgagaaaaaacaagaaagtcaatgattatgttgtgatttttggaatttctttgtgaaataacaaataaaaccttcatgtatcttactacgaaatccatggagggtattaatgcgattctctatgcaatcaatctgtgtataaatttatcttttccattttcttgtcctccttacgaaaaagaacagagaaacagaagaaaaaagaaaccctaaatactccgtgcttattcagcacactgcaaatttacttaattgaccccgatgtttgtaagctttttggatcttaaataagaagagatctaggcgaagtaattctaatcgttcatactaatagcttcgtgacgtgtcgtaacctgaatcgttaaactccacgattatttctcgaggaaaaaacttttgctcagtagtctgttgacttcttcactggctccacctcatagaattgctcttcttcagctctccggctaattgaacggcggttgatcggacattattggtctgaaaatcggatatagaacaggtaaatttcgaaacgaaatttctcactatcaagccaagctctctacatgtatatattttttggttctacttctccgggacttcgtcaaagctttcccgtcactaaaccctaaaattatc

SEQ ID NO: 59797 - DNA, 925 bp, Arabidopsis thaliana landsberg
acatgtatctaatcaaaatctcttcaaaaacactttctttacatggaatatgaatccctccttcatgatcgtacccaagctcgtccgctacttcatccatcaaactcctaaattcaggatattgaagatacttggtcggtatcacaaacctttgcctctcttcgcgccccacatagaccgcaagatgtcctctcgggacaccgttttgatctctggctggtctgctaccgtccgataactcccccgagacaagacgatccttaatgttagtttcgtaccttctgtttcgtctgttctcctggtttgctagacgcacgatgaaacttagcgaaatcatttttgttgaatagaaagaaagatatcaaaaaaatcaagcggaatggtgtcttgagaaaagttcaaaaggaatcatttatatatctatcaatgtcaaaagactttgcatttgatagatcatagataacaacgataaagatcttatgatgaaagttgttatcttcatagaactttaaataaaaaacaagctaggttaatcaaaccctagttgttcttgtttcttatttttccttgtttgatttaaatgatctgtctgccttttatatgtctattgttttcgtggtcaacaagttattggaagaagactattattgggtaactcaaccaaagtacagccgtccgtaccgtacagttggtacgaggttattgttccatgaatccaattcacaaatttagaccaagactttcgcgttatcatcgattaaaaagcttttcatgtaaaagtagtatcatgaaccaaccatctctacatcgagttttattgaaattaactttgatatttttaaagtcgaatatcacattgttttgcaaatcattacatcgaacaagcttgttcaatggctgaaacagtttgcttcacatccagtcc

SEQ ID NO: 59798 - DNA, 1137 bp, Arabidopsis thaliana landsberg
aagagaaccacaaagatttaatggaagagggagggagggagagagaggaaaagagtgaagaagagctctctggttatgtaataacaatggcaagtgagtaggagagtactgtaataacgaagtctacttaaaaaaatgttctgttttttacttttaatgcggccgcctttgttataattatacatgttcaatgaaagagagagagagagagagcataaaagcaggaagctttttcttcatttctttttacctgccttctctatgattcccacatcatttagacctctctaattaaacttagtgtgttttcttttgtgggtttaccattttgatttgtaacttatgatgacacacataaatgttgggtatccagttttgattttgaacacaaattatattactatttgttacctttacactggtcactataccaaactttctagcattataatattttgattatacattaatacacaaaacacatagctaataataagtaacttttcttagagtttttagtgtatttatattgttttgttttgttggtaaatatctcagtgcacattgttctttctttcgataacatattttatcatttataaagattttcttattccctaaaagaaaagaaagaacagttaaacggaagagatgggagtgagagtgacagtgtaatataccgtcggcttgagccttgagccgagccattttgtgggaattaaaccttcttcacgcgtttaaagcaaacccccacgcgcgtcatcaagcccttgaccctacgcgccaatgttcttctacgcgtgcatccattgattctctgtgcactcgccatctctgcaccgtcggattgtcctacaatctacaatcatctttcctatcatcatcacttggtctaatttataataaaaattttgttaaatatttgttcacgacttttgcagtctttgattcgtcaaagagaatactattgtagttctttttagtgtcaaaaactgaattggatacaaaaagaacatttttattcagtgtcgtcatggttacgaatgtattatgtatgaaccatttttttgcataattacattaggaaaaagaacatactttattaatgggcttttagtgcgttttaacaaacacaga

SEQ ID NO: 59799 - DNA, 1517 bp, Arabidopsis thaliana landsberg
ggatgatgatttcgtgttttaactatcaatatttttcattcttcttctttgaattggcttatacgtatttaaagttctgtttcacttattgggtgaagtgagcttttggtttattactctaaccagtatatataaagtatgttaattatagcttgttaaatgatgctacacataatgacatatcttatcaaatataggtaataattgctcaattactcccaatctattaggagacatacatttggccaagacatatattagtatgtgttgtcattatcatccatgtggtaccatccatatttaaactcgcatgttgacaaacaacataaatatttacaacatttagttgtttttccgttttgatattaatcacttgagttgttacatatatattcgtgtatacttttgaagattcttgtttgacggtcttaggcaacattataaccttacattacttatttctttccgatcactgtttctccttcactccttttttcgattctttacaatattccacatattatagaacgattatacaatcagtacagatcaaaagggtacttttctttctatctttagttttatttaaacaaagcatctaacagtgtggtcatcaaaagttgcatatatattattgattcccctatatgattagttaactataaagtcttgttaactaatctaaatctcatttttcaacgtttaacattagggtaactaagtactagtggattttaaaagaatggagtcactggattgcatctcaacttttataaattaaaacttacagatttacaaaatcttctcatatttgataacaaaaaaaagagaaaacaaatcttctcagatctcgtcgttgatattcttatactctctattattttgtttctgtataaaatatgaaacttccatgtaccatcaaggtccctgaccagctagctagtcaatagtatagtaccaaccttctttttaaaattggtcctgaaacggtaacgaattaaaagtgtggaaaatgtgtgtttatcccggagcgtataaacaatacacatatttggtgtgtgtgtatatatacatctatctatctattgcattatttcaaatagacccatcgagtggcctgtatagtatggaaataaagatcctcactccatagttgaagataacataatcataacgttcccatcagtcatcaattcttacagaaattgcatagtattttcttctttgtttgtatgataacagtgcagtgaaattttttaagcagtatcatggattgtgaaaatcttataactttcatttaataataaagagttagaagttttatataattgaattccaatttattactctcttttaataaagtaaagttatttatgtctgcgaaattcatttaacgaatgtacgttccatcaaataattttagtttcggtttggattagtttattttgagaaaataccaaaagatcagaaggggatatttgttagatattttgccgaaatatctaattaggtcaaaa

SEQ ID NO: 59800 - DNA, 107 bp, Arabidopsis thaliana landsberg
cacacactgcactacatgggggggggttagatcttaaaaacaatagacccgttaccctcatttacctcttaacaggcactatacttagaggcacccctgactctatg

SEQ ID NO: 59801 - DNA, 1064 bp, Arabidopsis thaliana landsberg
  unsure (1)..(1064): unsure at all n locations
aatttatactatgtgatgagtcgagcatccgtcatataaacaaaactttatgcaaatcagaaatttcacatttatgcaatcgttttctccatgaatatacatacatacacacacattcgatttttaagatcacaccttatttagaaaagaaaacatcaagatcacaccttaaaatcattactgatattgttgtagagtgtaaaactttattcacacaccaaaaggaaaagaaaaaagaccttttttatataagaagttgaatccgttgctctttgaccactcgccgtttcggccgtggcttttccttgtacgttttccccccttgtgccgaagacgagggaggctttttcttgtcgattttggccacttgcggtgaaggcgacggtggaattttctttcctttttcgaccacttgtggccgagacgacgacggctttatcttgctgcaactgatgaaacaacacaagatacgaaacatcaccatcctttgtcaaatgtaaaactgaagtgatacgaatatatatgacaaagtgaccttttctaaatatcttgccgttgactttttatgtatgtagatatacttgcgggcatgagccacgttgcttatattgcaaacggacttccaagttgatcaaatggtttcgccaaccgaaactagctgagactttttgattaatcaaattgcttgtaaaagtctttgaatttttaatcatctatatctcctctgttgtcttggtccattttacataccataaaaaagattaagacagttgataagaaagaaacaaaagaaaagtattaacactgtttggcctttcttagtacggaagaaaagaattgtggtggactaccaagttgcagaaattgtatgaaatatgatcatcacattaaaactacggatatcttaatatatacaacctccaaagccactgccacatgttttgaaaagatatatatcagttggaaaatttgtaaaactgggtttgcatgataatttttgaaatatggcagatttgaatatatatatcctgaattnggatgagcatagataaaatcactagcta

SEQ ID NO: 59802 - DNA, 1134 bp, Arabidopsis thaliana landsberg
ggaacctgccaaatcttcgtcatgactcataaagacacggaattattgtttttttgcaatacatcacagtgtttgggggtacgggacatatacaatcagaaactgaatgtattgtctaaataaagctcgataagataacaatacctttatagctctgtctagaaacagtccctttggaattagatttgtataatttaacaagcgtctgacattttcaatatcactttcaatgctgttggcaacgccagggtactgaatcttcattgcaacttctaatccatctttagtaacagctctgtgcacctaaagcatcattacgaagaattaaggaaaaggattcaacacactcaaaaggacgacatatcacatgcattcttcaatcaaaatactaacttagtagttagtacctgaccaatactcgctgccgctagcggttcataatcaaaactagtcaacttggattgccaattggaacctaactcagcatccaaaactggattaagttgactccttggcatcacatcagcaccttgacgcacatattccagagcattcaagatctacaaaagaacctatcttcatgtcaaaaccaaccaaacagagaacactagttgagcaagattggtatataccggagcaggaacgagactctcgtcctgtatactcaacatttggccaactttaagagcagctccacgcatttcacacaatccaagagccaatctttcagcattttccttagacatcaaagacgataacgcaggctgattgtctggtgtcattggtgtcccatttaccatcctatacgtagattctttaacagctccccaagcaagagcagctcctaaattaaaaaaccttcacatttcacaaaatttcaacttgttaaaattgctaaagatcctatcaaacctaactaagcaacaagtgattgattcagatacccataagctcttgccatagaagttgaaggaaccttcctctctctaggtctccgtctcttcaccgaaggtactacctccgacggagatgatgcttccgttaccgtacctgattcaacagctctaacaacaataatctctcccgcttcaacgcctgaaaccttaatctcaccttctctatttaattctaact

SEQ ID NO: 59803 - DNA, 1427 bp, Arabidopsis thaliana landsberg
tccaatatcaaagtagtaccagtcatcatcaaatcacaaactttagtactttaagaagagaaaaataaaacaaaacgcgaacgggtttttaggaacttttgaaaacatatgtataaaaaaaaagaggtaacttggcttatcagctttcccagattttgctttcaggacactctgacaacaaatcttaagtacttaactatataatggactggaccacaacatttcccagaagaacacaaaactggtaatgattttagcaatcacttcataacatgtcattaaaaaagaactacaacaacatctttctgtttcgtttcgtgtaatgaacaatttgttacagaacattagaaaaaagagttgaggagaaaacaagattaccagactagaaaacagttgcaatatgatatgattcttcaaaaccaagaataaataacatggccaaaaaagcgagaatttctttctttttgtggttgtaattctttacagttttgaaatgtctttttttttcaattttcaaaagaggaagagagggagaagatatctaactttttcttcagcatttaatggaagaatacaaatttgaaaaactttttctagttccatgaaataagtgggctgctgtaagatatctaccacatattatttggtccaagcccattagtttagatatttcaagcccaatgagatatattttacattttattcatatttcacattaacatatttatttatctgaaaaaagaaaaatccaaatacaaaatgaaagccgaactatgatcaataatattaaatttttacaaataattaccattaaaatgcaatatattgtgatgggtgttgttgctatgtaagtaacaaagcagcgctaagtggataaatattgatacaaactgtaatgaattaagtatcgtctaataaacttttggaaatgttgtaagttgataatagttccaagtatacgtcattttctttagttcaagactttgaaatttgaatctcacatgttgttgtcactcatgaatcacgacctacgtttatacatatagaccatacattatcatttaatatcaaattattgtcgtaaaatctcatattttgtacatatatatactataatgttttaaatataatccccatgtcgttttataccattcgcattttcgtatatgctatagtgtctatatatacgcagaccaatggggcttacgtcctgatcaaggattctttgtcttggtgctatattttttttgtgatacttaaatttaagattttctggatcaatataaatgggactattttatgaaaaatttcatttaatttttcaaaatcttttaggttaggtaaaagaaaataggtaggtggtcctcctcctaatcttgaatacgatcatctattaaaatggtcccgtttaaccctacagccaacgc

SEQ ID NO: 59804 - DNA, 184 bp, Arabidopsis thaliana landsberg
tcaactagaaaagtagtggatatggatttcacttgaggaacaaaaatacaaaaatatgaaacttagaaagcacgagggatgtacgtattttgttgcatggggagatattgacaaagaccatcgagttgggttttgttaaatatagtaatattttatgttatgatttgacgtacgctctttaatt

SEQ ID NO: 59805 - DNA, 218 bp, Arabidopsis thaliana landsberg
ccaacacggcgcaacggggggggatgatttagcaaaaaagcaacagcccccccaagcacgcgggccacgcgcgaagcgcgaaagaccggggcacagcggggagaaggactcgctccctacgcagcgaacggcggacaacggaaaggtagcaagcccagaacaatgatcaacgccgccaggggaacgagcggaggcgcgcggcagaaggcagcatgaaa

SEQ ID NO: 59806 - DNA, 1619 bp, Arabidopsis thaliana landsberg
gcatcctggttttatgatttgatgatctctgtgccaatggtgatttttttttggttttgatcaaagctatgactgtgtaatgctgatggtgatgctttgggatgatctttgtaacgctccatgccattctaattgtgtaaattagtctcaagtttgttgctttgatcaatgaatgtggtgcattcatcaagtaggctttcgtcttactgaacttggttttgatgctgatggtgtgatgctctaggataatcacagaactctcacgccattgtaattgtgtaaaaaaactgatctttttgtttcagtctaattgtgttgtttaaatcaatgaatagggattttggtgtagcagggatacaagttttgtatgatggatgaatcaaatgagataatcttgcagaaatcaaagaggttgacatctgttgtctggaattactttgagagagtgagaaaggctgatgtgtgctatgctgtttgcattcagtgtaataaaaaactcagtggttcgagcaacagcggaacaactcatcttcggaaccatcttatgcggtgtctcaaaagaactaatcacgacatgtctcagttgctgacacctaaaagaaggaaaaaagagaatccagttactgttgctactatcaattttgatgacggtcaagcgaaagaagagtatcttagacctaagtttgatcaggaccaacgaagggacgaggtggttctaagccgaggaagtggtggaaggtttagtcaagaaaggagtcaggttgatcttgcacgtatgattattttgcacaattatccgttagccatggttgatcatgttggattcaaagtttttgctttttatctccagccgttgcttgaagctgtgccaaatagcacaattgaggattcatgtatggagatttacattagggagaagcagagagtgcagcacactttgaatcatttatacggtaaagtcaatctttcggtggagatgtggtcttcccgggataattctaactatgtgtgtttggcctctaattatatcgatgaggagtggaggctacataggaatgttctaaactttatcaccttggatccttctcatactgaagatatgctctcggaagtgatcatcagatgtttgattgaatggagtcttgagaacaagcttttcgctgttacgttcgacagtgtttctgttaatgaagagattgtcctgcgaattaaagaccatatgtctcagagcagccagatattaatcaacgggcagttatttgagttgaaatctgccgctcatcttctgaattctcttgtcgaagattgcttggaggctatgagagatgtgatccaaaagattcgaggaagtgtgagatatgtcaagagctcgcaatcaacacaagtaaggttcaacgaaattgctcaactcgccggaatcaactcccagaagatcttggttcttgattctattgttaacttgaactctacgttcgtgatgcttgaaaccgtattggagtacaagggtgcgttttgccatctgcgtgatcacgatcacagctttgattcatctctaaccgacgaggaggggggaatggacaagatccgttactggttatctaaaacttgtattcgatatt

SEQ ID NO: 59807 - DNA, 1167 bp, Arabidopsis thaliana landsberg
aattaccactaatttttcttgacatacattcaaatttcagaacagatatatagatatgtgtaaccatcaagacatgaggatactgatgatttcatctgaattcgtgtcttatcaagattgtagattctatgtcctttaagagtgtttctttactctgaagtcagaaacagagtaaaacaaaagaattggataaacttgtaggatgttatctttttcagaatctacaacattggaaccctaaagcaactggcttttgtttcttgggagacaagtcatctgattcaggcatcttagcaggactccccatccactctactcctaatctgcattaattttcaatcccaaattgtacaaattatcagaaacatttatttccaaacaaaaaatgttataaactcttttgttgtttttgaaactcacatgggaaatgcaaaagatccccttccttcatctgagtgactagacccgctagatttatcagaggcatcaatgtcttcttcttctttggttctctgcgacagtcaaagaccaatatataaataagaatgttaaattctcaaatactttgaagttgaaagatgttacgaagcattacttctgtaacatcactagagacatctttagttccttgacatgaagtgttatcgttctgatcttgttctgtccctttagtctccggcgagttattcttctctgttcctcctactccttggtctccatatataagctgttcttgaaaataaaagcattaagaactttgtagtttgctatgtttcaaactaaaaaggtcaaaactttttaaaacaattttgattttcggacaacgaaccttacgattcaccgtcctcggtgacttttccgaggacgattccgtctcttccttctcttgtttaccctctttaaccacatcgaaaccaccatcttcgcgatcgaagcagaagacaatgaatccagattcttctgagacagggggctgaggccagctcaagcgccggtgctgagaccccgacgtcgtcggagaaacgctactgcttcttagatgaagatgatgatgacgtgtacctggtgggcttaggctgagtttcctctctgatctcttcttcttagtacttttaatcttccccttaatccctttgaacgttagattattgttgtaagtagtgaatc

SEQ ID NO: 59808 - DNA, 1141 bp, Arabidopsis thaliana landsberg
  unsure (1)..(1141): unsure at all n locations
ctgtgttgcaaacatcttttgttaaacttttatggtttcttaacttgtttgtcaccattttcttcagccttcagcggtagaaactaaaatatacatagagtttatgtataaatcaaaaggctttatatcgtcaatgagctcatgcttaatgggctaatgccgtattgtccctttcataaggtccagtggcccattgaccggtttgattgtccgtccatatttacagagaaactatatacttttatgaatttatctaatatataagatctacatctaaaatacaactatctgattagttgtcagagaactcctggatctgtacaagcagattcacattcttcgtatagacacaatggttataggacttctttaacatggagaaacaataacctgctggaagtacacttagattctcctaggtcttgccattttcgtatttacacgcatttagtttctttctaggtgtaatcatacagatagtgtttagttaaaatcgtgaagtcagcccttaccatatgatatatatatacattgtctatcaaaatgtgtgagtataactttctttataatttttttcacaaaaatcattattcaattaccacttttagttttaaaataaaattgaatcttgaattgaaaactttcgaaatacacagatgtcctcatctagtagaaaggaatgcgttaaaaactatgaaacaaataaaaaatcattatgataaaacagtgattcaatgagttgtggtctcttctccatttggacagcgatagtgagacgacgaatacgatgaaaaataattttcttttctccgttttgttagttaaggagagggagagggagaagagaggacaaatggaagcagcttgcgtaccaaaagtgcgacacgtatgtaaagagtcggaaggagacgtacggtgtaagtcatctcgtcttcacaaatatgttttggttttatcttatgctttgtcttatcctacgtggccattaaatcgttccattcgtctaaaccataatattaaatcaaacaatcgtataatatcttatcaaccgtaaagatggtgtggtccgtttctctttaaggtntttggttggatattctagaacgtcacatgaattctnttttagattaccaaaaagtta

SEQ ID NO: 59809 - DNA, 135 bp, Arabidopsis thaliana landsberg
cccctacggcatcaccgggggggggggtagatcttgaaaacattagccctgtctcgcttacggctatcgttcgagccaccacacctacaggcatcccgggcgctatcacttgaagtgctcgctctgtgagtcttg

SEQ ID NO: 59810 - DNA, 363 bp, Arabidopsis thaliana landsberg
gatgttttgtgatacgtgacatacctgacctctaaactcacatccaatgttctcgaccggtaaacaccagctcctagtacagctaagagctaacaatctcttggtggctgttcccttgctccacttacatagttatatgtctctacgttcaagcttagccgtcgttggttcaacaatctttgtcatgagtgcttgtctgtattgctcatggactgtccatctaacacgtggcgcctctctggtaaaaacatgccaagacctctggtttcccataaggctgacatccttgacgacggaaagatatatgtagtcggaggagagggaagggttttttgatgttttgacatcggaaaagtcaattta

SEQ ID NO: 59811 - DNA, 1238 bp, Arabidopsis thaliana landsberg
cttttcgtaagccattgtgggatattatcgcctatatggtatctaatgtgccattgccgactcccggaaaagacagagtcttgtttgctgtcgagaattgcctgctctcggtggaagcacctccagaggatagtcttcctcaggcagatgtatgacttgtggttttgtctccttaatctgttttgaatacctttccttggctactttttagtatcaacgttggagatttccaatttcctgacaactacaagggcgactgttccctgacttctttcaactttttccaataaacttatgtaacgtttggcatgttttactgaatgcagatatctctccagcctcttgtacaatgcttggatgtcgacaacttgattaagctgtttacatctgtactagttgaaaggaggattttgattcgatccaacaagtatgtttctctatgtagagacattatgagtttaagatacattttctaaacagttactatttcatactatctctatttaatcaccacactaattttgcctcatcgtgaatctcaataggtattcgcttttgactctggtgtctgaatccatatgtcatttgatttatccttttcgatggctggtatgtcatagaacactgatgagatctcagtttatcacttaaacaaatatgaactcatttgtaagcatgctaacccatgcatttctactgactaaaatatttcttctaatctttattatttgttttgttgtatgtttctgaagcaagtctacattccattactattttttagtggagtagactacattgatgcaccaacaccatatatgatgggtctccactctgatgtcgatacatccaatcttgctatggatggcgtgagtctaaatttacgtcatacttatcctctttaaaatttgggcaaccttatattggtctaaaaacattgccatttctaggttgtagtggtggatcttgacataaaccaaattactacttctgaagagatacctcagataccagagcctgagttcagcactttgcgaaacgatatcttgaaactactgcaccctaatgttgtagcgattgatcagttgaagggctttggtcattccgttgagcagtgccctataagccttagcaaaccttggggagaggatcatgacctttaactcaggtgactctaggaaaccttgtcttgtgattgcctacaatttattatctttttccatgggaactgcttgggtctc

SEQ ID NO: 59812 - DNA, 405 bp, Arabidopsis thaliana landsberg
cgacgatatttacggaggcgcatcagctataggatgattataagtggagatgcgctgtgttttagccctctcattgaaggtcctcatggtctgtgcttgaacctcgaggctctgactctgtcgaacaattggatgctgagaacttgtagctgcgcgactcacttgattagcaagatcaagagatagaccctacatcctgctgctcacacgccgagagactttgccattcctcaatccacctccgtagatccccatagtcatctatcaggggctcgcaatgcgcagaatatgaataactgatgccactactcacgtcactagacgacctgtatgatgccaccacctctgattctccaaagctttcgtctgccaaagacacaggcaaaaccagaatagggtagtgct

SEQ ID NO: 59813 - DNA, 172 bp, Arabidopsis thaliana landsberg
cccttcctgcatcacatggggggggggtagattttaaaaacactagatctgttcctcttccatataacatttgatgcatcaaaccaacagacatccgcagctcaatatcctgcagtactcatactcgtattcccacgatcgtcgataaagtaatcgcagtccacttgatact

SEQ ID NO: 59814 - DNA, 538 bp, Arabidopsis thaliana landsberg
  unsure (1)..(538): unsure at all n locations
gcgagttggcctcccctacgtaaaactcttgtaaatgctatgtctccacttcactccatccttttattgtcggtcacaattttgaattcagaatctcactatctcttttcttcatatacaccgaaatataaacgcagaaatcccaaaaattacgaattattaggcggtaaaaactatcggtacggttcactaatacaaggcttaagactatagttggtaatctttaagtttttattcaaaaatggaaccattttcatgagtattaagtctcattgttccaaatggtcagtgtatttcttcatgttttggtttcgatcggctatagttggcgcaatcgttagttttttatatagaaaaacatctggaattgtttctgtgatcctcattctttgaaagattcttaattactattagcaattacatttgaatgaaattcttggtatcactntgtggatagaaggataatcaataattattggccattcaataattaaaaacatactcgttctggtttaatataggtggaggttaaggtttt

SEQ ID NO: 59815 - DNA, 1021 bp, Arabidopsis thaliana landsberg
tgagggtggtctatatttgtgggtctgatggtcttagttcttctagtatgtcgtattttctacttcttgttgcagaaaatggtactgtgatcctttaggacatgtctttgtctcttgaatgctaatatcaggtgaaattttctttttttttgcagtattattgttgagattatgtcaaattactggcaaacaaacaagtagtaacaagttttaagatatgaaaaagaatttgtctttggttacaaacaaaagaatctagcctcatctcttatatcatttggctactactgtatattaacaatacatgtatctctctgaccacaaacacaaaaattaaagtaactgatacagaacaaactttctaatccacagcttttgtagagattctttccttttgttcaccaaaacaacttctgaaccttcttcaagtcttgatccaatctacagacaatggagagcaatggcgtgtagagaaaagcgaaacacactcaagataatacttcaactggcggctttatgttttaaaccgtctaaacccgaaccagatctcatagtgattaaacagcaagctatcatgtgtttgttttccaagatactcaagtcctaaacttgctagcttctgagaacacttgtcttgtcctaaccgtgaacaaaactttacgttatgtgacacgaagattctcccgtcgtaaggttttaacctgtctactaatctttcgagtccagtccacacgagtttatcaggcatgtggagaaagactgcacttgcgtatatcagatcataggctgtatctgaaccaaacttgctgaattccatatcatcgcctctgactataagaggtcgtttatgtagaagtccttgtgatggaagctcgtacctcaaagcagccattagagaaagcttgttcttttcaaggcagtgaaaatgttggggactaagatagcgaatgaaatgcaaacccacgcgtaacgtgccacatccaatttttagaacacgagagtttggtttaagactggatga

SEQ ID NO: 59816 - DNA, 1253 bp, Arabidopsis thaliana landsberg
  unsure (1)..(1253): unsure at all n locations
caactttgttgatttgtcgggatttggtttttaaccaaaaacttggatgacaaaaaagaacagtaaggggcaaaaagcaaaatgtataaacaatgtcttctctcctgcttcctcttcttctgcttcttcataccacaactatctttctcttgtccacaagatcaaagacaatcccttctcgagttcaagaacttgctgattcacaacatcaaggacaactacacagcctttgaagaattagggacatggaggccaaactcagattgctgcaaatggctacgcgtgacatgtaacgctagttcgccttccaaagaagtgatagacctgaatctattcttgctcaccccccctggcttagttagttcaagcattttgagaccgattctgcgtataaactctcttgttgggcttgatgtctcatttaacaacatacaaggagagattcctggagatgcgtttgtgaacttgaccagcttgatttctcttgacatgtgttgtaatagatttaacggctcaattcctcatgaattgttctccttgacaaatcttcagcgtcttgatttaagcaggaatgttattggcggtacgttgagtggtgacatcaaagagctcgagaatctgcaggaactgatcttagatgagaatctcattggaggagcgattcctccagaaataagttaactagaaaaacaaattctcaaatattaaactttatattcttgtgggtgttaaaatgtcctaccttttaaaatgtgcnaaggtagtcttgtcgaactactgacgctgaccttgaggcagaacatgttcaatggttccataccgtcgtctgtatcacggttaacgaagctcaaaacgatagatcttcagaacaatttcttgtcttctaagattccagatgatattggaaacttggtcaatctatcaactctgtccttgagcatgaacaagttgtcgggtggaattccattgtcgattcataatctgaaaaatcttgaaacccttcagcttgagaataacaatggcttgtcaggtgagattcccgcagcttggttgtttggtcttcagaagctgaaggtactacggcttgaaggaaacaacaaactccaatggaacaataatggttatgtctttccacagtttaagttaacacatctgtcacttagatcttgtggcttagaagggaatattccggattggctcaagaatcaaacaactcttgtttacttggatttgagcattaacagactcgaagg

SEQ ID NO: 59817 - DNA, 326 bp, Arabidopsis thaliana landsberg
  unsure (1)..(326): unsure at all n locations
ttcaaatcatgaacaaacgaacaggcgcggggggcatgattattatattaccaccatcaataaaccattgtatgtgaaatggctgtggatgctnnnnnnnnnnnnnnnnnnnnnnnnnnnnnnnnnnnnnnnnnnnnngaatgctacaactgccgctgccaaaaatgatactaattgaccgctcttgcacaacaccactagtatggaacaaaatagcgtacttattctattttagcaaagcaccctgagtgctaagaacacgctgcacaccaagactactatacctatcatcgtggcccgggtggacatgtaccttcatctgagct

SEQ ID NO: 59818 - DNA, 486 bp, Arabidopsis thaliana landsberg
  unsure (1)..(486): unsure at all n locations
tggcatgcgcgcagcggtggcagcgagacgaaacaagatcgacatagggtctgctgttttgtggggaagagaggaggaggttggggctgtccacgggaaaggggctcggcctacagccaccatggctgggcgctgcggcgtcgagcagatccctgcgcgctcacgcccttggagtagggggctggacaaccatgggagagagggcagagctgctgcgttccagggatccaagcgccagggggtgagctcgggcttgagctatggagcagggagggcgctgcttggggggctcggctgggggagttcggctgtgggatttttctgggcgccatggctgccagcggccgagagcagagagctcgccgggagaaacacagcaggggcgctgcgcagagaanggcgcaaggatttgcggccatggacgngaggtttgcaggggcgccatggacgacaacgagagaatgtncgcgggaatgggagctgctt

SEQ ID NO: 59819 - DNA, 1035 bp, Arabidopsis thaliana landsberg
tgtttgctatcatctatggtctccttgctatatttctcggtttattcctcctcacattaggaagcagctgttctgtgcctttgttttggtgctacgagatttcttcatggggtttagtaatcttgtatgctggaactgctttctcccttagaagaagagctgctttaactattgacgaaggagagtttgggaacagaaatgatcagggcttggagatgcttgaagctaatccgttggaattcacaccagacgttgaaagacgagtgaacgaggggtttaaagcatggatgggaccatctttattatcatctgatgaagaagaagacgaacctgacttttacaatgaagtgccgaatgtaactcatactctttcaagcaggcaaagatcttgattcttgcgaagaagaatttggtatgacactaatgcaaacctccaaagatgattgcttcagagattgggctcaccaaattgttccctcagtgattctcgggttatttcatgtctctgctttctgctgatgttgtttatggacggatcatgagaagattttgatccggaagataaatcagaacggttaggactgttgcggttgtagatatacacatagtggatcaatcaagattgtgtttggttctgtcttttgagcagttcatggtcggttttgatcgtttacattgttcattgtaggaatcttgggtttgtagtataggcctaacaatacattttgattgtacaataacctttagatcaacagtaatagcatcataaaaggattagtattaacttccaagtcctataaaagaagaatctgtgtctacacaatatcataatacaaactttgctggtttttaatggttttatgaatcagtatcatacctgaacattgtgaaaaattcttagcatttaacagaacaagaagaaaatcacttggttcatcatgaggacgagaacttttggagttacaagttaattacttgagaacaagctactttttcgctatttaatcaatggtatgatgtccagaggtgagagat

SEQ ID NO: 59820 - DNA, 400 bp, Arabidopsis thaliana landsberg
gagccgcgcgaggcggctctagaggttcaacagggaggttcgacaaccgaggaggtcgccatccaaagcaatctggacttccccaactctgcgccggaatggtcaacagggggttaattcggacaggaattttcgaccggccgcgttaagtgacgcgcaaggttcaggaggtttgccacgatgacgacgcccagcgagatgacgatcattgccctcgacggccatggcggccccgaggtgctcaagccccgaacagctcccgtgccccgaccgggggagggcgaggttttgatcgcggtgcgggcggcgggcgtcaaccggccggacgtcctccagcgcatgggcgcctatcccgcgccgaagggcgcgccggactggccgggtcttgaggtcgcgggca

SEQ ID NO: 59821 - DNA, 1234 bp, Arabidopsis thaliana landsberg
ggattttacttttgttaagagtttattttcgaaatattttacattaaaaagtaatagtaataattccacaaatgacaagtatcaactctcaaaactattccattttcgtgtttgtttccaaaattaatactatatacttggcaaaatttcctatacttttaagaagactttatcagttatttccattgtttctttttgtgggtcaaaaattcaattgtttctaaaatattaaaagctaactaaatgatggtagaagtaattttgatccaaaatataacaatgtttttccggttttgataaatttggactatttgtctattaggcaaaatagaagtttgatcaaatttaatcaagaccatatgtgtgtgcctctttctatatctatcgcttttcgattgttgattgtcttcttttacattacatggatattttcccctccctaatcatttaaacaggcagtgataatgatggtatgtttgatttttgaccttaaaaaactcaaatcaacaaacattatttatgtcaattggcaaacaggtactttttaggacttaattttatgatgtactagtagcagctaattaaatgatacacacaatcgagattgtaataaactacagcactccctctacaaaatacaatcagtgaagagagttaacctagggacggagatacaaactacccttatgaatctttcaatcattcaaaaatgtttcaaaatcaaatgacaacgtactagcatagtcttgatttcccggttcaggtaacggactaacagggccggttgggttaggattttccattagccatttctcaaattccgatagtttggtctccaagacgttttcattaatccctggttgctgttgtaccgtagctgtatgcgaatcttcagcagtaagaggagctttggacggagcaaaccgatccacatttgtctgaaactgacgatttccactaccacgtatgttctggtctgcatgtcgagtgaacacgttgctctgagaaccaggtagcgctgtgcaatgatcacgagcattgcgttgttgagtgtatgtttccgggtttaatgtaggtgccactgtggaagagctatggtgactggattgtgaaacttgagcattgttaaatcggatgctgataccatttcccgcagaagaggctactcgggatcgtaggctaaacctataagaacttctatccctttggatcacgctgttgcgaacagtgctta

SEQ ID NO: 59822 - DNA, 431 bp, Arabidopsis thaliana landsberg
  unsure (1)..(431): unsure at all n locations
gnnnnnnnnnnnnnnnnnnnnnnnnnnnnnnnnnnnnnnnnnnnnnnnnnnnnnnnnnnnnnnnnnnnnnnnnnnnnnnnnnnnnnnnnnnnnnnnnnnnnnnnnnnnnnnnnnnnnnnnnnnnnnnnnnnnnnnnnnnnnnnnannnnnnnnnnnnnnnnnnnnnnnnnnnnnnnnnnnnnnnnnnnnnnnnnnnnnnnnnnnnnnnnnnnnnnnnnnnnnnnnnnnnnnnnnnnnnnnnnnnnnnnnnnnnnnnnnnnnnnnnnnnnnnnnnnnnnnnnnnnnttttaaaattttatattattttattattctttttttctttttcatttttttttttttctttcttatcttttcttttttttaattacctgtatttattattttttttttatttctttttttcttttttttttttttttttttttttt

SEQ ID NO: 59823 - DNA, 104 bp, Arabidopsis thaliana landsberg
gggtgaacagatgatcattggcattatagactcaggtatatatatttttacatttcttaagtttctgttcttatatatgccttaccgtctcactgactaaactt

SEQ ID NO: 59824 - DNA, 835 bp, Arabidopsis thaliana landsberg
tacagtatcataatctatcatagagggttaatcatggaccatagcttcgtctcacataccagaaatgtgatgactttgttttaatgaaatggaactcaagacagaatcttccaaacttcttttccaacaagataaatcgcctctaaaccagtacaatatgtttaaaaatattgttaaattacagtcttagtagattaaaaaaatgattttaattcaactttattgtattgaaaaatgaaaacaatgttgttgaagataaatatttagcattattaagacgaatctagatatgtactctagaaacttttagacgatttgctagcattattctcaactatatatcctggtgttctcgaaaagttggcaagaattcacaagtagaaactgtttacgaagctgattaagtgcattaattaggtcagcattctaaaagttagggttattcacattttttcttcttcaatggaattctgtttctccatgagattgaacttttgtctccttcacatgaattccaccaagtcttagtagtttgaattatttacatttgaaccactctttttatttattttaaaccgttggttagtcactctcattaaaaaggagagacacatgagtatgagttgattgttgacttccagttctttcttggttcctcagtagcaccatctcttctctttttatctttttttactgggatcaacataaacaatttactatatataagttatattctgtatatagagaaacacattgttgtataaacaaaactaatgtcgttcaatcagaccttgttaaaagaacattcaatcgccccgtaactggtaaatgaaag

SEQ ID NO: 59825 - DNA, 461 bp, Arabidopsis thaliana landsberg
gctatatacttattactgatgaaattgaaccgttggactatatttatatccatctacgttattttttccattactattgattttgttattggcccaagtagaatcaaaagaatggttttttgatgtcataatttgcaatatagaaatgggagggatatgtattgcataataagataaagataaacctttatcgagacataagattgtatgtagatattgaaaatgatagggtgatcaatggattttaaaaagtttaaacaattttgctactaataaataagagattgatatataacatggagaaatggaccttcgcctgaaattaaaacaaagtctgggtttcattcatgtttcagtgagacactgcgccaacatcaccacaacaagtcttacacaaggaacgtgtgcctcacgtgctcttctctttctctctgcagctacgtggactgtcttcgctcccc

SEQ ID NO: 59826 - DNA, 176 bp, Arabidopsis thaliana landsberg
cttacttttaattcagatccaactagccaaactggggggtgagggattactaagatttcgaacatcaaacacaccaaatagcattaaccaactgagtcacagatacttagcattattgtatacattgttctatgatgatcaacagacatgtttgacacttctcttcctattccaaa

SEQ ID NO: 59827 - DNA, 231 bp, Arabidopsis thaliana landsberg
taaaatcaatttcaaaccgctaccttaacttaacatctatgcttaaaaataaccacaatcaacttccttaaaaacatttgaccaaataaaaacaatactatcatgctttacattacaccacacaaactcaaaaacccgtcacctaatcaacatcctactcaaaacacaaaaaagttaaactaggccgacctctaaaaaaagccatctcctaccaatcataacaaataaaga

SEQ ID NO: 59828 - DNA, 322 bp, Arabidopsis thaliana landsberg
ttatgttttcagatcatacagaataaaaaaaggtgagatttaattcattaatacctacgaacccccccccaagaacacaattttaaaactttacatcttcaacaaaagaatacctgtctcgataatcctcctcctagaaggacctatcctaaaaaaacattaaattggtcccaaaaagcgtcaaacaccactagaaatcgaacactgactcaccacaattgactatctacgagtgaaattctttcacaattcatacactatctttctcttaaatccgaacaaagctaaaaacaatcgaaataacgtacacaaataaataccg

SEQ ID NO: 59829 - DNA, 948 bp, Arabidopsis thaliana landsberg
gaacttactgatagaatcagtcttaggaagtccatcaagcatttcatcatcaacctcaataaagctcactcccactgtgtcagcgatctttggttcagcttctggttcttcagtaggaatagatgatgagccaccaagtccctgcaaccagagattcaatcaaagttaaacaattcagcgcaaaacatgtgagtaagtaccaacactgcagatggtacaacatacataatattcctctgcgtattcataattcatcgccttctccaaaagcagaactcgctttttcacaaactcaacaagtcgtctctgcatgtgccgataatagaacatcgagtttacttgagccccatcagcagaagcattattgttcccagtaataacgcttccaggattctggttagtctgtgctcccggattagagcccccactaccattctgcccctgcaaaccagcttgttcagcagcagacaaacttatgtgagggaaattcaattctttgcagataagctcttggatccccaactctttgtcatcaacaatagcttgccaccgtgcgtacccatgcctaaagattcaaatttccagagaaggaaaagaaaatgtgagcaagtaatggagaatgatgagaaaataaaaccattcggtaagaacagtggtgcagggttcatactttaaaacagcacgtatcattatcttgtcatgttcctccttccaaatttttccacttctcagtccggggaatctttcaagaatgcgagaggggaaaacaggtttccctggatgatcttctacaaatttcacctgtcgggccagagcaccaaaaaaacataagtaacccgggatccaaatcttagcgaggtttgaacatacattactgtattaaaaacttatgtacagagctaaactatagactagaagtaacatataccaaaaaaaaactcagatata

SEQ ID NO: 59830 - DNA, 1376 bp, Arabidopsis thaliana landsberg
  unsure (1)..(1376): unsure at all n locations
agttcaagtgtaaagttcattttctgccctcactatttttggtgaagtaaaaaaatggcgctcatgggaatttacacaccaaaagactcgactcacattttgtttctccatattgatatacaaacgtattttccgtcagtttacgtacgcagagtatacctcaaattaaaatgcttaaaatcagttctcataatccaaaactctataaactttttgacaaaaagtaaagaaataaaccgaaaatgttaagtataaatagcaccttattaatgtacatatatgtatacactacaagtgcaataaatgagagcatgcagagcatgtggctgcgcccaaaggccaaagttagtagaacatgtaaatgcattaaattgacaggttgggagacaaaaagattaatatggaagattaaaaaaatctttcaaatccataaagtaaacagtatttctcgagaaatgatgatgtaataagtaatattaatacaaaactcgaagctcgtaagttaattggtgattagttgcgtttcttaaggaaattgtttgctcaggaagaaggtgaggatgacaaatcagatgtgttttgggtaggaggcaagagtaatgatatttttatttgagttatacaatagtcgagtagatgtattaagtaaaaattgatctatgtcaaatttgttctttgatacataagagatcaaacaattacaatcttgtttagagtttatatatagtgtcggttttgaaatacacagttttaacttctaagcaaaataagaaacaactaagacccatataatttttacaaatcgcgaattcatattaaacattgcaactttaaatggtactagctagttcaaagattagagtttttagtcatttattgacgatactgaactataaacaccctaaaacctggaaaataaattgtcactgaaaattaaatgatcacgagatttcgaacagaagcaatattattctatccaaggcattatgtatctctctgagatattaagaatgacagctgaagccagtgaaaataagttgttcgttgggcctttcttgtagttcagttatttcacctcttcaatgctgttttgtcttcatatcaaaacatattaatatactatagactgtgtaaaaaaaaaaatcatatactatagactatatagtctctctctcttctcttgtgattaatactcgtaagttataagtatgaagcttcaatttaaaatgactttacatttctactgtggtacagctaagagaatagcatacttaatggttgatcatttgatcttgatagtttagtctttgatctgttggcagcaaatggtatcggactaaaaccgaatttaatctacaataattngctatcgattc

SEQ ID NO: 59831 - DNA, 476 bp, Arabidopsis thaliana landsberg
  unsure (1)..(476): unsure at all n locations
taactgcctagctcaaagctgtttttattaatgtatttttgcttaggagtaaatgccgtgggcattatctattcatgaacaaaaaaactcgggtaattatcttaatatatttaaaactagtggagttatggacgttaatatctcaatattataacggattgtgtgtacctaactagaaatgtatctaaaaattgacgatataaacagagtccacggtcacgattagtattattatgtttcttttcttatacacagaaactcggaccgaattgatggatctttgcaactaatcgcttatacattgtcgatacattgttaatgaaattataaaagtgtgaatataattttaatgttcaacaatgcggatacgctggatcacnnnnnnnnnnnnnnnnnnnnnnnnnnnnnggcgtcaagggctcgtgttataaaaatcatatatagtaatatgcttgatataccatcatttgtctata

SEQ ID NO: 59832 - DNA, 1224 bp, Arabidopsis thaliana landsberg
cgtaactgaaatgatatctcaataattgagccatatcgtaatattgcaagacaacgaatctgaagttgagcataaacaaacggaaagagaattgaactaataaaacctctatggtatcaggattaaaatttgtatcctaaccgtaaccaatatcagatcaaaccattcatatatatattatttattttgttttaaaataaaacaatatcatatctataattttggtataagaattaataacaaattcttatgcccaaaaaaaaacataaaagcatagatatgtccgattcgttggagctaaattattatctcgagaccaactgaccaattccaattctacgttaattatagtcatttataataaaatggttatgatattatttggtgctaaattagtagtttttttttttaagttatagacttaaagtgaaacacaaagcctagacggaaccttttgtgccattttaagaccaatatacagcatcattaatcttttaaaagtcaattaagttaacttccacgtcgttatgacagcgacagttaatggaaggtagccagagaagtcactgaagaagaaggtggttcttcaaaatcgagatcatattgatgagattaaattgtttgttgtgcagaggtattggcgcacaaagatcgagtgttaaattgtttagttgaataaaagttcgcaacattgcactacattttgatgtgtgctttaatttaaaggctacctctgctctgcatgcgaccattcaagttttcatgtattattccactccataattgacccccaaggccccaactgatgcaaaaacactaatatttggttacggctgatttcttcagtcatatatatgtgaaaaaccaattaatggtcttcacactcccatatagcaggttatctattagtgcccttaaccgaacccgatcgagattgattgaagtcatatcatctctatcaagtagttatcatcttcaggttccttgtgggttgtttgatagcataagtgggtgtttggtcgacagttgttatatatgggaagttaagaacatatatgttatgggtgcactcttaaaaagaattgtcgggcgtgccacatgctgtctcaacatgaagcgctttatcaagatggccaaagaggccttttacaatagacaaaccagttgtacatgttgaaatgcagatactgaaaagtttatcttgctgcagagatattggtacag

SEQ ID NO: 59833 - DNA, 336 bp, Arabidopsis thaliana landsberg
tacataatatagccatttttcattattgtcaaattttaaattttgttatacaatatatcaaattgaaaccctccaaatgatgagttcaactatatttttaaaattttcaaacataaatatacgtgattgtaaaaacaattataataaattgcaaaaataaactatattatatattattttggaatttataggattattttgcattttttggatatgaagggtaaaattacaaaaataagatatttgaaaaaaaatttgtataaaactttatttaaaactatactcttttttatagtatagcattttgggtttactctcaccttaaaaaaaataatg

SEQ ID NO: 59834 - DNA, 483 bp, Arabidopsis thaliana landsberg
catctgacagaacccaaaagattacaattcgtaagtaactaaagctttgtccaaaccagcgtatcatgtaattagcagagatctagagggtaccaaatgcaaaaatttcaaaagggtcacaaaaagattaaaaatttcagattgacctagaaggaagaattgagtttaccagaaagtggaacaacgctaagacgagaacagatagtaatgaatcgacaccaccgatcagtagagcaggtccgtaattaacgacgacaacggcgtagtatgtgaatccgatgatcccgataacaattaagatcatgatcgaacccaaggcgcgaagtgctgtgcagaacttgaacacgttccacgccattgtcggggttctttcaaaacacccggaacttgtttggtcggagaaaaaaatgaagcaaaccccaaattgaattgaggaataaagtttataaatttcgatgaaatcgagctgacaatttttttgtt

SEQ ID NO: 59835 - DNA, 680 bp, Arabidopsis thaliana landsberg
attcttcaattaacagctactttgtttgctttttgaaatattgaattgttttgttcgcaatcaaaatcacttttaaccattattcacaaggttttatctgcaataatataattaataaaaaaataatagtacagttgcaaattgttattttcttaaaatggagctgatcattttttcctagttgttatatgctacaaattgttattgtatagtaaaatatatataaattaatattagaactaaaaagtttctatttaaaaattagattttttagttagtaacatttttctagaactaattacaaataagaagacaataccaaaacttttcgatgcagtaaaaatattaggaacgaactctaacaaaaatcaatgcagattcaaaaaatgaaataaatatatatatatatatatatatatatcatattccattaaattttcttgtatgtaatatatatatatatgataaatttatataagtattaatttatcaaaataatggaattatatgtctatatataactaaactaaaataatatattaatgttttatcgaattaattgcatcaattttgtacactaatctaatttgagactataaatatttatagtaattattaatttattgaatattaatttataaaatattttgtatttaaaaatattattttattgattgcta

SEQ ID NO: 59836 - DNA, 535 bp, Arabidopsis thaliana landsberg
ttgtgaattactctggatatagtccaatcttgaccaacaaccttctggtctgaagcttcttgtaagtagcagagagagatttgaatatccatatgatgaagaacgcatccaatattgcagcaggaagaacgaaaaacagtcgagctttccctgagagatcactgacagcacccacattttccatcagctcaagaatttcagatgcaataaagaaggtgaccccaagcatgataacctttgatgtgaatcccccgagcgtaggtctcacaacaccgtagcccattgaaaccatcaagatgataatacgagcactcgtacgcttgatagaaccgaacgtgactgcccagatggtgatcacggttggcctgatcccagtctcattgaattcagcataatcaaaataccaaagagccatctcacacatccccagagttatcaccagagttaagcaattttgcaacggaagcacttctctccagaatctagcacactgtgaaaaccagaagatgccatgcaacacaaaagcaagcgacat

SEQ ID NO: 59837 - DNA, 501 bp, Arabidopsis thaliana landsberg
tgtatcacttactctaatttatttacttttcacttactctaattaaaatttgtatagttcatattgtggacggttacgaacaaaaataattatatttacattgaaaaatcctcttttatgcttcagtcttagcttcgttttttttagtttgattttcatcatcaattgaattttatctcaatgaactagttttgttagttcgtatgaaatcgcatttaacttgggttattggggaaacttctcctaaaaatggaacgtaagtaacatagtggaatgtaagaaaaataaaataatggagttaaggtttttacttaatcccttatttttatcatccacgaaatatttacatatgaaaagaagcatagaccaatcaacgattaggaccgtccgacattgtgtagtcgattagcgatttctagaatcactttccaattttaaaatagaagtaaatcgacgaaagtaaggagaaaaaaaaaaaaaaaaagagaaaacgtaaatcat

SEQ ID NO: 59838 - DNA, 801 bp, Arabidopsis thaliana landsberg
tcttccctcttctaaaataatttattgaattacttcagcttttctatcagagtgtcagaccctttgctaaaagaacacgtattgctttttatacagacactgacacgtcagttttccggttcggtttttttactagtttgtcggtttggtttgatttgagattttggacggacgagtttacaaatacgttatgagtgactatgtttgtaattgattcaaaatcatattatactgatattcttattctcctgcaatctgtagactttatcttctgtctaatttatgtgagagatgtctaagaaactgtagctacaaaactagaaaccttatctagcaaatgcaaaatagccatgattgtctaatttatcttctcctcttttgaaacttcaggagcattgaatttacagttctgctttagattccaagtcttgttctgtatcttcagagatgtcatttgatggaagaggattaggcttgtctgtagcaggagcagctactggctcgttgagttccacatcttcacccaagatttttgctgtgaattttcgtgcttcaagatcaagatcgggccattcggttacgattcttcgggcaccctgcagaagaacgccgcattataacaaacaacgctttgtgagtgttgtagatatgaggaaagccatcattttacctgaagctttggttcctttgtcatgggattattgcaaagatcgattgttctggccttggcttttgtggcgtaaccacaccaggattcacaccacaaccactcttggggaagtgaaaagatagttccagtaa

SEQ ID NO: 59839 - DNA, 481 bp, Arabidopsis thaliana landsberg
  unsure (1)..(481): unsure at all n locations
atacactaagtggtaaatggggtgtgcttgtgttgaagtattcaagtatggatgtgatcttacggataagttctagtggagaatggaacatttaaaaataaaattaaatagatgtcagattaaaagttttctatcagattgtagctcaacaacttcgaataataaaaccatgtccataaaaattagttgaatctatatcaaaatctttctcgaacacttttagtttcctctttaatattttctttgtttttgtgtaatcaagtctaattctctaaaagtcatatattcaatgccactagttcaaagtttatatttgccaattttaaaatttatgtttttgagcatcacttgtaactactagtaatgcaatctttaagcacatattcaatttctgtcatattttggtttctctgtgagaatngtattcatgtcacttacatttacatatatttttgacaatcgtaggtcggcgacatatatt

SEQ ID NO: 59840 - DNA, 530 bp, Arabidopsis thaliana landsberg
  unsure (1)..(530): unsure at all n locations
cgcccagaaatagtaccgaggagcggggctcacattcacttctctctcctctttgatgcgctctcacaggaccccgcatatggcgatgattaaccaactgtgatgagagggaaggttgcggggcacgtatatatatgcacgacgttgagagctccaacaggatgcgtgccaaccatcaatagatgatcacagcggaggattcgcctgctatttcgcgggggactgtttgtgcggcagcggaattcggcatgccccaacagaaaagcggataagggagggagaagaggttcctgacatccaggccccacacgtaagtgccaccgcgactaggtcccacacggcggtgacacacggcgcgcangcaggctgcgcgcgtgagagtagaaatgggccgggtgaagcagtttcggcccaattgctgagatgagagaattttctgcattctagtttatcttcagttttcaagttcaagttcaaacatgagtttcacactttattctaaatgtaacatccacaatatcagcatgagt

SEQ ID NO: 59841 - DNA, 1142 bp, Arabidopsis thaliana landsberg
taccttcgggaagccaacttcttttaggttttgaaatttcctggaggaataactgtagatccactggaacctgcacctgtctctggagtagcactggttctgtttagtgttactatcaaaacttcgatatcaacagtacaagataggctggatctgctaaatggtctatttgagcatatgttgtctttggagccatatgagagtgttcatttccaactcacaaataaacaaggatctaccatatcaccaccgctaacttttcaggtttatgttgctttcaccatgagaaaatatcttcatcagagattgaaccattttactcagatcattcaaacatcccgtgctaaaaatctcggtctagacgaggcagtttttggtgaagtcaaggatataactttctcaacatacctggatggcaaagttcctgattctgatttggaattggcaccagcgccaactccttgcttatcttctctgtgttgagccttactatgaagcttcttcttaccaaacttggcaaagcagtttctctttacctattttaggcacctaataattcttttggcaaggacgtattattaatgtttcttgtctaatatattagagtaggttttggcaggatctagttagctttagaactaattgtctcatcgagtttgtatgaaacaaagttttttattctaatgagatgcagcttgagtttactagttacttctttgatttagttgcttaaagtaatctattaatacaacagaaaatttcagattttgcatattgagtttatatagcctccctatggtttcacaaatggaatatcaccgttttctttgaatcgattaagctcttcctctagcatcttaattacttcatctttctctgcaagagtctccagcaatgttctattctctttactaagagcttgaaactggctgatgattccatctatctgcacttcaatggcttcatcactaagttcaaatgcagtctccacaacccgcagaacccgccacaagctcaccaccacgatgaacccggttcctttcttctcaagaagaacctggagaatcagagctacaatcgcaagagtaccatccattacacatccaggttgtttgaagaatgacttccccatagcaacaacc

SEQ ID NO: 59842 - DNA, 484 bp, Arabidopsis thaliana landsberg
gacgtgaaccaggcccgttctctatgtggatacttaaggttccaccctcagcttttgggtttcaggcagtttatcccacccagactctctgtcatggcctattgctgctccaggcagtcctcttggaccagatactcattaaaataacccctggcccactcacgcacccacctagcccatgtgtgttagacactcattactcactctcaggcagcacctggccatatgcgtggatatttgaagctgaaaccccacgtaacgcacattgatggaaccacgtgtacctcttaatgcacccgtcacctagccggagatgagaaagaccattcctctgtatcttgctgatggaaataggaatgggatatggatagctcaaatacgactacaatggaaaaatttttctcttgcccaattatttaatcttctcttccaaacatcagatcctactctttgatagatggtcattggaataattgctttctta

SEQ ID NO: 59843 - DNA, 998 bp, Arabidopsis thaliana landsberg
tttatttatgataatcataaaaagtaatatcgttcgaggtgtgataataaattatcttaatatatacaaaaccatatgtttgaggtgttgatgacatttttagttaatcaaaatttgtgttactgtcacggggtcatatataaggtttatgtggacctcatttgtaaaagaattacttaaaagtgggctttcacaaaaacataggacatgtttttagacttttaacctttaaaggtccattggaatttttttgttggcaactcctatattagaacttagtcctaaatgattatagtcgtcacatacaaatattggtgtttagatatgacatgaatcagacaaatgaaatactataataattgttggaaaattgttttagaagcagaattcggaccaagttctatctttaatttttttctgaaaatatatcgtctctttatcatcagatgttctacttttggttgatgactatttaccaccagtactataaggtttattgtttgtttaacatacgcgacctctgcattttgatagatagataaatatatgttagaattttctcacaatgacatagttatatttttaagaaattcatatataaattaaatatgaatttaaatatgtttcgtattattattaaaaagacataaaagttttggtccaaaaagtgtttaaattttgcaaagaggggatcacgtttcgcaatcgttcagcaaacctatacgaacacgtggcattctcgtcccgtgggctctacttgcgattgtagacgtgaacctagaaactacattggcccttgtttttcttaataattataatttaggtctcgtttgtttcaaaaccttcatccagatccatattgccgttaatttttctaatttctgttgatattgtgctcactagataataacttttccccaatatcgtttacaaattctttttatgttgaattggcaatcgtattacaaaaagaacctaaactgtatgctaaataaatt

SEQ ID NO: 59844 - DNA, 1060 bp, Arabidopsis thaliana landsberg
tctccttctgtttatcatgcatgggcttttgattaagatagacctctactaaaaccttgcaagtctccttacaaagaaaaagaaaaaagttataaaaaaaaaactctaggctattgggggtaaatagttttggtttggatgctaaatgctaaccggctaaagtgattcacggcaacggcaactcagtctattaggatttcagtgcaactaaaacaatgtattttagacttttagtttagttggaagcaaaccaaaatattgaacacctcatactgtcatacaaatacaatatacaaaagtactaaacattatcgtgattactagaacatgagttgtcttctcgttaatgattaaaaaagtttatcttaatacgtattcgtaaatgccctctggaagctgcaagagtcagatcatagtcctaggtaaatgtcatcactcatcatcggattctaacaacatgcccatcatcttcaaaacacaaaggagtggaagctaacaaacaacgcatcatcatttttttgtcctctttatatatcttctttcctatttattatctttttattgttttgtatataaaatccctaaattcccgttttatgtaacggacataataagccgcgtacggcgtatccggcaaatcggcccagctcgagccatcatcaatctacggaggagatccatctctctctctctccatatcgcaacaacactgctgaagatttcgggggttgtcgacggagctggaatctagctttttcttctccagatctctaaaccgattctcaccggttcgttttctaataatctttcacctacttcggatctgtttccctcgattatccaatgtgcatcgatggcgacttgttgttgttgtgtattgtgattgatgattgattgagaatgacgttattgttgctttcattttcatctttcgtatacgatccaagctcttttgtaattataattatgaagactaatgtcgtttccacaaccaatcaaaacagcgatatgtgtctcgaattcttgtttctcattgacatttatgatggcttatgatgga

SEQ ID NO: 59845 - DNA, 164 bp, Arabidopsis thaliana landsberg
gggggggggaacaataaatgttggactcttttttaatcccccggctaaagaaggaggagggggcgttttaaggggcatcaacggtcttttcccatctgcctggtagcaatccgaacccctgagaaagctacaccacttataccctacttcgccttatctgattt

SEQ ID NO: 59846 - DNA, 1582 bp, Arabidopsis thaliana landsberg
tactatttaaatcgggttgtttgaaatttggtgataggaaagtagtagatgatgttgatgttttattcttaaaataattgaaagattgagcacttattgcctaaatcaccgtgtttggttagtcataagactcgcgtatatttaatattgatttcttatttcaatgaattaagtatacaatataagttagatcaattattgttgtgatatattaagattgacaataggaggagtccgatcttagatattatattgacaagtttggcaaaaaaaaataaaaatattatttgttcaaatgaacaagttataaaaaaaaatgcagtagtttcaagtttggtaaaagaaatatgacaaacttaaacttgaaagtgtcagttttgtatcagcgttgacaaatacaatacttctttctctgtttgaagttagagagaactaattaggtgtctggctaacaaaacatgcatcacaattattattgttaattgtgacccacaaaatgcagtccttaaacatttcaagatttgtctttcgtaagatagatgttttaactgtttagatttataatattttttctgatgaagaggcaaataaaaagaagaagcaaatgctagaagaggcgcgtggaaaagagtcacaaggaagtgggaaaggtgaggaggatggggcatgtgtaaggctgatatgtcggcacgtagtggaaatggtcaaccttgacggctcccattagccgtccgatttaactaaaaagactcttttcatagcccatattctttcaattattattctctcaactctttctctaccaatacctagtacctacccacttttttacgaaattaacattcaaaagtatagtcgattttcagttcaaaattgttgaattttgaagtgatgcatattttcatgtttgcaagattcattatattatattttatactagttataagcactttggacaataacatattcgattgatcaatacagaaatgtgttttgttgaaaaataacagttaattgaatttgagttaactcaaaattgataatccacattttgaacaacacatttgtttctttgttacaacatttgaacaacaaattgatgaatggatataccttcaattcatttgaattcctctaaatattaaagatagaaaatataaaaataagtatgggagaaaaattgaccagagacaggatggatcaatgaacatgtcatctgacatattagccgacattatccccatgaatgaaacatacatatcggttatatcaaaacctaactcttatcattttaaattttggtgaccatatttgctaaacaattcgatattaatttatgattttatacgtctcttcttgaacttatatacacaattttagatcaattatgagtctaaagtagacagtcggtcaccaaactccaagacatccaatctgaggtttctgttttttttttttcatttatttatgtttttattttagtttacttggtattcaattttgaagtatcagcgttgttagacaatgtaacgtagcatagatactaatttcagcattgataaaataccaatttcatggatat

SEQ ID NO: 59847 - DNA, 1441 bp, Arabidopsis thaliana landsberg
  unsure (1)..(1441): unsure at all n locations
ttgcataaatttatcggaagatttgtaatagtctttgtcgtgtttaggttaattatcattgttctttttttacgtgctcaatttagactaatatttttgtttcaagaaagtgtgttttgtttaatccaaagatgaaataaaataacatatatgtaatcaaaacgttggcgtttacactttatagatgcgtgcaaaacaatacaagaagaagcagttacttaaaaaagccttctatgaaagtggagaatacaaatggaaactggcaagtgtaggatctttaacaaactaaataactaattaaaggtatatgcatgtaaagagttctttggcacaaaaaaaatatgtttcttaattcaagagtgacaagagtcctactatatatcccatgatcacttacgatgaatacatacgtcgtcaaattacgtacacatgatctaacaagatctctatgtctaacaacgtacacatgcaactgtaaaaacgacatagatatgaacaggcgttgtcgacagaaagttttggtcgataagaaaaggaaattaacagtcataaccttattttctttttatcccattttgatactcttttggaaagggaaattaaaaaaaaagaaagcgcaaactgaaaggccacaattaaattaaccccccaaaaaatctgaaaggccattatggatgggatttggatgtaagaagctctttttttcagtctttagtttgaaaattttaagttaatttgatgatctaaataaatttctaactcctaaactctcaaacccaaaactaaagtaaaaaaactgtctatttgaagcctataacttgtttatgagaatctgagatacatgttttaaaactatgaaaaaacattagaatgtacattccacaaattatacagatatatattaccaatagatttataagattatcttctagcagaaagcccatttgtaaatgtggaacacttaatgagactgatttgcttcttcactaagacaagctcaacattatacacttttctgtccttttttttggtgtctctctttaataatttatggactttaactttgcttttccgaaatatgaaagaccccatcttgtaaatagaatgcaattaacttctctttttgatagtttttgagtcacctattaaactttccgttatggacatgattgatctataaaagaaattttcaaattatgtggtggctggctaagttgataaaactctcccatttctttagattatccattagtttcgtagactttgtatcatgcaaaattgtctctcctttattcagaattctggcgcttatgaaacttttcttgaacacaattttaaatgtaaaaaggtgaaattaatatacntatggacccctcggaaagaaaaaggtcatatacatatgggccttgagcaagtagctttgatttgattctggaatata

SEQ ID NO: 59848 - DNA, 1242 bp, Arabidopsis thaliana landsberg
ttcttgaattaaacttgtcttgtttcttattttggtttcttagatctagataaatttgtttgttgacatggtctttgcttctgttagtgatcgagactgctccaaatgatgcatcatcacaagtgcctcaagaagcagctactgctaattctagtgataccccaattcctgtggagaaggtttcaagtaaagcaaggcggttcagggctcgaaagaaagcgaaacaagaaaagtcacaacaagctccatgttctccttgtaatcaaaacttctctgtttttcctcagtttctcatcctgtgtttgttttgctaacaacatttattgtctttgtctccttttagcaagagggacttctgcggatgttgagagagctgaggtacctattgctgatgctgagataattttgaagcagatttcaactagaatgcgactgcttgagagtatcatagaacaagtacacaaactacttagtaatgtacttggaccacctccttctgctgcgaaagccctcaagaaacagagatcatggaaacaagtgagaggtgattatgaacaagcagagatgcttcatgatctgaatcaacaagtccaacaagaaatgccgagaatggacatcccggggaatcaagctagcgacaactccaacgaagaagatacactatatgattgatagagagcatattcttacattagcatgcttagtttgtgattaccagaatatattgctaagctctatgagactttatattgttggttacgttaccatgtaacaattaacaaaagagaagaaaccagtatatatattctatcaaatctcaatccatattattgtatggccaatcacaacaaaaaccagaacaaaaatgttgtgatgcatgatcttaatgagaaggaaccataaggccaaaagacttgttgagccaagccttccatctccctgaagtcttccgggttgttgttgtcatcatagagtcttcaaggttttgagtctctaacttgttagacaacacaaagttccttgatcccgttgaactgattttaccccatggatcgaatgctacataagagattcaaaaacattaaccttagtaaaactgatgaaaagtcacaaattcaaagaggaaactgtagataccttcagaggcacagtaagggcaataaagtcggaaaaagctggaatctaatcagagaagtggaagtttgccttcaccaacataacatttgagagcataatttatga

SEQ ID NO: 59849 - DNA, 167 bp, Arabidopsis thaliana landsberg
tctagtactaggggatacaccgggctgcagggggggggaaagccacgctgcgcctcaaaacctttgttgccacactgcacaagataaaactagagcagcacgaacacaaaaaccgcctgcttacacaaacaggcaaacacggggcgctatgagcccatatacaacgg

SEQ ID NO: 59850 - DNA, 546 bp, Arabidopsis thaliana landsberg
  unsure (1)..(546): unsure at all n locations
cgcggtgtgcggcgtggcggcctttatcggcgccggttttatcttccccacgctcaaccagggccagcgggcggtcgtgctgaaggatcgcggcgaccgcgacggcctggacagcgtgatgcccagcctgcaggcggccgtggcggacattcccggcgtggcgctgtatctcaagccggtgcaggacgtgacgctggacagccgcgtctcctccaccgagtaccagtactcgctgtccgacgtgaacgccaaggagctttccggctacgccgagcagatgacgcaggccctgcgccagcgtcccgagctggccgatgtggacaacaacttggccgactccggcaacgcgctcaagctcaccatcgaccgcgacaaggccagccgtctcggcgtgccnnnnnnnnnnnnnnnnnnnnnnnnntacgacgcgttcggccagcggcagatctccaccatctttacccagctcaaccagtaccgtgtggtgctggaggtcgcgccgcatttccgcaacagcgacgacctgatgaacaagctcaccgtgcg

SEQ ID NO: 59851 - DNA, 423 bp, Arabidopsis thaliana landsberg
  unsure (1)..(423): unsure at all n locations
tatgatcaggatgtgtgtattggttgacgtaaaatcaattattctaacatttatacatacttatccaagtaaaaaacaattattttagagttagttaggtaacccccatttttcaatgttgagaagtatttaaatagtcgattaatacctggatatgtagatacttatatacgtgtcaagaattgatttggtaaagaaccaacaacaggcaatagataataatcttgcattgaattcgatgttgcgttcnnnnnnnnnnnnnnnnnnnnnnnnnnnnnnnnnnnnnnnnctaacataattaacacttaacgcaggatctttattctgaaacatgcgaacacaatgataacagtgcatgtgtgttcaagttgcgaattgtgatgaatggttgtcannnnnnnnnnnnnnnnnngtgagtcagtc

SEQ ID NO: 59852 - DNA, 410 bp, Arabidopsis thaliana landsberg
tttagacgtttaattcagataacttcaaccttatggtgactgggccaaagtcaattaaactatcgattaatattttgcgaatttttaataagataagtatcaccaacccgtaaacatccaactagatacatttatatacataccctaataataattatttctgaaatgcattgaaaacgaagtctatgatacacggcatcttcctgttctagtcgcatttgctctctctctcactctctctgcaatctcttatatcaactttgttttattccactttaaatcatgaaagctaaagaaatgaagaaagatagcactttctcaaggttggggagaaactcggctcggtcctcgatcatggcacgtgacgcttacatacgctgcatgacgtgatgcttcgtcgggcttattcg

SEQ ID NO: 59853 - DNA, 507 bp, Arabidopsis thaliana landsberg
  unsure (1)..(507): unsure at all n locations
gggaactaggccgggcgtagactgcaataatggacccaaagaagctaatgggcggaaagagggccgaaacgtgtgaaatgctatgttttacagcttagagcatttaattggtgcaatacgtctttttaggcctactcgtgtaacgtatcagtgttttagcatctaataagtgttttgtcgtttaaacatcgcttaaatgacattttaataacattgatccgaagtggtctagaatgagccaccggagtccgcaactcagtaggtgatggcnnnnnnnnnnnnnnnnnnnnnngtgctaaacgagttagcaagagactgttggtaccaaaccctagcccacgacgtccaagatggagccgggtgaagcaacgaccgcgtgcgagggagaatcaagggccagtgcagcgccgatggagccgaaggtgagggctcaagcggacacccaggaccgccgaaagacagagtggcaagtagcgtatgatgaggcggcagtgggagcgatgtggg

SEQ ID NO: 59854 - DNA, 1460 bp, Arabidopsis thaliana landsberg
gcttgatactttctgagagagatatcagttttccagaggaaaaaccacaaatgtgagttgatgaatgcgcttaaatgaatgatgaaacaccaaccaaatattatacctttgaaagacacgagctgtccatcatcattgaacaccatcctgttagatacaatcttaacattcttgaaagttctatcaaggttctgcctcaaaacctggtaagaatgtgagtatgcaacaaaagcatattcattatagaggcagcagaagtaggagagtaactctaataaactaatactctttagagtcacctcttcaatgacatcagcaagtcctgctgaaaaaatcagaacagggatctcctttttctgaaacagattgcaaataaggtggattaagatactaatagttgttcctcaccattaaagtataactctacaaaacatgattgaattccatttatttacctccaaaaattcgaaaagttcagacacaccttctctaaaagctatggaagaattcgcaacagatttcttgattgcgtcatatgtcaaacctccctcaatgagaagctcatgagttttaccccacctcatcattcacaacaacaaaaagtttatcacttgtttgtccaaactagagtatcaaaagacaagccaaatgtgattgataagaagaggagtatataccattcttccatgagtttggttttctcatcaatgggaatcacaggagaaatctcaagaggatgatagtgatcatataaggcttgcctcttagcatcgtaatatgcgtctccttgctgcaagaggccatgactggctatatataaaggtttcaactttgattgcatttggtttagtgagaagagaagaatataattgatcaaatgaaacatactctgccttcctcgaagtccattgactcggtatctcgttaaagtcgcatcgaaatctgcaattacctttacaaaattcgcaggatagaccaacacagcacaaagtttaagcattgagaaaaaaaaaaacttcggagataggagtgggaaagacctggaatttggaaggacccgcgtcacgaattagagtcatcttatcggtgagagctcgaggatgagctatcacagtgttggcagataattcacacggttccatttgatgattctgagagaaaacaagggaaaaaacggacaatgtttgagaatttttctattgaaactgagagtgagagggagagagatagagactgacgtcgtgacggaagtagcaagaagaatgtgtttgcgggtgattatggcagacgatggagaaacgaatcgacgacggcgcgtgaaagcgcgtgcagaaactgataacgcgcatcaattaatttggtcggagcaattttattctgcattacttacgtctaaatgggccaaaatagccttattgtctctctgttgggtcaaaaaaaaaattttaatcattataatt

SEQ ID NO: 59855 - DNA, 223 bp, Arabidopsis thaliana landsberg
tgaagaggaataatttacaagccagtttttggactgatcgttactattccgtgtacaatcacatttgcaaaaacatgcgtacataactatcgttatagaattgttaagaaaatctttgaatctacagaacacctttaacactcaaatacttgcgtgctaccattcgagacaaagagctcggctcaacattgacttcccagccttttggaagagattttgcctc

SEQ ID NO: 59856 - DNA, 519 bp, Arabidopsis thaliana landsberg
gtgcagtagcaccgccgggacctggtgatattttcatatatttttttaaaaaaaggaaaaaaaaatcataaccaagtcaatccttgaatatatgtttgaaacgtggaatatatataagttgataaaattctaggtacactatatatttaatttggatttcagatttattaatatttctgcaaaaatgctcatttgttccataattatacgcagcttctataagaacaaaatagtattctttgaatctactctctcactcactctttgacctaaaagttcatatatatgtatcgatcttagaaaatgattataagtcaaagagtaacaccatattggaccgaagagtttggtacaatccgtagtctaaaggactaggaagttcacacaaaacaataaaaatttgatatgttgcataagtaaagtttaatagtttcttatgatttttgactaaaatatatagcccttccatcgactttcataattaaaaaataaataaaataacaaaactcttcatagatt

SEQ ID NO: 59857 - DNA, 126 bp, Arabidopsis thaliana landsberg
catgagcgttatttataattttttaaaaattacagattaagaaagggggccgttattggcattttaaggtgaccattacaatagtttataggttgggaaaaaaggttgggtgggaagggggaattt

SEQ ID NO: 59858 - DNA, 904 bp, Arabidopsis thaliana landsberg
ttactgtcgggattttcccgcgcagaagaaggaccagaaacgaatgtcttgactcttcgtaatttattaatttttgtcgttaacttaaagagacgatggaaactaccaaaactttggaattatcgacctttacacacccagttgtctcatttacacgcaccataattaatttaactcgtctataaaaccaacaacattactgtattttatatgaataataaaagtgtggtagacagatctgtataataataaatccgatcttgtttcaatacacacggaccagtggattaaataagaataagtcaatagaagaagaagaagaagctgacgtggctggcaaaaaaagtaaatttagagtctcgtggagggcacaaaaggaaatataaagatacctcgtatacccaaaccagagagatatcagtgaagagagtaaagcttcttcttcactttttcttctcccgaggaacaagacgaaattgagactctgattcaacttttcttctcatactcgtcgaagaaaaggagattcctcgatggaatcacattcttccttatcgtcctcttcttcttcttctcctccgtcgtcgttgtcgtcggagagttgttgtgttaaagtagcggttaacgttcgtcctttgatcggagatgaagtaactcaaggttgtagggaatgcgtttctgtttctccggtaactcctcaggtcagttttcccattctgaatggagtcagtttcgtctcctctccgtcgtttacgtttcttctccgatggtgtttaaatgcgttcgtcgttgttcacgctattcctggatccggatcaaatctctgttctaactctgacacactcatttaattttatttcttcttataaaacagtgtcaattgtttttattttttacatcatat

SEQ ID NO: 59859 - DNA, 531 bp, Arabidopsis thaliana landsberg
tgtcaattctatccccaacagacctggtcttcaaattctgcatccatatttatggttcatatatatagaaagttttttgcgtgtggggttaaattaattaattacagagatgaaattttcttgaaaattgtaattttgccaaattaaaatctcagtacggttctgtagaaaagagagttttcatatccataaattactggtggcatcttttaccaaatgagcataagtttggtggtcattgagaaaacttcaaaattttgttttaagagagaaaaagtaaatcactgacggtcgagaaaaacaaaggccgttagacgcttacttaaagcccattgtggaatttgcccatgacattggtaacagttttatttattgggccttaatgtaaagcccgcctttagtggacatttttggtcctctttctggacagcaattaagaaaggctcgacgcctcgaattgacaatatgagggttagaaatgtgattcttcgaaaataatattgttttctgactgcataaaataaaaacatg

SEQ ID NO: 59860 - DNA, 1259 bp, Arabidopsis thaliana landsberg
catgttgtgaggattatagataagtttcgtagtttaattgggaaatgagcttaatgttagagtcaaactagtttattcagttgttttactacctcttgtttctgacttaacctatagactggaattggtaattgatagcgtgatattagagaggcttaccatcaaaaccacccaaaccgaagtaaaccaaaccggctgaacctaagtttaagtaaataaggtttgtgttgaacaatacggtctcttggtttggtttggtagcccctaaccaattggttacgtaatttatttccggttaaacacaagttttgttggaaaacgaaaactgtgactggtcactagtcactatcaagcagcctaaaaagtatcgactcttatttatcaaaaaagtttacacaaacactttctctccactgaactcattttctctcttcttcttcatcatcatcatcaatggatgagataaaaccaaagaaagaagagaattccaaacgacgtcgtaacgtcaaacccatttgccgtgaaactggagaccacgtccattatcttccaacatgcaaaaccaagcccaaacccacgcgtactcatcacgcgccaccaccgatcctcgactcaatcttcaaagtcactcacaagccacactactacgaatgcaggaagaatcacgccgctgatatcggaaccaccgcttacgacggctgcggcgagtttgttagctccaccggtgaagaagattctttaaactgcgccgcatgtggctgtcaccgtaacttccaccgtgaagagttaatcccggagaacggcggcgttactgagacggttcttgaagttctcaagatttcatcgtgtcagtttcgtcggatcttttgctcaccttacggcggtggaaaaagcgaaggaaagaagaagaagaaggagaaggagagttatggaggggatccgataattaaagatcgattcggcggtgcggaggaggaggaggggatagtgaagaggttgaaaacgaagttcacggcggacgaaacggagaaaatgagggattatgcggagaagcttcggtggaaggtgagacctgagaggcaggaggaggttgaagagttttgtgtagagattggagtgaatacggaagaattttaggatctggatgaataacacaaggataaattataattgatgaagattatttaccaacttaattgtgttcttttcttttcatcgactttgtgttaattgtggttgatttagtgaatgtataatac

SEQ ID NO: 59861 - DNA, 1336 bp, Arabidopsis thaliana landsberg
cgctgttcaacacttgtctttgcctctgcgagatgtggagacttgcctgagctacgagccttaagggtactttttggcacgcgttatgggaatcactttgtggacacggctcttaatcttctgcctggtaattgtgtcaaccctcaggttcgtcgatcaatctcacatttcacatctctatctctttcatttcttgattttgtttcatttagagttttgtttcttatgattcaagtaacttcaaatcttgtttagacttgcttaaggttcaagaaagagtacatctttgacctaacagagcatatatatactcaaatataggttatagagaaactctccataatctcagtatcggatgatgccaagtccaaactattaggtgaaatagtggaagagtataaccttcgtctagaggtgttggcaatcgaatacactcccgaatttcacaaacaggtgactctttgcatcattatataagtaatcttatttgcttcttgaagttatgaaagtatgtaaaatgctacttgttgatgtgtgtaggtactaaaaagcgagaaggcagaagaagagaaagaagtcatgagttccaattctgctcagccgtactgttcatcacaaaaggctgagagtgaagcagaagtgtataagtttactctcacggatgcggatatagaggaaaaccaagaacaagaaagaaaagtatgtgatgaggaagatgattgcatagaggaagaagtggtggaagaagatcagagtgtattcagatttagagagagtactgaagatgagagaaaagagagaaagaggttaaggaggaaaccaagatcaacttcatcatcaagcagtcctatcgcgaaagacgtggattgttggaggtactattacaagggaaagagaagtcgtcaaaggaaagagtgtggtaaatgttgttaccatatagtgtacaacgtgtttacaatgttgccggatcaaaaggaaagcgaagaaggagaaagaagtttcaaaaaagctatgcatgttcatcctaagcttcccgattatgatcagattgttgctcacttcactgctcttaggaaacaacaacaacaaaaacaaaagcatatgcgttcatgatgatttgtttactctcattctttcacattaacatttaatgtatttttaatcgaaaaaaatatatttcaagaatgatccattaattttataatatgtgattcagttcacatcataataaaaaaaaaggatccacgttttgatgtattatatgttgtttacataaaatatttaacgtttaataataaaatatgttggtgtttgtgaaaaaaaaaacccaataaat

SEQ ID NO: 59862 - DNA, 178 bp, Arabidopsis thaliana landsberg
ttgacagtttgtatgaaaatggtaggcctcgtagagctgataacaattcgaaccaggttgagagcaggaaacagtttcaacttgatttggagaaaattcttaatggagaggattctcggactaccttgatgatttaaaacattccaaacaagtaagcttttacttgctttatcttttc

SEQ ID NO: 59863 - DNA, 751 bp, Arabidopsis thaliana landsberg
ctctgtggacttgcatccgttgccattctcttcactgccatcttcaacgactgagtcaacccccaagtgagttagggttctttttctctaaataaaaatgaaataaaatctgagattgatgatatgtttcttctagttgagtcattccagttttttcatttctgtaacgaatctatggatttatgttaaaaccctaatgtgaaaaaccttttggttgatcatcatccaagacggcattttttttgtgtcttttactagcgaagcatcttgatattttactctagttttaggtactaggatcggttttctacaatcggattcctgatcgattatcaaaaccaatcaacctagaactggttcagcaaaatttcaattttttctcttccgaatgttctagaatccctccataaacagaaatttggacttattcgagtcaaatccctaaaggtgtgtatgggctttgtaatagtttggcccattattccgaatcatttccttgttaattgagtgtattaataaatgttttggactggtttgtaccaaaaaataaaataatgttaagcttagaagattagaagatatacaataaactttccaaatcggcaacaaaacaaagtatttgatattggtttgatgtgtttcacgaccatagaacaagacggtacattatactatatgaatgttggcaaaagacaagtttttatgtttagttacgcttgtctgcaaacgaagatattttttagtttgatcg

SEQ ID NO: 59864 - DNA, 752 bp, Arabidopsis thaliana landsberg
agacgctcggcactgcaatcatcgaatttgttggcattaggataaggaaactctggatatttggaactgaggcttcatgtttaaaagaaagttatgccaataactaactataaatggctataccctataggaccacaatgtaagtcattctagtatccaaattgttgaatatgcaactttttataacacaggattcataatccttcacgatgatatacaaagaaaagtgaagtcatgatggactaacctgctctgcaatagaatggacttatcattcaaatgcccctctccatcacagcaaatcattcccacagcaaatatacttctctgcagcaatcagtagcacaatgtaataaattctataccccaatgttaatttatttgacaccaaagtagtatgtatgaacaaacctacctgtgaagcaacagccggatccacctgttcctcatataatcccgaggcagcaaatgcatctgcatgccttacgatccgatactcgagtgcactaaacctgtcctcagttctgtcatacatgaacctgcaacctggttcagggcctgagccattgacttttagagaacaccgctggctggtttgaactctcttaatgatatcatcctcactgttttctacatcattgttgtttccattctctgcatgtgccgccacattacccacattgaacttcaccacaaacttctcgattcgtgacccaaaaggtgtcacatgtccaactgacttcccagtagaa

SEQ ID NO: 59865 - DNA, 1318 bp, Arabidopsis thaliana landsberg
acttgtgtgttttggtatgttcaaaaacagatgggtggtggagcagctgtgtttacacacagtatatattggaccgtgattttcccgtgtctgtctttacaggactatgacatgagtttcgtaagttttcgcgccatttacggtatattagttaaagcttgcacactgctgatggcactttaaacgttgcacttgaccctcttgaacttagtctcaacttctctagtgtcaaaattctgtgttttcagatgactgtgaatttgcacacaagcaacctcgttttgctgcttattgacacgtttctaaaccgtctggtaaaacaattctttcctctgcatttacgacgagttttcgttttcattaatgtgttgaacctgaggtctttttgtgatgttgctttgcagaaatttccattgttcaggttctcttacttcatcttatggacaggatgtttcgttcttttccagtggattctccacatgtttatctccgttgggtaaaactcttctctgtcatcttttgtatgttacacttaccgtcttgattaatcttacacttgtattcctcgattgacttaggtggccatatccatttctcaacctgtcattagacatggctccagtgtggtaagccttgaaaacatttacatactagacactagtcaggattggtttatatcataatgtttcattccttagaatgattacgcctatccttaatattttaattcatgcatctgcaggtatttgttggtggcactcctgcatcttccttcttatggcctctttgcattaatcgtcaaaatcaaatacaaactcatttcttgaagtcatttcgaatccaagagtttctgccccgtaagagtcagtgctcaagggttacaacaatcaaagaaacaattttttaccccatatgtctaaaatcttcaaaacagatcattgtaaacgccacaacatttcaatgcataaactatttacttccgatccaattcgcatatcgcaatgaaccatttcgtaaatttttcgctacccgaattgatttcagctcgaaccaaatcgaaagaactaaccatagcaacagaatatagtgcaatctttgccaaaagtgtatgaacttaatcaaaaaccgaaccaaaccaaaccgaaaacccgaaaattcaaggttttagaattgaagatttgagtgagacttgagaagccaagtctggctctcctagtctcaagagacccttactcaaaacctcagcgacatactcatcagcctcccatgactcagacccccaaccacttttcctcatcaaggtataaaccctaaccac

SEQ ID NO: 59866 - DNA, 453 bp, Arabidopsis thaliana landsberg
agacctcttgcccacaagtgacctaatgccaggtacacaatccgcattgattaggccattctttcttttcatatatatatatatgtctttaaattctgtttgtttagtttcatttgaatcagcctctgatttattctctttgagtcactaatcactgaaagagacaagctcttagctcttctacttttcgctgtatccaatattcttcctctaatgcaggagctagccggcttcttagacatctccatgggaaaggaattccaatatgtatagccacagggtatctctttctgtattagcacatgctcttcttataatagatcactgagagtgcaaatggctttttcagcttctttttataaatttatggtttatggcatatgttatctgatttaactactttttaatgcaggacacatacacgacattttgatcttaaaacacaaagacacc

SEQ ID NO: 59867 - DNA, 132 bp, Arabidopsis thaliana landsberg
gggggcgctgaggtctgcctcgtgaagaaggcgttgtcgtctcataccaagcctgaatcgccccagggggcatccttaaagtaagggtgccacacttgatgacagctttttcatatgtttttctacttaatc

SEQ ID NO: 59868 - DNA, 1187 bp, Arabidopsis thaliana landsberg
ggagtgtaccagtagtaaaacccttgagaaatgcttgttcacagataactagtgaagctctccaaggggggcacacaagtctggatttttactacctcgctgacctaaaccggcactggatctcacccactgggtaaaccataccctgtatcctatgcagcttggaccaaaccagagtacggaaaggtgctcgattaattacatgagaggtattatgatctgagcacctctttatcttcttccccgtttactattctgcttcgtggattgcaaaattctgacttgtagtaggatgatgatgcgttgtatattgttctatgatttttattgtggtgagttacatactgcatatatacgtatgtgccaaggttgttttagattctgtaatatccgttggtgatacagaagattccttaaattccgatttgtccaagttttgtcctgtattattattactcgtccttggtcttctcctcccttttggtcaactgtattcgtatgtgggtttgtcaaagtttgaaattaaagtcaatagatttcttagttgattattgtttcttcagtctacatgtttaaattttatgatataagttttatgaatgaatcgcacttgatctagctggccaagagaagaagattagtgttttgtattcttgattccaactccaggtcccatgtcacagaattcagcatgctgaatcgttttatttgtcccaagcacatgctgaatcgttatagcattaaagaactttatactagtattttttagagaaatatctagcatttaaaaacaaatattagtatgatgataattttttttaaaaggaaatatctaccattaagaaacaaatattggtatgatgatagtattattatatgatgataatatataactagtaatattttatagaatgggtcatcatacaattacactagttaatatttactaatatccattttaggatattttaaaatatattaaatgtaattaattttctgttgatatttcatagttttagatcaaaaatattgtaaatattttgttaattgagttaaaataagaaatctctatttaattaccaaaagttacattaaactctttcattaataaatggactatatcaacaaactctcatcattatatattaaagttgaattaaaaaacaataaaggtgagaaataatata

SEQ ID NO: 59869 - DNA, 1155 bp, Arabidopsis thaliana landsberg
ggatatgatttattagcaattttttcgctatcctagttttgctgatgagccaatggacatcctggttgtctgtctaacatgcacgggtctcataccgtgttgtatgttgtgtaatgatggaatatatgaatatatgagattaaagaggtttcctggactttcaggtggcaacaattgcttggtttgaagctgacgctgtctgtggcagtcatcaaattgcaatcccattggttcttgttttcccctacatttgccgtcttttgcaatgtcttcgacaatacaaagatacaaaggaaaaatcatctcttttaaatggtaaaagcctaaccttctagcattaatgttaaattttcccacactatgaagaaagatgttcttttcctaccatcaatcttatagttgatctgtgattttttcagctctgaagtattctacagcagtacccgtgatcttcctttctgcacttaaatatcacgtgatgcccgagagctggacttcattttaccgaccgctctggcttttctcaagtgtcatcaactcactgtactctttctactgggatgtaactcgggattgggacttgaggtaataggttgaaactgcatcttcctatccactaagcagtatttgcatatcataatcacataacttctctctgttgtgcagcggtttcactaagatattcaagtttagccgcccaagtgccatatcaaacctattatatggccgacaatgggtgagattcagtttccaatgcaaccaccataatgttctcttcgtattgtaatgtctgaaactgtcaagtattacgatgatgcaggtatatttctgggtgatagggagcaatctggtgctaagatgcgcgtggacatacaaattatcagcacatttgaggcacaactacataacagtgttcacaatgacagcgatggagatgttgagacgatttcaatgggtatttttcagagtagagaatgagtggaacaagatcactaaatcacatccaatgggtgagatttcacttgaagaagataaactacttggttctactacacctcacgatgtttagcatccaactatttttgattatttcctctaatcctacgcaaaattcttggtttttttcctattggtccactcggactctagacactt

SEQ ID NO: 59870 - DNA, 1254 bp, Arabidopsis thaliana landsberg
agaagcgaagtcagaaggcaatgatacacagctttgtcgggttttatccccatcgccttcatttcctcgtagcaacttaaggctttctctggaagagatgctctcgcccatccttttattaaggtcgtgtatgtcttgatgttaggtttcacacctagtgcttccatttcttcgattgtttgtgtagctctctgccaaacatttccaaaagttttatttctcgttacaaacccgtgacaagaatctgcttcttgaatggaaacttacattcatgtcgccggccttagaacaagcgctaatgaaggatgtgtaagtatgaatgtcgggtttaacaccttcttttttcatctgctgtatcaaatccgcggcttcccatacatcgcctcttcgtgcccatctaaaataaaccagagggaaacgaatgagaattctagaagcaggccaaaaagtggttacaaaaccagatacattacccgtcgattaatatgttatagacgaaggaattgcgcgggatattccgtgcactcatttctttcgtgacagctaatgcgctctgcattcttcctgatttgcagcaagctttaagtaacgcctcgtaagtgaaaatgtcaacatccaaaccttcgttttgaagccttgtaaaatactcaaaggcttttccggtatcaccgactgatgcatagccttgcatgatctttgtgtaagtatgttcgtttgcacttacacccgccaatgtcatctcgtctaatatctcaaccgccttttccatctacaaaaataatttgacaagagattagttcaatcagataatctctataggaaaacatcaagacatagattcgtgaaacatacctgacgtttctcaactaaaccattaatcaaaccattgaaagtatgaacggttggaacacacccacatcgtctcatcatatcaaaaacttctagtgatctcctcatgtctccggatttcgcatatccatgtatgataggcataaatgtccgtgtggatggtctatgcctcagcttttgcatctccttaacagtctggatcgctcgatccatgttacccatcccgcagaatgctgagatgatgttggtgtatagtataacatctggtttcatgccttcttttaccatatcttcaaatacagcaaacgcattggcccaatcttttagttttacaaatccgttaatcatcatcgaataagtctttaaattatgctttacgccctcttccttcatcactctactaac

SEQ ID NO: 59871 - DNA, 403 bp, Arabidopsis thaliana landsberg
  unsure (1)..(403): unsure at all n locations
gaacggggggaaagaggggtctacacctgctgccaacagcctctcttccgaattctactgaagcggtcgatcctcccctccgcctgttttagctacttagcctagcgtctnnnnnnnnnnnnnnnnnnnnnnnnnnnnnnnnnnnnnnnnnnnnnnnnnnnnnnnnnnnnnnnnnnnnnnnnnnnnnnnnnnnnnnnnnnnnnnnnnnnnnnnnnnnnnnnnnnnnnnnnnnnnnnnnnnnnnnnnnnnnnnnnnnnnnnnnnnnnnnnnnnnnnnnnnnnnnnnnnnnnnnnnnnnnnnnnnnnnnnnnnnnnnnnnnnnnnnnnnnnnnnnnnnnnnnnnnnnnnnnnnnnnnnnnnnnnnnnnnnnnnnnnnnnnnnnnnnnnnnnnnnnnnnnnnnnnn

SEQ ID NO: 59872 - DNA, 365 bp, Arabidopsis thaliana landsberg
acctagctcgctgctatgagaatttatgacatctgccacttcttggctcatatgaatggctccaatcggcatatatgctgaagacagtgcctgtatattggaaacatttacaacttgtcaggggaaatttgccaacagaaaaaaactactaatcatcttgcaaaatctcaccttagctaaggtcacaagatctggcttaatgttgtatttgtcacagccaaacattgtcccgagccttccaaatgcacatatcaccttaaagaccaaacagatattacacagataatgatatatcttcttcttgatggatacttggggtcatgatcctgtgtggactggatggtaacatggttcaattagacatg

SEQ ID NO: 59873 - DNA, 996 bp, Arabidopsis thaliana landsberg
aatccatttgatttgaagaaaatctatcgttttatattttgccttggtttacttgtttgtattcaaagaattggtttacttgttaagatatttttcatggtccaaagacacggaaactttgtaccgaaatcaaattttcaaagtaattctattatttcataacacacatggatacttgacgcaagatttgataacaaaaacaaacatcatatctttcataaagagatcagagtctttggttttattctcttgctaagtaagcgcaagaagagaagcagcacaaggccttagttttgacaagttaaacaacgaaacaacacaaaacatcaaacacaacaactacaacaataacaacgaggactgcatatttacactgatctggaagcttttcagattcagcagcacaagaccagacgacacaacagggaactcttttctttccattattcaagatctagtaacctccctgaatatacgcatttaggcgttgaagctcctctctatgctcatgaaccactgcacggacaacatctcctatggacaccattccaatcatgcccttgtctttgattaccggaatatgcctgattcggttatctgtacattacaaaaacacaaacccgcatttttatttgcttcagtaggttttaaacccaaaagcttgtatctttagtggaaaaatatcaagttgtctgcttacctgtcatcagttgcatagcacgcaagaccttggtctccggtgtcacagtgataagcttattctgcaattgccagttcacagatccagtaagtttcaatccacaaaagcaaaaaaaaaatcgtacaatcgtgcatttacatacctcttcagtcataatgtctccaacttttgttgatttggatgatctcccttgcacaatgatcttccgtagataatctagagaaatcacaatgccgaaaagaaaatcacacataccacaagacacaacaaaaaaattattaatgattagatctaat

SEQ ID NO: 59874 - DNA, 128 bp, Arabidopsis thaliana landsberg
tcaataggatcgctggcgccgacggggcccgagagaggaaggttgagcctcatacaatcagagatggatcccgtcataaccttacaccaaggcgaaatgatgcgcgctagacttggaccgtcatgaat

SEQ ID NO: 59875 - DNA, 172 bp, Arabidopsis thaliana landsberg
gatattggaaagcgaccgggaaagagtgtagtgttaaatccgggaaccaagtggggggtaccaagagaacgcaggaatttaatatccagcgggctacatagggcgagagaacggagtgtattatgcagcgaaacgggatcaatctaaaccgtcaggaccgggatgcgggaat

SEQ ID NO: 59876 - DNA, 1351 bp, Arabidopsis thaliana landsberg
actacccaaaattctggttcgacctcaagatctaaatgattcagcaagctgtctgattcgttccataatcactgggatatcttcatcagctaaagcggtgaaacagcacctgaaccaacctggttctatacaataacaggctgttcctggagtggcattaatcttagcaacagtcaatagcttctcaaataactcgagttctcctttctcactgtaagatgtcagtaaactgctcatgtctacccaacaatacaacccaccaccactctcagcacatggtattcctaattgtttcaaaccttccacaaaccgaatatgcttatcccggatcctttgcctgtgtgctgccatgtatccctcaatgaatcttacatcagatagtagagagataagtatcctttgaactagaactggcactgatgaaaatctcatcagcttctttgcagcatttactacgtcttcatgaaaggagtagatgactccagctctaaaaccaggaattgaaaggtcttttgacaagccatatatgatatgaaccctagtcttatcaaattcccctgagccagcgatctcagccatgctaacaaactctttgtccccgtaaacagaacccgcaaatatttcatcagaaataacatggatgttcttctcttgagcaaatctcaaaatatcacaaagcgtctcccttgatagtatgtttccaacaggatttgacgggtttgaaaagaggatgccagaaaccttgcttcctcgttttctagcctgattcaaagcttgttccagtgcggaaaccgttacagtaaaattgtcagagctacggcagtgtactggtataagctccactcctgtccggaatttaatatccctatcaaagctgcaaaatgaagtttccttagtacatcgcataggaagagaagactggtgtataaatcaaaaagtttcaccacatactaatggtcgagaagtgtaaactaaaaattaccctggataatatggcgtcggaattagaaaagcatttccatgatcagccaaacagaaggccaatacttcaatagcaggagtcccaccggctgttatcaccatatttgagggatcaaatgacacattacctcccattattcgtgacatgaaatcagcacaagcctgaaacatgataggaatagaagaaattcaatttcctttcgatacattgttgggacaactaaatccacaagtttgaatacgctaatttctgatatataatcaacattcctttgatcctatacaagaacatatatcaatcaaacctcttctaatttctgatacacgtttgcagtcaaatattaactaataactgcaaaaagctatcctt

SEQ ID NO: 59877 - DNA, 428 bp, Arabidopsis thaliana landsberg
  unsure (1)..(428): unsure at all n locations
ctcttgaactacgcctccatgccatagtgccacttctctatcgaagttagctcccgttcggtgaaaggcggggcgctaccggccacattcctggcgtaaaaccattcactttcatatcgcatagaggaggggagtgaaatcttaaagtactcnnnnnnnnnnnnnnnnnnnnnnnnnnnnntggcagaccaaacatatagctagtcgccacgatcgagagtcactcgcgcgctaaagaagtaatgccacaacttctagtagggttcgatccccatgaacgactcgcatagcatgttgaagaatgctatgtggaggacaattttgggatgaagggtttttgaatctccaactgatagtaatngaaggatcccccacacgagggcggtgaagggtanngtcgaactcgcactcatagaacaacacgagct

SEQ ID NO: 59878 - DNA, 628 bp, Arabidopsis thaliana landsberg
ggacatacgtcggccacttatccacctctggaacattatatagctctccccattggtttaaagtctagagtgtgtccacctccctaaagtcaaatccatgaaacaattaggtaacaccagtaattaaaaactctttccttttatttataatagaaaatgttaagtggagaaacaaaaagacttgctttgattgtggcaaatgtcatcttatgagcatagagaaaaaaaaaagaagacattgtaataagttactatatttagtattaccttaatttgtccatgaatatggattagagaccaaggaagtagagaccaaggaagggatgccttcattataaccatcaatcttgatagtcacaggccctgccatgcgaactaaaaaaacaataaaaattatataaagatgatatttatagtaacgttaggttatggttcgtgattgcttagtaacttaagtatgtgtctatctttgatatatagtaacaaaagcccatgtattgctaatttgatcttactcacacttggacacaaaaacagagaagaagtagaaacatttcctctagagaaatagcggtccacagtatagaatgggatccatcactacacttatgctgtgattaatagaaac

SEQ ID NO: 59879 - DNA, 346 bp, Arabidopsis thaliana landsberg
catgtatcgacgtcactgtcctctagtgtacttgaaaataataccatttattcaaaacatcttttaatttggtcggttcaaaacatattcaaagaccatagtcattatttgatagtaactagagatcaattgcattaccattcgtgataatagatggagcaaagttagttcgtgaacaattttctttcgcaatactaaagtttattaactttgggagaagcttgtcagagtgtaacatgaagagaggattttggtaccggatacaatacattgatcagagaggaatcagtgatttgattgaacaaagccaagactaaccggactaaaccggagatagagaaaatac

SEQ ID NO: 59880 - DNA, 456 bp, Arabidopsis thaliana landsberg
agggtcacaatcatatacttttatcaattattactcaacgttcttcttttatttggtctactgtatttttgatcttataaattggtttctgaaatcattggtaaaactagtttgtaagtaagatttgtttgttctgtttcaagtagagagactcatgtcatgtgatacagattggagactgtataagtctttctagtgtctagtctaagcacattctctgactaggcaatatggttttagactagtaagaggtctaattatcaatcttgatccgttttggaaatcatgcttatttcaatatcttgatgcctttataaatctcaaaaaacttgtagaaatggatggtggaaatttgcgagaggatgctccagaaacatttgacaacaggtttgatctttacacaattttcttcatctgcaatgataccggctttaagatgaaagccatctattaaac

SEQ ID NO: 59881 - DNA, 532 bp, Arabidopsis thaliana landsberg
taaatacaaaatatcgaaagtatatcgttatttatataaaaagaagggaaagaaaaaggatccttaggttcagtgtactatggttaatgacttaatggtttggtagaagaagccaaacaattaaaggatgtagtattagacaagtgctttgtttaaaacgaataatatataagagctttggttgtttagtggcaagcaaagtaacaaaaagacattctacaactaactttggactgtcctaaacaccaccacattttctactaaataagtggttcccttatctatacgaagattagcaacaccatagaataccatatatataaaccaaaagaagaattggatttttttgatattttatgaaccaaggacgatatattatataactttttgggataaaatttgagtttatttaagtgaaaataacgtctaagaaagctagaaccatataacatgagaaagcccacttaaattaatcatgaatattgttaattcattgatacattggtaatttgctaactagtcatttatatgt

SEQ ID NO: 59882 - DNA, 1064 bp, Arabidopsis thaliana landsberg
tgatgatagctcttgggcttggcatgaagctgaaatgaagaggtctgttgatgacatggttgcattttcgtcttcttacagcgcaaatggactagattctccaactgcagcctcgttctgttccccttttcaccccttaggcccaccaaatcagcctctcggttatgttgtgccaggtaatgaaatatctaccaaaatactgcaagctccgccaacaacaattgaaggtgcaggtgaagaggaagtctccggaactttggctagtttatcaggggatgttgaaggcaattcaggagactcacttccttatccaattttgcgccctataattatcccaaatatgtcaaaatctgaatacaagcgtagttatgatactaaaagcccaaacgttccacctacaaggcgcgagcatcctcgtataaagcggccaccgtcacctgtggtactatgtgttccacgtgctcctcgaccaccacctccttctcctgtgagcaactccagagcacggcgaggttttccaactgtgaggtcaggaagttcaagcccaagacattggggtatgagaggctggtttcatgacggtgtaaactgggaagaacctcgtggagcagagattgttttgccctggagaaacaaaagccttgcagtcaggccgatcattcagccgttaccgggggccctcctgcaagatcacttaattgcaatgtcgcaactaggccgagaccaagagcatgtaagcaacgtctttgatatctatgtatagctaaattctgcctaaattacgtttgtctataatgctaatttacagcctgatgtggccttccctctgcaaccacccgagttattgaactgtccaatgcaaggggaatctctctcactgatccacggtattcttaatgacgagatagattctttctgcaagcaggtaatcacaatacctcttttttttctccatatgctttagtagctgcctttactttgcagagaactatatgagcatctttgaagtgtgtatttacttttcttgggatggcgtttcttctaatcctttgaattatcgttag

SEQ ID NO: 59883 - DNA, 1028 bp, Arabidopsis thaliana landsberg
tattgcattcttgtaatttggtttgataggtcttataaaaaaagagcattacagaaaaagaaaaaactataaaatatatatatatataaatatgacaaaaatagaaaacaatatctatttagcttaaattctcttttacaattttagtcttttggttaatttcactttcttttacccaaatgaattgtcaacccaatcttttccagtcttcgtgttggctctttctcaaatcttctagaatcatcttcaggtcttcaccctctctctctcaatcttctacatcactccatcaccaacataaactaaacttcactgacattaaaaaaaattcaaaacctttcaaaaaaaccaaaacatcaacaatgttcggcgtcgtcttccccaatcgaagtttccctatagacatctcaaccttcactcaaatcgacacattccactgggttctcgacatgaaccacttcgtcggtaagtacccatctcccagaaaccaaacttttcaaaaccctaattcccaaaatcaaaaaccctaatcgaaaaatccaatctttttctttttttacaggtgaagcttatgatcaaatctcagagatgtgtatcttcttgttaaacaatttcaatcttccaccagataaagctttagctgtttatgttcaatctccaggatcagcttttgtgttctgtggtgctgtaactttagctagaccttctgctgttttatcacttcaatggcctgaacctggtagtgcagcgaagatgcaactcacggcgggtgattcgagttccttatcggcgaagatcggtgtttcggtggaggatgtagcagcgttgaggtcgttggatgttgttgcggagaggaggattgagaaattggctatgaaagttggagagaatttgtttaactttatgcagtctttttgtggtgttgatggaagtaaattggttgttcctatggatattttggatcgttgggttaagaagtttcaggagaaagctaaacgtgatcctgatttcctcaaaagctttgcttt

SEQ ID NO: 59884 - DNA, 542 bp, Arabidopsis thaliana landsberg
ttgggttttggcctggatcccccggcacagtccaggccctcgatcacgcttccatcgggccgcagcgctcgcccccgcgcgtcggtgcgcgcgccgccctttgtgctcatgatcgagcggttgaaacggatggcgataaagggagactgcacgatgggctcgaacccgccccgcttccgtttatcggccgcctgctgcgctctcgtgcgcccgcggccgaaatcgctatcgacgcccgtggcgcaaagggcgttatagcgcgcgaccgtatccgccaaagcgccgggcggcacgccgatcttcagcgccagctcttctagggtcgcggcttggaccagccagcccggcgccagcctggccagccaccgaaccagcggcatcctgggcaggtagcgcgcatcggccacgacatgggccggcaaatgcagaaactcgcccgacccgggatcacggcgatctatcacttcgccgatattgggaatgagttcatccgtgaagcggcgcccatctctatcgatcaagatcgagttggccctttccgt

SEQ ID NO: 59885 - DNA, 1180 bp, Arabidopsis thaliana landsberg
cgtttcaattatggcaacttttgcttgggattaacaatttaacaatggcaagtataaaacctgtgcttcatgtaaaacctttaatatgattttatctttcaaccaaccaacaataataataagaaaaaaaacagtaataataataataaaatttccatataaaaacagcgatatacccgaatctaataaaataatactaaattaataaaagtcgttaaacacacaattaatttgtgagagccagcgaagattttttctgattggggaaaaacctaagtgaagaagagagacaatacaacaacaacaacaacaacaacacaaaagcagacctcaatttcttcacaattctgatctgggttttgagaaattcggaatctttctttctctcgtttggttaatgcctgggaatcacagtgagatttcattgaatgaacaaaacagagtcgatgataacgataccaagacgaagacgacgacaaggaagaagaagaagaagaaagatgtaacaatcgttgatgatgacgataatcaattcgataccaccaatcaattggtaaagagtaagaatcgatttttaggtaagtttcgtaagaaacccaaatcgccaaaacgatgttctgggtcgcgtaaaggtgggtgctttcgtgtgatgagacgtcgaaggagagatggtgatggtgatgattcttcggtttcgtctccagtttctgatcctaatgatgaaaggtttagtcatgagatgttgagagttatgttagagactaatgatttctgctctgatgagtgtaatccacatcggtgaatattttgtatgtttcattattggcatttggggttggttgattcttatatttatagattttttggttttgggtttctttctttggatcaatctgtatagaatctctccatcaaatggctatgagtgttttgtttcttatgttttagaccagtgatgattctttaaaagggcaattgtgtattgaatcagatttgttatcggtagatttcatttagttgagttagctttgtgggagatgatcaaacttatagtaagttcaatgtatttagattaagactggcttcagtgcagagtaaatttacatgatttttttgtctttctaatgtgccaaatgtgtaagatgatagttcaagacagataatgtgtgtatttgaagac

SEQ ID NO: 59886 - DNA, 209 bp, Arabidopsis thaliana landsberg
caacagaagggttgaaggggaaggagggcattgtgtacacaaggtgatctgaccaccctcatacacaaggaaacactaaggctgtgtctgcggatcaagagacctagctggagtgttaacacatccgtaagacaacacaggggtctgaatggctgtcatgatctcaatactggtataaaactagctaccattcctctattaagaacaca

SEQ ID NO: 59887 - DNA, 1324 bp, Arabidopsis thaliana landsberg
acctattggcatatggggtgaaaacaatttcactttccaaggattattggagcatttgaatgttacaattgaccggtctgattacctgtggcataagacaaggtagatgccgagttgtctatttcatgatctaactaacatcaaccattgaagggaaagaattcctacaagatagatattcaagatgcttttacatcataatttgactgaattaccggaagttgtttgttgtatgtaatggctttttgcttctttgtcaaccaaatgtagaataagcgtatctgaagatgatatctcgttctggaagaaaaatggacctaactcaacagtgtcgattgatagcatgagggatgtgttacgtgtgtttgttaacaaacaactcgcaggtaatttacaacactcactcctggtttttatgcatgtctgcaattgtacaaatgcactgctcctgtattgtgtctgttcgtggttgggtatgccgtctcttgtgattcgctgtgtctaactatacatgagggttatagctttcataaagtgcaacgctttataaattgttttctcccatcttgtgctaactttttcctcctgctgaatggaagtaaaggcagtattgttggtcactgggtgaaggcagtgcagcctgtacgatttatacagggaaacaatgatttacttctgttgactcaaacagttggtttacaggttaatatctactacctaatttctctttttatcttttttcttacagctaattgtgatcactttcgactttgtggcacagaattatggtgctttcttggagaaggatggagccggttttagaggcaaagctaagcttactggattcaagaatggagatttagacctgtcaaaatcgtcatggacgtatcaggtgtagttagcgtgcatatggtttaaaattatatgtcttaaaaaaagttgaacgttgtggattcttttttctttctctcgctttatctgaaatatgaagattattttggaagcattgaatgtttggcgtttgttgtaggtgggattgaagggcgaggctgataaaatatatactgttgaacacaatgaaaaagctgagtggagtactttggagaccgatgcttcaccttcgatcttcatgtggtacaaggtaaatctgtgaaacatgttggcgttttgttttctcgtttctccgaaaacaaagatgttttcgtattaccgtccctcattaatctactgatcattgttcattttttttccccttattgaattagacatactttgaccccccggccggaacagatcctgttggtcttgatctggaaagtatggg

SEQ ID NO: 59888 - DNA, 166 bp, Arabidopsis thaliana landsberg
tctggtaaagaatctttatctagttgctctggaacacttaggagtccgtctagaagaaatacggcgtactggcggggacacgctatggggtggagccccgctgcacgccgaccaattggcgaccccgaacccttgctttggcacgaaacgggccgcccagtcggga

SEQ ID NO: 59889 - DNA, 1082 bp, Arabidopsis thaliana landsberg
ttttaaattttattatttagtgtcattcttatgagttgtattctcacaattgtcaacacatatcggataaggaaaacaataataagtaagattttacaatggtgttttgttgaagtacaaagaatatcaaatattctatcccaagcaaaaagatttgaaaacaataaataataatcaatatgtaatccgtagataatatcaacttatcatttcatcttcagattttttttctcttttttttttggtacattaaatcaaatacagttttgttatttaaattaacagagtacttatttttgacaaactttcaaaaactcttgattttaattttaattttctaataacactagtttagtacatttgtttggccaaaacattagttcggtattacacgttttttatgccacaagtcatgttagtcaaatataatgtgcttcaataggactttcaaattttgaatattcctatttattaaattcatttctaatatctgtatttagctttccaccaagacaaaaaatcactgtagcgtgattagcacttagctcacaacgagagaacaggcaaaaggaaagaatgagagattctatcgattcataaaggaaaattgtacctctccaattctctgcttcggtcatcgtagatccatgagatcttcagcgggaaagcttctctcccattctctacggagaaactgcgggaaacttggtgatggattttggattccggctacgaggtctcagaagatgtggaattcgacggtaccgtcagatgaaaatcctgatcaaaattcgatcgatgcaggatcttcaatgcggaaaccaattagcttatggcctggaatgtatcattctccggtgactaatgcgctttgggaagctcgtcgtaatatgttcgaaattcctaccggagacgacgcttctcagtcaaaattgacggctaaatctccgtctcgaagccgaacgtcaattctctataagttttcttctgattttgttcttcgagaacaatataagaatccttggaatgagattcgtactggtaaattggttgaagatcttgacgctcttgctggaaccatc

SEQ ID NO: 59890 - DNA, 1555 bp, Arabidopsis thaliana landsberg
ggacgtttgtttcatggagtctagctctcgtgtcattagagttgcgactgttcctgttgctcctatttttatcgatcctcctccacctttgatctgttcaagcttctgaaccattattgtaaattttatttcgcctctgcaactctctaagaagacacttcttgagttttacctgcttcacgggtctgaatataaatctgaataaacaaacaaagcatcaatctaaatgaataagtaacttttttataccaaaaagtagaaaaccaaacaaatgcaccactggcttccaaattggggtatatgcgaaacgatttagtaacttaagtttctaacttagcaaatttgaagcagaaaagaggaactgagagttccatgataaaaccaattgtgaaatgagagctgagaattagatgttgcaaagctcttcacaagcacaatctagaggaacaaaccaattgtgtactgcatcataactaaagtctttgacgttcactttcaagccatatccagtgtataaatgtaaaagaaaagaaaaatcgaaatcaaagcaccaaggtcaaactctaaccatacttataagctgagaaagaaaaacatcaaagctagttatagatactagacatgacacatttgaataagagcttggatcacatcattatcataccactgattctgttaactaatatcaaatgtttggtattacgtgtatctatcagattgattgaaatagaaggttgaaacataaagcaaggtaatgtctcacagaaacgattcaacattattatcaaaatcaatctctatcaatcaaaagcaagaggcaatcacaacaaaaggaggaaaagaaaacctacgcactagtgatctgaagtaaaacaaacatgagaacgacatttttatgattctaatccttgaccagtcacattcaacagcgaagaaacaagtcccagaaaaaataggccaaagtcatatagagaacaaacacaaattcccctaattaaaaagcaacctagctaataatctcgatagatcaccaaacaatgggtttgcacaaagaaagcttaccgatttctaatggatcaagtgatcagaagaaagctaaacccttttcaaatttcaaaacttttagaactccaggatgtaattgatcgaattggattaaggaacagcattgaacatttaggtctacaagaggggaaataaaaatcaaaactttggtcttttgattggttttgaaatctgagtttccttgttggggcgtgatgaattaagcagcgactagtcaacgttccttgtttacagtgtagagtagattgctccaatcatttttattgggctcggaagtaataatgtttcactttttgacgaacaagaagaaaaatatgcaaattatactgaaagccctaaacttttgagtttatcacatttttaacctaaagttatcaattgtatcaaaatgatgtagttatattgaaactctcttcaccagttagaggctttaagacttgccgacaaaatgtagaagtaggtgtatatctccggccatttcagtaactag

SEQ ID NO: 59891 - DNA, 1371 bp, Arabidopsis thaliana landsberg
gttttgtgtttcaccaaagattgactgcttggacttatattagcaatcatcaccgtgttacacgagccgcctagtgagtctttgagtagttgtgtgagctttgagtttctgtaaggaatatgtttcttgccttccacaagcgcgttaatgcaactacttaatgcaagaagtgatctgtttatgtttgcaccttccagtgatctgagcgtcctttgatcagttgctagcgctctttcagaacccgcaagatcaatgagagatagctttcctacccggctgatgatattcatggaagcatctctagtcttatactccactattacctagagaaccgcaacaaaagatcaacctaagacattcctggcctcaaagtcgatgatacactattgatttgacacaatatgaaactgagaagaatgcaaattctaacctgaaggatggcatgtgagcgagaagatgtttcattgcaacgagtgggctcggtagttctgttttgatttcccctttgaagcaaagccataacctgcaataaacaataacaaacaaatcttatatattagcttttgtttttcaagatcattaaaaatggaaaatgtatagattacaagaagaaacctcatctgttgagtaagctctatattgagtgagaccagcagccacaattccctgatttcgttcacattcagagaaatgaaaacgaatgagaccattgtgttcttaattcttatctaaagctcaaagagacaaaatgtaatgtcagttttatgtttacctgcttatcttcacggagaatgagaggtctaccaggtgaaagcaaatctctaacagtttcattataaacctcaagataagaaagatgaacaacatggttcccatctaagcttctctgtctaactttagcaaacaaatctttgattgctagaaccattacacctggattctccattgtccctaacatcgtataagtcttgcctgctcccgtagcaccgtagcagaaaactgaaccatttcttcctttaagaactggttcaacaagatctgctgatctgaataaatcaaaagggaaagacatctaagaacaatgctaatcaaaagatccattattcaaggcaatatggttgaattacacttacgtggtggaataaacctcttgttgtgtggtagtttcaggaaatgaagaatcaaaagtgaaatgacgaacacggagcctcttaagcctaaggtaatcattctcattcgtaaactccgttaggtaaacatctcttttattcaaaaccttgacacaacaccttgacccattctctctttcctttttccccattggtctaagcctaacaaacaccaaaatccgactcacagaagcattaagac

SEQ ID NO: 59892 - DNA, 418 bp, Arabidopsis thaliana landsberg
cccctccacgcttccatcgaacgagatggtgcgggatgtctatagcatttttggaaacaggggagctattgctccgcaaaactgagctcacattacatatgtggcaatgccaccatgagctgtgctccagctgggggaagaaatcgcacgtaatcggatcttactgaggactgtatcgaccgagaatcggtctcgacatgacaatgagaggctggccaacatggcatgagctcttagcatggtacagatggcacagctaaatattgaatctgactctacaagagctagagaacgacacatagcagattctggcgcaatgctcggacactgcagtcaatctatcaaccctgtcaaaccaatactcacagaggactgagtacaaacacgtatcacacattgatgatcaagggagacgact

SEQ ID NO: 59893 - DNA, 1331 bp, Arabidopsis thaliana landsberg
agacccttaaactgacttttctcgtgggcggcgtcgaatttttggttaacagacaaaacatctggggatggggcctgcataactctatgtttttatactactcatttgccctctatttcatgctactcttaaaaatagctaaataaaaatacttcaatattagaaaaaaaatcttcttgatgtcaaaaatacactttagatatcccctctagttcttgtgatgctaatatattacaaaattgtttatatatatatagaaatattacctctaccaatacaaaaatcttgttatatcaattaaatataacactatccgactagtgtttactaaaataacacataatttttaattatgatctttgaattttagtttatgtattacgctttataattttgttatcaaaaactataaaagctcaaaagtgagcatctataccctaattccgtttttatgcatacacttaggtttatttttattacgagaatctgtgtttagtatatataaaatagagtttatgaatgactaagttaaatacttcaatactaattaaagtaagtcgtattgatgcagacaatataaactttagatatctccgctagtttgtataatgctaatagattcaaattgtctttatgtagaggaattacctcaaataacataaaattttcattttattaattaaatctcattttgtcatttcaaaagtcattttaattactgtgttatttgtctaaagtatactccaaacaagaaaccaaagtagaaggtcagtgcccaagagacaaataaacttaagcatgtccactctttttagcgatcggatcgcttatctgttcttatccattatggaacatgaacgatgttcctttaagactaccacattcaaacgaaaaataagtcatcgatgatagactggatagttatagtttgatgatctagctaattgactttcatatttacataaaacagaaatgtgtttttatcaaaaaagaaaaaagaaaaaacagaaaatgaacaatacatctcacatggagtttgtacaagaatccataataattttttgttcggtacagtaggttagatatacatttgaatacagtttacaagccaaatgttagaagcaacatatttatatagtatcatcaatatacgatccaaaatgaattatagattgacttatggaaaagttagatactatatgcatgattgccaaatacagagaaaaataacaatttaagttctttcaaacaaaaggtttataaaatgactcggtgtttgacataacttggggttgtttttctttggtaattcaaacacgggttggtgtata

SEQ ID NO: 59894 - DNA, 383 bp, Arabidopsis thaliana landsberg
  unsure (1)..(383): unsure at all n locations
tatggtaaagaagaaagggcaattaagtcatttactcacgaatggcattgttcgtaattttggcaatattaaagggtaatttattcttccttcttctatatattgncttaaccctacttgatatctccttgtcctttcatttctcctcctctctcaaatcgtctaattctctctctatctctctctctatctctacgcttctaaattttattatttcttaagttaaagaaacagagattaaaaaataaaaagccttctcgggttgtttaaaaatactgtttcaccgcagtaattaatttaaaaattacctgtcggtgacgtggcatgcacttaaaaagaaacagccatgaatacaaaaacgatgcgtctttccccacgccgag

SEQ ID NO: 59895 - DNA, 629 bp, Arabidopsis thaliana landsberg
  unsure (1)..(629): unsure at all n locations
gaaaatcagccttgagaataactggcacacctaataaattcacctcaatctagtttttctcataattacctgcagaagtgagaggtctctgagtatttcaaggttatcaggatctattctaagagcatttcggtagcatttgattgcttctctatactctctgtctgaccggtacaaaagaccaagcacatgccagcaaacatggcttttgatatcattctgcatgaaaaaatttgaagtatataaatcctatgttaccctgaaaacaaaataccattttggaaactaaggaataaagttgtgattattgaagagcatattcaaaccttcactccaagtcgaacaagctcatatgcttcagttntgcggtccatacagtttagagtcagtcctttcatcgataaagtctctgaaaatcacaaacaataagagcgacaagttttaaaagaaagaaaagaataacgaaaagggttgacaaatcaaaaaaataaatattcagcagaaggaagaactgcgtttaacacgaaacagaactggtctctactaacaaaactaaacaataccaagcattacccttgtactaaaaagtaatttatttgctctaataggaagaaagaaataaaaatcta

SEQ ID NO: 59896 - DNA, 1330 bp, Arabidopsis thaliana landsberg
atctatcacaggagaaaaatgatagttgagcaaacgcttgaggaacaaaagaataaactcaaataaacgtgtatgtaagactacggcatggttaccttctttagatgtattggacgattgtttcacagcaactactctctcttgaaaagggtcttccagaggtttaaaaacaggacgaccagcaactccaggtctcctttctccaaaatgtcgagttacttttggtttgtccacatatctttccgcacctgagaacaaagcttctaaaacttccttttcaagaccattcttagcattacgcccttcctgtgaacctgtaaaggttcttgctccaacactgcatcatcacaaaaagcaatttgaagaggaaaaaaaatcaaaaggattgcaaagggaaagtttcggtacaaagattgactaggaaaaacgtgcctctgagaaattttttgtagttccatttggttgcaggatgtagattgtctttgaggatcaacttttgacatctatatagaaagggaaacaaagcaacagagtcagatttagaagaagacgctattctataacaaagaccaaactgaaagtcataataaaagctcacaacttcattggaaattccaacatcagcatatttcttggtatcagaaaagtcaagcagtttctccgtactctgcaatataatgaagaatatagtgtagatgccaaaagaagaagttgtaacaaaagcaggatcaaatgaaatactcacaagagccatatgccaagagttatagagataccactaacaatcaagtgatcaaaattagaggcgacagtcggtatgaaaagtcaactttatctcaaattttagtcagcagtagtaccaagacagagaaaaggattgtcaaagtggctcaagggtataattgtaattattgttaaagtagctcaaataaagagtgatgcaactataaaggtcacaggtcataattaagcggtggtcatcttgatgagcttcaacgtatggggctatataatataactcagccaggaaaaagtaaaacatttaaaatattttagaaaaagaaagaaaatgaaggcatatgggaaagcaaaacgctgttaaagaaacaaaatacattatttttcagagctaaaggcatcgggttaccttcttcacatcatatccgcatacgcctgatagtttagtggaaaagcagattaagtttagcagctaaggtcgccaataccaccattaaagaagaaaaatatgtaaagcagaatcaaggaaagctagagaataaattaccaaaaacctggtgaatgacttcttggctagcttatatcgttcttc

SEQ ID NO: 59897 - DNA, 260 bp, Arabidopsis thaliana landsberg
ggagggaagggatgatcaagaagggttactgtctctcactacctttagggaagtgtgtgggaagagacaattcctacatactcgcacacacgactagaaggtaaagaagtgcatgcgcatcatagtaggaaaatggattatcaatcatgctaacaaaatgagcggctagtgaactcacatgagcaatctatggaatgaaattcaatctggcacttgcatcggatagtagatgactaccaattacgatctactataactct

SEQ ID NO: 59898 - DNA, 527 bp, Arabidopsis thaliana landsberg
cccttgacttatatgtcttttccacttttcaatgttttatggatttcgtggccaatacaatagtagaaagttatataattttaattttaaataaaaaaaattgtggaaaggaaaaacaacgaaactgtttgatagagcttaaaacaatgaaacctagaacttgtaaagttttatgttctacacatatatagttcgtgactacgtgtatataacaaagcgcattaaaaatgaaattgtagaatcaggtaaaaatgatttacgtatcgtattggtgagaatgatttagctataactatgatatattggtaccattattttgtgtcattcttcttatatattaaaacatgattatcttctaaatccgtttctgatatttttctgtttggcgttttcttctttcgatagacatccgtcttttaacttgtctttcacttacaagcaacttacttttgctttgcttatggatttaagatgattaaaaccccattacttatagttatatactaggagtattaacttattttccg

SEQ ID NO: 59899 - DNA, 469 bp, Arabidopsis thaliana landsberg
  unsure (1)..(469): unsure at all n locations
tgagaattgtagctcttaatcatatgactacgaaattagaacaaacaaaggacaagagaatgattatataattttattatgacattttatatgtgatctatcttattatctttttatcaacttaatacaatttttttttttacatcttgtaccatttgtttattttcagaattaagagagaaaaaactaaagaatatttgaacatatattgtagttgggccgtattgaattatcttcgcttgggctcattttaaacattntaacatttcggttcgactttgcgtcgataaatgtctggtttagattcataattttgattcgaccggttcacaatcttaaaccaaacacgaattgaaaaagacgacgacgagggttttaggcatttgcgaggatgttgtttaaaaaccgcgctttgtactcttcgcggcgtaatttatcttcaaatctctacttttttagtatctgagta

SEQ ID NO: 59900 - DNA, 1470 bp, Arabidopsis thaliana landsberg
ctttttggtatttcttctaagatgttgggcaagctataaaggctttttcaggaacgaaataattaaaacaagattttgtctaggcgtgattttataagtaatcagacatcatcaagatatattaaaatcacaagatacctgtcaatttcgtttaatatcttctctttagccttttcctttgtctctttttttcgcagtgccttttgcctacatcgcttatttaattccacacgggtaaccctctttgttttccttgagacactgcagtacaataatttcaaaaacatgagtatccaactttttgctgagggagtaagttaacaaattacaattttatcttagacgattttatgttgatatgtaaataagagagcttcttacttgttcccagcctctgacacttcaatcttaacatctttattatcttcaccttcaccaacattgcccacttcaagaaagtacttcaggtcttctgcaagtaatttgttttgtaacggaaatgttaattcatgacatagaaaaagataagattacgaagaaactaaaaagtggaataattgactaagcaaacctttaatatcatcacccaacaagtccaccattacagaatcgtcaccaacactctgcaaagaagggagaaatcatatgaagataatctcccaaggaaaaagttcgagacaaaacatctcatacatgtaaaaaaacatatcatcaaattactcactttttgagcttgtctaggtgttttgtcttctattttcttcaagtttgtatttgaagatggctttaactggacaaatgggttctcctttaatctgcagtacaagaatttcaaaaaacatgaaatccaactctttgctgatggagtaagtcaacaaattataattttctcttggacaaatttatgttatcatgtaaataagagagcttcttacttaattccagcctctgacacttcactctcaacgttttcattatcttcgccttcactaaaattgtccacatcaagaaagtacctctgagatggtaaatacaacagccatatggattaaactatcaaattcaatgctcatctttccatcgattatattataacatacaagcaaaagactcacctcatcttcactgagtgtatccccttcaatagtcaaaggaacaggtgcaggccctaactcagttttgtaaactttctgcatttcttgagcgacggcttcagccaacatatcctgcaatacagaaaagaggtgtgaatgcaagattcacacacaagactaggatgataaaacaagctcaaatctgtgaaacttagttcataataaattattacctggtgactctcagttgtagggttgtatgagcatcctggatgttcaatttctactgctggaataatcgaaggatttttgaaaatctgtacaccagacaaaagttcttagccaactgagtaactgtctaacaccgactaactgt

SEQ ID NO: 59901 - DNA, 564 bp, Arabidopsis thaliana landsberg
ggatcttctgctgaggaagaagaagaagagaaccatccctttctgtggcatgttaatggagaatctaaaagtgtgatcaatcaccgaaacagaagacattttctgctgaaacgatccatttaatcggatttgagatcttcttcttctcgaggagccttgtgattgatcacctacgaacaaacaaaagagacagaacattacattctgagaatgttgttgtttatataacagaaaacttggagcgcatgaaaaggaagccccttgaacttccaattagaaaaatggggagttttttctttttttggtatcatcggcataaataaagttcataaagtttaaaaaaaaaaagattattggcaaatcacgttgcagatttaaaaagaagaaaataaatcttattaaaatcttcagaaaacaatctttctaaaataaggaagaatctgtctccactttgtttttcgttttctgagattaatacatgcattcgtttcaataaagataaaccaaaacccattattactaagaaacattatcgaaaaatagtctggaaaaatcccagaaaaa

SEQ ID NO: 59902 - DNA, 113 bp, Arabidopsis thaliana landsberg
cgggctgcaggcggggggaaagccacgtacattccaacacactcttatgttacacatttcctcgtatcatcatttaaatattatgctgtatgagggtccccttacataaacag

SEQ ID NO: 59903 - DNA, 500 bp, Arabidopsis thaliana landsberg
taaatgttactttgattctttaaaagagaccttcagctactaaactgataaagatattcatatttatgatggagctggcttttactttaacattgatcaaatttcccctaaataattgaggcattgactgattgattaagataaaggttcctatcacagtagcatgcaactgtttctctaagtaagattacacacacatgaaactatgactctgtggggcgtagaatgtttaatatgatcagttcaaggatacacaagttatctgtgtttatgactgcttgtggccttgtaactgtatctcgatgttaaatggagcttttcttctatatcttgtagtgctatgcagcgtggtatgcctcagttcctggtttgaaagtccttgctccgtattcagctgaagatgctcgtggtcttcttaaagctgccattagagaccctgaccctgttgtcttccttgaaaacgagttactgtaagtagtattcctaatttgagttcttgc

SEQ ID NO: 59904 - DNA, 942 bp, Arabidopsis thaliana landsberg
aaattattcaattttttttgggtgagcgtttacctgagaatgttgagctccaacaccagcagcagcaccattgggtcctctaaagacgatgggtacatttatctgtccagcagacatgtaatttgactttgcagcggaattgatgatatgatcaattgcctgaaagaagattactagatattaggatacacattgggaaataaatagaacttttgtgcactttaatgtccgaaagaagataaagtgtacgataactggaaacatattgcgccagagtgcatgatctgagtaacgcaacaattatgcataatcaagtcaaagaaagaggcaaaatgtagtattcaaagaatataataaaaaccaacgctaacctgcatagagaagttaaacgtcataaattctacaacgggctttaagccagcataggcagcaccaactccaattccagtaaatccagcctaaaacatggttaaacgataactgtcagaaatcttctcaatcaagaaacatggaaataaggattgagactgcagtacaagataatagtataagaattccaaacctcagtaataggggtatcgtaaactctctcaggaccatatttctccaaaaggcctttagtgatctatgagtacatgatagacctccagcatcagatcagggtcaaaacaagagaaatttaactggaaaatatctatttccatcaggtcaaataattctaaccttgtaggcaccttgatattggccaacctacaataacaagataaaagatgagatattgatatttgattagaaattgcaagatgaatttatcaaacatgttagctgcaactaacctcttcacccatgacaaatactttaggatcagcagacatttcctcatcaattgcagaatttagagcatctctgactgtcatctaaaccaatgatttgcacaaaaaa

SEQ ID NO: 59905 - DNA, 492 bp, Arabidopsis thaliana landsberg
aggaaggcctataagcccactattacaaacagtacaagatatggacgacagttttaagacacgtgttatgcaatttgggttcttgtgaggagaacgacgcttcatcacgaaccttatcgtcggaaactcccgttgtcggtcgacagataatattttgagattcttcattgagctttcactcatactagacggaagataacaaagataaaaaatccgattttgatttatgaaaacaagagaaagatgaagcttttgtcactattagagatacacgagagagagaaaatgcggttttacaacctgatacatgatgcatattatatggcgtttagcgctcagcattagcaattttacgcaatgatagctttacattgtattttgttagttgtgcgttttttttataccaaaaatgtattctaaggttttaccctccgactaatctcttaagtaagtgtagccatcgaatagcctactcaccaaattttttaatgg

SEQ ID NO: 59906 - DNA, 533 bp, Arabidopsis thaliana landsberg
aggataattaacgcttttcagagggaatatgctttgaaagattctttaatagtgtcatttactttattattagaataaaattagcattgtcgctaaaaagcatgcaacaaacacattataaacttttcttcttctaagaaaataattcaatttaacaatttaagttattcgctgatgagtatatatattttacaaaattttcagctaacaaatcatgttttcatttttttgtttttgttaaatatgataatcgttcaatatatttactttagctactttacgttccacaaaatataaaatatttcttttaatcaacaatagatgtaagatttgataccaaaaatttcttgttcatcaagacaaattaatgatttatttatatttattaattaatattaatttttcttgatctatgtgataaaataaaaaagatcttttttattttaagatctttaagaacgatttctctggctttctaaacacaattcttaatgttccttgttcttaaaattaaaccaactgctgattttctg

SEQ ID NO: 59907 - DNA, 435 bp, Arabidopsis thaliana landsberg
  unsure (1)..(435): unsure at all n locations
tgacccacagtaagatgtttggatttaacttaccgtgctctatatatactttcttttcccaatttattaattccagctcatacgtagttatgacccacatttttcgttgaggtagctagctatgttgagtatgggaatttgtagaagctacgtgattcagatgtagaagagcaaatggttcacaatgaggaatctacctctcatgaggaagaagaagaggatgaaggtgaggaatccacatctcatgaggatttggaagaggaataggataaagaagatcctcctccacctcttagacgcagcaaaaggctctgcaaagatatttacaaagttaaaggaaggagattcaagaaatctgaggcggatcacaccctatttacccttcaaggtcttanagcattggtgttgttctcatctacttagatgatttaatca

SEQ ID NO: 59908 - DNA, 347 bp, Arabidopsis thaliana landsberg
tcattatattagaatgaaagaacaagtttatatatagacaacatcacttaggaaggtgacaaggaagtttgtttagaagtcgctcggagattttttctctttttgccgccagctcattatgcaagatataaagaagtcgaccaaacaaaaaagggcaaagacaacaaaaaaaaaagacaaggaaattacgcttaaatattagattaggatttttgctatttgaatacagttttatattaaaaaataaaataaaattgattgaatatattttatgaaaacaataaaactgttttcaaatgaatcaatattcctgggtttttgataaataatacttgactctatgctgc

SEQ ID NO: 59909 - DNA, 107 bp, Arabidopsis thaliana landsberg
aaattcagatgctgcttaatttggcgcaactcggggaatcttaccaggtcctgacacataaaggaatgcctaactgagagctctctctcgattctatgggcggtggt

SEQ ID NO: 59910 - DNA, 374 bp, Arabidopsis thaliana landsberg
ctgaacccggggtcgagcgtggcggaaccggacaggttgtcagacgcgctgaagggaaaccactcgagtggatctcatgtgtggaccataccgacgcatatataacgatcgatcactctaactgcatgtggcgccacaccacagcggaggcgtcggtctgcctcccacttcatctaaagaaatatatcattattctgcacgttgttcataacctagatctattatttatagatagattggtccatagcggattaaccgaccttgagagcgattgaactgacctgcacccgtcgaactaataattagattttattttaaagtttatggtgaaaactttaggtgtagtctatgcatacatctctactttcaatacc

SEQ ID NO: 59911 - DNA, 176 bp, Arabidopsis thaliana landsberg
tttgcattatatgttcacaccttttttaccgagagaatttttatcttctggtttcaacgtagaataatcttgggttggtctaatttaaatttacgtgtcatgcagcatcctgtatgaactatgcatttctttatttcccttcactctttcctaccttctttagaaaacccccctct

SEQ ID NO: 59912 - DNA, 1819 bp, Arabidopsis thaliana landsberg
gtaggttttgaccagtaagatttcatttggttccatccaggttttgtcttggacgcagcaaataactcctcttgcatgggaacctctaggacggtctctaacccgtcctcgaggttgtaattcggacaaagtttcctcatattcgcaaaaacaaaaaaaaaaaaagggtttcgaagggagaaatttaagctgagtgaagagagggaggctatctgtgggaaatttggatttgatgaaaacttaaaagagattgaaattagaaaagagacattcgtcgttgtcaccaaccgaccggaacgtggggaggccttttgttttgtcgtgtctgcacgctctctcactctgcttacgtctgtttatttatacacaagacatgggatcaagatatgccaagtacaatatctattttttggacaatctttaattgctaacaaaaattatgaccacatcaacctctaaccgaattgaatatgatacccacccttaaagatttatattgtataatttaatattttttggacaaaataatcgtgcaacaaatttactacaagcagagtattgacccgtttgaaatcataccagaaacttcatagacttatacgatcattctttttttatatatatataatagtaaatatcatttcagttaaattggacatgatctctaaagatcggaacattggatgttgaatccaataccgaatgactatgaatcgaacaaattaatacattggctatggcactttcgtgatatcctcgctacctaaagtcgtaatgaaataaaacattcctaattttacaacttttataaatatattaataagtttgattttcttaaaatagtattaacaaaagtaatacacgaaagaaaaaagaaaaaaagtaatacacgagcgcataaagtttttttttctcttgattagttgagttgatatattataatttaagtatctagttgttgaattgaaaattatgaatttggcttttggacataacaaatcagaaaaagccttaatttaaaattaattaccgaaaagttggacttaagcaacctgaaaaagataaacttgagcgggtttattgttattttctaatcactatgatactatttgaattcactctattcttaaacctaggtattctctaactagtattagtatgttaaattgttaatattcaactggcaagaaaaaaaaactgttttaactgacggaatacttttgtaaattatagttgtaaacacctaatagctaattatagtatttattaaacatcaaagattgcaattaaatagacctttttgataaatattgaatagaccttttgacttgttatgaatcttgatatatcaattagtggcatgcagagcgggagtcgttatatgtgaaccgaagttatttatgactaaataggaacattttggtgtaaatgtatctcccaattcaatgaacttttttttttttttcatctaattactattttagttctaagactatacaaggcttataatcagctattgttttaattgtaaaactatcgttttctcagtttctgcaaagataaactcagctattgaatatggtttcaaaaaaattgtatggacttgcaaaattatttgtatagatcttttctatagttaaaaagtgagggctatatatatattttttttgtttggttggaaaaaactatgtgtattgcacgttcatttgttcctaaactatatgattctgggttccttggattttttttttctttttctttccggaaataaaaggaattaaatacctttgccgttgtttttagaatatgcatttttttt

SEQ ID NO: 59913 - DNA, 537 bp, Arabidopsis thaliana landsberg
  unsure (1)..(537): unsure at all n locations
attcttttttnattttcataactgctgcgaggccgtattaacttagatactttgcctaattcatcgcctagaaaataatcagtccatgcgagcaaagccccggtttctgcagcgaacagatcaactataggatcttctacatcgggcaatcctacgccagccttctgaatacctacatgggcactcactccccaaaaactttcttcagagattgcccatattccatttacagggtgatctatgaaacgccctttgccctccattgcttctgccagcaccagactccataattgatttctgttaccaaaagaaattttttcataatcactacggtttccattacgtttatattctaacataaccgctgctggtatatttttaaattcttttccaagtgcatcttctcctcttttaatcaatcctgatattaccgaatccggtaataaggctttccatccggcaggtgtttgcgggaaaggttggattgatcttgtggataagcgatccagcaagctctttgttcgcagacttttccag

SEQ ID NO: 59914 - DNA, 1414 bp, Arabidopsis thaliana landsberg
acacttataaaattgtagcacatttactaagaaaaaattatattatgcagtactagatttgagaagaaagatatcagtgactttgatacaaattatgatgttgatcactgagacacataaaacactttggcaatgcaaaaaaacaataagaaacttatataagaataccaaacatatatacattattggttacaataaacagtaacgtctcgtctagatgtgaatactggagtcaagaacgtaacacagttcgaaaatgtcaaataatctcttgatatgtgtttcagtttttacggttttgttaccttaaattgtacaacacgactgttttgcttagtgaaaaaacgaatgtcttatgctatttaacgttgttactttcaaagtttttatttgcatcatccaaatatgttgggttaatacctcaaattttacgacaaaaaaaaaaaaacctcaaattttagtgagatttatttcgtaagaatatcataagtcattttttcatcatcgtcgacaactcctcacacatgcattatttttggaaaaaggtaaagtagcgacactattacaagacaataaactactcagttcggttgtgtgataacaccataactgtacatgaatgtgtatatgaacttgttataaatattaatactatccatcattgacttgaattataaaatattgtatccatatgtaatagaccgtaaaatataagtaaaatacaaagcattagacaaaataagtatcctaccatgcatgttcccaactagttaagtttgatgggttttctattgaaatttatataattgaagtaactacaatttcctttactagaaaagtggtaacagctaaaaaaggtatgattatcttgattagcactgagagagatagagtgattagagagtaagcaaagtcagattagacacaaaaaccacttttattaagagacaagttggtccagcgattagggtaagatagaggtaccaagtacaacagtgacacctttcctttcttgctgcttctcaaaactttctccctccatcatctctatctaatcccaaaatttcattatcttatctttttattttcatacatttttactccatttgtgcttccttttccttttgtttctaactcaccattttctttctaaatttttttaaatgatttattattgggattaacaattggaaaaccttttttcataaaactgatatatcctaataatgttttcataaataatttaaattagtaaattgttaattagaattatagttttaataacaaataagtattgtaaaatgattatactactttagttatcaatgaattttttcagatcaattttttttttaattccatgaatcttttgagtatcaatcttaattgttcattttccattatttatttttgg

SEQ ID NO: 59915 - DNA, 1047 bp, Arabidopsis thaliana landsberg
ggtcgactataaagctgctgatctggtacttgcaaaatttcgtcggtattcgaggggacgagttttcgggacagagaagctatgaaaggaacatgtcatgatgagataacagagccaattcagagcttggggcaatcaacctctggtcttaaccgaagcttcaacggaactccacttgtcacaaccgatcatttcttcgtacctagcaccgtaggttactacgtgggcagagacggcggatatgtgcaagatgaacacaaacaagatttgatttgtttgtccaatactcaaaccgatgactcggttaagcccaatggagttctaggccaaatcttgtttgatgtttatattccgaagaatgttgaggattgggatataaagttatcagaaaccgggcggtctaggcggagaccagggaagagatttatacgtagatcgagattgtaacatctgagttatatatattatatataccatgagtacccatttgttttcttcagatactactgttgcagaggtattccatttggttttccctcagcaaagatctaataaattaataaaataagatctattttgcagacaagacaatgtgttttcttggctgctgtataaatcaagttcctgttaatatccgcgacttggactgcatttaccattgagatcagaaaagtcacaaacgtcacggaaccgtaaaaatttgaaagaaacaaaaaattaaaaagctttttagttgtctttgcagtttctgcgtataaccagaggatgatgataatcgtgactgtgattggaaaaactcgaatggagttccagggccaaatgcacgtcgtgttgcgtttggagaatctgatagccatggctcatacaccgggcttttgttcttgggctgcgtgatggatattggagacaagtccttttcaatggtccttggttgcgtttcgatggtgcctagtgtcagtattggaccacccattcgttcagcttgctggaagataatgattttgctggggcctgaatggggagcgggaagaacatcaatgccaaaaa

SEQ ID NO: 59916 - DNA, 403 bp, Arabidopsis thaliana landsberg
aaaccggcgccccgcatgctcttgagcttttccagactgtccagcgcatcctgccggatgccctggctttcgtcattatccatgagcttgagatcgaggttcttggccagctcggcattcatggcgctatggtccttgatcatctgctgggcgaactgcttgacctgcgggttttgcgcatggctcttcgccagcttgccggcatcgatttccgccgtattggcggcttgggcaatcgccagtatctcaccgtcgctgggcgccgctaaggctggagtcacgctaaaggctgcgcaggcgcacagacacagcgccaggcgtccgaataaattgttcatgatgacttacctccacaatggaaaatattcagaccattatggccacgcgaaacgcatcaaccgtt

SEQ ID NO: 59917 - DNA, 541 bp, Arabidopsis thaliana landsberg
taaaagtgtctctttctaatctcctcctgtgattgacaaactacgacgttgttattacaaagacagaaaatcatatgtggactagttagtctacaatatcagggatttggctttggatttgagcaaacgtctcaacgatttggctgattatggtttgtaaatgagaagaaaccaagtagaattaatatttaagaggttgaatctaccaacgacgcaaagaagaaaaacatgtagaagaaacaacgtgtggattcagaggctaagcaaaacgacttgttttagagcaaaacgacttgttttagagcaaaacgacttgaactaccgagattcaaaacatttgcataacaagttgaaattttgctaacagaaaggattttgaaaacataccaaaagatcctgaagattaagtttggaaacgtagatgaagttgtctattgtcattttttatcttccactttaatgacatgttatataaacttctgcgagaattgcctttaaaatctaaaatcttgttcagagtcgctaacaagaaccaaccatt

SEQ ID NO: 59918 - DNA, 1238 bp, Arabidopsis thaliana landsberg
  unsure (1)..(1238): unsure at all n locations
tggggattctttttttttatcggaggcataggttagcagctttacccgcttaacccgcgacatgtgaccgttgctcatcttacatgggactcgactctcctatatctaagtttcggcttggtgttcttaccttgtttattttttttaaaagagaagaggacgtttttcactattatattaatgtcattatgatcaatctatatcttacggtacatgcaaaattttcttacatatttgaatgttggaaatatttatttagagttaggtgtatggtagaagttttatttgatttcaaaactgaaataaaaactacatttaaaatatgtagaattattaactctttgtgctagtggttgtctaacctaattagattggttggtgcattgtctatttggtccgaccgatataggagaccggtcttttcatttcattagtttcctcctgagtcctgagagatatcacatactaattgtcaaatttaataaagtagtgagactgtttttttttctcccataaagaaaagaagaagatagtactaataagtaataactaataaatagaggtgagacgaaaaaagagaataggaccccagaataaatgatgaaccataattatgaagccacgtatgtaacagtccacgtctgttcgtacacccgccgcggataatgaatgatcgcttaaaagctctggtctggacgctctttactttccccctttatcaaccacttttctggtaacatgtttacattttggagttgcttactttgccactcgtttttctttttttttggtcacaactttgccactcgcttctttatgtttcttaaaatgtttttttcttaagtaccaattgttattatacctatatttaggcatgccatagtcaaagatatagttaattcatgatattaaataaggtttattagtggtttaggtttaacgcttagttcgattattgatttagatcttttgttactagaacactaatcttaaacaatcaattaaaacacacaaaccagaaagccttatgaatgaagattcatgaatggtacatgttattcataggtccaatttgataaattagaaagattaagggtagttttggagaataaaagtaggtaggggagcaaaactgcaaattcataaaaagatatcatcgntgaaaattcaactttttcaaaagaaactcttaataaatcctctaaaaaaaataacggaacattcgttctttttaatac

SEQ ID NO: 59919 - DNA, 306 bp, Arabidopsis thaliana landsberg
ttccttggccacggtcggcggggcacttgggtctgccgctgagatatgtgtggacgtccgggccgccgcctacggggtatcatcccgaccgcgccgaggataccggccggcacctctaatttctttcttgtgctgcttgtccagcttttttgcgtggccccgaaccttcgaccgttttcgtcgcctgttcgacatgccgtacctgttctacgtggtcgacgttcatcggaatcgtatttcccgtgtccgatttgacaacccaccgcgtggacaggtgggtgctcatgtcgaccgcgatgaagagcg

SEQ ID NO: 59920 - DNA, 1468 bp, Arabidopsis thaliana landsberg
ttttaaatggatttattgcgtggacatctttcacattcaacataacaagggaggaggattctctgattcactgttgtcacttcataaacatgattcacgcaccagctcactttccatttccttgctcttttttttttctttcttttaattcaaattatctatcttttggtgattcgaaatggagtttggtatttttgacacttgtatcaatccgctaaaaaaaattacttacattcttcttaattaatagattctacaatctctcacgtaaagtttacgctaaccatgaatctctctactagtttcttattgaattacttccctacctatagctgtagacattaggtatctccatgatttcaaccctagaagaatccataacaatattcagtaccttaagtattttgtaaaaaaaatttgtgattgaaatagatcttaactacttcaaatttttatataagaatatataatatttttgaaattttattcgctatatattatgtttggaaatcttaagctacttaactaatagcttgtcacgtttgtgtagagaagagaatctttctttttttttcgatattgaagactgggctttattgggctttcatgtttgtaaactcaatgtacttatagttgaaacaaaaaaggaatttattataagaaaaaaaaaaagatgttgttgtgtccgttcaactaataaaagcccaagtacttttttttttgttgcgttggttatttatacatttgcaaaaaaggtcccatatttatttcctttttcatttcttatcaaacttttgacaacgatcatccaggtcccactctgcttcttaaccattctttaccaaaaatcaattgctctctccctctcagcttccaaagtcttcatctttctcgacaatatctaaaccttgtctgagaatcatttgaataagatctttcatcatcaccgatccactttctgatgtaagaaactacagtcttccttccttctcacttctcttcttatcttgctttcatggttagggcaagtttgatttaagcttatgtggatgatagaactagtgtttatacttgtagttaggtcaatggaacagacaaaggatgattctgattttgaggatgattttgaaacggtaagcatttcttagtgaatgtttcagtggcagagaatgaatgatctttaagctgttttatgtgacagaagaagatggagactgatacatcagctcaagaggcaaggaatggtaaagacatacaagggattcagtgggaagggtttaagtatactagagaccagtttcgtgacactaggttgaaacaatatgataactttgttaatatcttaaggcctagctctcgagaaagcttgataaggttagtgcagtacatagaatatgactatactatctgtgattttcgatcattagagaatagatacatgaagtttatttggtacaattgacaggaa

SEQ ID NO: 59921 - DNA, 1205 bp, Arabidopsis thaliana landsberg
tattttttatatataagagaaaaggattgatattcgcttggggggttgaggatatcgtcggaaaaccgcctggaaaagtttttacaataacattcttctgttcagaaatttgcagcaaaacagttaccagataaaatgattcatacattttaacttacagttcgctgtccaggtatgatccttgtcacagaactcagtttaagacgtttctcctttttaccacaataccataacaaatatatttcatcctgcaaaagttttgagaaaaccactatcaaatcacaatcttcagctttgaaataaactgtgactgaaggttatgaattagtacacttgaaagccgaaaagggtagaatttaggcttcccacggcggccgtatttcaaaagataagcccctttcttcagaattgctatcgcctgaaccaagtttgatgccaaaagctagaatcaaactttaggaatggaagatgatctttacaactataagagagtttggaacaaacctgctcattctccctatctgtgggaacacttctctggaaacaagccattccaagttttgagcaccagataatcccaatgctcgccccatataataaaaccccttttgcctttggtttccaaagaggttctttacctaagctttcgaatcgaaaacctcatcaagacgtctaataactacttctgatttctcctatggaatcgcatttgcgttcatcatttttcccttgaaaaaatagaaataacctaatcatctacaatgccgattaccctaaacaggattgatgatcaaaaatcatagagaaacgcacctagttccttgttccgcacgccacaatgcgaaaatatatttttgtggaacaaatcgaatcgtcttgaaattacggaacaaacatatattgagcttggagcaatttagacgaactaatatccctcgttaggtttctgacttgactctcccgagaatcagacagatctttgtgttggatttgaaacgtagagcgagagaataaagaaaaacataacaacaagattctgacccagcgacgacgacaacaacaacaacagataagagaaaaaaggtctgtgtcttctccttttgttggtctcagatgcgtttatccatcttattttatcaaatttatcaaaataaaataaacattctaatatcatatagatagattctagggatgatataaaacat

SEQ ID NO: 59922 - DNA, 1049 bp, Arabidopsis thaliana landsberg
  unsure (1)..(1049): unsure at all n locations
agcagctgttccgtggggggctcatattgattctccatcgaactctggagaagaacaggttatatcgtctaattcttcgcctgcggctgctgctgctgctataggaggagtggttggtggtggttctttgcagaggacaacgagcnnnnnnnnnnnnnnnnnnnnnnnnnnnnngaatgagcgattgaggaaagataatgagcgattgaggaaagagatgacaaagcttaaaggattgtatgcgaatatctacacattaatggcgaatttcacaccgggtcaagaagagtgtgcgcatttgttacctgaagggaaacctttagatcttttaccggagagacaagagatgagtgaagccattatggcttctgaaatagagacagggattggtctgaaacttggtgaggatttgactccaaggttgtttggggtttctattggggtcaagcgagctagaagagaagaagaattgggtgctgcagaggaagaagatgatgatagacgagaagctgttgcccaagagggagaacaaagttctgatgttaaggcagagccaatggaggagaataactccggtaaccataatgggtcgtggcttgaactcggaaaatgaaaaacacttgccgattcagaggcattgttgaatatgcaagaaactgttactgatccccattgcataggcaagccattgcgctgtcccggacggaaaatggggatgtgttcggtcataagaggacagatgttcattgagttggggtagtacaaaagtatctaaaaacactgattctaccatcctgagttgttcctgatttcagatgttgcctcctgaatcttcttcttgatggaactgaaactattctggcttgctgtgctccagtgagtggatgtgcttctcacgatttcggataaagcaggcagattcaatgttacatcttcatattctgcaacaaatagcaggaatcaatggtttttaagagttatggcaatgttgatacagaattatttcttttgagttcaaaacaattgtagctctctgacttgtaatgatc

SEQ ID NO: 59923 - DNA, 384 bp, Arabidopsis thaliana landsberg
gggaaaccactgcgattaggtgcaagggtcaggaacactggtgctggccacttatttccgaggtacagctcacttgatcagagttgagacatgatcaaactatcacgtgttctcacccgaacatgatgactcagggctgtgaatgaaaacctgcaccgatgagagcagtgagaaataaaagcgtcgctggcgactctgtatcagatgctaatgccgcgctaagaaccaaagtgccaatacacttgtcgctacattacacaaagccttggccgcctgtgccactagaaatcgaggctaagtttgacagaaaagcatctttggttgacggtatagagactacttctagtctaatgcatagctcgaaaggcagaaattattaggcct

SEQ ID NO: 59924 - DNA, 1740 bp, Arabidopsis thaliana landsberg
ggagggagaaacacacaggacctagatcggcactttaaattaagagataaaaaattttggtgatatcaccataaagagataataaaaaaaaacaaatatacattaaaaactttagttagatctctatggcaaaaacgtctgatctccatttcaacttcttcctagcgccacatccacacgtcgggcaacactcgtctactccaactacgacaagcgctaagagtctgagagagagaagactttgttagcatacggacaatctcatgcatgcaaaactctagtagaccaaaaggacaagaatattcacgtggtaaaaaagtcagatctctacttcaacttcttcctagcaccaaataactcttcttctcgaaccacaacaagattgagaagataagactttggtaacatatacggatactaatctcatgcaaaactccagtagaccaaaagccaaagggagaatattcacatggttgactcaaaaaatcaacgattatctaagtcaggagcttccacgattagagtggacccttttctagaagttttgaccatgtgtgcatttgctatgtggggcacaatctgcaccattattcaagataaaactcataaaaagtaaaatgttgtaaccctacactattaaattccattgtacaatgagatggcaaaagaaataattctcatggtttcatgatttgtaaacaatgctgctaaaagaaatggagtatttaatcatatgaatagaaaagtaaagtatataatcattttctaaaaatcattttttctctctacaataattcatttgtaagagatttttatttctttacattagcaaaaaaatgtaaggagttatttcaagactttgtgaaccaataaggcttttgtgtccacaaatatgcccaaattagattcttacatttgattggtagtacgtgtcttccaatatctctttcacatttataactttaggaaatgttgaaactcgctgtatttggttggcttattagacgactgtgtgacttaatttagacgactgtgagtctctgacaatcacaaatatcatagaggaagtagtgtagccaaaagccaaaactaaaagtcaatattagggctaattactcaaatactcctcggaaacgtgacagcttatgctgatgccaattctgatgccattcttaaagatcaaattcataagcataattaatcataatgactataaatcttaattaattaatttttaagttttgtctcaaataaacaaactgtcactgttattagttaccgtcgaatcttccatcatcaccgataaatactttgatatatactagtagtgcctaaaacatcttcttttttatggttacagcataaatgagcctgatagatgacagatctaaatattgatattttgagtatagaaatggagtattttaaaaccaaacagagagttaattaagcattaatctgtggaagttgtaacacatatcacctaccttcataatctttctcaatcacgagtatatccccacacaaggaaaaataaaaaggctagtgacgacttttccactctcttcacaccatagatcgtccctctatctctcttcacatctaaatacaaagcatatgaaagaacaacacagagcagagatcaaaagagggagccatgttcttgaaagctttaccatcttcttcttcttctagacctcattttcatcttcttctcaagtctaaacttgctacaacatg

SEQ ID NO: 59925 - DNA, 272 bp, Arabidopsis thaliana landsberg
gcatggcggaaaaaatgagaaaaaaccggtttaatatttttcaccagtgatgaactttctcaaaagagtttattatatacgaacctagctactagccaaagtcttacttttctcaaaaccaaacgttaatgaaactaccatttgatgtatacatatgggtagaaaacaagccaccgacacctttgtcactcattgggtgagctcttccttaagaagatggtcttttccaaattccaattcagcagcatgtgtagtagtagtttcggggatct

SEQ ID NO: 59926 - DNA, 1422 bp, Arabidopsis thaliana landsberg
atgtgtgactacagagtacttaagtgtttatttattgcaatgacctattgtttttaagtactcctatatgtttaaccaattcacttttatttttttttacgtgaccaaagctaagatcttatctagaaaactaaaagctttgtgtccttttgttatattcgggcttcaaaactttgtaccttcttcttaccatcgctgtcgagagaaaagtcagcagaagttttggaaactagtagttgtagggatcgaattatcttaatcatctatgatcatgtcattttgtgttggatatttgttgatgcttgtacatttctaaaaaaatatgtgttgtatatttgctaatgtcaatatgtggtgcatatttgctaagttgccgtggaaataacaaaaacttaaaattttgctaagtactgtactttttttttttttgtgattgcaatttgcttaaggtgattgatgaacgaaggctatatgtaaaaagtggaaaggagtgaatcaatgtgagaagtgggtgagttgttacttcgttagaagagagatttgggtttatttcgctttccctgaattaatggtaacgcacccttttgcctttggttgttgtgtttcatttatttctcttttgtttttaatcttgttatatccaatttcttgtacctactttacttttttcataaaatgagattatgcatattcaatcagtaatgttttaaatcgcatatacttttatatttaacaatatgccttcactaatttgtatttcaagattagttagtgatattttatagtaaagtttaaagaacattataatgtaaacgcaatcatagagtttttctttgtcacaggcaatattgcaaaaataaaaaaaggtagaaacgaacagacattttgttttttgttgtgtaactaatcaccttacacaaacggacatatacttttttgtgtaaggttattttttttttggagctactatcactaaatttgaaatcaaataattgatactccaataaaagtagaaataatatcatagtatatgaaaaaacaaaaaaaattataaggacgatgaaagaaaaaacaaaatctcataactcaaaatcaatatgataaaactagactaaaaaacaaactgatatcctactaaaattagaaacaaaatgacataaattgaaatcaaacttacaaaaaaaaaagaaaaaatagacattaaaacaaaaaatccgaataacaaaaaaggatctcagctaaacaaggcctggtgtagtatactagtattggcccatgtcccatggcccattgtttggttttttttgtctctgaccaaatgaaaaaaaagaagatatttatccgtatggcgccaagcgttttgtgtggttttcgatttcatccaaatttctgaatttcgtctctaacatccacaaaatcgaa

SEQ ID NO: 59927 - DNA, 358 bp, Arabidopsis thaliana landsberg
cataacctgggggataagtgtggattacatggtgtgtctggatttaaaaaactggatattgtcccaacaatctgatgcatgggctttgggaaaattaagaatgcactgagaagctcaatggtcctgtgctcacttacctggcggatactactcctgtacatactgactaagacatagactgacttatgaagcatacatcactgacaaccagtttatcacggagcataattgacaatgtttgcctacatccaataatattctctacatatcaagggctgaacgagcgtacactaattctcttccctactacctgaccaatggcatacaggaccaaagatagactgaagtgctaaatctc

SEQ ID NO: 59928 - DNA, 144 bp, Arabidopsis thaliana landsberg
gctctgatctatcaaaataggaaataaaacattttaaatctacatatttgtaaagaataaatagaaaaagtcagaaacaattctgattcgttactataatttcttccaggctccactaaaaataaaaatatccttcttctcttt

SEQ ID NO: 59929 - DNA, 859 bp, Arabidopsis thaliana landsberg
ggctgaggtgcagatatggtgggcaagcttggcatctacaaaagttgagatggagattgatagagagtttaaatctcatcaaaagcttctctcattaaattatttatttaactaataaataaacacaagtaagaaaagaattttaaaattaaaaataatataaatacatttttaacttttgttatgcacacaaaaacacacccatcaatttcagatccctcgctctccaccttattatatatctttttagggggtcggaattatattacgtacaaccttttgttggtatactcctcttcttcttcttcttttgtgcaaccgtatactcattttctcaaattcaatgtttctaaattatatatattaaacacacatttggtagtagcaaacttgtcgctttggattttatcattttaattacagttcgtataaatatctgttgacccttattaatatgattgaacaaacaactaatttgactaaaatgcgtcatcatagcaaatgtatgttatgttgaaataatgatctcttacataccactttgaaaagggatcgaggatgcatgatgcgtgatgcgttccaccatccggtgcctttcgttgtatcacaatatatgaggttatgttagtgccatcgtttataaaccaattgttagaaatttggaattatatacatatacatttaacgcacaatatcaacattgcaatactcgtagtgattgagattttggacgtagaagtttttaacaactaataataaaatacttgaaaaacagtgggatgatggaagacagatgtgagttaaagtctgattataacaaaatcaaaatcttcctaactcctaggagagtattgtttga

SEQ ID NO: 59930 - DNA, 1881 bp, Arabidopsis thaliana landsberg
gcaatcgttcaatatacataatttatgttattagataacatttagacatttagtttaaatatatgtattattttgtaatctaagggttgatttgtatattttaaaagtttctatcaaaagattgatttttgtaagtttcctgaaggaaaaaaaaaaaaggacaaaacacaaagtggaggagaccaagctgacaaaacaatgtccgaaacgggttataacggcttaaaacgccagcaaatttcgatctgaccaattgcagacccaaacaactggtcgaatcttttttttttccttcttctttggctaatcagacataataatacacggagaagaagaagaagatttgcgttttacgtgctctcaactataatctgcaagaccgagaaagattgatttcccttcttcttcacgtgcatgtttgtttctttcttctctctttctctcttatagtttcgatctatctatctatctcacttagggttttcaattttcccccttttttctctgttccaattctctaacctctcttcgtcaaagctcttgctcattacatttccgagacacccatttgatcaatttcgtaagatttcaggatttttctcctcatgggttacatttgaatttgaattttcttcaagagaaaagttttggattccataaagttcgtaccttttggtgattgttcgattcgtagcaagttaattcgtgaacccttttgatctgaagtttcaaattttgttgctttttcagggtggaaatggaagttcttctcagaagtatctcgtcgtttctaaatctgtcatcttctaaacatattgatttagacccgtttgagaagtactataagagagttgaagagttattgagagtgttgaagcctatagcagatgttgttgttacctctgattttgtttttgatgagaaacttggtaaagcatttgaagaattgactcaggatgttgatcaatccattgatcttttcaggagttggcaagctttctctagtaaagtctatttcgtaagtccctaaacttctcttctcgtctcaggttgtatcttagctatatagagttttaacatatgcatagattagtttgctttatgattgttcggaagttttcttttgcctttagcttgaatccgtgacggttttaagatcaaattagtgaccattgtgttattctgcactcttgcttgagttttggttactgataaatcatttcgttgatgatagcctcttaatatctacgtctaggttcttcaaattgaatctttgctaccaaagatgcgggacaccattgtggatacttttcagtttctcatgtcttctaagaaccatctacctgatgagctaagcccagcttctcttgaggtaccttctctttacatttagaggaaatttgtatcaatttatatgctatagatatgtggtctgttcagaacattagctttaggttggatattaaattggatcagttactgaattttgtggaaggggttgatcgtagtgatgctgactgctttatgttttgttgtgttgtccacattagcgattgaatcaaattgcaggagatacgaatggttaatttacaaatattcgtaattgcagcaatgtctagagaagattaagcatcttagttatgaagaaatatcttctgtcattgacggtgctttgagggatcagagagatggtgttggacctagccctgagatcttggtgaaaattggagagaacactggtcttagatcaaaccaggagattctgattgaagctgttgctctagagaggcagaaagagatggctgagcagtctgagaataatgcagaagtcgagttccttgaccaactgattgttattgtaaaccgcatgcatgaacgtct

SEQ ID NO: 59931 - DNA, 1890 bp, Arabidopsis thaliana landsberg
  unsure (1)..(1890): unsure at all n locations
cgaacataggtattttctgatagagttttacattcatcctttctatgtatagttaaaggcttaaaggattgctcagtaccttgttagaactattactgataagttataaccaacaattgaaaagattatgaaatttctcgaaagggaaaaatagtgtctaaaatatctcggaagggaactattgcttcatgttttctgctttcagttgaactgtgatctgattgtgacactaatttccgaaattgagatttatttcacttcactttgtattgataatgaatctatcttcttcttttttaaacgcataatgaaactggattcatagtagttatagagtctgatatgcaggaggatatggtcatctacatgtaacattagtcacttagtactcatgctttctactagtatctgagcaattttcttttccgatctttatagggcggcaagagcactctggaaaactgtcaggttttgcaggtatgcagtcactcgtatgaaaatttaaactaacttataacaaactactatttaaggtttccatgttttaaaccaacttacagtttattcatatctacgacaagtcttcaatatctatgtttatagccactattctctcataatttgcctcatgaccggctttaaagctttagtggaggcttctctcagacgatcggatttccacagaacactctcttgcatattcttctttgcgtttacttataaactctctccatccaaaacttcaaaccaaacatactcttttaggcctgttgcttctttctattacttgtaatcgtttactttgtttcgtttctacatttcaggcaaaggtaaaccgatcaaagggtaataaaaccgatatttctcgatccgagcttatccaaaggagttcttactgtcgagttgctggtaaatctactctttcttctctatgaaacaaactataactaggttttatcctaaacctttacgaaaaatttgtaggccgagatatggatctgattgagctaacagcttacgggaatgtacagcgtgcacctacgtccagcggatgcagaattcagtgatctgttgaagatctattgatggaattgaaaatgtttgggtttctcaatatttacttggtcaagagtctgtaaacttttagttcttctccgagttacttgtgtactcattagtcattatctttcctatattgtgtacatgtaagtaagttgtaagttgtaacattagtcatttattgctcaatcttcttctatattcaattaagttcnactctttttattacattttcacataaaaaaaataacgccttctactactattagtatttttgtaaaaacaatttaatcgtatattttctatatacatgatcaaatatataaatagaaatgtgaaaagtaggttttatttcttttatctttaacggaagtttgcttttagctttttcttctagctataaccatacttttcgttttctttccaatttccattaatttagaaaataaatactactttttctccaaatttgttttttgttattttttctgttcggattagagtatattgttcttccgatttgaataaatgacaattatgagcaactcgttaactcgttagctagaacggtaagtacatcatttagttatttacaaattacatgtcgttttttaccgaaacatgtaaaatgaaagaaaaaaaaagaagacaaaagtctaaaaaagacatatctttttgttgcctttattttgatcatcttttgggaggcgtgtcaggtttcctaaaagaacctaaagttggccccacgtgtcaagatgatagaagatgccttcaattgtgggaaagtcctttttatttattttcttgtggaaaatctactcaccgaagttg

SEQ ID NO: 59932 - DNA, 1098 bp, Arabidopsis thaliana landsberg
ttatcatcacatgcaacaaaaaccaacctctcaccaacacagactttgatagaaaattaggtcatcgaacaaaaattaagaaaaagacctttttgagagaaagcctctgaagttttggaattccttcaagcaatcgagctttagttcttcgaatctctgcgttcatcgccacagctttcgctttgtttgtctcagacgacaaatcctctgttttctataacgtccctcacaagtttacagttaacaaaacaaaaacatacagagaacgaaacgaaatcggagaaatctaaacgaacctgaagaacagtttcgagtgcatattcgacggcggagtaaaggcgggagaaagcatcgtcgccggagacattagcgtctctctgtctattgatatcatacttttcgtactttttacagatggaatcaaccctagtgatcaaatcaattacgcccatcttcgccgctcgacgctagggttctttttcgccggagatttctccgaaaggttttttcaggtttcttctgaaagttcttgttttgaatatgatcagaacagttacagacttgacacgtggagcttatatctaacaaaagcacagaagattgttttgtggccgttcgatctgttgccacgagggcgtatcatgaagattatactttccttataaagttgaagattattttctttattaagtcaaaaatgttgattctgagtgtgatatattggtcaactactcagtcgttgttagtatatttatggcttttatttaatagtcaatacttgtaaaatgtatacgttttatttcataaaaaagagtaatgattttccaatctatatgtatagttctctgttttgttgataatcggtatagatctacttctaaaatgttaagtcagcaaaatctcagttagacggaatttaccagcagaaaatccctatttgaaacagaaaatgatgaactttatttagttggatcttcaatatccaagatcaacatcaacaatactgtgattatattatacatcaacaatagaacaatataaacacaaacttattactcttacatctttctttttataatcttttgctcccgagatttt

SEQ ID NO: 59933 - DNA, 294 bp, Arabidopsis thaliana landsberg
tttttttttttcgtaggcatcacatattttaaaatataaagagtgagttcaagcttacttggatagaattttgaaaatttctctattaactaggtgaacaaatttggtctagctgcattaattttcaaagatttgttctcattaagtagatacgataagaacaaataactttcaaagattgaagaagatagggattaaattaaatgttttaaataaacccaatcaaatagcactatttattttaattggaggtaaaaaaaaaaaggcccccccccaaaaaaaagaatgtttttt

SEQ ID NO: 59934 - DNA, 361 bp, Arabidopsis thaliana landsberg
  unsure (1)..(361): unsure at all n locations
tcatctttatctaatgtagtgactgagtgatgaataaatagatacaaaaatcttcaaaataanaaagtgatttgatgagacatttcaacgtttaaaagatatttatcttaatgtggaagatttttttctaaaagatatatatttaattttctttaattattgattgtactttggtaaaaaataatttgatttcattatatattcacaaaattaaaatattatgttatgggggcggaattttgtatttggaaaaaatcgagtagtatagtgaacaattctttaagagatggattcacaagtttggtcatggacataataaagtgggtgtgggtgtgttagtattgaaaatgatttaattgag

SEQ ID NO: 59935 - DNA, 484 bp, Arabidopsis thaliana landsberg
ccccttgggaacctttaagaaggggttttaattcggcccgaggccaaagggttttaaaatctggccagaaccagtggaaagccagttggacgccggccttggtttcggaagcggccatgttcggcctgaatttggggaccttgggggccgggccggagccgtcggcgccaaacttggccgacagctcgacccagtagaggccgtcagcggcgaggaaattatatttgtagtcgacctggtagctgccgccgcggaattcgcaggattcaatattgaccatctgcttgccggtaacggcgacaaccttggatacggcggctttgccgacaccggcagccagcataccggcggtcgattcctggtcgtcggagcagggggcggcgttggcggcggcggctgacagagccataatggcggcggcggcgaaaagggttttcttgatcatctgtttctctccttgaggttcttcagggtgagatcgatg

SEQ ID NO: 59936 - DNA, 508 bp, Arabidopsis thaliana landsberg
cacgtttaaatatctgtttgggggtttggaaataccttcatggccgtgagaccctctcccaagcatgtttgtatagttagttcctcacaggcaagttttttaattgaatgactttgcttgaaacacaagtcataattcataaattttgcattttctttataaaaattacgatttcaatatggggaaaccattttgagattctcaatttcaccatattatttaaagcttatactataaacacacaaaaacaactcgaaaacagaagggaattcaaagccaaagagagagtacttactgaaaagtaaaagtgagatggtctaaagatttacattacaattattcattacgataaaaggtctaacaaaaaggaacttctgaacattaccattacggcaaaaataagttataagaaaaggcagtgtggataaagcattagtttgttcccaactcccaaagtaacgtgcaacacaattacaatagagctcaaatgagaagtcacactctcaca

SEQ ID NO: 59937 - DNA, 1850 bp, Arabidopsis thaliana landsberg
aattttcctaatcaattctctcatattaatcattttcaagtcctcaaaaagttcttgcccggaaagatcgggttcaagaaatagtactactccaatacaagaaggtaattagataatatggcttgaatttctgtgtttatgtagctaatatagctgcacaaagataaaacatgtgtagcatacgtatattgtattttgtgtgaatacttataggcatatataaattacgaactcatagaaaacatgtacattcgtcatattaatgtgcaagtaaatgagtaatggtgcattaattcgtatacaacttgattttttaaaaaaaaacgattttttttatagattatatgggttaaactgatcaaatttttttgtaaagatagtatgaaacgatcatgattttcatagttacatgcatgcatatggatgtacacttgcatatgggtacgattacatacttgtgtaacttccaaaactaacttttggacatggattaatttgtcaggagcaatagaccaaactaaacgaccgatggagttctacaattttctccaagtaaacacggattcgaagatacacgaattgatagataattcaagaaaagacgaagaagaagatgtcgatcaaaacaaccgaattcgtaacgagaattgtgttccatttttcgactttttgtctgttggaaactctgcctctcagggtttatgttaatttgtccgtaccacatgtactataaggtggaccatatgttaattaaagataatgtagaaagtactaatcaattagagctcctgtttgagccaaatgtgaaaattagttaagacatcccaaacattttcttgtataacacatataaggttgtacttttatcaggtctaattttctatttttattttaaggatgtttaatcagactcataaccattcgatatttttcatatttaaagaaattcaatcagacgaatcgataaaaaggattgagcagaagttaatttattttaaaacatttttatgtttaaaggtttgtcatgaaaccaatcttaaactgaaattctgaagtaaaaccaaaaatttattccaaactggcctagtttcactttatactcatattggctatggactatggtatatattgtctaaattacaagatgcgtatgtactgagaaaattctgtgtcctgaatccggattaatctagaaattatcgtaatagaaggacttgagagttgagaccaagaatttatattttgtggaatttaatttgcaatcgtcggatataatttttgtgttgttgcgttcttaaggaagatcaaatattataaggtttaaatactaaccgaagaaaatatgtcattggtgcctaaatatatgtaccaccaaatgaacatccttttaatacagtactacttaattataatttcatgcagactattttgactcatataacttgtgatgatgatatcaaaaaaagaaaaagttttttttttttaaactagtggttttatttatgagagccttttaacttctaaaataaagtttggtttagtttctttaattgtgtgaagaataataataagttaataacggaaagacgaaatcgaggttggagtatagatatgattaagttgggagtagttatcagccaccaagaaatacaatcaaaagtagcaatctacctttgtctagcttaagaaaacacgaataaaatagttcgttttatttaggtggagatgaagaacacacatcttgacacgacttataaccatacaattctccatccgaaattaatatatgaatttatatcatcgagttttctttttcttttcaatttactttttctgaaactgatgtcttt

SEQ ID NO: 59938 - DNA, 1583 bp, Arabidopsis thaliana landsberg
gcccttgttgaagtgaaacctattttatacgtggaagaagatacagacaccgaagatgaaaccagccgagatcaatcgggtgatggacattacagtatttggggatataagccagagaaatggcaccaagattgtgtgcagaaacgagttgttgatgggaaagtgtgtgtggccgttctctctatctcagctgaactaatgaggaaacttcagggagaagaagaagaactggagatagtatcaagattctgtgtatatcttctcaacaaaaccttgtctgaaaattcgttttcttggcaagacactacggtgagaatgagattcttttaaacaatgttagcctatcatcaaaagctttgcttatatcttgttgttttggttgatgcagagcttaagaatacacttctctactagtattggtgtgtccgtagagagattatcggccatttttgtgtctgcgttcagagagcttaacgagatgagtgatggagtaaaaatggacagcttgaaagaacctatcttcaatctcgtccctgtccttggtgctggaaactcttctgcttcactcgacaacataatcacctgtgaactatttgccctaaggtcgtagctttcctgtttctcaaggaacacaaaggtttacttacttgatcttggggtcatcaaggtcatcaagggccatttgattttgcaatgggtaagccaaattgaacggccctatgttttaggcggacagttccatgccgttttttttgaataccttttccatttgcgaaagaacaacacgtagttgttttgttccaaatggaaacggcacgatgtttgttattcttttcttttctttttttccaagtggaggtgcaaagactgtttactttttgccaaacccagtccaaatggaatttatttttatcgaaaggcatgatattattggtcaatacattagtgcaatatgaatgttatttacccgaaacatttagcctggattcgggtttaccacagactgtatgtaactctcctgtcacaagtcgttattattaaacgtatgttagaatctaacgcagagaatgtgacatgttacgcgaccatatatatctcagaaaggtgtgttttttgattaaagattattagtctttttcacgaggatataataagaggagagattccaaatgtcaagtgctattttcaaattgttatacagagattgaagatctttagcataaaatgttaactatgacttgtctattcacaaccaaagtcttacctcaatgtataaaccgacgtctttccaacataacacatttgtattctcatatatttaaataaaagtgaagcttttctttgatctagatcgtggttattttaaaaatataataaaatcaaataactatggttacttaccaaagtaaagtggggttattttttgctgtggtgatgttttatgctttgtataagacacttttgcatctctagtttatttctaagcattttggagtaaagagagaacaaaaaacaaagtataaaaatatccaacaagatgcttttgggggaaacactgcattgtggtctgtggaacaaatttg

SEQ ID NO: 59939 - DNA, 1327 bp, Arabidopsis thaliana landsberg
  unsure (1)..(1327): unsure at all n locations
catgatttcgcctatcttctgattgcagaaggatgctacaactgcagatcctgtaagatttttatttgaagtcctgtgtttaacttttgaataaatatatgtatgcggatggccacacttttttttttgcataccccacntgtgttgatttctgatgactttacatcttgtttcgttttttaatcgataatagagacaagaaggaatacctcctcgcatgttcaaaaacataattgccgcgagccacgcagaattctcttctatgagacagcaggtgaaaaccatgtcttttttaatgttcggagttttgtttattttttaacttgtattggaacgatactccttttcggcatcagttaacgaaattattttatgttttcatactaactagcaccaatctgtcttgtaggatgctctcgactttttcctccatctggtaggcaaggttgagcgtgctagcaacacgacaccagatttagacccctcgaggagcttcaagtttggaatagaagagaagatcctttgtccgtctggaaaggttggatataataagagggaagactgtattctttctttgaacattccgctacatgaggcaactaataaaggtatatcctgttcgtctgtctatgttcctcttcctttatcgtttggcgtgtttcttagttttgcttaatgtttggtgatcaagatgaattagaagcctttcacaagcaaaaaacaggaaaaggattggaagagaatgatatgtgagtcaatggacttaagtttaaatctgtttcatagtttcactgcttatctaagatttttttgtttattttcaggaggtcaagtgatgaaatagtacgcccacgagttcctttagaagcctgtctagcaaattttgcatcatcagagccgattgaagactactatagctctgctttgaagggaatgacaacagctatcaagtaagatattgttttttaccgagtgaattcttttgcaaccaagattagaatgaaagcaaggcttgacttttggttcccattttatgcaggacaactggtttgacatctttcccagattatttggtcttgcacatgcggaaatttgttatggaggaaggctgggtgccaaagaaacttggtctctttctttctgaaacaatgatccttataatgttcccctattgtccctgtatataaatacttattatcctttcttgatttactgtggcagatgtatacattgatgttccggatgttattgatatcagccacatgcgtagcaaaggactccaacctggggaagaacttgtgccagatggcggtatgttgttatattt

SEQ ID NO: 59940 - DNA, 518 bp, Arabidopsis thaliana landsberg
  unsure (1)..(518): unsure at all n locations
nnnnnnnnnnnnnnnnnnnnnnnnnnnnnnnnnnnnnnnnnnnnnnnnnnnnnnnnnnnnnnnnnnnnnnnnnnnnnnnnnnnnnnnnnnnnnnnnnnnnnnnnnnnnnnnnnnnnnnnnnnnnnnnnnnnnnnnnnnnnnnnnnnnnnnnnnnnnnnnnnnnnnnnnnnnnnnnnnnnnattttttatactttttatttttacttttttttctttttttctcttcttctttttattttatcttttttcttttttcttatttttttttttttcttttcttcttttcttttctctctttatttttatcttttttttcctcttcctttttttttttctctttttttattttctatttttttttattctttattttattcttttcttttttttttcctttttttatcttttatatttcttttttttctttcttctttattctctctatatttatttttttttattcttttttttttattattattcttttctttttctcactttttttatttatttacttt

SEQ ID NO: 59941 - DNA, 463 bp, Arabidopsis thaliana landsberg
aaaaacgggtctacactatatgaaacatatgtgggaattcgggggtacaactataccagatggaaaaatatcaaccaaataatgtagaaactatatcaaacttttaacaaaactatcaacccaatattttatattttattcaagaacaatactaataattcttgcttttcctcgttttttttgtttctgatcaaccattcacacgttgattttcgtaattatgattctgcgtaatgctcactctaaatcaaacactccacgccacgggtcaactgatgtagtgcctccaccgttgtcgtttgacgttgtgcagaggacaccattatgcacttcgattcattttcaaaatcagatttgtctactgaatttctactgcattcactttcttggtccctagataacatagaccacaatactagtgtgttaaatgtatacttatcagttaccgcacaacattaattct

SEQ ID NO: 59942 - DNA, 626 bp, Arabidopsis thaliana landsberg
aaggacattttcatgcataaagaaacatgcatgctcctcagtttttttagttttttgatttgtctaattaaaaggctatggcgtagacttcgtgaagaatgtgtgttaagtgtgcgtgcgggcggcatggggtttggagtcgataaggttggtgaaaaagccaaacactgaaaacagactatccgtgatattgacctctctctttcttcacctttccagtttttgtctattatttcgaaacgtcaatttgtataatttgtaacattttacatctactctactactgtctattatttcgaaacgtcgatttgtttctattgatattattgggtaaacattttttttctttttagagaatagttaaaaatgttataacataaccaagtgaacctaactttttatcgactcatatgaacctaagcatgatttcgactctaataataacaacgaccaaacatatcataaaaattagtttacatttgcctataactatatatatatatatatatatatatatatatcaattcacagaaacaataatttcggtgttggagcccaatttgcttgttgactagctaggggcaattagatagggacaatgcgtaaatttaccttcttttttcttt

SEQ ID NO: 59943 - DNA, 586 bp, Arabidopsis thaliana landsberg
ggagattttcggattaagcttcctaatcgaaattggtgaagccaattcccttcaccagcagctttgtatacggctgcttgatcaggatatctttctagccatccctatagaataacaagaaaaaagagacaaacacaattcagtaaaatgacatttcacacagttacattcacaaatgcaactacattataacatcatttgaggaaaccaaaacaatgttaatcctagttcaaaccaagataaccaagctttagagtcatgtattgagcagcttcgtattttctaaacctacctcagaactttcaatcatgattaaaacttggatactctgacaaattcaagcgaaaaggaggcagctttagggagctaacacatacttgaattttgtggcagaagagttgttcaataaagtaaggtagcgaaacaccaacagctgcagctgagataataagtagaaagccatagccataactcaaaagtcatttcagcaattcacattgatgggtgtaatggtaagagttttgttggaaatattgtcactgttgcaaaacaagtagaccacaccagattgtgtataagttttttt

SEQ ID NO: 59944 - DNA, 839 bp, Arabidopsis thaliana landsberg
attcccttacattctttataactactgttctgtagcaactcgtgttaagtatggtttttacatcacgttctctctcttaggcatggtgcctgaggtttttgtcgcaatctacacgtaagtcagctttctatctcttcttttcaattccaaaacattttgttaggtccaatactgtttacatcaatgctcattgcacctactcagcagaaaacatcccataataagaatacttagtaaatcctcacattacactattccactactgtagaacagttttagcttgtgtctagcttttattttagcttctagaagcctaagtaaaaagcccttttcacggatgagtcaaatgtctcgtttctgtgttgcagagggatacttgtaaggacattagcagaagcatcttctgcagaagaacagggtctctcggttacacaggtgattctcaacattctcggctttttagcaacagtggctacaacgattctcatcacaaagtatgcgaaaagacagctggagacgatgaagaaagaggacgaagcattgttgcagtaaaactgtaaaaccacgtgacaaactctgagctgcttttgtctctctgctactttatctgaaacaccccttgtcttcttacacagtacaggtctcaggtctgttcctagatgtgaaagagctctggtttttttgtccttgcttcttttaatctcatttattaacagccttaaaatttgagaagagaaaaatggttaacaaggaaaaatctaacacattactttttttttgttattattgtacccaagttttatgttcggcatgaatgacagaactgaaaaaaatatttg

SEQ ID NO: 59945 - DNA, 1527 bp, Arabidopsis thaliana landsberg
agacaagggcagttacactcatttgttcttgtacttagggtttttgttttggctgccttaagtttcataggttgttcatagttaggttcattcgttttattgagctgtacaaaactacacttttcagaacagattgtgtggtcacaggattgtggaactagtatcaaataggaagttcaattattaattagcttcctttgattgatatatgcgcttcattgatgaaccctcgagtctgcttttgttatttgttcatgaggtttgcgtattttcgtttaagtaatgttgtttattatatactcgtgcagcatttttggttttggtggcgttgagacatcatcatgtctagcgcagaggatgtgaaagagcaaggaaacctcaccaacgaggcagagaagtcaatgccatcatcacagcaggaggtttccttttaattctcacactagatgttgatcaaataccgtaatgaatacaatatcgtgacctaactctttctttaattgcattgtgtaggaggctgttgtaaagaagaagtatggagggctcatgccaaagaaaccacctctcatttccaaggtaagtgaagtaactggtctaataagagattttggggtttcattcttggtttttctgagatgtgtttataatcaggatcatgagcgagcatactttgactcagctgattgggctcttggaaaggtaaactattattaaacttttaacccacgaatattgtctcttttgagttaccatataaaagctctctctaaggttcccactctgatagtgttattattaatgtctaaaacagcaaggtgttgcgaagccaaagggacccctggaagcccttcgtcccaagttacaggtaaatgagcttgaaccctgtttcagctgtgttttttttatgctgtttgtttccaattctaagatcttgtccttgttttgcagccaacgcagcagcagacacgttacaggaagtctccatgtgctccatctgagggtggtgaaggtaaatatcttcattttatcatctccatcccaaagcaagttacagacttattgatccatcctgttggatctgttattgttacagatggaggagctgctcaggccgagggaggttcaggcaactgaggcgtacagagacagagagatgtatgaaaactcttgtgtaagaagtctgttataatcggatattttctgtccatttgaaacatcagatatggctttcattaaaatcttaacttgatcgagaaattatagtttacccttttggtccggaatctctggtcatacctgaatgtaagttatgagaagccacctaaaaatttatatatattagctaatcttttgttaaatgagcaaatccaatataatatataaagttgttgacaaaaaaactttaaataataatttattggattggctcatttgacagtatttttttatttaaaagttgtgacaaaaaacatatatattaggtaatataatatatatctgagttatctttcatcggctaatatttac

SEQ ID NO: 59946 - DNA, 458 bp, Arabidopsis thaliana landsberg
gccatacatgagggtacttttttatcccctgggaggatgtgcgcgagctgcgaaagactgaaaagagttggtaaagtagtgggtttagtttctttttccagtaaaagtggttagctttttccctctcgtgctggacctatctctttggttttatcatcatacacttcgttaaagaatagcgtaaatagtagtaaactcgagagtctaaacaaattattggcaaaatgtgtaattaaatatgatggaacggccgacggcggctaaaacgtgtatcagtgcatgcgtagtaaagccatcactcattcatttgtttaaatatcaatatagagcccaaaaacaataaaggaagcattaaacacaagaatagagagagaagaaagaagaagacgatgaaagcagaagcagagatcatcttcgttacatatccatcccctggtcatcttcttgtctccattgaa

SEQ ID NO: 59947 - DNA, 262 bp, Arabidopsis thaliana landsberg
catccaaatagctatcagtagaacgatgtccactaacataacagctacacccccacttgatttcaaaactcaagacacctcctttcacatctaatgattaaaatcacacacacgtgtggaaaaaaatagaaacctattagcttatcaaaatcctcacatcaccccttcttaacgaacaacaagacgtttccactaacctacacgctgctacttactctacacgaatcagtactcatcacacattgacgtctacgccaaacaa

SEQ ID NO: 59948 - DNA, 1244 bp, Arabidopsis thaliana landsberg
aagagctagaattttctttcctcaagacatacaaatccaatcaatgatcaattttcaaaacgtaaaataaattctagcactcaccaatttgattagacgagaacgttgatctccgaacatggtaagttgcaaaacaaagcaaagagacccgaacccaatcaatccaacgatcagtatcaataaccttgcacaatcatctctgagctaaggatgtcaaaactgtaattggacttacgtcttgagctatctgagtcacaacatccgcaaaacacgaagctaattcttctctcgatggcttatccaaaaactccacaccttccaacactgccttacagctctgaattggcaattcgccacgaacctaataatccatcacgaggcaccgttgaggaactcgaacaacatatacgcgtgattggatagtagtaggaagagaaggtggtgtttgtgtgtataccaaaatccaagagagctcgtagaggaaacgaagcatcggcacagagctgggcagcttggttccatagttgccattcttaccttcacgaacaaactcctccgtcacgtacttacactccagtagcggaagagacatcttaaacccctttcgtgtgtatgtatgtatatctttcactctcctcccttttcgaaaccctagaagattaagaaaatagggtttagacttcgattggcgaccagaaaataagcattccgataagatgaaaagggagaggaacgaacaattttgatcagagaagaaaaagagaaattagggtttttgagagattatttgatttggtggaagtaaattgaagacgatgatgatgacggtgtgaagatgatgcaaatatgtttttgattttgcagaagaggggactattcttttcctttttctactacttaccgattttgtttttctgtcgtcttttgtttcagcaaattatgttgtatacaatttcaatacaaaaccgggtccggttaagtcgtatgattttgttttgaatgggcgtgaaactatgaattggttgttattgaacaagcccatgggctcagatgatctttgagtccaccacgatactactaacaaggcaattaggcaaatatcgaattaaaaatgttaattacatcttttggtcctaacagatataaacaaatagaaagcaacgagtacaagtactagctagtaacataccaaattaactaaaatatggaaaccaaaacctaaaaaatttctcagcgttcttcgc

SEQ ID NO: 59949 - DNA, 529 bp, Arabidopsis thaliana landsberg
agagaacataccactagctctatagtgtctgttctgtagactggtatatagagaacataccactagctctatagtgtctgtcaaacttatatataagagataaacatgtcaactttgagtaatcacatgaattaagtcgactttgaatgtcacatggtttagtttttttcagcatatcttcagatagtttggcaatatatactaagatgtcttgcaattccttttatgtatgcatattcattgtcgtttcacttcatatgatgattaaagagagggaacgtggcaaatcagagggagcacataatactgcttcttgctaatgctgacattagaaagagaaatgatgaagaatatgatgaggtgagcattgtcgtagataatgccttgtgtttttctcttacacttcttcctgttttagtaatgttgtaagtttcttgcagttgaaacctagcaccgtcactgagttgatggacaaaacttttaaaagttattactcatggtgtaaatatttgcactctacgtctaatct

SEQ ID NO: 59950 - DNA, 862 bp, Arabidopsis thaliana landsberg
tccaaaccctacttcaaccctgcgattcattcatcattcacagagtttgaagaaaacgccgaaatcggaaatggcgtctattgttcttcgatctcgcctgttgccaagattagcaaagctcagatctcgtaatctgagatgtttctctgcggaagcatcttcgacgaattctacatctaggtattcgggagtcacctctacccagtcgatgttttctgattttccaccgccaaatcagccgccacctcctcctcctcctcaagtggaagctgctgccgcggctgcgacgggaaaggagaggaaaggtcttaagtatcttggttacgcactcctctgggcactcactggtgctaccgctgctactggttacgcaagttttggtatgtacttgcattcatgaattatcttttttccctctcgtagatttctagtacaaagttgtttttgctgtgaaatgcgagtaaaaatgtgttatggtttgcttaatcgtggcattgcattacattttcacatatcagtcttttgaattcagtgttcttcacttggtagaactgtgtctttcttcgttatgttgactctttttagttctgattatacttgtttgtttcgttatgcagcttacacgatagatgaagtgaatgaaaagactaaggcgttccgagaatcagctacgaagacaccagttattaaatcttctggcattgatgtgattgatgtgagtaagcttggtagccttgagtcgctgtcaaattaatgttgatcataacttgcttctgtattagttgactttctttagtctctggctttcaaatgcgtgctgccatgtttctctgcttcaaggtattgtttataagcttctctg

SEQ ID NO: 59951 - DNA, 1244 bp, Arabidopsis thaliana landsberg
aaactacaattaaccgcaatttgaaaattccacttaaggtttggtcaataaagttaagctatgtagttaataaactatgcaaaacattccctctgttgaaaaaaagattcattctgaccaccattaaactattgtttagtcttcatgataacactaataagtgtaaacaattatacactacaagtgaaacaaaaaacgacgacgtagaacaaaaccgtcggtgagaaatagtcggagcaacaaaaactgagtacaaaaagagcgtacagagagagagctagacgacgagaacattttactgtaaacccgtgaatcacgcaaatccataacgtttcactgagtcatcccactttgttttctttatgtacacgtgtcagtcttcttctctcttttgttagccctcttattcaccgactattacctgttccggttttcaaagtaacatttaatttacgatgttaccctttcaactaagatatacacaccataatcaaatcatacaaccaaactgtacaaatgaaataatgaattatctctatcactatttattgtagaatttaaatgtgattgtttgcatcatcattcaaacgtgagatttttgattggaggttcttctttaaagagaacaactttggagataataaaaagctatgatttatgtattgaaaattgtaaaatataaagtacgttgtcaaacaaaaacaatataaagtatttaacgttttgaaactagagaagaaagtaaaaggagcttattattttcgtcagtgatttcaaattcttcaagcaagtgatttatactattagcttgtgtgtatattgagtatgcaacttttttgggggtacttgtgagaaaacgtaccttttagagtgaatcgtgctccaaacgacgtgaaaggcaaaatcttttgcataggattggatttttgtgggaaaaaaagtaaaagaaaactaaataaaaaagagtaaaagttggcaaaaataggaaagccaaagctaaagtgctacaatagctttagcttgcttcatctagatttttttttcttcttttctttttagtttcacttgaataattcactagaaatgattagttctttttcttaaagaaactatgtttaaatgtgacatttgttgtataagctcgtgtatagtttggctttatttgcaaaataacgattactataacgaggctttaggcccattataaaacaatatggaccgttttctcaacaaaacattatatg

SEQ ID NO: 59952 - DNA, 507 bp, Arabidopsis thaliana landsberg
  unsure (1)..(507): unsure at all n locations
tgcccgcgcccatgcgcttctgggcgagtgctacgagaagaaggggctcgccgctgaagctcgggaagccttcaagaccgctgcatccatcgatccaaagcttggtgttgcgcttgacgggctccgtcggttagacggaggcaacgaaggagacgaaaatgactgatgtaagcaaacttatagccttaataattcctgctttgagctgcttcgttcaagatattgcagatcgcatctgtaggcttagtggtatttagtttgtggaatgaaattgtccattatcatctcactctttagtttttttggctttggtttatgaaatgaaatgaggttcatgcatcaccaacgcattcctcacaatgtaaggctaataaatagtactgntaaggtcgttctactaaatttgaggaatgaattcatgatacatcaaccggtctataatgttgtgattccctaaaccaaaagactcctaaatatctcatgctttatgatgccctgcatgctgaa

SEQ ID NO: 59953 - DNA, 1435 bp, Arabidopsis thaliana landsberg
gatattctttagaaagcttgaaaataaaatattatgataaatttagttttctctaagttcatagtcgagtacttgtatctaataaaagtaaactttgattgaccccatatatataaaaattaggtaattggtactgcaacaaaacatgtgtagtacaaggagacctcatagaattctttgtacttgtactttctgttagtggattttaaagttggtaagcttttttccacatcaggtataactaaccttcctaaacctttatactttattattggaaatatggtaaatgcactaattcataatgttctcgtttcctttacgctaacttctccgaatctttgcttttgcgttactataaatattcagaagacaccatttcttctcattcaacaaacaagcatctcattctctgattcggtccatcgatctcaaaggctcaaagcttaatcgtttcctttcttcttattctagccatggctcaggtaattttgtgactttgatattcttcttctttttttctccatttcttggccatgaaacgatggaataatgtttttgagagacattgatctggaagcaggaatgtctttttgtgtccatctccaaaaaagatgctagcaattgtctatatatatcggttatgagagtccgattaatcagtttttatgataataaatattttggaatgaattaatatcaaatttcaagagggaagaaaagagattgattggtctaggtctaggttctatctataagtactataatgtccgattagcaccactttgaaatattcatcaaaaaaggtaaatattattaagctagagcacaaaagataacagttaataattgtgataaaattagctgttgatatatttggaccgaattggtcctatgtatatggatatggttcttacattttcggattaaattgtctaattaatgcagaccgttgtcctcaaagttggtatgtcatgccaaggctgcgttggtgccgtcaatagagttttaggcaaaatggaaggtatttctctctaatctttttttcatgtctttcaaatactttctactaatcattgtttccctttattttaagccttataatttattgactctataatttattatataatctcaggggttgagtcatttgacattgatatcaaggagcaaaaggtgacagtgaaaggtaatgttgagcctgaagcagttttccaaacagtttcaaagaccggaaagaagacttcttactggccagtggaggctgaagctgagccaaaagccgaggctgatcctaaggtcgaaactgtgactgagactaaaaccgaggctgagactaagactgaggctaaggttgatgcaaaagctgatgttgaaccaaaagccgcagaagccgagactaagccatcacaagtttaagtatactaacgatgaaaag

SEQ ID NO: 59954 - DNA, 299 bp, Arabidopsis thaliana landsberg
ccggtcaccatcctctacaccaagatcttcccggcacgcggatccttggccaccatctctaggcgccactgccccaagtccgacccgtgcccccgccatgacccggctccgcgcctcctctggtgcacgaccgcatctattgccgccgccgcgggcttctgctgcattaccacgagtcaacaagcgaggaaaacacagagagagaggtaggagatggagccggatgcctctgccgcgcgcccctctctggtcacccgctgctgcagcaatccaccacccagtaggcgttcggggcatga

SEQ ID NO: 59955 - DNA, 183 bp, Arabidopsis thaliana landsberg
atggatattaggataccaaattctcataattatagatagaaactagtggaaactttacagtacaaagcttatcttgagctgtgaaactcaaagttacaaatacgtgaaagctaatttaatttattcagaagtaggtgctttaaccaacttgattacttgagagatccatgcaacgcaactacc

SEQ ID NO: 59956 - DNA, 262 bp, Arabidopsis thaliana landsberg
cgaaccctgaactcagggagcgattgacgcattctacactttctttgccaaccttattgtatacgttagagatttctggactatgtcttgagtaagaattgctcccggtactcctgtaggagacggcgtatataggatactattgactaacatggacgctgtggtaccatactgcattcggtagagttctaaggaactcttgagcgatatacgcaaacgaaccatcagccaccaaatgcctagagctcatgcactatctcat

SEQ ID NO: 59957 - DNA, 932 bp, Arabidopsis thaliana landsberg
ccagaggcatgcctttccactactttaagatattcatcaacctcatgtgcccgtacattaaacaagacaatcgatccataatgaaatactaccatgtaaatagactcactcccacttatgcgtcctcgagtagtatcctgaaacaatccatagaagaatcaacatttcacaatgagaaggtacctcagcttcataaaactgaataaaggtataagattgaacttacagtgagatcagaatgattgccaaacttaagaacaacatagttagtcatacgcgaagtaggtgggatgaagttctgcttgttctgctctattaagcttctcaaatcaacgctgcacacaatttacaatccaaaaactacttcaatcatcaaaacacattggcaaatacatccacttttaaagtttgtgaacaaaattatacctagtggagaagaaataagctcgcacaggaatagaaagcttggcttcgtcctctaagcccatagaaatctcttcatcaacctcagctggatgctgattctgattctgaagctgctgcggctgagcagaagcgacgggggtcgtcgtagacgaagagatagccctctcagtgaagagatttcggaatccttgaaaatcgtaaatcggagaattggatttcgcaacgacattggagaaacaacgagtgggaatattcgacgacgaacgcaacgaaaagtgaaatggaagcgaaggcagcgacgaaggtttttgctgagaggtaaagatcgagtagagaattgaacggacgggagggcctagagttttcacgtagacgtcaacggaacgcatcattttgcttttttacacagagagtaagagtcaccggagaagaagatcaacaacagagccggcctctctctgcctaatagcagaattattaatacttgtttgagtattggggtttat

SEQ ID NO: 59958 - DNA, 493 bp, Arabidopsis thaliana landsberg
taaagaatccagtatggtagtagattaactcaacgtatggtacaagaagcttcctcaagcacagatgcatcatggtctggtgctaagtactatatagctgatgtagccgccttgcctgattcgcagactctctatgcaatgatgcaatgcactcctgatttgtctccggctgagtgtaatctctgtttaacagaaagcgctgttaactatcagagttgttgccttggacgtcaaggcggctctatcgttaggctaagttgcgctttccgggcagagttatatccatttggtggagcttttactgttatgacagcaagacctttgtcacaacctccaccgtcattaatcaagaaaggtgaattctttgcaaaatttatgagtaattcacaagaacctgtcaaaatgattcaaaacttatatgttgtggttttgattttctactttttagatagcggaaagtttttaacggaaactattggctgcaatggtggtc

SEQ ID NO: 59959 - DNA, 1443 bp, Arabidopsis thaliana landsberg
tataaagaaacgtcaacaagtgtgtgtttatccaaactgattttacttgtctcaaatctcaatcaaatatatatacgtttcttataatgcggagatgatgaaaacaggtcagaagagtaagaccatgtagatgacgacacgtgtcagctaagaaggcgggagtgggaggtgacgtgtgcaacgcgtggtgccacgtatgtcacatcaaggccaagcaagtggaagtgtggaggcacacaagacagtgactgtcattttgtgcaaatcgtcaacgcttattaccaaattttacgatcattttaccaatttctcccactcccaaacttttttgttgacttttttctttctctttatggggtttcctcgaacttctcgccagaaaataataatttatagctcactctcctcactgttctttctaaacgaggacaaaacatgtttactacatttccaaaagtcaaaatatgttcatgagacagtttaaaccaaagtaagtgaaattcgtaatgagattggtacttcaccgattatgccttaccatgcattgtactgccctccagtaattgtatttagaaaaatcttttatttttaatgtagttgtataatttgctacaaagattttccgtgggttctattgggctccttaaaacctcatattggatccgactaatggtgattggtgatacgcatcaaacatgctctcgtcaaattgatagatttttggtttctgttggatgaattcaaaatatataagaagaagtagacaagattatttacaatataatacagtacatatttactctacatctgcttatataatttcgttgtatagcagtatcggtataattacgaataagttcttttaattttcatttaaaaaccaaaaaatgttttgattaattttagaaaaatattggaactttacgagagatgggccgacaagtaagattaaatggtacacgtacccatatcgcatgcaacttggtctcttcgtttatacagaatctatgccttatttgtgttacagacataaatccgtgacaagtgacatcaattcattagggaatattatattataaggaggtgtgatctatagacatatatattatggaaaatttatcattttttggaacgtaatcctttgtaactaaatgcacctatagatacacatcaaacacttcatttgttttaagtaatttaatagactttttaaaggataaaatcgaaagagatctcaagagaaatagggagagatgagcatcagtgagtcatatccaccggctttccggcgtgtaaccaacgacgaaaatcctccagcaacaccggttattgtccagggcaaggatatcaatatcccggttatcgatttggaacgtttggacaaggagatactgagagaggcatgcaaggagtggcgaatattccgtctagagaatcacggag

SEQ ID NO: 59960 - DNA, 1351 bp, Arabidopsis thaliana landsberg
aaaactttctactggacttggtaggatagtgccaaacttgatatcgaggaagcacaccaatagtgctgctacaggtatgtagttctctcatatggtgtgagtgtgacattgccaatactatagttttgggtttttaaagaatttgctagcttaaatgaattgagagtgctatgcaactatacgatcatgaatttttgtcttatggaaaatgttctgtccgaggcttaaaccttgtccaccaatcttttagtgtgtcttgtgattatgattttgcagctccggtttacttgaactgtatatcttagtatctaagtttatttgacatggtgaaatggtaggataattgattcatttagtagaaaagtagctatccaaactgatttcttcatgtctttttttgtgaatatgtaaaacacttaaatgttaagagtagatatctgtattatcattggaattggtgcacttacttgtaagttttggtggctctttctttttaatctgaatctcacttgaaggatcttacatctttgaaaatgcagtgctctatgcattttttggtttgcgactactctacattgcttggaggtctactgattcaaagtcaaatcagaagaaagaaatggaggaagtaagttgttctcatgctacctgtgttgccagttgtttgcctatttataattaaaagagattctgcctgacattcttatttgctattaacattcaaacttgtctgacttcccatcatctttggtaaaggttgaagagaagctcgagtcaggtcaagggaagacacccttccgtcgtttattctcaagattttgtaccccaatatttctggaggtatttttctagggcatattgatgctttcggttgtatgatttttgcggtaaactgtttaaaaagttgctataaccccttctcttgtatttttttgcagtccttcatcttaacctttctagctgaatggggtgaccgtagccagatcgctacaatagctgtaagagtcatctctcatatctagcttcttactaaaattgaccagtgactgacttttatctttttttgaagttggcgactcacaagaacgccataggagtggccattggggcaagtattggacacactgtgtgtacttcactagcagttgttggaggaagcatgctggcttcaaggatctcgcaacgtacggtcgcaactgttggaggcttactcttcctcggcttttcagtctccttctatttctatcctccattgtagtaaatgtgcttctttcgaaaatgggtgttagagacaatttctaagtaaagtttcaatcttttttttgattttaatttaagtttgatattttgt

SEQ ID NO: 59961 - DNA, 293 bp, Arabidopsis thaliana landsberg
atatactcgctttgttcagctccggaaaaacggtctatttccacatcagcaggagacaccatgccactgttgtcggagagaaagacgactcactccaggaccaccttcgaaaaaccttcacctacgattaaaccagattcaccggagaaactagatctagatcaagaaaatcgccttcaagagagagaaaagttcgagaaacgatgcaacgattgcgcccgattcttcaatattgctttgcatgaattagaatctagggtcctctttaccaatgcagggcttgtgctggtttt

SEQ ID NO: 59962 - DNA, 604 bp, Arabidopsis thaliana landsberg
atgaactactctacttatgatttccggtttatcttcagatgtcgacatgcctcctaagcagcaagaaaagtcaattagtgccccagaaacaaaagcttagagtatcaaagaatagacaaacttcaagcattcaccgccgagagttgtttcatcaatcacagcaggcaatgggttgtaaaagtcaaacaaagtgtaatcacagtttttagtagttgtaagaggctataatcaccaaaacaaagtttctcaccaaagaccatagagaactcgcatcacattagatatcatcaactaggatcctagtggaatatcccaaaccaaagaacatacaatgcatctctgtactaagagacaatgatcatatcacgtgaatcaagaggattcgtgggaaatacagatccgaatgttcgatctacacatgatagcactagatcaacctaaatgtcaaacagatcggagaaacaaaaagctcgatctaattacaccacctttttccatgtattccgatcaaatcatgaaggatcaacgcaagaacaacaatgaagagaaataaaacttagtggatttgatttttacctggattggatgaatgtgagtcccagag

SEQ ID NO: 59963 - DNA, 701 bp, Arabidopsis thaliana landsberg
gattccctcctggattggatgaatgtgagtcacagaggcgaagataagagagtgctccaagagtcacaaaatgattatagattgtggaattggttgatccgttgaactttatattaactattatcaatgtgacgcgtaatcttcgctcgccgacaaaattttcgtcgtgtaagatccttattggcttttaaaattgacatccatttcgacacctcaatttcaagatattacaacaaagaagatcacatttttgattagtacagaaagacccccaaaattcggaggaattattattatcatacgattcaaaaaaaaaaaacaaggccagaagcttacaaaagcgtttaaatgattttgtaaccaagggtaaaacattttgacaatctttgaggtacaaacaatttcagagactggattgtaaccaaatgggacaacatcaagaggttctcatacgtgatcatgttcatccatcgaacgagccgagctatttcaggtggtgctcaaacaacgacgccattttgagctgaaaaacaagaggaagaaatattcaaagactttaccaaaaagacataagaacccgaatggttataacatgaccagttgctcaatggaatgatcaggaatttctacatcttattctaacaataaaggattgaatcataatgatacttaccgccgtcaaagcagtttcagctccctta

SEQ ID NO: 59964 - DNA, 518 bp, Arabidopsis thaliana landsberg
ctatctggtggggtaaggttgctcacagtgcgatatgtaaagaatatccgttactcttgcatgaagatatttaacatactttcactaactcaagccgggtggaagactgccatccaaagagtttcggaggatcagaacgattaatccattcttctgtctgacaatcgcactgttgaagacagatgctcacgcccaccctgttgataaataaggtgtgtggttggagatgaataacctgcaaaccaaaaatatagtcatctactgttaaattgaaagtcggataatatcaaggctaacttaatattctgaccccaaaaatgctaagcgtcaagttacttgtaagcattgatctgcgtataaatcaacttgatataataaaacacggataataacctaatatatagcaaccgcatgtatacttttcacagaaacaggagagataaagcggaggcttaacaaaatattgcatgtatatcattatgagtcttcacaaccaaatagcgttaataaacaccaac

SEQ ID NO: 59965 - DNA, 1441 bp, Arabidopsis thaliana landsberg
acctcgtatttgagaacttcatggggggcttttttggttgctagtagctgaaccacattcgctatgtcaacatgcttctgagcgacattctttgtttttccgcctgaaaacggcctgcctcttttcttcggaagagattcggacttgatcttggaaatgttaccgtgaacccgtgatacaattgcagtctttggcgatgaatcttcttgtgaattttgtgagagcagcttcatgtcttcagatgtttcggttttaacagtctccgtgacgacatcttcctccataggagttggagttgaatctgattgctgttgaatattcagagcagtagactccaaatggttctctgttgagatatctttctctttctcttcatttgtgttggactcgccattcttagaaggctcagatgtaagctcgtcctctgcagaatcatagactggaattttatcaactgaatacctggagacaaagaaaagagaggggctaaaatatcgccagtccaagatgaaaaacattcctttctcgcaagatccatgaccatttttatgccgcataaaataagtgaaaagaaaattaccgatcgtcaccatcctcccatacatatgtatcctcctgaaatgatagaaaggtataaggttaggtatagaccagtatgattaatttcattcctcccaatttttgacaaataatactatgaggatgataacgtaaggacttgcctgaaagccacgagacttggctccaagaaatccagagcatgcaaccgcaccacagagacaacgcactttggcaccaccgtaccattcaaaattatagtcgtaagccaattcggtccggggagagatgctctcttttgcaaagatcccaaccctaacttctcccagtacattccacttcctcgtctcacaatttggtctactgcaggaaaatagagaaagaaacgataaggaacgttttatagatatgaatttctttgaagcatgtaaaaagccagttgttcgttttaccatgaatgatttataaacctagcaaggcttcccttcttagtggcatcaatagcctcagatgcattgagagatataatgtatgcatccttgacacctgctcatgtaacacataattaacacatcacctaacatcacctatagcattacaacactctcatcatctctgtaaagtttctactcaccatgagtttcataagtttgagccctcttctttgcttctttccatgatattacttcaccacagtactccattataaattgccccgcctaaatcatagcatcaaatacaaccagtcatttaatcaaacccaattgactatttacttaagaaaaagatacaccagccatgttatttgcccatttgcattagatcaacgaagtgtgacggaaattgtcataaatcttggtaaagagtatcagacatgataaag

SEQ ID NO: 59966 - DNA, 420 bp, Arabidopsis thaliana landsberg
cgtatatatcatccatgtaaaaatatccatgcgaccctttttttttcttatagtaatgtcggtatgatatacgaattataaatatgaatgtacataaataagcgaaagttttggacgtacgttcaacctataattttgtagtaaaatcatttcttggtataaatttatacgtggaaaaggaaaacttatatcatcgaggaatcaaaattttctttgtttttcatttggcaagtgaaataataatgtcgggatacaatacatttttaaaacaataaatttaagtaaatatgcataagcaatgattaagaaattagaaaaatattagaaagtatattcagaaaacaaaagtgaatttgaatgagagttcaagttgatcccaatttaaagatttgagaagctgacttaactagttagttttta

SEQ ID NO: 59967 - DNA, 1267 bp, Arabidopsis thaliana landsberg
taaacttatttcatgggctcaagctaaatcatcagtggaacacaaatgatcacgagagtggttcactgatctccaggagttcattgcggagtcctgtaaagacgagagagtctgtttcgatcggtctgaacctgatgagcgctgacggaacaagctcttcgtcctctaacgttatcggtttctgtcccggggctggagtatgtggaatcacacgccgtttaaccagcacaggatccagaagctcaaactgcaaacttggttctttcaaagcagagctcacaaactgagaagaaaacaaaaaccacagaaatttcaaaaactttggccttcattgagtaaaacccaaagagaattcagatgttaacctcatagagagcaaaagtaggttcccatggagcaaacacaccttgaagcacaactccgtcaggaaactgcactcttatcatacttcttttgtatctctttctagctgctttcgcttgtttctccttataagatcttggaatcaaaagctgtgactccgcaatctttttcctccgtaaatccgcttctctctttatttcatccgccgagagactatagaacgaatcaggtacctctattctcgatgctacgttttcagaaaccgagaaaaagacacgaatctgaaccaagaaacaaccattctaagaacaagtcacaaactaaacatattcatcaccaaaaatgtgatcaagcaaagaactatacctctctatcaatcttctttggagccacaggttccataacctgagctgaagatcctgaactctctgtctttctcttttctagatatccgacaactttattgatcaatatagattgttcttcactaggaacatccataacagcccaaatctcatcattttcctctttcaattcaaaaccaaccaactcaagaagctcgacacctccagcaacatcaccaatagcttctttaatcttagcattactcattctaacttttctaaacttagcattctcaggttctttcactatgttcttaaacaacctaagcaaaacatcaatagaactctcacttggcttcccagagagatacacaaccacaagtttctccatttcggaattatcgttatcaacattatccttctcaaatgaagattcgtctccattagtgtccccaagacagctctcgacatgaacagagacttcttcctctgacgtgaattgattcttacagatcggacactcaaacatattcagagaataaccattctgagatctgatc

SEQ ID NO: 59968 - DNA, 481 bp, Arabidopsis thaliana landsberg
tgatgaataagctaatactgctataatgattgagtagcaagagatggagaaatgaaactttgctctattaaaaaaatgtgtttgagatcattttatcaatttttgaagtaattggctacatcgaataatttattggccttttacatgtaaactgagaaaaactttgaataaaggatattgttttatgaacttgacatttatgtttgatgtgacactgtcacgtgactgatccatcattttactctctttctttatttgggctacatttgggattttttagacaataattaatcaatgtaagtttacatgaaatctccaacttgagacaaaagtagtcaagtagagtttatcatttgattaaaaaaaaagaagagataaatttatatgtaaaacagtctattatctatctttataatgcaaaaaaataaaaataatatcaattaatgggttgccatatctttaaatgggaccaaaaattata

SEQ ID NO: 59969 - DNA, 409 bp, Arabidopsis thaliana landsberg
  unsure (1)..(409): unsure at all n locations
gtgcacgcacatggacgacgcgtatcgcaaggggtttaacgttcgtggaagcctcacctcaacatcgattcccaatcctcctgccctagcggctgccgctgttccctaggttgaccccgacccttattttttgagggatgacatcatctactatttttgaagaatattccttgatcctgactctggacctccaaaccaaacgtgagtcaacttagaatgatctcaccccatccatcttcatccttcctcgtccatccatccaaacacttaatgatcagatccgattaatatcggacttttatttatatttatttttaaactaaaatttatttaatgtcctaccattttgtgaagaaatatttgaatcgntatttattaccactcttatccatacctcacgattcacgag

SEQ ID NO: 59970 - DNA, 972 bp, Arabidopsis thaliana landsberg
tagataagttaagtttataattagatgactgattcttattcattaaaataaaaaattctgaataaaaggatgatccaaaatatttttttaactaatggaatcttgatgagacacacaaaaaaataaagagacaaaaaaaaaacaccaatcaataacaattatatttcattaaaattcgtatctaccacgccccaaaagatagctctaacaatcagtaaaaacaaataaaagtgtagagattcatctctctctctcactcgctcttactctcaacagtctttcacactagtcaaactcacacacacattatcaaatgcagtgtctccgagtcacacaccaataaccagattaccacaaaacctctctcttctctctctcactagctcgaacacccaaaacagttagagattcaaatgccgtcggagtcatcgtacaaagtccaccgtccggcgaaatccggaggatctcgacgagactcaagccccgactcaataatcttcacacctgaatctaatctcagtctcttctcctccgcttccgtcagcgtcgatcgttgctcttccacctccgacgctcacgaccgggacgactctctcatctccggtccctctctggtactcctacattgttcatcaatctgagtttcatgaacttctaactctgacatttatgactacgcgtgtatttgacttagtcaaactattcaaaatcatgcaaaaattgatttcaatttcactgttcgtcattcaaataatacagaagacagattttgtgtgtttcaattgcactggatttagagttttagcgctgattacatgcaatggaactatttagattcgactagtgtggatttagagctttagagatgatttacatgccaatagaactgtatagattcgagtaatgaagaagctactctggattttagaaaatgtttctggtaaattactagatcttgcttgcaatgtgttt

SEQ ID NO: 59971 - DNA, 218 bp, Arabidopsis thaliana landsberg
agggcctcattggtaagtgctacaagatctcgtgccctggaacccatggttatagacactaatgggggggattggaacagcttcaggtaccctccaaggaatgaaatggcgaccagcgcattaatgagaaacaggtcactacgcaaaagaaaaacgattttggcccaagccgtgttaaaaagtcgaaaagacctatcgcgagccggggaattccacgg

SEQ ID NO: 59972 - DNA, 1406 bp, Arabidopsis thaliana landsberg
acggtggatcctcgaccagcttttacataaatccaacagaaccatcgtccatcgatctgattactccgggtcttaaaagtttacaacattgtaacaatttggaaatggttgttagtttgttacttgttaggtagttaatccccccaaaaaatgtattgagagttctcaacactattttatttgaaatatttacgtagagacaaagtgttttggaattcaccatgcatgtatacgatgtcatcacatttataccccgagggttagctagtattagtatacatatagtttgattttgttacacgtttgtttgacgcattgtgaataataacaagtgtacgtagtggtagtaaatcgatggacaagtttaaagttttgtatgcctatacgtacgaagatataagtatagataaacaacaaaaataaagtatgggaaacggaaagaagaatgtagctggtttgattgtaatcattagaaaacaagaataacaaacatgaaagggaataaaatgatgggtgaataattgtaatggaaggcacattttatttatatattcattagaatcattgttagttagaatttttataaataaaagaaaatggggggcgagaacaaaggaacatgaatccagcgattttaagcaatgtacacagcaacttcccactatggcatgcactatcctataaaaacctatacctaatctccacgttcctcatttccagttttggcctaatttcttttcataatatgaccatatatcatattacagaattgatcaatataatacacggtttttatttctaaataccttctaaataaggttttttatcagcctaaaatacgactcatttgatacaaagtcaaacagtatacgatttttcaaaaaaaaaaaaacaacttaattaacttcaattagacaaccatgtttacttaatttgcaacatatctcattggctaaccacaaacatacataactaactgggatcaataaataattcattgcattctcttttctttcgtttgtcattttttttatatatcatatacttaatgtataactaacaaaatccataacaatcacaataatttcacaaactccataacaatcataataattttattatattaaaagcatatctttattatatagtatgtatttatgtataacttacaatatacataacaatcacaataattttacaagacacacgtatcaatctcaataatagcttaaaaatgaaatggaaaaaaatatatactagaagtcggttataaaggacaaactaagctataaaaaatatctcgaatccaaagataaacaaaaatctattacctgtactactatacccttagcaaatgagctcatatcaaactcactgattgaatgaaccaacctttgaggtcggca

SEQ ID NO: 59973 - DNA, 147 bp, Arabidopsis thaliana landsberg
ctcgtggatcccccgggctgcagggggggggtaacatatctttttttgctgtagctcctattctcaaacacgggaatcgattacaataaacttttatttattgtgtactgtaccttttccctttgaccgaaattaagctatgcgcta

SEQ ID NO: 59974 - DNA, 671 bp, Arabidopsis thaliana landsberg
cttgtgcaaaaagacttgtgaaatgcagagcccgaggcgttaaagaagaggtgatgaagacataatgggtttacatatctctgcacatgctttgacacgtgtcagtacagtctgattttgctattgggtagtgtgttattgtcatttgattagtttattgatgtttaccaagaaaaacaagaaaattttgtttattttttttgtcgtgacgcaaatatttgattttataatttttaaggctattatgactaaaataaaagatctttatgatattgatatctaagctgcatatatataaagttaaagtgataagtttttacgtaataattaggttttgaaagttacgtaagataggattaggttttgaacgtttgagatccacatatgttagtgaccatgtcggtagctcagtgctatttttgaagattttatatttgtaattactgaattaattcacatattcatgtttttgaacattttttcttatctaggtacgctgatagtttctacatatcttgagctagaaaagttaaaatattaagaccactttcttaaatggtattctagaagtataaactatatgatgaaaggataaaattgaatttttctaagaaaaatcttaaccacgtaaggacaaggtaagtaaatggtgaagttcaaaaaatgaaatg

SEQ ID NO: 59975 - DNA, 434 bp, Arabidopsis thaliana landsberg
  unsure (1)..(434): unsure at all n locations
gctataatggncaaatggggcgcaattgagaccggataatggaggtcccccaccgnacgtccaagtcatcgttgagctttttttgtaattatgaacctattaataaatgttttagtattgatagtaatctaaggatgacaatgcaggagaaagtaacaaatcttactataaaagcgcactacagcaccaaactctcttttgcttcagatagcttgcaacactgatgactgtgttgcagggcacattagctagcatcacattaactcatttggtccaccacgctacagcggggcaggccaacccccaccccacattaattctatcttctcgcggagaaaataaattaaatggccttaaccaccgcatgggtacagtcttagatttcttacacattcatcttattctagcgtatgccgctgccacacacaatcgaa

SEQ ID NO: 59976 - DNA, 570 bp, Arabidopsis thaliana landsberg
taaaggctatgttacacttacataaatgcatgtagatgattaaagagtacgtattatactatagtttaaattttattaacaatcatgctaaacgatcagaatttacttctgattattgtataaattacatatttatttgaacaggattgaagcccgcactacaaaatgttcatccttttttcttttgttttttttcagattggtaaagtaacatcagattaagaagacacaagaagaatttcacaagaggaaaaagagaccttatgatttgatgtgacttaaatccgccttgaacaacgttcgaactgaattttgccccgtgttggtaaaatgaccatatacaaaccaattcacaatttttttttttccttggcttccgcggaagagcttcagaaactcgaattctatggtttacaatttctttggggttaaaagggttaatgtttacgaaatctttgtagtctgacgatataaagaagaaaaagtttgcttcaatattttttcatcaatcaactagctacatttctttatcttaatgaccataaagaaatacaattctgaaaaaaacaa

SEQ ID NO: 59977 - DNA, 240 bp, Arabidopsis thaliana landsberg
ttagaaatagtgacacaacaggtaattacattagattggtttagcttagcggtggcgaaagaaaacggggtgggattaagattgactaagtcgagatctgtgatgacaaacatgctcggcaaggatatcgctccaaggccaaactaacaaaccatactcttgcttgatattctacacacgcacacattatcacaatcacaccgatgagcattggactctgactctaaagaagaaagctcg

SEQ ID NO: 59978 - DNA, 1242 bp, Arabidopsis thaliana landsberg
atgtgatggaatgttgatttttcaaaaggtcccctcgtgcggtaatattttaatatttaattacgtctttagcatcttttatttttgtcggcaattgcttcatttggcttaatcaaagataagacaccacaaaaatactatttggctgaaataaaatcttacaaagatttgaaataattagatcattttggaaagttatcagttactattactttcacatgttttcttacattattttgcaaatcactaaattggatcgtaaacaattatatattgtgctgttgtatgagaattaagttatttcaaaccttatccaacagtctctatattgccgttcatgagattaatgtgaacataataacagtataagactatagctgagtttcataattgaaactttaacaagtgctgtgaatatgcggttaaacaaagtaattatataaatgtgcaatttttaatgaatacttgcttgacagcaaaccctatatagtctaagttttaggtcacgagtaataattatcaactaacggatggataggatccatttcgttttccaaccaaactactccatgagatagtttaaaggttttataattataaaaatcatatatttgtatctgattcaaaattcattagatcttttattgagatacctcttataaatccgtggtatagttaagtaattcctgaccatatcatagtctataaactaaaggagaaaaggttaaacagacaccttttaattggcgtgagagtgagaccaaacaagcaaatccactccagggactttgatcacatggaaccgcgtgatttagcggcgcaatttgatgttaattagtatatagcgtcatttggtatttgataagaccaaaatcgacaaaattttaagtcaaaagtcaatagtgaactacattcaaatggtatatctgacccccaagaaaaaaaaaatcatggatagctattgttaaatcttccttgcttgtatacaaaaatcggtctcaataaatatattacaatcaacgagaaaatcagatgcaaaactaattgacgtaacccagattcatgagtcatgactatacagttttgtctaactaaataagtattgatgtaaagtggtatgtttagttcagtccaaaagtcacgactcaactgaggttttgacttctcgtagatgcaacaaatgcatcgttatcaaccgaccatttatatacacgacatattaatgaaacattgcaaatttgc

SEQ ID NO: 59979 - DNA, 247 bp, Arabidopsis thaliana landsberg
tcaggcgccaacatgggtctctgctatctatgactcgtgaatgaactgactgaccctccggcgcaagagagctgcagtgctgcaggggaaacttgaccttatcctcgcgcagtgaggctgcaaagagcctagttgccaggatcaaaccgaccaccctgcaaagatgatcagagtggacatgtaccgtcttatgagattaacatactaaaaatcacaacagtaaatgcgaaacgttatgggtaacacc

SEQ ID NO: 59980 - DNA, 121 bp, Arabidopsis thaliana landsberg
taaataaccccaaatatctgctagatttatcgattatactgcataaaccaaaaccacagtatcgtttttgtttttgtcgctcaatcttcggtttggttattatttcccagggacatacatt

SEQ ID NO: 59981 - DNA, 394 bp, Arabidopsis thaliana landsberg
  unsure (1)..(394): unsure at all n locations
cccccacacactgtgtgngctataagactatacgctatagcgtcctcagagaactcngtgctatacaaaatcacagatgcaacagctcgtacaagtggtgatgtttccgtaatataccccaaatcacccaaatgccctaaaaagtacttaaaggacaaaacatggannnnnnnnnnnnnnnnnnnnnnnnnnnnnnnnnnnnnnnnnnnnnnnnnnnnnnnnnnnnnnnnnnnnnnnnnnnnnnnnnnnnnnnnnnnnnnnnnnnnnnnnnnnnnnnnnnnnnnnnnnnnnnnnnnnnnnnnnnnnnnnnnnnnnnnnnnnnnnnnnnnnnnnnnnnnnnnnnnnnnnnnnnnnnnnnnnnnnnnnnnnnnnnnnnnnnnnnnnnnnnnnnnnn

SEQ ID NO: 59982 - DNA, 444 bp, Arabidopsis thaliana landsberg
ggacttttacttatttagaatttttctttccgtcaagtatttaattttttgtaattctgttgcatttattgtggtttgtcattgaactctacatcaaaaattggaaaagatctttgaacggaagcatcctgcggcttgcgtattaccaccggatcagaatagaaaacgtaaaagtagagtgaatatatcagaaatactatactataaagtgaaataaataaaaagcttgttgacgaaaaagtggcttaacttaactaatgactaaggttaacttggacctaaaccacgtttaaattttagtcaatgcctcgagatccgtacagtacggttttacattggagtcggctttacgcttgcaaattgacattatctcgcatctttttctttatatttcctttcacatcatagacttttagtagtatatttttgtggtaaaacttttgc

SEQ ID NO: 59983 - DNA, 1248 bp, Arabidopsis thaliana landsberg
ttttacatactctatattggagcattttcattatattatgtagttctcatagatactgtgggcttgttttggagtttgataattagatcaatttgtaaagctagccctgtcgaataacaaagctcaacttcagaatggttgcatttcttggtgtagcttctacagtcttagttcagacacaacaagatgtttactctctccatgtttattgttggttcagataaaggagaaggatactgcgtggttcgtaaagttttgtgttccttggtgtaaacactggttagtatccttgtttcataaaattacctaacaacttagcagtttggcttgtttatcccttgttgataaactggatctgagtgtccagcaagaaactggggaatttgtgggaagacttgggaaaagcaatggagggagacgatgaaattgaggttggtgaagtagactgtggtactagcagagctgtttgcaccaaagttgaaattcactcgtatccaacggggatgctattttacaatggagaagaagtttcgaaatataaaggtaaacttgcttaggcacacacgaccaccacatgcatatttggactttttcaatcctttagtttagtaatgctataagtgatattttttcatacttgcatttgtgatctcaggaaaaagagacgttgaatcgctcaaggcttttgttgtagaggaaactgaaaaggcagcagaaaaagcacagcttgaagacaaggaactgtgatacaactagtcggtgattattagaacctgatacattgttccctttggttttcattttgcctatgcagttgtgtgactcttaccgttagttagataggcatggttttcagcacgatggaggagcatctttgggtttaaaggtttttcacaccactgttttgctaaaatattcagtttccattttattcagagtcagataagcaaagacgtaagtgtagttagtcgagatttcttacaagtttgtgttgtatgttcgttttaagagcagctgcagaccaaagttcttgctttaaaatttcatattcagtgaattgtcagaactaatacgcatgagtaaccttgagaaagagacagagtaatgcgaactttaacagtcttttgagaagtgaaaaaaaaaacatgattctactgttgcttctgttcccattattaatgtagatagagactcattaaacttcatgatcgggcaacaaaatatcaattcgaatgttttctgatgaat

SEQ ID NO: 59984 - DNA, 477 bp, Arabidopsis thaliana landsberg
aattttgtcaacatagattagattctcttgtaccaagaacataaaaatgcatagataacaccaaaagatactgcatgtgtgtatgcaagctgaggaacaatgtctctgatgaaacctccaaagtccatgttgaattaactccaatccattttaatatataatataatcatatatatatatatatatatgactaaatgtttttatatgattaaaactacatttgttctatagaatattagtcttgttgtgaccttttgttgaggattcaatggaccctccatatttgcatgtgactgagtgtggaatgggacgagagaatggcggtctttgatatggacgtcaccttattatttcacatttatctacaaatttaatcacatgtatagttaattatattgtttgggtcacaatattttttggacttaaaataaggtagtaattctctttcattttaccaaaacaaattacatagttttt

SEQ ID NO: 59985 - DNA, 1142 bp, Arabidopsis thaliana landsberg
caaacagtgtgcgacctctgatgctgctagaactaggctctaacaactacgtgttttatcctcgcagcgcttcaattctgagtttatgaatatctgggggacataaccacctctgggacaaacagagctcagagaaaggcaaatgctgttatacaactgataagcaaatctcaacaaatttagacttgttctaaacattttcatcttctactgtaattataggtttcataatttttttattttttttcattctgtatcaaaccagtgtctgttgtatatttgtatatcctcttccatttagtcatatactatttgattttcctctctgtaatttctaactctcacgttgataattcctcaaagttgattgttgtataaaaaggtggaaacaccacacggatccaccagataaacctttctaagcctgaaaggcatcacagtcgaattcataacgtttaaacgagagtgctaaatgggagattgcgcttcttgtgtacgcctaaaggctcgcttcctgttagtcgaaagaaagcaagcaagccagtacttgtgttgcaggccgtacaaagcaagaggcttaatctctcctttgttgaaaccaacttcgtttaggtaaatctctaggattctgttccatttctaaaaaccgaattcgtttccaaagcaagaggcttttcaatctactcatctaactaacactcaagctactaaagaaacaccaaaatgcatttgatgaataaaacattctgtaggtaaagcatatctcaatgtataagcaatcaagaaaacaaaacatccatggatttaatcgaaatccacaagcaaaaacaataccaaaataaattcaagaaaccaaatctctagtttttttcgatttcttacaaaacgcacctcagtttcagattctcctaccctttcgagtagtaacactcttcatcgcacttacagcgacgttaagcggaagcggtggcttcctattctccttagccatactcctcaacgaatacctcggtatactactctcaaccatagacaccaccgtcttcttgatactctccttcttcgccgttcctcgtctcttaatcgtaacggttcatgattaactccaagattataaggagttcctttcacaactcctcctc

SEQ ID NO: 59986 - DNA, 537 bp, Arabidopsis thaliana landsberg
tcaaacccaatctaaactagcagatgaccgatctaaacccggagacacataactcctaagattctatcacaaaatctaatcaaagctgccttccactgtgtcgtggaaactcgcttgaataagaccaccggtgactcaggaagacgagagtcgaacagagaaggcggcgcagggtcatcgccatcccaccaccgtagagttgtgaaaagaaggaagaagaaactgatatacaacgtcgagaaaccaagctccttcgtgtgacccgttatttttttcataattgttgtaaataaaaatggataataatgactcatgtttggataaatttacgaaagatttgaaaataaaaagtattattcatagatatcttataacaataataataaacaaataaaaactcagttatcaaaactatactacatatttgacaaaatcaattaaatctttaatgtggattacgttgaaagctgtacaaatccttacaaacccgttatttacaaaaataataattaaatatacatatctcgtaacaaacaa

SEQ ID NO: 59987 - DNA, 1017 bp, Arabidopsis thaliana landsberg
tttttcgcatctgttagatacaatgcttttggcgtgatgcgaaattgcccgtgattcaacaatattcaaacatagattaaatcattgataagacgatcaaatcctcaaaataatgaatttcacatactgaatctgtgaatcagatcggaggtacaaaacacaattctagctaatataacatgaataccgataataagaaacaatcgagatcgcgggctataccatgattacaccggagaagaagcgaagaatttcttttctccttagtctttgcgctttcgttttttttttttttttggtttgactaaatttgtcttgctggtttcaaaattattctgtcacggaccttaaaagggatcgggtactgcaactcaccgtgaacgtcgtcacaaccattctatgattggttattgagacgtatgatgtccacgtggcggtcagtgattggattccgattattgaaatgcttgagaaaagccctctcatgttgatgtggtggacaaaaatgtgacctaaaggtcaatctgaaaatctcacggacgtgtttaaaagtcaaacaaccacactcacgttttggggtccacgtttctatagttcttctacgtgaatttagttggacacaaaacacaactatttgaagacattcggttctgtttcttgattcggtccgatcatttggttttggttccaatatgcattgtacgtaaagaaggggaagagaaagtaaaagctatcttcaactttatatcacaaagccagtgtatgtataagtagtaatgtccacttccctatcttggaccatgatgataacaaagaaactgcagcactgttctctaatacaagaagaaatatcgtaaatcatgcacacacacttttacacacatactatgatgctctcttccctgtccaaagcaactctgaatatattccagctgctactctcatctacatacaacaagttatgttgtctcaatcagaccagagaaaaatgtagaaaaaaaatttcaggagaaagta

SEQ ID NO: 59988 - DNA, 1125 bp, Arabidopsis thaliana landsberg
atattataccttcctttgcaagaaccagttcatatttagccgtctccggaaaatcaggctcttttacctatttataaaaactggttttctaatttccctgtaacctgtgtaattgtgaatgtgtaaagtgttggattaagtctttcttaggaactgtgttatcttgtaaaaagagacattgttttgttcttcaagtcagtgagtgaaatgtctcgtttgctttctcctattgttcggctcatgagattactgctaaccctaaacatgaacctaaaggagcaagagattcacagaactaaattatatcaatgttacggacataacatgaacagaacagaacagagattacactagacagtaactcttgtctgaaacaatctattctcacgtctcaagctttaagtcagcacactgtaagcagggattttccgaattccagcttctatcatggctttcctcattttttctgcttctgaccaattgctatccaaagcattgaacgtcgacaatgccacatactggccacagtgttgaggttgcagtccaataagctgtttacctactgtatttcctaattcagtattctcatgaatcttgcaagcgcccaaaagagctccgagaacagaagcatcaggctcgaagggcaaactttgaatgaaattggctgcgtcaaccaatagtccagctctgccaatgagatcaacaacgcaaccgtaatgttctgatgttggaatgatcttgtactcgctacatatagaagagaacaactgaatacctaaatccacaagtttagatcgagcacaagccgtgagtattgcaagtaaagtgatcccattcggatgcacatagcttgatttcatcatctcaaacatctccagcgcttgcttaggtctaccattggaggcaagagctgatattatcgcattccaagcgcaaactttcttatcacgaatttgatcaaaaatggtcaatgccatctccaagtcaccggcttttccatacatatcaagcaaagcagtacccaaagttgtagtaagaatgatctctttactcataacatatccatgaatctgcttccccagtcgaataccttcttgatcaaattagcacatgaagaaagtccac

SEQ ID NO: 59989 - DNA, 961 bp, Arabidopsis thaliana landsberg
aaacctactactatgcaaacaagaagatacacaactttaaaaaacaagattttgtgactcaaatcatcaatcttttcatcatcatcatgaaatctagtactaattttttcagattattactagtgaatagttaaaccacacaaaagttatcaaaaacaatcttatgattgctaagttaaacaaaggcagctttaataatgaagaaactattaatcaccaaactttctcaaagatcatgcacatggtttgacattcagataatgaatttctctacaattgtagcctaaaaaatctaacgtgacaatacgaaaaagtaaaccttaagaaaacgactcgttaaccactaatatagcacaacgatgatcaaatattaaaattcaattaacataaacgacaaaaccaaaagtcagctgtatcaaccacaaggacatgcagagaacagagacgtaataagcaaactgaaattgatgggttcaaagggaacgaaagagaggatttttaatggtgggttttggattatgaggctaaaagagcgagatttatctccagaagcagaggattgtttctgaaatatctctccttttttttggatgaaaagagagaatctctaaataagagaaaaggacttaggaaacgtcggaagagagatggagagtgaaagacggaacagaagctgtttctttcaggcttcttttaaggacacgtatttatttgtttttttctctcaaatatttcttaaagaaatatcatcaaaacatatctttggtttttggattttttaaaataggaagtaaatatcataaaaacatttatttttttaatctatctgataaattgaatcgttcccatctaaatcatatccaaaaaactgaattaaaaacaaaaattggattatgtgttatgctaatggtagacctgttctcagagatattaaaatattaaattcaataccttcaaattg

SEQ ID NO: 59990 - DNA, 209 bp, Arabidopsis thaliana landsberg
tttgtacatatatattcccgaggtccaaccaataagccgtgtaatattagtaactctactgttcaaattaaaccttgtaaactaatctaaggcttatacatttctagtgatccaaacaacaaacaaaaaaggatatataagtaaaccagcatcaacgaaacaagtagataaaactaatatcgccctctgaaagtggcttcgacatcatc

SEQ ID NO: 59991 - DNA, 387 bp, Arabidopsis thaliana landsberg
  unsure (1)..(387): unsure at all n locations
ttcaaattacacatttaaaaccaagagatggaatattttcaatcacactacactccaaacctttcttggcttcaccgaaacaaccagcgtaatgtttctctcctttaaacaattcatgcatcagacatccactccaccaaccagcaactactatactaacctacataccatacactttaccattttaagtcttaactccagcaacatccttcctatccccatcagacctaaataaacatactattaataaaactctattacaaaaaacattagtaacttccacttaacatttacatagactaggatgaatctgttttccagtttcaccctctcaattaaaataacaaaatttccacacacccattttttntagcatacaaatataaa

SEQ ID NO: 59992 - DNA, 1289 bp, Arabidopsis thaliana landsberg
  unsure (1)..(1289): unsure at all n locations
cttcttttccatgtagttaatttctgcgtttcactgacttttttgagtaattttaagaatcagcttttttaatcctaactgttgttgtatactactactctagattgctctgagacgggaaaagatgggagaaaccgctccgttttggagattttcagcggcatcatatccacatcttgtaaaggaatcatctcatgagactgttgcagagaaaacaaaactagcattgactggaaatggcaatgcatcatccggggtatagaaatattagctaatttattttctccctgtgtatatctaagcactagtagattgaacgagattaactgatactttattttagggtgacgtttatccagtggaaccctataacgatttcaaaccggtccttgacgctcattggggaatggtctacgatgaagatgtaagacacgtttctcggatactgcattcgttttataattttctttttgatccagtaaatccttcgaaattagaggtcaaagtgaactaaaactgtttacctttttgcagtcgagcggacttcggtcccacacattatctttacttgtggccaacgttcccggagttctcaatctaataactggagctatctctagaagaggttataacatccaggttattatgcacacacttttgcttttagcttcaccgatgtgatgcatactactcatttctctcaagagtatgtgaaagttgttgcttttattgctctagagtctagctgttggtcctgctgagaaagagggcttatctcggattacaacagttattcccggaactgatgaaaatatagataaattggttaggcagctccagaagttgattgatcttcaggaggtgagctaatgattcgaaaccgtagtgtactttgggtttaattttaattttatatgtctaataacgtgtcccttttcattggcttttctagatccaaaatataacgcacatgccatttgcggagcgagaactgacgctcatcaaagtacctgctgatacttctgcatggagagacgttttagatcttgctcaacatttccgnnnnnnnnnnnnnnnnnnnngcgatcatactatcacccttgaggtgctgatatcatatctccctgaactttacacacaaaaagctctcgaacctctctgatatttcaagcttgagaggagatctctgagctgatgaaatccgtcgatgtgcaggttacaggctatctcaaaaaaatgactcgactacaaacgcacttagaggcctatggaatctgccaggctaaaaa

SEQ ID NO: 59993 - DNA, 1544 bp, Arabidopsis thaliana landsberg
caggttctacttctctcagaatctcagctctttcacgaatcaatggagaagttaagatgaatttgggtttcttttttgattggttttttgttggctacagctatggcggatacggtagagaaagttcccaccgttgttgagtcatcttcatcatccaccgttgaagcatctactagcgccgagaagactgagcccacgacggagaagaaaaagtggggcgatgttgaagatgatgatgatgaagaagaagctgtatcggagcttaattcattgagcattaaggaagaagagaaacctgattctattcttgaggaacctgaagattctaacatcaaagctgtattacttcaattccctctctctctttgatcctaattacagtctagggttattagattttccagattcgtttggttgattttgaaatctggtgttttttgaaggttacttctggtgacacaccatatacatcagcaagtagatttgaagacttgaacttgtcacctgaattgatgaaaggcttgtacgttgagatgaaattcgaaaagcctagcaagatccaagctattagtttgcctatgataatgacgccgccacacaagcatctgattgcccaggctcataacggatctggaaagacgacttgtttcgttcttggaatgttgagtcgtgttgatcccacattgagagagcctcaagctctctgtatttgtcccactagagaattagctaatcaggtttgtttagttactctgattttggttatgatctgagagtaatctgattgttgacttcttttaatggttgaatgacagaatatggaagttcttcagaagatggggaagtttactgggatcactgctgagttggctgtgcctgactcaacgagaggtgcaccggcggcaacaagaggagctcctgtttctgctcatgttgtgattggcacccctggaacgcttaagaaatggatggcatttaagagactaggtctaaatcatttgaagattctggtttttgatgaggctgaccatatgcttgctacggtatgctctttcttctgttttacttggtcttgttattttctcaactgtaatgatttaacttctgtataatgtgattatattttcccttcatatgttgttgataattgttaattcattgctgttgcaggatgggtttagggatgattccttgaagataatgaaagacattgggagagttaatcccaatttccaggtctgtttaactagtgtctgatttggtcatgcttcttgaattataagtaggatgacagttgatatctagtggcatatctatcgtgatatctagggggcacaagatagtctactgagcttatagttatacttgtttcaatgttcaaaagctcttattaaatagaaacacctcaactgtgtttttctctgttgataaagccgtcatatcttaagatgacatatatgtctgcgctaaaatgattatcaatatcttcactgcaaaaagcttgactaatgactgcttgagtttactttattatggctgttatc

SEQ ID NO: 59994 - DNA, 1101 bp, Arabidopsis thaliana landsberg
tttatgtttaaaacaccagaggagtaaaagcatgcagaggaagaagcctttgttgatgttcttcatgatccttccagtaaaaactgaaatatccctacaaaacccaatctatgaaagctttggggttgttagattctactctgttattataccgaataggctttatattgtagataactatgtcttattttcctattaaaaatgactacaaattccacaattcgaaacaaatatgtaagaactaactacatatatagactagtacggtaaacttaaaactagaacaagaagtaaacacgtacgaaatatacctttttacccctaaattgtgtattaactaccaagtgtgttggagatacgaatcccgcatctttagtgattattgtgatatttattgttagtatttgacaatcttttattttagaaaattagatatgatcttcagcatatacatgtatgtctcgacactatgatgaaataatccagttatttagaaattttctcaactcttttcctctgttattttacaacgtgggtactaatccaataaaagtacctaaagtatgattcactcgtaatagttaaagaggttatatatgtattttgaaatgaaacgcttggaagcaaatattttgtttggttggagtaaaagcgaccaagaagcaaaagtataccatagccgttaagcaatatatcgacaggtttcgtcctctacgttagagcataaccctcgcgtgccaaggtgacaagccgtgggccgaccgctagcccagggaccatttgctattcacttttttaaaattataattttgtaagtcatttaagagataccaatggatggtaacaatattttttgcttttgatgataccaatgcattatgcagaacgaaatgcaacatactattgccaacattgtctggctgattaactcgatagtgggtgtggttggaatacgaaagatgatgcttatacatacacaaattcatatatattgagatgtttttttcatttgacccaaaaaaaaaaaagagatgtatcattaaattttcttatatgacgaacatacttcgataatatttttctcaagaagttgaccataca

SEQ ID NO: 59995 - DNA, 1030 bp, Arabidopsis thaliana landsberg
ccagcagtgaaccagagcttgtcagacttggagctctcgactgagattgttgtgactttaacccacaccaacacttttgtcttcattccttccacacccatcagcttccctctaagcaaaatccctttcacacgcgttgcatatcttatcgctgatccatctttgaatgtgacttcacatggtgaagagaagaagacggtgagtttattcttcgtctcatcgaattcgtagcagattatgttttgtgggaagagtcctggtggtaagttgtattctttgaggaggtctggtaagcttttcagtggttttcctgttataaagagaacacagaaaacaaattcgcaagttaagaattttcgcatcttcttatatataagccatgagataaacaaaaaatggtgtttgttacctttaagcttgttgaaaatccattttgctttctcttcaaccgtactggagaatgtctggaagagaaaaatgaacatcatataaccatttgaggcaatgcaaatcaaccaaatatcgaataactagcctacgaacacactgatacttagttaagaagataaatcgaatgatacgttcgaaaaatggtcttagaatagatatcttggcacaactatagcaaactcaagaacacaaatccagtgaaactggttttctaggcttatcttagtagagctcttagcccaaaaagcagaacatgaacagattaataccaaaaaggattcatcttttctagtaaacaatgccttaaaatggaaactttaaattgagaaacaagctaagttgagttaactagtataaagagtctctaatgctaaaaatctcaacttggtaaaattggaacttgtttatacatcaaattgctaaattggtctgagataaggactatgtatcaacaattctaatgatgttaactaatttttatcttcaattggtaaaacccattttagatcttcatagaattgggatcttttacgattcgaaaccatcaagtccaagatttatcaaagaattgccttttatt

SEQ ID NO: 59996 - DNA, 145 bp, Arabidopsis thaliana landsberg
gcctatatgtagtctacgatagccacttatagttataggtaaaggggatgtatttgttctttgcaactttactgatttgctctttctggctggttacttttgtaggcacggcctacctgacattataaggatatttctgccgttc

SEQ ID NO: 59997 - DNA, 1155 bp, Arabidopsis thaliana landsberg
  unsure (1)..(1155): unsure at all n locations
ttagtaacccgcgatagcttaagctttaagcctaaaacccaggatactcaaatctaatattaacataagagccaagaggaaatgaaccaattcggtttcaatttttcccatttcagaaaatgccataattgaaaccataagaacactcaccttgtgtacttggtgaagaatggatctctcatgaggtacaatgcccatatcagttttcgtctcctcagctgaagaagtaacaagaatatgagttaaatcggttcaacattactgttgtattgaggtccaagagatttctaacctcatccttttcaggtcctgagaaatggacttgcttgctcttctctccccaccacttcgaatttgcaagaagacccatccccagtgtgtccacagaaagcgatatagcccaaggaatccaagatcggactccatattttctgatgaaaagaacgtaaatgagcggtctcgttatgtaaagaacctcaccaatcgcaaacaacgctccattaacacccttctcagtaagtagctcggacatcgttcttcgcctctccttgatcattggaggctctataactgcttgctgatgttgaattcttcgagaccaaccgggggtagaagatgttgttgttcttgcattctgaccaaatgaacttaaagcagacatcgcccgtccttccaagttccatggattatgatgattttggtttccaagaccatgaggcccgagatttctacccgaattaccagctctattttgcgactcggattggttagaatctttctcctcattaggtgtttcccctccttgaagaagcatcttatacccactattccggaacaaggctaacctaatgacagccctgaaaattcaaagttttcaagatatcaaaatgccaactaagtaggttgtgtagatccaagtgatcagaagaaagcaagcttacttcatagcttcagtgagaataatgtagttccattttttgtctccatagaagtgttcagctgccacttncacaacagtttccaaatccttgaggatggcgatgagtagtggataagaaagggatggatcattcccggaagatccaacatggccacgaggtgttggagcattttcaattatgtgttcatttatcagtgtgaatatgcccaaaaaag

SEQ ID NO: 59998 - DNA, 448 bp, Arabidopsis thaliana landsberg
tttatgagtgggattagctcctgcaaacaaaagttaaatggatagatcccataatcagcaacagagccaaatatgtcactgactgaatttgtcaccagcatcgaaaatctaccgattttagacacagaacatcaacaacgaaacctcactttggttattggatactgagctaatcgtagggatacatagtttcaattcacatgaaccaaaatcataaaggaacctcttttatacactaaggatctaattcagtagttgaaactataatcaaacccaatagataaagaagaagactttcagaagaagatcaattcaacaagaaatcattggagggaattgaaaaccttatccatgattaaagggtatagccatttgtaaccagcgagacccaaagcagttagaaaagtgaagaaaagaccaagcttgatccaaaaccaaacagatcgtt

SEQ ID NO: 59999 - DNA, 1467 bp, Arabidopsis thaliana landsberg
cagcttagactctaataccgacgaacttgaagctatgagagcgtctaatgttgctttcaattctattccgcttatgcgagcagaaagtggttatcccaggagatctgcaagtccgttactttcttcacctgaagttagtaagcaattgttatcgaagtcttgccctgatcctagggcttgtgagcagtctcctggaatgaatggtgaattgtttcagcaaattgaaggttcctcacaacgaaagattttctcttcacactggtctcttgatgctgtgaccgaagctttagaggtttgtttgagatgttatctttatctttctttttttcttccttttaagttatatgttttggacctcatagctgtctttacttttatgcattgtatcagaaaggtgaagcttttaaagcgctatttcgggtgaatgctcataatcgcaatgaggttagtggcaacatctgtttttccaatgaggtttcttctgttcacttttaatccgttttttttttcctttgaaggcttactgtaagatcgatggagtccctacagacattctaatcaatggaaatgtttgccaaagtagagcagtaagtttggtttatctttgtacaataagcttcctggcttgtgttttatcttaattcattgtttggttttctaagttcagacttgtgtttctttacgtaggtggaaggtgatactgttgttattaaattggatccgctctcactgtggcccaagatgaaaggatttgttactgaaagcgctgctaagcctgaaggaacgaacagtcccccagagaaagatgacaaaaaagctcgtcaaaaaaatggtattgatgtggtagaaggttttgaagatgggttctcgaaaaacaaatcatcagttataggaaaaggagctaagaacggtgttactcccagttctccaccatcactggattcatgtttgggttctttttgtgagcagaaaggaaattgcagtgcggttgataagctatgcggcatccttagttccttcccccacaaacgaccaactggacaagtagttgctgttgttgaaaagtcacttgtaagggattctatcgttggcttgcttgatgtcaagggatggattcattacaaggaaagtgatccaaaaaggtgcaagtctcctctgtctctttcggatgatgaatatgtccagctgatgcctgcagaccctaggtttcctaaattgattgtccccttccatgtcttacctggaagcattagagcaagacttgagaatttggatccaaatctcgaggcagagctggtagctgcccaaattgtagactggggcgaagggagtccatttcctgtagcccaaattacacatctatttggccgaggcagtgaattggagcctcagatcaatgcgatattatatcagaactcggtttgcgattctgacttttctcccagatcgcttactagtcttccacgt

SEQ ID NO: 60000 - DNA, 1105 bp, Arabidopsis thaliana landsberg
ctttgtttacattgtaaatggaccaatatgagtgattttttttcttttctttttccaaaaaaaaaaacaggtacgaatgttcgatttcaaactagaactgttcaagattgtgtatggattggatcctcaaaaaaatataaagatgttcatttaaatttttattgttgcaaaaaaaaaaaaaaaccaaagtcaaagtttactgggtcaatttctagagggaaagactttatcgtgcattgcaaatggtgtgtatatttaaattaaaattgtatttacattttttccaacttgtaaatgtttgtttctatggttaaacatttgtatatatcaaaaacaatgacaaataacaaatcaaaaatgaagaaggtgggatataaaaaggagcagccattgatttgtcttcttttctggacgacgacttgaactgctccaacaaaacagaaaaggatgagttccgatcaacggtggagattgctccgaccagcattctccatcttcttcttcctcttctttcttcctcacaatctcacctttggtctctgtttcagcaccgatggtacttacttttgtttcatctttctttctgagtctatttcaacaattgattgatggattaactcttgtgtgttttgcagcattggcgttgatgaaattcaaagagagaatagagatagacccatttggagctctggtgaattggggagagctttctcattgttcttggtctggtgttgtctgttcacatgatggaagagttgtcatcttgtaagtcatttccaagtcctcaacataagaataagaagtttctctaaatttcagttttgttataaatttgatgtcttataatgtagaaatctaagagatctctccctacaaggaacacttgcacctgaactaggaaacctaactcatttgaaatctctgtaagtaaccaacgttttctccaacactcctcaaactataatacactagatagatagacctctacaacaccctttgttcttgttgcagtattctcagaaacaattcattttccgggaaagtacctgaagaggtaacagaattgcaggagcttgagatcttggatttgtgtgacaacaacttt

SEQ ID NO: 60001 - DNA, 520 bp, Arabidopsis thaliana landsberg
cttgtttgcatgttaactaaatagatcacatgcaaactaattgcaagcgggatcgtgcaaccgccgctcaggctttggaggggaggggaggcgtcagcccgccagcaggcgccaggccacgtagagtccgatgaggacgacggcgacggcgccgagaatgagccccagacgcttttcgatgaaggcctggatcgtcacgccgtaacgcttcagcaggaaggccaggagatagaagcgcaggccccgggcaatgacggcggacaccacgaaatgccagagcttcacatgcgcgacgccggcaaggatcgtcaccaccttgatcggcggcaggtgcgcaaggccggaagtgacgagcagcaggttgagctgctcctccccgacatgggatttcaactgctcgaacgtatccagcttgccgtagaaggcgaggatcggcttggcgatgctttcataggcatagaagccgagcagccagccggcgatgcccgccgccacggacgccgccgtcgcgacgaacgca

SEQ ID NO: 60002 - DNA, 477 bp, Arabidopsis thaliana landsberg
tgatagccattctgtttctatgagggttggcttctattttttttttgagttttgtaatagactgatcttcgctttgtttttctcatgtactacatatgtttatatatatgataacaccaacatacctaaagatatttattttttgtaaaagagaaacaaatcttgatatttaatttccttgatttctataatcaaaagagaatagagagatttattttcttacctaatataattacgtttgaatgtatatatgatacactcgtctaatgtgatatatttttttacatattgataaaacataaagtcgcttttccaaactctagtaaacaaaactttaaaatagtccttactaatgacaaggttctataaattgaaccctagcaaaaaaaggttctattaatctgaattaactttaaggataacatgtaaagcaccttctaagtatatcatatctagtcgatatataattccaagaac

SEQ ID NO: 60003 - DNA, 1332 bp, Arabidopsis thaliana landsberg
  unsure (1)..(1332): unsure at all n locations
aaaataacatagacatacatgcgtataatcatatataccacatattcaagattttggttttaaagaatagtaatcgaagggaaaaaaaaaaatgctcaatacggtgttgatctaatgagactaacctgcaagtaaaacggagagggcgaggaaagcgaagaaaacaaatcttggatggaccatttttttttttctaacgtactaactctataattattgtttattatattacttatgagaaatgtagacttgttaagtttgatatatatatagggtttttaattgtttgctactaaagtttttttccgttaattttcttgctaataaaggtaggcattgaattctatattgaaggcatatcaacaattttcttagtatcagcaaggaaatgatatggtactcaaaataacattgcaatttgcaatgatgatgatacaattggtacatttgtagaaacaattgaatacatgtaaacaaaaatccagtaaactacaaaacagttcaacgttttgtatcagaaaatcacttgaatggatccgatcgcaagtcaatgatttttaatgattagtttccttagatttataaagttaacaaacataagtaatgcatgattggctcattgaaaacatgcatgatttaaaaagattatgaaagattcttaatccaatttatttcaaaggaaacaaatcttgaataagccatctttttaacactctacgtagtgttttattagtatcgttatttgacataagaactgtagaattgtttacgaatgagttttttttgtttgctaataaagttattaaattatattgaacgtaaatattaaacactttttttttgtaacatcgattatattcctaatattgttcttgaactactattttagtatcaataagatgatgatatgttattcatggaaacattgcattgctgaatgatattattggagtacaatggtaaacgaaaatcgagtcaactaaaacagtccaaaggtgacttgatgtcgttcaaaatcttaaaagtttgaaagaaaccaatcaaagaaatatgaaaaaaaataatgttttcatctatcaaacaaattagaataatgttttcaaataattattacataaaattataattacatcatgcactcttctttatcaataaaaacataacggggtccgtatcgtccctatcaccaagtttgaagtagcagtgatataataacgtcttgtcccatttgataatatgactaatagactagtctccaaaaaaaatcttaaaagataattataattacattntttgtattatcttttgggtgagaaaaaataataatacagg

SEQ ID NO: 60004 - DNA, 1862 bp, Arabidopsis thaliana landsberg
tattaatgcattgttttgtttaaaggctggaatgcatatatacgcaagagcagcagcaaaaggaaaacgtattcaggtaaagtcttgcatcttttcccatttaaaagtcttccttgctatttcgaaacgacactatgtcaaattgcttataatatattgactcagtcaaatatgggggcgaaaaatcatggacttgtcttgcctgatgccaacatcgatgcaactttaaatgcgctacttgctgctgggtttggtgccgctggacagagatgcatggcactgagtacagtggtttttgttggcgatgcaaaatcatggtactgcttactttatatattcaaattactccagtttctcgaatatcttatatttcttgtgataaacacattttcctgtaatctttttctctcgtacggtttccagaaccacgcctttagggtgcttaagccatatataggatagttaagataaccccattttctttaatttagattgactattgttgtgtcctaatactaaatgtaactgaagaatatgtatgaggcctgttgattttcatttgacagtcatgaaagattagctttaacttgtctaatactaaccagggaggataaactcgttgagcgagctaaggcccttaaagtcacatgtgggtcagaaccagatgcagacctgggtcctgtgattagtaaacaggtattttcgcgcacaaacctctgaacttacatgtgtaaaaattatgtttagttttgcattctgtctgttgttcaatatgtatatgttattgctaaattttgatatgactaggcgaaagaacggatatgccggttgattcagtctggtgtagatgatggtgctaaattgctgcttgacggaagagatattgtggtattttcccattctccatatttactgctattgcaacagactcatgccttaaatatagcactacccttcacattcttatcaaatagtaatcatcaagaaccgcagaaatatcttgatttaataatctttgtgtaatcttgaaaacaacgcaaagatcaactggtccgagaagtttatatgttttctcttataacaaacagggtccaggatatgagaaagggaattttatcggtcctaccattctatctggtgttacccccaacatggagtggtacaaggtattttctgacattaaagcaaatgatccgtactctacttgaatcttaaaaattcatttttcttcgcaggaggaaatatttggccctgttcttgtgtgcatgcaggtcagattggaaaactagtcttatatcattcatttattcgtgaattgtgagattaatgccctctgatgcttttgtgacatattcatttacaggcaaacagttttgatgaggccatatctataataaataaaaacaagtaaaacaccctgttctatcatcatcttaatactaaaatttaatcgtctcatcatcttcaacaatttgctacttacgccgtcaacaggtatgggaacggtgctgcgattttcacgtcgtccggggcagcagcaagaaagttccagatggacatagaagcaggacaggtatgaagaactttgggccctataaaatacaacattacttgtatgcatttgattacatgtttgatatcttcttttgttgttgttaatgtttgcccagatcggtattaatgttccaatcccggttccattaccgttcttttccttcaccgggaacaaggccgcattcgcaggagatcttaacttcgatcgtgaaattcttgtcacaactaaacagaagaagatccgttctcctttctctttgcttatatatataacttgagtgaactatatttgcaggcaaacaggagtg

SEQ ID NO: 60005 - DNA, 499 bp, Arabidopsis thaliana landsberg
tcaaactccaatcatatggtttgggtcaactgatatcttttaaagttaaaatgaattgtaacaaatctcacctctcctttccctaatcgagcacccgtttgtgggttaaccgcaacagagccaatgacaatgagatccactttgattttctcatcaaggccaatcgctcttccatatttggctactcctacagaagtgcaagcctccatgatcgtttcgggtttcaacaaatcagattctagtacagagaagaatcctgttcttagcctcggttgaggagtcaacagcttcttttcacctacatttacacaacacaatgtctaaaatccgaattcaagactaaacttactaacatcatcagaagaaaagagaacttcataaaaaaaactgtgacaatgcaacaattttgcggccaaatgtttgaagtatgattgaacatgagttcaaaactctaaattgtgaagaatttgctcagatacatgtatacctatattaacta

SEQ ID NO: 60006 - DNA, 536 bp, Arabidopsis thaliana landsberg
agaagttatcaacaaagtgtaatttggtggtaaaatgtgtttgattctccctaattttacccattagtaagggctatggctggacttgtcggagaatttgaggtgaagctggacggaaaaggaagatttcttttcccggctggtttgcgcaaacaactcgctccggaagctcaggaacaattcatgttgaataaaggctttgaagaatgtttgacgctttaccccatgaacgaatgggagaaattgtcggtaaaactgtcgaagctgaatttgtttaaaccacagaaccgaatgttctaccgtttgttccatcagggagcaaaacaaatcgcgctggataatgcgggccggattttgattccggtgatgcacatggagcgcgttggtttggataaagatgtgatgctgatcgcatacaacgaccgaattgagatctgggacaagtccaagtattttcagctgattgatggaaacatggctgattttgctgatttggcagatgagtaatgggtgattggggaatgatgacgaataac

SEQ ID NO: 60007 - DNA, 417 bp, Arabidopsis thaliana landsberg
  unsure (1)..(417): unsure at all n locations
ctgtcgttgaactttctaattttcgttgtgaaggtcaaagatattgatcaaaagcttctactagttttgtttgcgagaatactaataatcacatacgtgaagtctaatcagttgaatacgtgaatactaataatcatattaattttttttggttgctttctgatgaattttctttatatcaaataanaagagtttaaaagaagaaaaaatggtagatgactaaatatttcaattgaaagaactatttttgttactgtgatatctttttgtatgcttgtaatgttataataatacgattggaatgacacacacacaacgaaaaaaactattttgtttcgtcgaaatttcattatgacaagtggacaaaaacaaaatgctggtcaaaaagctcagtctgtgaaccacgccattggatgc

SEQ ID NO: 60008 - DNA, 438 bp, Arabidopsis thaliana landsberg
cagatttctaatcaaaaagtaaaattctaggtgatttcccaatccgacttatttctttatggtcgaataaaagttatacactaacagaaatatagttttctccatggttgtacatagctttggtgacttaaacagttttaaattatcaatgaagataatgaaatacacaaaaagttgttttacaaagtactaataaaactgaacatgaaagaaataaagtcaaatcttaaagagatgcttcttcaccaaatacatgatgctgggagtttcataatcacttgatcgtctctattgcctcaactttcttctgcaactttgtcctccagtttgatctttgttgatcttatgagatttaccatggaattcttgatgatgtaatttacgccttttcttagtttcattcttagaatgaataactctgtatgtacaaccaacatt

SEQ ID NO: 60009 - DNA, 911 bp, Arabidopsis thaliana landsberg
cgccattcttatatcagcatgtgtagactcatctaagctaaatctgtatacttgaggcaacaaagtcaagacgataataaggcgattattatcctaactttgcttccgacggtgtggcctcacgccgccgtcgagaatatcctctttctcccccctcttcttttctgtaatgtcttctttgatttctaattcggttcttccttctccagacccaccagatccgactccgactcgtaatgctcttgttgtgaatgttactcaccaatctccaattctagatctagatccatcctcgggtcacgaaattcctcctgcgagtgaagatgacggccatgtatcaactcctcttattccgacaactggttctgcaacctctgctatccagaaccaactaaatggcctatcttcctccattgctcttcctatgattgatgattctcaacttatttgggctgctagatttagtgccaatcttcgaaacctgaaaaaagcttctcaaccaaccttcaccgaagatggaactccaaaggttagagctccagaatctgttattcttaaagcaactgatacttggaaagatcatatcgttgctcattttcatggtaatcctccacctgcgggcaaaatatttgtggacctaaatccaatttgggggaaagatgggcgcattaacattcgttgtcttctgagtgggacggtgcttatttatatcccttctgaggccactcgcaattgggtccttgaggttgggtgttggcaggcaggtaactgtctgtttactgttaccgcttgctctccaacagtaaccttaactcctcttaaattagtctcgttaccgatttggataatcctcaaagactttccacctcaatatactctctgcctggtctaagtattattgcttcaggaat

SEQ ID NO: 60010 - DNA, 1655 bp, Arabidopsis thaliana landsberg
ctaatatccaaatttttagcacacaagttccattgatcgtcccattcctttcatcgaataacatcggatgtgaaactctttattccataccttgtacatatataaaaatcaataacatgttgattttaattatataaaaaattgaatattaaataaaatcagattgaataaaaatggatattaagaaaatatataggtccttttattttatggatcactgcgtcggtaactatgacggagtaaaacggcagtagccgttaaaaaaataaaataaaatgatccatatggataaatcggagatgtcgctgaaaaaatagaagtgtcgttggaaaaaatagagatattgatctaacaacgtaggagtcgtgaaaaatatagcggcctaaatgaacataatccagcttttcttcctttgtcagttttgaacaaccagctactgattttataataaattatgccatttctttcttatttcgttctttaattttcagtcatcaaatttaatcgcaacgaccaatacaagaagaacatggtataatcatgccaaatcattgattcaatattaccttattagattttataaaattcattatccattcaacaattgtacctcaacattttcaaatgtacctcaacaagcaattttttctttatttagtttaacctaaacaaggaatttatttttatttttaccataaccatcatgaactttgttgacttgttaaatgtctctatctccttctaacgaaattatcaaaatcaatttctgttccttatactccaaccaaatagtggtcctgattctaaatcctagttctaaaattaagccttgtattttctcttttttattaacgtaaaatcaaacaaaacaaatatctcaaatattttgttaagaaaaaagaattctttattcaacgaaaaatatggattaaaaagaacaccaaagccacgtgcattgtcacttcccaactttagaaaaattgtatttatataaacaagttttatctaattagcagttttatgttattttgtctttaatctcacttcaccggctctctttcactcaatctccgtgattcattgtttctccgacgttgcttaatcctcgaaatctccggcgatgggtggttgcgtctcctccaacctccttactccgaccgatgacaacagcttctctcagcttaccagctccttcttaagccaacatttcgtcaagctaacttccaccacttacggtcttctcaatctcgactcttcttcaccttttcctacgtctccttcctcctgctcctccgccaaatccgttatcacgccaatgactccgcctgagagatttcctatcaacggtaaggaggcggcgatgatgatggttaagtctgaaccgacgaccgaggttattaacttctgggagctaatgtccggtttagacggcgattcttgtcgattctctcccattccggtgaaatgtaatggatttttccggcggtttaaaaaaagaaaactccgatcctaatttgaaaaaacccctaacgattaccaaggtttgaaacccttagaatcccaaattagccggaggaatctgagaggttattgaccgcggaaagaatcgcgttgggatttatccaacttcttgcccgggtttgacggacctttga

SEQ ID NO: 60011 - DNA, 629 bp, Arabidopsis thaliana landsberg
acatataattttctacacacattttcttgacatacgacggtctcatatgtcacggacgttcatccatgaatcaaattcatatactaactatttacgtcctttattttacttagttcagtcatatgtcacggataaacaaacggtcattcttgatgtccccaagagcattccaactccattacatatatatatgtaaacactataaaatttaaacggaatgagtaagatttgggccaacacaagtcactagtacgtgaatcatagtaaaaggtagagccactataatcatcttacataattagctagacactttcgtatattatatagtgttagtgatagcaggtacgaatattaattagggtttttgtgtttttcttcttatgatgaccagcaactaattatacctaatcacctacactaaattctgaaatcttttaagaaaattgagcggctaataccaaatgtatacaaactgcatttcacatatcagatcaattgataaatttaaatttctaaattttgttattggaatttaccttggtggtaggattctctttagcaactacgagggatgggacataactaatgtcgggaaaacaatgaaagccaagataaagacaaacggccca

SEQ ID NO: 60012 - DNA, 237 bp, Arabidopsis thaliana landsberg
tatgtatgatcgaacttatgatgaaattcttctaacgggttccataaattgagaacaatagaattatttttcactacatggttcttttggtttaaatacatgtttcttcttcgaagatgtactatttctcgctttgatctcattcttaaccatcaacatatgttgactctttaaattttcttttttatctataaggaaaaaatgtcctaactcataatgaggtataactcatttctt

SEQ ID NO: 60013 - DNA, 493 bp, Arabidopsis thaliana landsberg
ggatcgtagatctatggggggggccttatcagacgaaggggtatctctcgatcagatcgatgccttccgacgagtatccaacgaccagaaccccccttctccctcctcaggtcggagtagggcaacgacggcgagctctgcggcggagttctcaccgacgaactacggaccatgtccctagcgctctaaaatcgaagcagatggatcctacgcagggcggaggtgagcgcaaaactagtgaaggatccttacttgctaggttggtgagggtggtgctacctgcaatgacgcctacggcggtggttctcctggccaaccgacgaggaatactccgcgccttgaagacccccaaccccgtccggttcggattaacgcttatagaacgaagggtgagagccgtgcagagttctcaccgagatcgaaggagtggaagatcctgcccacggtgagacacggtccgaccgccgcccgtgagctccagtgaggaaatggc

SEQ ID NO: 60014 - DNA, 234 bp, Arabidopsis thaliana landsberg
ggagtggtacactcactgcgatcactagtttgtttttgatggcgctagcgcgcgactatacccggcgcggggcaagaccaggcctcatgagtaggaggcgcggggcgctgaaaactaggccgagcccggcggagcggcgtcgggcagatctgtggagagcaatttaaatgaaacttgaagcgagaggggaaggtcatgtgacggccttgcctgggtagcgacctaaagtcggga

SEQ ID NO: 60015 - DNA, 452 bp, Arabidopsis thaliana landsberg
tgaactattgaacttatatgaatacataatatcataacaaaaaaggtatttgtagaaagtataaagaaaaaattaatcttatataaaacttaaattgtatttaattagtatcaaactaaatcaaatagcgacgcctgcaacttaatttatcaatccctcgcacaaaacattctttcgggataatagaacataattaatgatatgctataataacatctataatttggttcaatttttgttagacaaaggcttcgcatgaaatgaatataataacggtcattaacgagacttatgttaatgaccttcatggagtcattattaaagcgtacataattttaaagaattattgcaaaccattatattgttttctttctcccatgatccgtgaacaaacataacataaatatttaatattatctctagaatttgttgttggtcatgaaagaaaaaaa

SEQ ID NO: 60016 - DNA, 1702 bp, Arabidopsis thaliana landsberg
atgaaaaaaaaaaaaatgatacggacggaccatgccgttgaacatagtcatcgagatcgatggttgaattgaccatacaaagagacatatataagcacgtagcaataatagcttttttaatatatacatatacttacaaagatatagttattatttacagtggacatatacattaatgttcaccataattacttgcttgcttaacatatatttaatcattcagaaccttaaacattcttattgttaatcattcgttgcccatttggtcgagacccgcgatcagatatttttatctttttttttgtgtgccaataaaatatttatatattaaacgaacttaggaacttttccgattttagacttaaatcaatgttcgaaattcaattctctatatcactcaaattacaaggttatagacttatagtcaggcccggcccgccgtaaagtgtcgactgactatagtatactgtgaactattgattgtattacaagttttcaaccatgcatatggttagtacttcgttgtaactgtaatttttttttatcattttttgtttgtttgggccttagtagtacttctagaataatggatgcatgattcatgtgccatttcaaacaaaaatcatacattgctgaacgacagtacaataaatagataaaagtaggcaggggatgttggctttcgcagaactattattgattttgttaaagcatgagcttcacaatataagacgttgttgaaacagaaacagaggagctggaacagatactcaagccaaagctaaattcagaattttttattaaaaaaaaacataatgccaatgtaagatgcagtttttactgaatcatataagctttcgagacttggagtcagtttgggaactaagaattatcacctagttttctatatgtgaaccaacatatataataatttctttttatttacggagtgaaataataaataaatttttatcttgatccatcagaattagctcgagggtgaacaattggttagaaataaacgtgggcaaccatgggccaaaataagctaagtaagggcttaatatcaaatatatcggcccaaaatgttgtacttattaatgaattctaacattacaataaaacagtttagtttgatttctctcttcttaaaaccttcaatgtcaacacatgtgaatgtgatacaactaaaacattttattttttggataatatggacaaaacaagtttttagtataactccacactatttaaaacaattacagtcatgcatgtggaaatataaatttttttgcattgatactccaatttatgatttgcaattatatacataaaaactgaagtcctggcatatacctcttcagaaatacagttatttaatcattaatttgcttgtacattgaattaagaacaataatatatatttattaagaacaataataaagtagacgaataaaacccatcgttaagttaaaaaaaaacaaaaaaaaataatgctgaatatcggcggtgtcgatgatgacatagaaaggctccacaaatttgataataatggaaataattataaggtgggtcgacgtaaacaacatgcacgtgtattccccatggacctgtttcgtctttcgagcatggcattgtccttactatggccgccataaatttccaatctattctcatcattacccaccaaattatactcttt

SEQ ID NO: 60017 - DNA, 289 bp, Arabidopsis thaliana landsberg
atttatctatcaactataagcttctcaatctcttatcttgcaatacacataatcaagagttatcgtacccataggtttagcccttccttatttctcaagaagcttcgcttttcgatgattcacccataaagtttaaaagttgcaataggtgaactgagtcaagcttgatccattctagctagcatacttttctggcaaagtctaagaagcatgacaagcggtaaaaaataggaccaatttaacttcaaaagataacagtgctacggacacactacaacttactacacac

SEQ ID NO: 60018 - DNA, 1073 bp, Arabidopsis thaliana landsberg
cataccatccatccccttcaagtttcaaccttgaaacatctttggtagcttcaacatttttttcgctgctctcctcttcatcatcaatatcccagctcaattcttcttcatcatccagagagatggctcgtttcacaagattagcccttaaatcctcagcttgcttgagcttgttaaccctatagaaatacctaaaccagaaggtctcgtgatcaaccatactcggaacgacccttttatacactcctttcatatcaccattttcctccaacaatttctccatctcctcagcttttccatccagagaaaacgcagattcccactttttgtaatcatctgaatcctcaggctcttcacagtaagtgttgagatctccttgaacagcacgaatctgagcatcgaaacgactatatggtttcgaactgaagctatcacgacgaccaaaactctgactactattgttatcagaagaatcagattcattaccagcggctaaaatcgcttccttaccttgagcaataatctcagccgtaccttttagcaccgtgttcccaagctcatcaatcgcatgtcccaccgtaccaagcgatccctgagccacctcgatctctttcttcaaacctgtgccaaattcttcgagatctcgtcggtaggtttcaatcacggattcggatctggtggctagagttttcatcagaccaccgaagctccatccaccgtcgtcgttagattcagattgctctggatgttcttgctctggatgttcatgctcttcgctgtgtttcggtgaatcggattcggattcggtttctggaggatctaggtcttccgtgaagacggatttgaagaaattcatagcgtaaagctcagatcttaccaatcggtactctcagataatttgtttgatccgtgaaagaatcaatttgaagagtgaaggattcgaattagcgtcagaaataggaagatcacaaaagacttgaagcttgtcgatgcagagacgtctaatttttttcccatttttttaatgaagataaataatactttatttggcgtcaattataagattaatgggc

SEQ ID NO: 60019 - DNA, 861 bp, Arabidopsis thaliana landsberg
ggcatattctctttataatattcttactcagttaccagtcccggttttatccggtttatataccggtttgattttgatccgaaccaagaacgtatctcagagtcagcgtcatgcatggtttatactttataggtctgggccaaatatgggctaagaccaacgtgtagtgtgtgtcgcatattcattcttatgaaatgtgtcctctttggttatggtgaaaagaaaacatttaaatattgttcttagttaataaaataattttcgcttccttagtttaccaacaacaaaattacgcttcctgttacttgttaaatgaaaataaatactgttcttaccaaacacaaaaatgaaaatacatattgtataatacacttagacaatacttaaaatatgaattaacaacacgtgttatgcttatcaagaaactgctacgcataaggcacctaccttgcctacctctatttttgttttcttctcttggttttctactctatgctttttgttatggtaaagataaacaacagaaaagtcagcgtgagagactggattatcttagagccatggctggtgtccagactctcgaattagagatccaagtgaatatgaccgccgagagattcttcaagactttcaagaagaaagaaggaaatttcacggacaagacagaggcagtttatgttcatcgtgacgatcccacatccaactcctctattcagatctggaatttcatcgttggtatgtactataactagctgtctatgttttttaaggagtcttgaaaaataggaatttttcactcttttttttttttttttttctaattcttgaattccatcggttactttgtgtttattatagacg

SEQ ID NO: 60020 - DNA, 494 bp, Arabidopsis thaliana landsberg
  unsure (1)..(494): unsure at all n locations
cagcattattattggtgagctcccatatgatgagtagaacctgctgatttgataaagaaaatgatgatatgatttgtaacgaatcagacaatcaatacatgttaccagcataagaataatggcggatttaaaaatgttcttctacttagaaatgatgtaatctaaatctaaattataaattatcccgcgattcttagatgaccgttagaattaggcattttcatatgtggttatagaaacgagacacatcaaatatgaatttaaaattctaaaatttacgggatagaagaatatctttttattattttaaataatgaaatataattttaaactatcccacgacttttaagatgaccgttaaaatctaggattatcataattgattatcaacacaagacacctcaaatttagattctagactttngaattaatntattcaattctaaaaagtaaatagcttctgatgatgacaaacaacanttaaatactatata

SEQ ID NO: 60021 - DNA, 1184 bp, Arabidopsis thaliana landsberg
taattattggtgagtgacaaaacgtaataaatatttacacaaaccactcaaatatatgccatgatgtatgagcaaaactataaatctagaacacaaaataaatggtcatatctaatcaatcagcttacaatttttaaattttttgtggcttccctacaaacaaaattccataggaaagtttaatcaatttcaagttgtatattttatttaggtttagcgcagtttgtctctttgtttaactaagtctttttttttttttgtttctttgccggagaagatatagagaagacaactagtaacaaaattacaagtgctcttggccgtattgaatggtacttggtacgtagacttggcatcaaactagtaatatatgatatatgtgttaatcataaatataacactagagttgtaattaaatttaccaacataatcttacgttatatgagttttaaactagaaactaattgaccatatatcatgatatatttgatgaattatcatggacatatcacatgtgattgataatttgatattaacaagtacatatttaaatggaccacgatctaaggccttttgctggttgcgtagagttatgtatatgccattgacattttagaataaatagtcagcttgttgacttggtgttttattatagcacatcatgtcttaactactttaacttttctcttaaaattgtttagaaacattttctacaattagcaaaagaaaaaaaaaacgccagaaaaaaaaaaaaaatcagctaaattcgtcgatgcccaaaatccgataaaaccgtaataagtaagagaatacaggggtatatttggaaacagattaaaacgcagaaagtagtgttccatttacaaaaccctaaaccctaattgctctcgccttcttttagcttttcatctttacctgtctctgcccttaacctcacacagatatcgagtctcggcgattgaagtgaactctcatccttataatttcatccgaaaggtaaaattttgacagctctagtcgctaaaccattgttgtttaggtctccttggaactcttctgaatttgcttttagattagtttactctttttgagcctttgtttgtgtaatcttcgaatggattcatggttttgcgttaatgggttctgtttgttattacagattttggataaagtttgattttttg

SEQ ID NO: 60022 - DNA, 167 bp, Arabidopsis thaliana landsberg
tactgtcagcgctctgcccaaataacgggctaacatctgtcttctgggatgtcaaaatgcatggtgggacgtccgcttagggaacaaccggcagcggggggacaacgaagcaatgtcgtgataccaacatgtgaatcatgccaaacccaggttctcgaggtcgtcac

SEQ ID NO: 60023 - DNA, 424 bp, Arabidopsis thaliana landsberg
  unsure (1)..(424): unsure at all n locations
cgaatttcgtccacaacatatgaatctagctagctatttagatatttctattatgcatatgatgaatcatagattgataaacatattatatattttttgaaaaatggtagttcaatttcttttgacactaattaaacatgaaagagacatgtccttcgggtgtaagaatacctaaacagacaaagcagagagtcataaatatcttatgattataaatggaagagacatataaaaaatgtttattgtgtactaatcccttatatagtttatgttggacaactccatatntaattaggtttacttatatttcggttatgaaactctaaaaagtattgtctcccactatccattaggacaaactggcaaaggcaaccaccttaacaacatcaaagaacaagaattattcaactggtctacaaaacta

SEQ ID NO: 60024 - DNA, 384 bp, Arabidopsis thaliana landsberg
  unsure (1)..(384): unsure at all n locations
tttctccgcaccggcacgttggttgcacgttgtatcttccatctcctcctccacaacatgcctntaggacacttccagtgaaacctatattacaaaaagagaaacaatacatatcgaacaaagtatcaaaattgatttgtatatcgaacatgtctactagttataggaaataatatggaagtcggattaccgtatttggaaggtgagttgaagaattgcatggcagaactgtaataatcagcatatataattttggcataagggtacttttttcttagagccgcgaggcctttcttgagnctatcattgtgaagcttagccaaattggtcaatggcatgtagcattggttcctcgagtcataaagccatccactatnatcatta

SEQ ID NO: 60025 - DNA, 531 bp, Arabidopsis thaliana landsberg
taaatagaagcaaatttctggttcttggccaaaatatccgttcgatgagtacaagaccgatgataccaaacaatctttacgtctcaaaaatgtgttttccaaatacgtgcttcaaggagctagttaaagatgttgaatatcaaaccattgccgttcataagatgcaccattcatgtatcctcaagcccgtacattattgcattgcaatagtaagggactaagggcacatttatgtcatttattcgattgccgatagtatgtgatatgcgcaatatttgaaatctacacatttgcctctaattatattttaaaagcataatagttttaagcattagtttacaaaaaaaaaaagaaaaaaaaaaaaattgttttaagcatttaaatggttataccttagttggtgttctcttttccttaattgatgccattgaaaaaagtatgttcttaggatagccacattgacaaaaatcatctacaatttgcagttttcatatacaaaaatttaaaacttattttgatttaacatcgggt

SEQ ID NO: 60026 - DNA, 1670 bp, Arabidopsis thaliana landsberg
catgttatttcttctcactattgttgttcatatttgcatgtgattatcaactcaaagcctgtggataagaagaacaaagtagatgcagcactctctgctccattttggaaccaaataataataagtttacgagagcaagactacatcactgatttgtaagtgctttatgctctacagtaactatactgtgtgcgtaattctctaagcttctgctattatatatttttgtttttacttatttttctcatctggaatcatttttgtagtgagatggaattgctcctgatgcccaagaattctggtaggctcgaattggttcagtggccactttttcttctttccagcaaggtgagtttgttactttacctgcgtttgtattaaattcaacgttttattgtgatatctcgctagcctcattgctttccataaaatttacatatgaggttacgtatgagtgacaattattatttgataatctactgtagatattattggccaaagagattgcagctgagagtaattcgcaagaggagattctggagaggattgaaagggatgactatatgaagtatgctgttgaggaagtctatcacactctcaaacttgtcctaacagaaactctggaagccgaaggaaggctgtggtatggattttcggccctaaaatcacttacaacgttgttgctggataaaaagatgatatttatcgttaatttttttagggtggagagaatctatgaagatatccaaaccagcttaaaggagagaaatatacatcatgattttcagttgaacaagctctcccttgttatcacgagagtgactgcactcttgggaatcctggtattcgcattgccactgctaattattgtcagaaatgcctttatttaacggctcttaatgataatagtagttattttgatgatactggaagttagattattgtgaatttaaggcgttcttacctattattgggagaagggtgccatattttcttcaccctctatcaattggacggagttttattttgttattttcctagcatgatactttatatttgattttaaatttgcatggacagaaagaaaatgaaacaccggagcatgcaaaaggggctatcaaagcacttcaggatctctacgatgttatgcggcttgacatattgacttttaatatgaggtgcatacaaagttgatgatttgttttttaatgcaagaatccaatcgctcttttcttttccttgtttgatatgttttaaaattatgttgctctgtgtaggggtcattatgaaacgtggaacctgttaactcaagcctggaatgaaggtcggctttttacaaagttgaaatggcctaaagaccctgagctggtataatgatgattcttgttgtcaagcatattagtgcactcattctttttcgtcagtctgataattgtctttgatttgcagaaagcactcgtcaaaagattgtactctctatttactatcaaagattctgcagcgcatgttcctagaaatcttgaggcccagacgtagacttcaattcttcaccaattctcttttatggatgtgccaccacctaagtctgtccgcaagatgttatccttcaggtatttctttcttcatactttcgtcatattatctaaagcagctctttcacaagtactatc

SEQ ID NO: 60027 - DNA, 1080 bp, Arabidopsis thaliana landsberg
aggaccgtctctagaccctctgcccttagccgacagagcatcaactaggcactgagctctctgtcccatgccgcttgttcaagctatggtaagcccaacccacttttatcgtggatgaaatgaggaagtcattgatcgatccctatgtttaaattttgttggttgggatgagacacacatcccaacatcgccaatgtgtcaatgtcagaaaattttcatactctactgtttgcaagaattagctgttttattttatttttgtgtggtttttaacagtttaaaagtaatctgttgatgtctctttgaatctttctgagtaagtgataagaaaattctccttaatactacacacattttcaattttcaatttggggtccacattaggttcaaattgtagtggagaagaaaccattggtgaatggataacggttttgttcggtacaaatccgaattctgcaattatatgtgtgtagataaagtgaacacctttttcgtttagatagtttgaagattaaactgaaagttaggacctttcatttccaatctctaaacccatttctctacgattagagaagctgacatcaaaattgaaacttgggaaatttttggatttgttcttcttctatggcaactggtaaattttctgtttctctataactgatttatgtctttttctgactttgtgtgttcattcttttacgttttctgtttgtttgccgggaaacaaaatgaagaagacgatggtgaattgtcagctcgttaccagaacacgttggatgcattatcgtctttgatcacaaaacgtggccgtttagctagtaacaaccaatctcaccgattccgtttgctctttcattatctcaaggttacaaatcacttaagcttttttgtgtgtcgtgccaaaatttacgaggtttttgaaagattcatgaatctcttaaaaggttcttgagcttgaagatgcagtttcacaaatgaaaatcattcatgtggccggaactaaaggaaaggtacagactttaaagttccttgagattatgcaatgaagattttcaagttttgtgatcgttgtaaggaatc

SEQ ID NO: 60028 - DNA, 546 bp, Arabidopsis thaliana landsberg
  unsure (1)..(546): unsure at all n locations
tattctcttggagggatgtgaggcgattatgtacaccagtttgtgcaatcatgtgctgtctgtcaacaggcaaagccggattgagctcgttatcccggtttgctcttacctttgcctgttcctccacatgcgtggcacaccattttcatggactttgtggaagggctttccaaatctaacgccatggactgcattttggtcattgtggatactttttcaaagtatggtcatttcctctccctggctcacccgttctcagcagcaaaggtagccaaattgttccttgacaacatctacaagcttcatggaatgccagtcaagattgtgtctgaccgagatcgggtcttcactagtaatttnnnnnnnnnnnnnnnnnagttgactggtacacaactttgtatgagctctgcatatcatccgcagtcggatgggcaaacagagcgagttaaccaatgcattgagacatatttgcgctgctttgttcatgcgtgtccaaacaaatggtgtcactggcttttcgttgctgagtttggtatacacaaatta

SEQ ID NO: 60029 - DNA, 518 bp, Arabidopsis thaliana landsberg
aaaggcctactatactcattggggacgatagctgccacatgctgtaatggaacacaccgaacgccgtgcctgccgcggcgcccgcgagcgccggggacaagctgggcacatgttgtcacggccggttggtcacgagcatgcccaccaggaaccgaagccgacctgaagcgcctgtgagcaccagatgggagtcgatgccctcgtcctcggaactgacgcgttctaccttgtccacgagccccagcggccgcttgcccaaggggcgaagccgactccgcgagttcacatccaccccgggcgacagtatttcgacgccgtgctcggcgaccagatgcacaatggctttgcgggcctgacggcgcaagctgatgccgccaagggcgggcaccgacaccagagcaacgccggttcgaagtccgacgtcggacaagatgggttggaaaccagcgcgccgcggttagtcggtcatcaagatcaccaaatcccagccgcgctcggtcagggcccgatggcccgtc

SEQ ID NO: 60030 - DNA, 563 bp, Arabidopsis thaliana landsberg
cgccaccatgtcgtcaagtactgatccaagactttttttttttgttttttttccttcttcaaccgcgtagatacggtcccaagccaaaaaaagctagcatgtacacctcttgtaagttttaaatatcatagcttatgacagtaacacggaacatcaacatttcattctttgaggaaaattcattatttttgtgtattgtgtactctgttccatcctgtgaattagccagcttctttataaggtccccaacaaacgcaaacgcaacactggatgggtctatcactatgatattgttccagaaagatttgatattcttatcccacaaacctgcaactctttttccatgagaaccttttcttccatatattaagaacaagtggggaagctattgaaaaactgaaattggagcttaaatatctacttaacaacatctgcaaccaaaaatctgagcaaattttcttggcaatgagtaatcagctcgcatctcagggtccatctgcatgtcctcggctcttgccacacatatactcctctttcttccttactaccaggtacagggttgt

SEQ ID NO: 60031 - DNA, 341 bp, Arabidopsis thaliana landsberg
tgtggaaaaaatatttttgataataaatattgttggggtgtaacagggggtcttttatatatataacaaatggatggaataattttaacagaatatatgggtcaaactttcaatattatgggaatagaagctgacaacacacacatcaaaaagctgggacacatcaggtagtaactgaagtcaaacatagacaccaaactcaactaaacccactctttttcaaaagtcagtgctctttctctttgcggggtttgctgtttactatacccactataaagggactcgataatttgcctatttttgtaattgtaaccaacaccagctaaacaatctttggtctg

SEQ ID NO: 60032 - DNA, 594 bp, Arabidopsis thaliana landsberg
tcttaatttattactagccatcaataacaatctcaatcacataaccatataaagaaacacctaaaacacttatccgagaatactcttgcaagatcactagagtaataaaagggatttcaacacttgccaagagaaacaaaaaaaggataaattaaaattccaacaagtatgatatcctccaatcaattttactgcgaattaaagcgtttcatgatgatcatactcatatccatgtagcgttgagcacaatgagtgaggcaagaactctcgcttgagctgaacttacttcccggtgcgcttgtgatgcatttgtcccagcacacacttgtcatcttcgacaccatttcgttcaccattgctctttctttctcttgctgccacacaaacacacacacacattctcttacaattcaccaaacataaacccaagacaaaaaaaatcattactttgcataaaccctaataaacccaattcttgtaaacacatattagtacactaaatctcaattcaacttgattctaatcataccaactaaatcacacatgaaaaaaaaaatcagatcttttaagtttaagcatcaaatgtaaattgac

SEQ ID NO: 60033 - DNA, 1915 bp, Arabidopsis thaliana landsberg
cttgaaaggtcaaacttgcagtaactttcattgtataaaattgcttttaactgaatgattaatcgagtagtagattagtccaatggaagtatgtggatcaagttatgtgtctgtcggcattatagttttcctttgaaatattgacacattactagaatcttatccaagaaaaaattgtgtggttatgaaaatcctaagtaacgagacagcttattaaatgccgaatttggtagcaatttgttcagatgaatgtatgtcttcttgtaaaagacagtatgaagtggaggttgatgctaactatcttatggttccttattgcactttgaagcatttattgcaattgttttcggttttttctcttgagtgggctaaactaataatggtctgttctttctctaaagagagaagaattcgacaggagcgtgaagcatcttcattcgcaaatataacacattaaagctacctctagcatcatctgtgtgattctctccaaggtcattcgttgtctgtcacggggcatctcaagtaataaagcttaaagttaactgtcttttcagccaaatagtttcatcatctaaatattcacatgatcttccatatttcatcaccgattatggttacaacatttttgcaaaccctaaaatttgtgttatcgccaaacttgacccttataccggaacccatgtgggtgggtgttgatttttactgttttgtaatttcctagtttcatgtgcatatatgtctctaaacagtaattgtttagcacttcatgtcaagcctaaattattataggtgtcttatcttgtctctctagtattttctgttgaagtcatgtgcattaaattgtatatagtacttccaatggttttcatataatttccatttttccacaaattgttcgtaatgatgtttatttaacaagattataaaagataatgcaacaaatttgtgtgatgaatgatgagatgaacccatttgaaagaggtcgcaacaaatgtcaacattagagaccatcttgatctagagttttgtctcgttgactttaatgccaaaattggacaatacatataatgcatgtatcaggcaatgctaaaatatcttcattcatttaattttcttactataatagatgtcacaacttccctcactgacaagcatataatgttggttttatctcaatgtaaacaaccttttagtttcacataaatgttaagtcgagcgaggtgatatattcgttccagatcggatgaaacaagtaattcatcgatgttacctttatccatatgtatatgtaagattatgggttttaggtaatctagtaagtactactaagtagtatccgtatgtaattttttatttatttttatccgttatgtataatttctttggccgttttcgcaaaatctatatttggatgttttagatcgtgaattgatatatcttaatttgaatatttaggtattcatatattttgaatctatagttgacctgttgaccatgtattttgatttgaatatctcgctcgatcgatagaagtttttttttttttttttttgttgctgatagtagaatcttcaagttgtaatttaacaaaaaaaaaaaatcaagttgtaagtagaccgtatatctgtatatttccatatgtagaaccatgcattttgaataattgaataaaataacatgtggcaagacgtatcttcatatgataatcagaatcataataaaaagacaaactgtacaccatattgtgatccaggtttaatttgacctctttgaaaaactaaaatagctgaactgaatatttataactaaaaagacaaattggatatgtcactttggactatgaaactcaaaattttttttggctaacgtggatacttttaaacgtgtgcctgacttaaaaacattttgaatt

SEQ ID NO: 60034 - DNA, 472 bp, Arabidopsis thaliana landsberg
tttttctcttacaagtacgcgtccgcttatgctgttgttcatgatgagtattctcaagctcatggaccctctttcgaagatgatttacgtacgcaatagtgtctccaaggattgagactttatccatcttggtcacaaatggaaccattgatctcaacgttatgaatttctcgttcagcttctccctcctgcgtcgctctgctactacgtggctcagatcttcccgcggtagcctcttatctttagtgttgtcatggaggaaaggaactctgaagatcatttgtttgagcacccattgtgacgacggcgccgttttcacttgctgatggtctttgccattctcaaccctccacgtggcaaacgatgattggatgtaagaagatgtggaaactgaatctgaaagaagacttgtggggtgtgacatgagaagtgttgttactgtctgagaatagtttccaccttcctccattag

SEQ ID NO: 60035 - DNA, 413 bp, Arabidopsis thaliana landsberg
aaaatccattaaaataaatgaaacgttttgagcaccgaattaatccacatggccacgcaacaagctgttgcgacgtatctgtttgaaaaccgaggcgtgagacccgctggccgctgcaagctgccctgtctgtctctggctgttccctttactggccccatcctcccgggccgcgagatcgagattcgacggcgcacgcgaatctttgcctgcccaccacctcttgtcctcttgttacttttccttgttccatttactttcagcgtgcgcgctctatctgcctagctgcctaccctcccgagatctccttgcttgttacgtgccttcctcccttctatcttggcgacgtatacgctcaccagcgtcaggtacgcggctctttttatgacgaggtcgctgcctgtctacgccag

SEQ ID NO: 60036 - DNA, 535 bp, Arabidopsis thaliana landsberg
ttctagaagaggaggtactcaaaacttaggacgtacaacaatatctatgtactgctttgcgacaaagcgtagaatttagatttaatagtctccaaacaaacacaaacctaaagtttctgttccttcaagcccctttatatatatctgcctggtcgatcttctttcgttacatcataattctttgaccttcttgttcttcttcttagccagctcatatcatttttaaaaaatttcatataacgtataaaacaattacgtattcttgtctcccactctcttcctcctcccttaatatttcatattaatttatgtaaagagcaaatataagtaattgattctgtcatctaagtatctacgtggcgtaatcccctgagttcctgccagcgtttcagacaacaattctttccccttgcctttacatattcattaaggtacccacatatgtctttttaatgccgattgtaatttgtattcaataattaccttatgattactgattactgattgattattagtactagtaatagttaatgaa

SEQ ID NO: 60037 - DNA, 280 bp, Arabidopsis thaliana landsberg
gaagccgctaaggccgcattaaggggggttccttgtctcctgggagtgcgaaacggatgatatagacttcacctacaagtgcgtctagctcattaacatactcgaaatactctgtcttccaataagcagccgcaccaactaaaatacggactaccgaagcgcaccatctctgaccatagactatgcccattttggtccgcaggtggacgggatgactcgtgactagatatccgctcctatcgatgaggagatctcaacctaaacgacatcgatacgctac

SEQ ID NO: 60038 - DNA, 501 bp, Arabidopsis thaliana landsberg
acttagacaaacataattggcacataatccaattaactaagtgtggtaaactcaccttttttacagatcttcaaaagagtttctgaattggctcaaaccaagtttaaaatgcactttttgctacaaaatgagttagggaccaaatgaaggtgcaagaaacatcataataggcctcacagatttaccattttactccaagttacatttccaggccttgtttcagctcttttggacttgaaacttcaaattgccatcaattagacctatgctcatactcatatcaaactagttagttcatgttggtgtgttggacatttaatcaccaaaacatgtagaaatgactatctagtacatttccctttgagttttattgttaatgacacatctaccttcatacaaactacgcactagattgtagtttactacctaccactcaacattaaaactaattaatccctctgaactggatggtgtcatagttcatcccccattcactacaca

SEQ ID NO: 60039 - DNA, 217 bp, Arabidopsis thaliana landsberg
ctggcccatcaggcgggaagagttgagaactttttgttgttcgggtgcactaggcgtgggaatctggcgaacagttcggtccaaatcctgaagaaagctaaaaagtgctggttgatgagcctgcgtcgtattaggtagttggttaggttattgatgaccacacccaggatgcttacttggtgtgtgcgtgtgacttgacacattgggacttgaatga

SEQ ID NO: 60040 - DNA, 1316 bp, Arabidopsis thaliana landsberg
tgctagtaatccgaagagcagccagatttctgcggagtccttgtataatccatcaagagaacattttcaccaacaagctttcaaaccgagagatgctgaagagacacagttccatcctcaaaggaatggtttccctttccagacatttgtgcaccaacctgttcacgggatgatgaacggaggataccaaccatttcaaaacaaccgaccaattgttttccctcagatggctgccccaacttctgatttctcaagattccatgtccagtctcaatggcgaggaggcattactccacaagtccagttgaagcagagacaagagaatttcaatctcccaccagatttgaacatcggagttcattcgcctgattctcctgcaaaacaatcttctggtgttcgtgtcgattcccaacagcctgatttggcgctacagctctaaagaaacagccatgaagaacaagcccaacaatttcaaggagaaacttgactcctgtcccaagcaaatgttattgccacagctttttctttttttctgtgctcatcactacatcaggcgataacgcgggctagatatgtaatcgctgtgggagaaaatggaaagaaacacaagaccaagttgttgaaccaggtgagtctacatgtgaatcaaaaatctttacctaggcttctttatttttttgatgtggttagtttatttcgaggttcaggctggtttagagtcatcatcagtcatcagtatagttggtctaagagttgaatttggagaatgcttattgatatcgacaccgtggttagctaacgatgttcctaacgtagatgttcaatcaaaccaatcaagttcttgattcacctgattccctgaagtctttggtcttcctacacttctctatttgttctatatataatatacgaattagtattataacatttggtaatcatatgaccatagtaaaaggttgtttggccgagtcttcaagttatggcacacacaagtggctcgcgtcatttgctttgaaagaaggaaaggtcacaacaagtgtttgtgtgtttggtcaaagataagaaaggactccataaggcatttatgataaatgggacaaaagagcattttgccactaatcaatttgattcctcgtgcacctcaatgtttgaaacgccaagtaacatgattttaggaagagttcaaaacatttattcacacatcaatctcatgcttgattcttgggttgaaattgaaactttcaaaatggaattcgtgcactgagtcgaatgaaaaactttttacgtagaatctgataatgttagtcaactatgcc

SEQ ID NO: 60041 - DNA, 336 bp, Arabidopsis thaliana landsberg
  unsure (1)..(336): unsure at all n locations
aaaagattaggtatatctttctcttgatgtctttgtttactgtctctctatatcatgagttttgtaagttgttccattttatgctcagtgtacttgaaggggctgaatcaactttggtaatggcatcggggatgtatgcaagtaatgttatgcttttggctttggttcctacaaatggacatattgtggcaactaaagattgttacattgagacaaggattntcatggagaattttcttactaaactgngaatcactgtaagaaaatctcaattcataactttcattntgtttcctttccagctccatcgattaacactttgttatatatatgtgt

SEQ ID NO: 60042 - DNA, 1326 bp, Arabidopsis thaliana landsberg
gaagaagtaaagggagaatggaatagagagaatctggtgaatagacagaaagctaaaacgggagggtcaaatttggcaaatcgggtacttttggggagactggaaaaagttatttttttcaaatttaccgcccaaatttgtttttctatcatataattccttaaattatgataactacagaaacaccccttttattttcgagttttgacaacatctatttgttattattttaactagcaatgcaaaatttctatatacatgaaaattattgaaatattaaaactcgcttgatttgcaactaaattatcgtaaaatgtaaatttctttttcaaaaatcatgttaaaactttaggataaaatgttgtcacgtatatatgtcgtcgcatgtgccttaatatatatgaaaaacagaaattaattatttattagatttttgaaaatttagtacttataaatagaaaaatgtcataaaatacattaaaacaaattttagttgctactttttcactaaatttaggtttaaaaatattttcttaaataatttaatatttgaagtttgtaaaagttcttaaattttattgtatttgatagtgaattgttttgaataaataacgttttaattgatgaagatacaacttttaaccttaattattgaaaatttcatcggattgaatgccgatgaaaccaaagcaatatcattattagcatactaccaatttgattcttaagaccctaattcgagacgtgtcgatttttttacttgtgtttaaatttatattttgtaatttttaaaaataaactttctatttttttttggcgtttttcattgacattgaaaaactatgtttctatggagtataccaataaataaatataaacgcaaacgccataactagcgtttgaaacaatcgaattcaactccgatgaaaatccatcctcgttcatgtcattggcttccatagtactaaaacatgaaaatggacaacttaacaaaatgaaccaagagggacggccacaaacagaaatgatctgtctgtcaatttaacatattaaaatagagattataatttaaacaatatgatttatatagaggactttacaaagaaaattaaattcatcatctcaaactcaaaagtccaaattgaaatcataacttaaaacaaattctctaaaagaagatcaagtcggtgcatttgcacttggggcaacgttgacgttcttgtaagaccataacatacatcatacaacttcgacatcccatcaccaccatctccggcgcctcttcttcatcaacccacgacgatgcaacctcctccttcacttcct

SEQ ID NO: 60043 - DNA, 758 bp, Arabidopsis thaliana landsberg
gagtaagcgaatcaggaaaccaataattagcatcatttacattgtactaaaattccatagttttctgaagagatttctacttggtttaccaaaaaaaaaaaaaaaaaaaaaagaagaagatatatttctcctttttctcatagctctaatacgcttgaagagacaagttgtttcaattgttcagtgaaactcttttcaacgaatgaacaaaaatcattgaaatcgtatagaaaatggctgaatgttttttgattggtcaaaggctgattaattttataatgattaacaaaaaaactttttatgtgaaagtttgacttctttgtctacagttacgtattaggtgaatcacatattcacatggttttcattgatttataatcgataatttctagaaagattcgaaacctaattttttttaataaagctttaataagcaataatggcacttaatgaatctttcaacaaatggcatatggagacaggtgtaacgtctgagaatctgaggttccttgcctaaaaaattaaaacttgtggtggcgaatcttcacttaacgcaaaattgtaaccaaaagctattaggttcatgcaagataattaagtctaatcaactataatacttaggcttgataacatggtttattttattatttggaaaagtaatggtccagaagaatgttttatttgatctcacgagttgcctcgtatttgaaaattctttgtatttgaaattgttctgaaagaaacatttatattaatat

SEQ ID NO: 60044 - DNA, 1541 bp, Arabidopsis thaliana landsberg
gaaaagataaataaaatttaagtgttttgatagatgcttacattaaggttagactccatagatgattatgagaagagactgcgatggtcgcgaagcaactcatcggaggaggaggcaggctgattcgaagccgagagagagtgatgattggaggattcagcggttaggtccaaacgattcgaagcgcgtacggtagagacggagagattgtcttcttcacagctagcgttggcgtgtgagttattattactactcttatggtagaaagacgtcgaactaatcgagtttgcatgatcattatgatgatgttgaacatcttcccaccatgatgaacttggagtacattcttcccttaacattttcctatcttcgagctttttctttttgcttctttcttttattttgttggttaagagtctaggatatgtgcattagagaatataaagtgtatatatgatacgatcggtggtggtgacaatattatatgctagtggggtacgtccactacgttacatttaaattacatatagttatatataagccaccgaaggatgtgttatatgcggtctgcgtaagatcgtacgtcaattgaagatgtgtttgacctctacatgaacttgtcacatttttcggcaactagatggatcttggaatattttacaatcagttaaaattctatagaagctagcatattaatctttggacaggacaacatgcagagtcacacaactaactcaaaacttgagtttccctaaacagcatatatatcatatactaactaattgatcgacaataataaaaatggttaatctttttattagtaataattatttccttttcaaccatgatattctagataacattatagattttggagattaatctaagtttcaaagattttaaatatcacttttatttccagaaagttactggaataatttatgcctccgccacaaggagacatgtctctggcataatgtacattgtcatcagacttggtatttaccatttggccaacctgtgttaccaagatatgcctccgccacacgtgtatgcggccgggtgccacaagtccgtgaatgaggcctaaaaattgttgtttcattctcttgtacaagcattggtgggagaaggcatgacgatactagaagctccacgcttcatcaatcataagtgcataaggagtagaatcggactcggagtcaatagtcactagctaatcttttatgatgattcgttctagatccaatataacaaaatttacgtcgtcttctcttctcttcatagtataatttatttttggtttatcgagagaagccaattatttggctgattcccttgctacattaggtttgaccaacttcttttctttgctccccagctttaataaagattttggtttgccgaccaaaaggttagatttttgtttttgaccgataacaaacttctgatattgaaactaaaagtacatactaatagtcattgcgaaattgaaggagtttagatgaaaaaagactaaactaaaaactgattattcacag

SEQ ID NO: 60045 - DNA, 1280 bp, Arabidopsis thaliana landsberg
gactcatacaggttcggattcagtcgcatcccacctgaatgataatgtaccatctgtatccatagaaggagaaaaaattatcaatgtcacttgttttagtccacaaaacacttttaaacaacaacagttacatttttagaccccatgatattgctaagaatttacaagaaacagaagtccgactgactagtccccaagaaacacatatttaaaagcgagagtgagtgatagagaagttaaagaagtgaaactcactggtggctcatgaggatattgaggtggaagcattatgtcgaaaaagaaaagcccatcgtgatatggcgttccaggggcaccaaccagggctgcacgcagaaggtccatcctttcttcacacacacgcacatatatcgtgtctgttcatcacaaaaattcaaaatcagtgattttataaccaaacacaacatcagaacatacgataattgaaaactatcatttggccaaagcgaaaaaaaagcgcggcatggctaggaaatcaacagagaatatatatgcagaaagagtcacaactaactcggaagatttgcctccaaattgctccattcttgctggactttcttcacccaactctttgtgacctataagagataaaaatgcaaaaggattacttggcttaagtatcggtttatcaaaaagaatgttaagtattggtcccaagagtcatacctgggactgagccaaccctttatccgaagaaaggaaatgatggtccgagcagtcattaaccatatcaaactgtctgaatctcacttggttcctgctgttctctagaagagttgaatccagtgtcctgttaattccttttccttctataggtatgttgaccatcgtggtggtcatatccacttcacctgaatttgtttcagagttgtcatatgattctgctgtttcttgaacaaggacctcagagtcactttgatcttcagaatcattgcaacgtgaatgtgaacttataaccgaagtggaaccctgataaccgaaaaggcttgatgcaaggtttgtgataaatccaatggcagcttttggaaggaaaaatgaactacattccggaatgttctcgttgcgactttcaccaacactgtagagcttcaccagaccctgatatacaggatcatataagtcactatatatatagaagaatctgctgctatgggaataaactgatatattcctcatggcacaaaaactctaggacacccaaacatctaagagcttagcttatataaatacacatcagagcg

SEQ ID NO: 60046 - DNA, 1368 bp, Arabidopsis thaliana landsberg
tggaaacttcccaatgaagctaatattactgatctgctcattctctctcatgcagtttactgaaacagctccatttaggttgttgctattagtgtttccatagaaacagaacagtgatgatgatgatgatgatgaaaacttaactcgagagcacaattgggatattgttatctccattttctcttcataaaaactgattgatcttacaaaaacaaaatatgaagtaaagaaaaatgcaaaaacttttgagatacgttaagagataatcactatatgggatatgtggctacaatatcttgtatctggataaaaacaaaatcctaaaaaaaaacagaatcctgattaataatttcgatacttttttttcgctttgcattaacaagtttacagttacagatttttttatgattataaaaataaaacatataatataaagtggctcataatcacagaaggaaacagagctctctgtattagctttaacatcaaatcagatataagagtttttgttttgttttgttgtttatacttgagaacagcgaattacgaaagagggagattttgatgcctggtgctggtttttcttggctttgcttcagaagcaaaagagatgtttcttcttcttcttcttcatcttctggaactgagcttcttcttgacgatcaatgtaagcaagtaactcttcctgtctcatcaaagcttcgtaaagggcctttttagtagctatgagctctgcttcaagtgcgtctactctgcagacggctgcgtttaacagttcttctttctcgtatggcatctcatttggctttgattggagcgttccgattttaccttccagctctgtcagtttcttcgtcacacagtttagtagatcagtttccgtgaggtctggtacaggagaaggaggacgacactcctctttaactccttcaccgttagaaccaagttctattgcgtttccttgggtttctgctggggaagaagtagtagtcgctggaagtatctttgttacagtgccgtagactgcgaaaacgcgtcatcaagaatgccatgaacattactaggacttgagccttgacgccttcatgatctttaggaacggtgggagacattaaagctcctggaggaaacaaatgaaagttacgatctccacacccagaaacaccaccgtaactctgtgtttataatccaacattcggagacattacctcataagaaaataaatcctaatgtaaacattgcatacgttaaattacttttccttcagtacttgattctaaaccggtgcctactggtacgaacagcatataccatctaaccaactaacctcccgaggcatctatctggatggaggtgtttaccttacag

SEQ ID NO: 60047 - DNA, 1153 bp, Arabidopsis thaliana landsberg
tgtcgtagatcgctatctgacgccgttcttttcatcctccttgaagaatcgtcgctagagtgtacagacatcgggctataacagcaagaggaagaagacgcagagagtgttatggatctgtgtcgttgaatctgatgaacagattcaacggtttcgattggagaatctcttggactcgagacatgaaccaatgagtttagaagtggcgttgaagcgcttcgtagaagcatctctcgttctggatctgaattaggagattcttaggttttgattagaggaagaagaacgcttagatttgttgttttccaggtttgtttgagctggggatgagaagtgaagacggtgctttttaatagagaggaaggtaaaggaaaagcaatctcagccgtcgattagtttttaatcacgtggtggatgttttaagcataaattaatattttctaggttaattagtttttggttctttctccgagattttttttgtttggttggtttgattttccaagtggtgtaccaaaatgatttttaatttgactttgcttgtgtatatcattggtctgcggattcttctctgctcgttgctactaagctataaaaatctcgtgcacaaaagttacaaaacgcggaatattaagttcacgaaggtcgcagaattgcaagtggacggcagtgtcaccagaaaatataggttcacggctgatctttctacaaatgacacgtgggacaaactcttttaatgcaaatgtaacagatggacggtagattcgttcattgcttttgcacaacgtatcaatgtagttataggtagatgtgtgcaaaaaacacaaatattgtttataaataaaattgaattgtaagtatatgtgtaatttgagtatcaattgggtgggtgggtccttctttgattgtacggttcacggttccatgtggctcacgaatgttgtaattgacgctttggcccataaccatttctatcttttgattttttttgggcccatttctaagttgataacatggccaatagtgtatttgtttttgttttttggtctttgatactaacttttaacttttcggtagtacaactaatgtaaggattagcagcgagaatctgaacgaatcgtctcgtgtcaaaataagataaaaatagtacaac

SEQ ID NO: 60048 - DNA, 1279 bp, Arabidopsis thaliana landsberg
gtacctgtcaagctgaaaccttagatgaccttctgtttcatctggtcctaaatagcctaaccacaactgccccgaagccggaaaaatgtcaaaagcagtggggtccccatccaaataccaagcaatttgccctgatgaagggccatggggtactgcctgataaacaggtgatcctgcaagaacaaaattgttcctacgatccgtagagttactccttaaatctgaaggccctcttgcagaaggagatggtgtatgctggtttaataatccccttgggactgaagatctaccacatgacaagtctctctggtcaacagtctcaaaatccatagatcgtgaacctccagcatcataaaccgatccagcactagagcggacatcattgtctgcagaactgtgaggtttcacatgtgaaactgaaaattttccataatcatcctcgtcactgtccatttgacaatcttctaacttgatattttttcaacaaatccaaagattccctctagagaagtaacagcactggatatatccacgaaggatgacaggctgcatattttcttatactgaaagaaggcccacctaccaatggaggaactcttcctaataacctgcacgaaggattcttgaaactatcagatttgaatatacccattacacattagccatacaaagttccaagaacagagcaagcgaataaaatgagtgacacggttgatgctcaatacagggaaaaataataactaaagccctacacaaataaataacacgctaagaaaagcaaaggctacttattttgattctacactacccagaggattaccatttctaacaagcagctcgttagactgtttgatgcttcttgtacaccattcaacccttctgcattcttaccagtagcctctatattgttagaacctgtctgaccagaattctcgtctacttcaggttcaatactagcggcatcaatatcattaatcttttctgtcatatgagtaatgagatacctccccgttgctacatcctccgtggatgaagaattgaagaatccgaaacaagtggcaattgattttttagggaagttgaagaatactttcagtaaagctaaaacacgaaactgggataatttgatcaaaggtaatgagtttccatctgaaagtttttgcatcagctgagaaaaaatttcgtcaggatcttgcaacttcaaatcgctcatatcaactatctggaagatatttttcccctcaaaagaaagcacaaagaaggttaacacatttctgaa

SEQ ID NO: 60049 - DNA, 626 bp, Arabidopsis thaliana landsberg
aatctaagataatgctaaccacaagcacatatcatgataatctatagagagaagagcaaatttcagtaataagttgaagataacaacaaaactattcgattctcaaagcattcaagcagagaaattgaaaaagttctcattcctaaaatcatccaaaatccaaattacttttgaagattcatcaatgtgatgctacataaaccttccaaacattcacataatccatagataaattagtagccacatagaactatggctttatcaggaactatgagtatgattcaaaaagaacaaacctactagattctcaaaacattcaagcagagaaattgaaatggttctcaattcctaaaattatcctaaatactttcaagattaatcaatgtggtgattctacataaaccttagaaacattcacacagatatatcaatgtctcaatctcaggaactatgaatacgaatttttgaaggtattatcactcacaggagcgtaagggagaagaaagagccatagtatatacacagcttcactagtccatagaagataccgaacaattctccttatagaatcatcttcaacctctaccgtcgccgtcttcggtttccggcgagcacagcataagaag

SEQ ID NO: 60050 - DNA, 153 bp, Arabidopsis thaliana landsberg
aaattcagattctgaaacaatacgaaccttgaaatggttagccgaaagcatctggctcatgcatagcaaactatgtccacgtccaaatcgttcaaaacgtttacctaattcacggagttacttgcaactttccatatcagatgatacaacact

SEQ ID NO: 60051 - DNA, 1613 bp, Arabidopsis thaliana landsberg
  unsure (1)..(1613): unsure at all n locations
ttatgtctatgaatttattgaaaatttatgttcgttaagtgttttgttttttcgtgatatgttttttttttccaactttttcttgatatattcattatttatatagggaatagagtttttttttgttttttttttgcaatcatagagttttaccatagacaaacgccttttattcgtcgtggcgaacgaaaccctaatcatcacttctccacttttgttcgtcatcctcttcaaaatttcttcaatttgattctgcaatttccttaannnnnnnnnnnnnnnnnnnnnnnnttcttcttagcccgccatggatgctcagcgagctctgttggacgaactaatgggcgcaggtgagaataatcgagtaccaaaatctattttcaatttattctccaaagctttaatttctgtattcatgttaagaattgagcgaatttttgttgaaattgctctcgattttatttgcagctcgtaatctgacagacgaagagagaagaggattcaaggaggttaagtgggacgatagagaagtatgtgcattctatatggttcgattttgtcctcatgacctctttgttaacacgaaaagcgatcttggttagtctcactatttgtatctacttgcttttttgtatgatgcttttctttagcttatcttaagcttcattgttgttttcaggagcatgctcgagaattcatgatccaaagttgaaagaaaggttagtcttcattgagatcttcttcattatgtttatttgatttgttacaaatctgaatcgattcgtgtgaaatgtggctaccttgcatgtttacgtccaccgatgttatgcatttatgtgagtttgttttgattttttctgtttcagctttgaaaactctccgagacatgattcctatgtgcctaaattcgaggctgagcttgcacagttttgcgagaagttggtgtgtaatgcttgtcataccttttttttgtttttttcattagagtctgattcttctctatactaaattttggaattggttacaggtgaatgatctagataggaaagttaggcgtgggcgagaacgtcttgcacaagaagttgaaccggttccaccaccttctctatcagcagagaaagctgaacaattgtctgttttggaggagaaagttaagaaccttttggaacaagtggaagcacttggtgaagaaggcaaagtggatgaagctgaagcgctaatgaggaaggtactatttgtttaccatgctctaaaaagaggagttttgaagttttaacaaatcattactgaactttggaatatggtgttctgcttgattcgtccgtatttgcagttatacccgatgtgacacatttactatgatcataaatttcgtacatttagtgcttatcttttgaaaactctggtaggtggaagggctaaatgctgagaagacggtgttgttacaacgaccaactgacaaggtactcgcgatggctcaggagaagaagatggcattgtgtgaggtttgtggttcatttcttgtggctaatgatgcccttgaaagaacgcagcttcatgtcactggaaagcaacatgttggctatggcttggttcgggatttttatttgctg

SEQ ID NO: 60052 - DNA, 479 bp, Arabidopsis thaliana landsberg
atctaggaatgtgtagaagattttgctagttggtctgggcttcatatgaacacagataaaacgcagttataccacgcaggtttgagccaatctgaatccgctgctatggctagctacggcttcaagcttgggtctcttcctatcagatatctggggttcctctgatgagcaggaagttaactatcgctgtgtactcccctctcattgagaagatctctgcccgcttcaactcttgggttgtgcgctttctctcctttgcaggacgggggcagatgatctcttctgtgacttctggcattgtcaacttgtggacttcaacgttcattctccctctgggctggatcaggaagattgaatctctgtgctcgcgttttcttcggtctagcagaatggataaaaaaggtgatgcttaagtggcttggtctcagggctgtctcctaccagtggatgtggtatgggactgagaatgtttgctgatt

SEQ ID NO: 60053 - DNA, 253 bp, Arabidopsis thaliana landsberg
tcattagaacgggtgaggggcaatttccgttcaatcgttcgaagccaatcttctgcttccaatggatcttctaccttggagaacactggtggttgcgtaccgaggaactccttgtagaggacagcaacatcagaatcataacgaccatgctgaactgatgttgtaggctgggctatttgctgaagaacaacattcacacttgcaagctgagccacaacatcatctaaagatgatacccgggatagggtatatt

SEQ ID NO: 60054 - DNA, 1636 bp, Arabidopsis thaliana landsberg
tgttttcttctttactttgtaatactagatattaaaggttgtgtagacttttattttgtatttaatttttttctgttgagaattcattactcggtgataaatcgtttccaaaccgggtgacaaatgtaaaaccacatttcataatggtctttagatcttatttttttttagctagaaccagtcttggatcttacgcaaaattaatctaaattctaccataagtcgttaggacgctaaaatcctaaaaaactaacatttcttggttcgacaagctaattaacaaaaaaattgtataatagtaagggagtctatctgcatttcacctatctgtgtcagattatatataaagaaacatatgtatacgtgaccatgtcttttcttgttaaatctttctttactgaatacttgacaatttctataagaatagctcaacggtcaataattttcaatccgtacaactaaggactatatagacatgtatgttccctgatcatttatggtcaaccacattaatatgtttctaaaatattagacgtgagttctataatattcttcaaacaaaatgtttatttagtgaaaatgatcaagtgtttacttgatttaatgaatctaattcttcctagttgtattttgccaataaccttatctattccaatatatctacattataatgcgtataatactactgtataatacaacagagtatatataatccagcgtattattgactctatactcaaatattgcattagcagaaaaatgcataatatatatattttaaagaattatatgtgaaataacagtctaataatgaaaatcctgtctaaaattaacgatgagaacagtactatttattatggaaactgacgagttctgaaaagatcatgggattaaatggtgtattatttgtagttatacgacttggttatttaaaattatagtcaaaagcaacctgttgctaattaaagaggtactagatgctgtcagaaatagaccaacaaaaaagagagactactttagattaccactaggagccgttatacttaagttctggtcaacggctataactaacggagccgttagtcttttcagacgtcgttatctttcccgctataaaaagccattttccattagcttgatttccgggccaaacaaaatcttttgtgaagaaactttctctcatcttcccaagggagagagcaaataccaaaaacttctttttgcgtctctcttctaacattccttccttcccgatatttcagctcacgacgagaaaaatctcaccgttcacgctatatacatctatttgcaggtgattttttttcttctagatttggtatctcgttttctccgaaaatctcgatcttgatctttgcttttctcggattcgtaacgcatgtgtctgattagagttcatatacttgtgaatttgttgtttttcgtatttagggatttgatttcgtagaagtggttttgggaaacactgagatgagtaatcatcacacggtcgtatatgttaatggattggttcgaccggtactcgcggaggcccagtatcctatgagaacagagtctccggcggataaagcaataaatatctacgacggagatactacggagaatagtaggagggtcc

SEQ ID NO: 60055 - DNA, 794 bp, Arabidopsis thaliana landsberg
accctagtctttagctttatatgttatatattataagcgattctccaatatatcatgagatctataacctaactctctttaaattattaaaaatgcatgattcgatatatatgaaaatatttcagtttgatgtacattcacaagcagccaagtaagaatacaatcaatcaacttatcttatatatttggtcactatctagaaatcgatctaggaaactttatgagattaaataaagaaaggaccacaatcttgatcctagattatttatacgacttgcaatatttatatgtgagtgggcattttagctaaccaaccaacatgtgcatgtaaccatatattacacatgaatggaaggtttgaccaagtaatatatgttgaccattaatatgtctgatttgacggcgatgacttcggctaacagaattagacattcccggtgatcctgaggaaatcgatgttcgaggctcgagtctctctagatttttaaaatatgtttacttattggatagaagaaatatgcaaataaatagcagccaaaagtgatttctatagtgtacttaaaggttaaccaaaacttaatatatagactcggaacaattgggaagaccaagttatttaaatctttcactacgaaacaaaaagttgttaacaaaaggattaaaaggctgtataaagaataatataagctcctgaacatgtgcattgcgtaacctgatatatttatataaatactaatcggatttatctgtaggaaagaggaagaaagatatttaaatatctcaaccctttacga

SEQ ID NO: 60056 - DNA, 624 bp, Arabidopsis thaliana landsberg
  unsure (1)..(624): unsure at all n locations
tgctttgcccacgggcacttggaaagtgcgtggtgaactcgtcaaacctgcggacatcaaacaggttgcactattcaccatcgaaggtgaactggatgacatttcaggcccagggcagacagaggcagcccacgagctttgcacatccattccagaagccaaaaaacagcattttcttgcccccgaatgcgggcactatggtatcttcagcggtcgccgctggcgggaaatgatttatcccaagatacgagaattcattgctgcgaatgcctgatgttctgactgaacaaattgatgatttattgccccaaacccaatgtcagcaatgtgggtttggcggctgcttgccctacgcacaggccattcaggctggcaccgcagacatcaaccgctgcccaccgggcggcgaaatcaccatcacattactcgcaaacctactcggcaaggctgaaaaaccgcttgatcctgaatgcggtcaaaccgtggtgcgccacattgccagcattcagccagagcactgcatcggctgcaccttgtgcatcaaggcctgccctgttgacgccattgcggtgcanacaagcaccgacacgctgtgatttgcccgctgtgcacaggctgtgaact

SEQ ID NO: 60057 - DNA, 394 bp, Arabidopsis thaliana landsberg
ctgctcctgctctacgccctggtgcgggggggctcgggacggaagatcgccgtgggggacggcgttcgtgacggtcgtcgtcgcgctggggatgtacgcagcctccgcgggctgggccgacctcttcggcggaagcgtcctcctgctgttgatcgtcgcgctcgcggcggtgttccgctaccgcgcggacctctggcagcgccaacagcgcgagatccgcaaccaggagagggtggcgctgtcacgcgagctgtacgacaccgggtcccaccatgtatggcccataacggtgcaagcgcatgccggccacccaggacaacaatatacaaccggtaaaggtgtgtcattatttggtcaccttcgaaacctctatcggttacaatgtatccgatat

SEQ ID NO: 60058 - DNA, 464 bp, Arabidopsis thaliana landsberg
attgatcaaggcactgatgttctttcaccattatttgggtggttttggtaatggcagagaggagacaaattgaatcttctcgcatcagggagaagtatccagacagaattccagtcatgttttccagcatttatgtacctctctgtgtaagttcttgcatgtagctttgcttttgtaacagaggcagttcatggtgtaggtgattgtagagagagctgaacgaagtgatgttcccaatatcgacaagaagacgtgagtattgagtaatgacattctttactgctgttctttcttgatgacaacttatgagttctacacatcttttgtttacttaataatctaaagagaagagtgtgccttgctttgaacatttatctctgtgtagtatgaaaccggaatgagattgatctttaattgaagactacaagagtcttatatcagggaaatgtgttgatctgtgactc

SEQ ID NO: 60059 - DNA, 591 bp, Arabidopsis thaliana landsberg
gatcgatgatggagaatgttttcaggcaagcttgcttccaaagatcaaacggagaggatcattccggcgaggatgataaggaggcaagagtttgttgccattggcaaagcagagaagatggaaatgatttttttactcttttggctatcacatgtccccatggtccatgtccatcaaacatcccacaaaatgttatgtcttcttggcacccaaatccctatatattatgtaatataaatacataaaaacagtttaaatttcacaacaaatcttataaacacaattaattagtaactacatgcatgtgatgattccatttctaacatataagttcgtcaataatttgtagatatcataatacgtttcatggaaagacgaattacctaacatatagctagtatttatataaagtgtacctcccaaacaattgcacgatcttggttgattcctttctcacctctattagaacaaatagaggtaaacctcttagaactttcggagctaacaaagcctgaagtaccgagcaacgtcgagttcttcttcgaatctttaatcatcgattttgcgatctctctcccttcatcttcatct

SEQ ID NO: 60060 - DNA, 386 bp, Arabidopsis thaliana landsberg
ggaataaatttaacctaatgttatacatttttatatatataaacatgatttatcctaattctcccatttttaacgtagtaccatttcagccatgcttgaaactgcaagccatacttagatgtagaaaacaaaaatcagtatttccatcttcaaggcatctgtgccctcagaagcagagaagcatataaattaccagagacaggacaagtcactgtactttgcctaacagctttcaaagaatggacatgatatgcgaaatagcttttcagtctaatcttcataccattttctaagggtttaaaacattgtatttttaaggaactccaaaccaggatggtccaccgatatttaaccctgtgaacctaaaccattgcccccaataagcc

SEQ ID NO: 60061 - DNA, 534 bp, Arabidopsis thaliana landsberg
aaaaagcggggaggggacgagagccactaaaagagtcgaattcgagaatgtgagagacacgttggaagttggatccagatacgtggcgtgattaacgtgaagacaagtttcttttttccatctgtgaagacactcgaagacacccgagagatgaggaagacgaagaaagaaagcggttgttgtcgtcgtcgtgggacactgaagtttaaacgacaacgtttcgccaccatgaaacgcttggacgccacgcgcgatctaatgtttggaagctggatggacatgtggcgaagatgtggtatcacgtttggtgatggcgcgtgagagaccaatttttgaactagggcctagtatagtagtgcgtaggtccttcaacgataattattgacttactttctactggagatggtaaaatattttatttttttaccacaggagatggtaaaatatttgtcgccatttttgcactttggtttggataaaatctagatgtatgtaaataaacgttactaaatacttagttaatagaatataact

SEQ ID NO: 60062 - DNA, 554 bp, Arabidopsis thaliana landsberg
acgaagaaccaatttcaacctcctcgccggaaaaaatggcggaaggaaaagaagctacgacgagttcgctgagtcaaggactcactcctcaccaagaccccgacgatgctcccaagtctcctcccaactctccaaattcttctactcgcaaggtactgtctctgccgaaacctccgccgattttatcgagcctgtgagctaaagtttctgtgcttactcgttgctaagtttgggttggattcggagaattttagaagcattcttcgattttgttgctcttgaatttgaattatagcgatcttatacatcactgatgatgctttagtgggaaatgttaaaatcgtagtgaaacaatgagtagcgatttgtaaattttgatgaatcaattattattagatgtcgaattgatagaaattcgagtacaattgcgaaatcgttgagagatttagggttcttctagtgttgttgttatagtttctgtttatgtaagacaactctgaattgtgaaggttaagctgggtaggagaatgatatagcagaatcgataagatgat

SEQ ID NO: 60063 - DNA, 818 bp, Arabidopsis thaliana landsberg
tcttagaacaactgtttcaatttattagatagatgttgtttagttataaactgcagaatacataataagagtgtgttttcacaaagcaaatctttataaatagcatagaagtgcattattctcacgtacaagccaacgaaagtaagctatacaaattggcttaatagaaaaaatatatataagttataaaaagcctcaagttctcttagaaaacttcagatatccagcttaggttttcggctaagctcggagtattgaccgcccattaactgtaaaatctcctcccacaagttttccgatgaagctccgcatattaaatccgagctgcacgcagcaacatgccagtaatctgattcaatctcttctctgagctgatctagctgccaaccggcgtaaccaacaaagaatctaaactcctgtggcttaagaactcccttctttacaagcactgcagcttcatccaaactatttcgagtaccaaagttaagcccgggcatgacttcttcaaacccaggtatcttggttttatcaccagtcttcaacaaaaacatgcttgcttcaagaggaccaccaaagtacaaagaacattcagaaaacgtagtagcgagctcggttttcgtagatttcatatgcttgatgtttttatgaagtggacggttgataacaacaccaaacggcccttcttgtgggtgtctagtacctgctctaagaagaagcacaacagttctcgcaaatgttctataaccatctagcttctctgtagcaactagaacacaaccagtctcaggaaacgaaatcggatgtgcccattacacccc

SEQ ID NO: 60064 - DNA, 486 bp, Arabidopsis thaliana landsberg
ttatctagtgggcgaacataaactcattttgttttgtaacatcttgaaattggagttttgaattctctagttttccttaaaaatgtccgatgaaacgaaatataaaagatatatttataggttacaacaaacaaaatgtatattttttgtcaaagcaaaatgtatatcattatacattatagcaaacacaaaataaccctaaccagacttattagacatgtaaacacaccatgcaacctacgtcacctaattaaaatgatgtaatgagtgacatcaattcaattttaatgaatttatttcatctagatcggaaaatgaacaggttgagtgaacactgatattcaatctttatagtattagagcaactccaaccatggaacaccaaatttagtgttacaattttttcttattatgttactcaatttagaattttctttatttttaatagtttgacaaacattatatatttttataactgatatattt

SEQ ID NO: 60065 - DNA, 604 bp, Arabidopsis thaliana landsberg
  unsure (1)..(604): unsure at all n locations
atttctaggcctagactttggttttcttttctttattatccgttgggttcggtttactgatttttttggttttccggttttcctattttgagggaaattaatgtacattttcggtttgttaaaaatccggtttgggggcaccaaattgagacctatgtatgatttcagtgctttttcttgatgtgattttgagtacaataaagagtacaatgaacttagccattttttactttttgttttggttttaattgtatttgtgtttcaatgttgaatctatttatagccaataatatctaatactactaatattatactaccaaagtattggtcaataaaaataataattaaaatacatttgcatctaacatatattgactaaattaataatttaaaaagtattgactcatactacagtaaaatatttatataatgctatttattttgtaaagtactagcataagcttgtcatttttaaaaatctgtcactactaattttactatgattattttcaagttttataaagacactacttctgttgatgtatgccatgtntgtgatttttatgatatatatatatatatatatatatatatatttataagt

SEQ ID NO: 60066 - DNA, 566 bp, Arabidopsis thaliana landsberg
  unsure (1)..(566): unsure at all n locations
atataggactaccactacatgtagcactaaccactagaacatgagaaacccatcaaatagagagaaaaatgtaaaaggatcatcacacaaacaacggcatgaagaaaaaataaagaaaacatattgtcctcgtcatctaagtaatgcgtaacaattcgaacaacgaaagaaaaaatgtataatagcagtcataaaataaatatccaaatccacactaaaggaggagctgagagacaaccttaatagcaattctcaaaataatctcttgatgctgcttaggaagcttnnnnnnnnnnnnnnnnnnnnnnngtgcaatttcctccctttcctattaaaacttaaacaaaaatcagtcctctcatttccaaagtattgacaagcaaacgcaaattccaacaactattaagatgaagcaaacctttgcaggagctcgttcaaaagccatctcaacatagacaatagcaaagttcctaaccataggagcagcagcaggatctgtgtacaattccataaagccaataaaggcnaccaattcatgctgatgcttcactcttctggtacatgac

SEQ ID NO: 60067 - DNA, 582 bp, Arabidopsis thaliana landsberg
  unsure (1)..(582): unsure at all n locations
catacgtgtccggggatgcgcgagatactaggagtactatatccaagaagggctactacaatagagtatatcggacaagtaggtatgcgccatatacctatcattggacatgtctggtaaggcaccaaatgtgtccgatgataggtacccaatatgacactcatagaagactgcatcatgtttgggggcatctacatggcattatacatatttggtgtaacactagataccccaccgaacctaatactcagagagttgcaacatgactagagagggnnnnnnnnnnnnnnnnnnnnnnnnnnnnnnnnnactcaaaacaccagatgcccaatatcaaatggtcagcaatgactagtttgaacaattagctaacatgggtgcaccagacatgtccggtgagcgtgcaaaattgttgtgtcacttttaatggctatttttggtgtggaaggatatatatactaccccaagcgtctgattgaggagtgtangagataaggaacatatcaagagagttgaggctcaactctagtaactctagaaacccaaatgcttaaagaatcacttggtgatagcgtaagtgct

SEQ ID NO: 60068 - DNA, 482 bp, Arabidopsis thaliana landsberg
  unsure (1)..(482): unsure at all n locations
tgttggtatatttggggtgtgcatttaaactttgataatgactcacgaatttgaaattaaaaattagaaatttcgaaattagaaaagaaatacaaaaaaaaagaaaaaaaaacagcccacgttcatgcaaacactggcccacacctctatgtgatcaatggatccaggttctttggttttttttgttgttcttattattttattatatcttgctggagcgacgtcatgctgatgtcatgaatgaggtcatcatgcaaatcacaccgctcggccgtgcgtttctccgtgtcgctgttgggctctagaagcttttgtccttcaggctcggaacggcgcgggcaaaatccgaacttaccgtgacgggattctcggaagccgttgaagctatcttcacccttccagtgtctataaaacgcggctgcgatgcgccttccgtcatccctgtctggtgctgggtggaccggngacatcgtcggcgagct

SEQ ID NO: 60069 - DNA, 1229 bp, Arabidopsis thaliana landsberg
ccacacacatatatatatatagggcaagagttctcccaattctatcaggatttggaggaggtcaaatagcctaagcttttttcttctgttcctataatctatatgggattagctagagaagcgaatttcgagattatccacttttttttaaaaaagaaaaattgttttccttcgtttttaatgaataaaacaaattctagtgttagcaaaacaaaagattagggtttaaggtttagctataagcctataagggtttttcaattggttaaaagagatattcaaaggtcttgttttgcttacgggataatccatattaaattaaaccactcacctaaaactaaaaccacacactctcttcctcttacatttctgtagcttatttcttacagctcacgtaacaaaaagaaacggtcatgattcgttgcactcacataaggtaaataaggaaaccgagtctgacttatatactgtatgcctctgagagacaaaaacagagccggtattgtgtaagtttttccggtttggtacatttttctctaaaccaaaatgacatggaccaagtggtaaaaaatcacacagaaccggtagaaactttgttgagaaaatctctgttgccaaagcatcatcatctctaatgtagtagatccgtcgagagtaagaactctgactagaaaaatatggaaagagataatggaaaacgtgactgaataaaattcgatttgtttatacaataaagaaacagacaaacagaggataacaaacccacgtttgtagacttggaaaagagacaccttttattttttttatgaactctttggtgctagatcataattgtattccaaaagttttttctgttgtgtgtaaaaagcccggatttagagagagatttagtttttttttttttccggcacttgggtccttcaaagtctccgccttctgccgtgttgaagttcgatggcgataggagaccgcaagaagattatcatcgatactgatcctggaatcggtatatacttatctccttttcattggattcgatttggatctctgtttctctactgtcattgcccaatatctttgaatcttctcggatttagaaaattttgggttttactggattctctccacttagtggaactacttggttttactgaatcttggtttacgaaaactctgggaaattagagatctgagtttttttttaagcgtttgactttacttaagagagc

SEQ ID NO: 60070 - DNA, 127 bp, Arabidopsis thaliana landsberg
  unsure (1)..(127): unsure at all n locations
gctgcctcggaagaaggtgtttctgactcataccaggccngtaattccccagcatccagccagaaagagaggagtgcactgttgatgagagcttcggtgtaagcgcaccaacccgcgacaaagaaca

SEQ ID NO: 60071 - DNA, 1014 bp, Arabidopsis thaliana landsberg
tatgttgaaaaactaatctattgaccaaggacgacgctttcatgcacctaaatgcaatattttttgtagtgggtgaaaaacaaacgtagtgatagagaaggacacgacggtaacaatgaataagaaaaaatcttttatggaataattcaaagtatatttcgttacacaatgtatgtataaaaagaatcaagattcaaaacacgaacaaaaaaatgtgaaaaaggaaatccaagatttaacatttttcgtaagtgaccatgaatcttcactcaaaaaaacttgatcgaactcatggcctcctctctctatctttacccaaaaaaaaaaactttctcaaacctcatctatatgaacactgagctattgaacctttcttctgcaacaactgtggacatgacagaggaaaaacgtcactcgcgtaaccagaaacatccttgcatttccatttctcggtcttcggtaacccaagaagcgtaacattcctcaagcatacgtcttgaaacgatgtgccttcaacaccgagcaacataggggcctttctcgaattcagactcacaacattgctaatgtaaatcccttttactctcggaagagctttcggatcccatttatcgtctgagtgatcatttgagccactgctgaatctaatcggaactttcactttctccaataacacattattaaaggtgatattcgaaatgtacccacctctccctttatctgtttttatgcggagcccagccgcagaatcccagacgtgaatatcttcaacggttatgttgaaaatcccaccagacatctcactgcctatcccaactcctgaacaagtgcgagtagtaccagagattcttcggattacgatgtttgaactcggacgtgccacagccattccatattgatcccacccgctctttacagctacaagatcatcaccactttcgatgtaacaatcctcaatgcagacattggtgcttgagtctgcaaaaagaaaacgcagagattggcatatgatgc

SEQ ID NO: 60072 - DNA, 553 bp, Arabidopsis thaliana landsberg
  unsure (1)..(553): unsure at all n locations
atcttaattactagcaaaaatgttaagtagattatactagctagaaacaaattgatccatcaacccaaacatgattattttcattgacttcagaatgtaataacaattaattgcttccttcaaccccaatatagttagttcaacagtcactacttactatccgaatgcaaattcattttctttccaattaaaaattgactttgactttctatataaattggaattgttttttaaattttaaataactttacgtagtttcgagactatttggaacagaaccgatgaaatacatggctaccttcactgtatagaactattcgttttggatgacgaccatatcaaagataacaagtttggtccaatattttttccttttttcgataagagtttggtccaaataatttggatggaaatttgaaacgaaatggttacaacgtacgtnnnnnnnnnnnnnnnnnacgtttgtaaataccatgaggtccatggcatcatcatcatacattcatctgacaatcccaccgattgtgtccataattctagacatatttacata

SEQ ID NO: 60073 - DNA, 516 bp, Arabidopsis thaliana landsberg
  unsure (1)..(516): unsure at all n locations
cgcaacgcgaggacnnnnnnnnnnnnnnnnnnnnnnnnnnnnngtcccagcttggtgcaagcagatcgagtcttcgccagaggtgagcaatgttattcgctaggaattcacatgtttccgttgcgctgtaatttgcaagtggttgtggttcagtatgcacaagcaaaaccagatagatttttttaaaaaaaaattaatccaaaactgtcgtcagtgaagaatcaaaatgttagattttctgtgtttaaaaatcacatcagtctcctaatcgtcactgttcttggtattccaggtctccgcgttcatgcaatcaagaaatggaactccagccagtctctggtgccgtaaacaatagaaatgaaggtagccgtcctgtttcatacaaggacaaataaggaaggcactttatcgtttaatccgttttccgaatccaaactatcctctgctcatccaaaaacttgtcagatgccaccgaacgagtttccagtgtataatagtgagtgcagcacaacgtga

SEQ ID NO: 60074 - DNA, 439 bp, Arabidopsis thaliana landsberg
aattgctgattctaaagggaatagttcaaactataactcaaggaagacccaccatctgaaacagaactagttgtgtctaactacaaaccctgagagaggtcagatttcatttatgttattatgaagtgtacaagaaatagggctgctaactgtacgtacctgtagctggactgcactaaaatcgccgaaaaggaaggccgatgattttgactcatacaacaccactgtacatacataacaacacatgagagggttacaatgcatgacatggttcaaaaaggacaggtaactactacagaaacccacgacctcgtgaaaagatggattaactgtgcatgaagctcatgatatcttatgacactactctcactcgtttgcataaacataatcatgtctcattagttttgtgcacactaattaagacaaaatggtgatacct

SEQ ID NO: 60075 - DNA, 105 bp, Arabidopsis thaliana landsberg
gtctcggatgaccgtggcagatctggaatgatcccagcaatgttttcctcaccaatgtacatatgccttcttgggcgggctagaacattcagaaaatccctgggc

SEQ ID NO: 60076 - DNA, 1214 bp, Arabidopsis thaliana landsberg
catgcataatcagtcagtctccatttttgcatgaaattataagaatatatatgcacatatttaccttggcatatgcacggactatatggtttctcgagcttttgcagtagatccataagacgagtttaatagcggttgcgcttagcatgattgaatacaaccaaatcaattggacatgattcattttctctgaaggttcatttgaaatcaattgctcagctgccacaagcagcacttggaaccctacgcatttgtgtatgaatggttagtttatagcattacattttcattaaagcaattataatatatagtttagagttatataagaaaatcatgaaaaaggaatatatgtataccaagggtagccataacagcggcgaaaatgatgattccaacaggttgcaccctaagctttcctataggatatttgtagatatttacgttcttcatagacaaatgtgtgaaccaaagtattcctcccgccataaggtcaagcaatgagtcgagtgtagatgctgcaatcgcaatggatccactctttaccgtagcatatatctacacattgtagacatttgatatatagacgacgtcaccaaaacaatgttataaatgtttcaatagatcaagtcacaccttgagagcaagtaaaaagatgttagcccaatttgagatttgcatggcaagctcttgtgcagctctctcagctcgatcttcttcttcttctttttcatcgatggtatactcatctgatcgagctaagaaactttctacttcttcaaaggattttagtgttgccaattgtctttcgtagtactccttttcatcttcaaaaaaagaagaaaaagcatatttggtttagtagttgtgacagttattatctaaattattatgtaaaacatagataccttctttgaggcctgcagctttggagacatcaaggcgcaaagggttctcgggatcgattttagatagaagtttttgaggcaaatccagtgatagaaattcagatcttcatagaagaaaccataccggttaactttggtttgtgatcaatagcctcatgatcgattgacgaaagcaacggtgtttccggacaattattcacttccgtataaggaaaattagtaacgaatcgtcgtacaagaaaggacatgaataaattaactaactagagatttgaagaggtgaaaccacccttagaataattaaacaaa

SEQ ID NO: 60077 - DNA, 375 bp, Arabidopsis thaliana landsberg
catccttaagcggtaacgctaatcaatatgctttacccatttaacttgtttagctaagctcttacatcaagcaacctaacaaagaccaaaatgaagaattcacaagcttcatcaatggattacactgtcgatatggttagccaaacgattaatctgctttatatcatgtatatatgtgagctattttttcctaaataacaaatgttgtttaatttactctatttagctgtgtgatgaaagtgaacagaggttgccagctttttcggcaaatagtgttagaagtcatccattgactatactgaacttgtctgactacgtttgtgtgtgttcgtctctgtgatgattcttgtagttgaaattaatatttataatatt

SEQ ID NO: 60078 - DNA, 562 bp, Arabidopsis thaliana landsberg
taccttttcattcttcttttgggactcactaaaagccttagacaaatcttgcaaacgttggtgatacacttcaaaattttgcggcttagaactacaagatatatctccattaaccaagctattggcagcagatcgagctttggagtaacgacgcaacatgacatcatttatatgtgtttgcaaagcaacacaaatttcttctccctacaaacatacaagttacccaaattgaatatctcataaggaattgcttcataatataatgatccacaaatagcgatgtttaaacctgttttgtctcgaactgaaatatgtgaagaacaccagcgactctcattttgaaaaagacagcagtgttactgctgccaaattgcatgatgtcacgtagctcagcagagtgcagatattctttaggaaccggtcgaaaaaagtgaacctacaagaaagcaaacaacatattcaaatccaacaacttagatttgaattccaacaacaataacagcttttttaaagccataatgtctaacacttatattgagactaccccacgtttgttgttccc

SEQ ID NO: 60079 - DNA, 560 bp, Arabidopsis thaliana landsberg
ttttgttttcttaattcacatcgtgtatatactaagcactcgatatgtattaaataccacgtctacattgttaaaatcacattaccacctatttacaatcgcctaactaacctcataattttaatccgattgagtattcactttactgaccgacaattaaataggaaattaattagcacagggggatagacgaggtagaccggggggtagacgagagtcgtctaggggtagacgaacatcgtcttggaggtagactattatcgtctggaccctgacagcacgctgcacgtacgcgaaacaatgtgcacaacatcaagcgacacacgcgagttaatacgactatgcgcgcgaaaagcacgctgacgctcaaacgataactacatagatgtcgcctctatactaaacacgtattaaccttaaaacatttgtgtagtcattaatcacactaaaatatttttataaatcgtaaattaaaaactataaattacttattttaatgacccaaagataaaccattgctctattaactaaataaaacatgagttcgcaccaaacaatgt

SEQ ID NO: 60080 - DNA, 205 bp, Arabidopsis thaliana landsberg
ggtatcactaaatgctgttaagtgggaggaatggtctgtttaacaagagagacacgcaggcaccggggggacatttatctaacctatcgagacaactattgttcacccaccttttttttgagtcccagggccctaaaatatccataaagatatatagaatatcgaaattagagcccctctttcactttagaaggacggagggggc

SEQ ID NO: 60081 - DNA, 561 bp, Arabidopsis thaliana landsberg
  unsure (1)..(561): unsure at all n locations
ggaggacgatgaccttttaatatatttgatctacttcaatattgctctagtgaaaagagtgttgtgtgtttgatagtaagaattcgtaaatcggattgccaaatgatggagctaatcctagataagccaaggaagtggcaaaagtatgaaatcatcatagagatggctatttcctatagagaatgttagatgcgtaacaaccaattttcttttacttttagaattttctttatttactaatatttcagttagaggatagcacacttcttggtccatcccataactgttcgggtgtttccaaattcctatcttatgtaggaatgtattctcaatatgggacaagttggtatttccaaatagaaactggaggggttccctaagtcctgattgtgacaaatacaactagnatatatatatatatatatatatatataatattctaaaaacttaattgatttaatttatgtttaggtgatctaaaatggattatggttctttgttttttcaagttttaacttttcactatataacacactgtatcattttttcttggttggaaaa

SEQ ID NO: 60082 - DNA, 1120 bp, Arabidopsis thaliana landsberg
  unsure (1)..(1120): unsure at all n locations
tggttgatttttaactccaatattagcttcttcttcttgaaataaaccaacaaaagaaaagatgtactttatactatttcaacttgtatagattaacacatatcgggtgtaatatgaatacacattcaataaaaaaaaaaggaagatatgtatacacataccttgtgttattctatccggagattcggtgtataaacccatgaaagttccttgtggagaatggactacaaatatttgaagaaagtttcactctaaatggattttgctcataccatgatcacatatatgaatttgctcataccaacatatagatcacatacagttattagttatgaatatatgatatgcattattatatacggtcaaataagcaagattaaaagatatataatcaaacatgccagattgccagctagtacccaactgggagaaaaattcaacgcggcgcaaatgatctattatgtcgaaccaaagcaaaaagataacttcgtaatgcttcaaaccaaagcaaaactgaattatttgccacatgaaattgaatatatcgtgggtagacaaagcgcaaataatgcattcaaatataataaactagttgctcaattttgtggagtctttctaccttcataattaagtcattgctaatacaattttgactatgcgtaagtttccatgaccaggtagtttattttattttaaaacttctaataaatatgttctagttcaaatgaatatataacgatacgaaaatatatgactttctgattttgattatacaagctattttatcatcaagattttttagtttgttgaaatgttaaatatattgatcaaccaaaaagaattgtacacaaactcggaatgaaaaaaataaaagaaacaaagaataagccaacttggctattccaaatggaatgtacgaaaacttaatttggttagcagcatatttctaacgacaccttgcgcctaaaaccattnttggagaagaagttgtatggcgagggtgggaaacgcatgnaagtgagatntttagacagatttttcgatggttccgataagatgtgctagcgggtaacgattgttcatgtgtcgntgttcatatatctcactccatatattatat

SEQ ID NO: 60083 - DNA, 1345 bp, Arabidopsis thaliana landsberg
caaacaatactgtgtgtacaattatgatagaaaacatttatatatggagaataatatagtcatgtgatacaattatgtaccacatctatacatatagaagaaacaaaaaccaccaatttgtcactcccaacttcattcacaactcacaagttaagaaaatacacatagtttctcttacacgcattactatggaaccttctgaattcgtttccagcaaaagttattttcttatttcaaaaataagttccatttttgtatgtataaaaaataaagttaattgcaataaattcgccatcttcctatcaacatatatagatttttcgacaaattcatataaggagagtctaaaattaactcacagccacatgttatttagccaatgtttttaataccagaccggtcaaaccggtggatccgtgaccttatatagtaattctagagtctttaacaaaatctcaacttatgacatcatattatatattaatcacgtatcatctatagactatatacattcatacgactctctgattcttcgtttctctccataatatctcctagtctcaactctcaaatagagagagaaaaacagaaagacagagagaggttctatatattatagataaagtacattacacaattgtacaagtggaaaaatcatcacggatctctcttcaaatatataaagaagatttgtatatcaaactctctaagcttttgttgagccatggctgtgatgaagataaaaggagcagcgaccgtagcaggaacatggctgaacgaagccgttagcttcgtcgtgttctgtatcttagacatcgttgattcatttctttgtctcctctacaaagcagctgattatctcttcgaagccgagtggaagccttgctattgcttgtcggacaaggaacccatcaccacaactcgagggaagatccttttgtctcacaataatggcgagtccaagatcctcactctttctccgcttcaagaactcgggtatatatattcattattgtttatgttttattaattaatgcaaaatgtactcatatcactatatcagaattgttcaaagatgtgtttattaaaaagagcctctaaacaggttttattaaccgtaatatttcaagagacaataatgaatcttttcgtctaatatataatagatatctataataaataaataaaactcatataatctatagctatttattttacatcattacatgtgattgttctgtttttttttacctcaacgaattatcttactatcatttaacatatttactataacatttgacatgcatttttttagaactactggccaatatttccctaggagtag

SEQ ID NO: 60084 - DNA, 570 bp, Arabidopsis thaliana landsberg
ggatgtacttattatatgtgtagaacaagtcatatatttacttttgtttggctattacatggattctagattttgttataataaataatcggaaaacgtttttatcgtcgtcaaattagtgagctcagaatacgactcattaagtcatgacaatctgataaagacacaaaaagattccaccaaccggttgatttctggttaaataagaaaaaaaaatgtttttctttttactgttgaaaatattgagacacaagagaaatacacacaaaaattgagagctgctaccatgagtccatgaaggccaaaaaagcccgaagacaggggaaggtgctggtcaccgtcagttatattatctaaccatttctaaagattattaaaaatattttatccaccacaatgtgtgatccgatttacatcgactcacttaatgccttcatttaccgcacttgttaatagacgtcttgttcttcaaatttgtccattttgtaaaattgtagggtcaaaagttgtgatgatgaagttatgaatgtgttgaagaggaggggggttctctatcatcaaagagtcatg

SEQ ID NO: 60085 - DNA, 593 bp, Arabidopsis thaliana landsberg
  unsure (1)..(593): unsure at all n locations
aaatactctaagaaataacttacaaaggaacctcgtgatcactatcatgtagtactataaaccaatcaattgacgtctacaccagttctagtttgggccttctggccgaaggaagagcaattgtagtcactgactccatgaaccaacatgcgcaccataaaaccagaacttggtggtaacattttagatgtgtaactaagtggtacgttttcataaaaagaggagtcatcttgtaagtctaggttagatattgattcttctctagtgcaaaatttactaaatcacgccatttggctagtcgaaatagttctatgttttatgttcattaaaaaaaatcgttgagtgggcaactcgccggttacactcattgttaagagatttgtcaaatggtaaaagtacggaactatagatcatctttggtaatttataaaaaggaaaaaaaaaacatgtataagagtttgagttttttcttacccattatctttaaatttttgttgttttctcaaatntgtagaacctattatttctgtagattntttttttctttttaaatcaaactcggctcaagcagtcgtatggattttgggctttaa

SEQ ID NO: 60086 - DNA, 282 bp, Arabidopsis thaliana landsberg
  unsure (1)..(282): unsure at all n locations
tgatcttttaggtttgggaaagaaaaaaatgactgtagactttaataaatttacaattacaaaagattgtttatcagtgccatgcatctatactaatatacctcggaacaaatgaaatagttatgatgtacctttaaaaccttcaatttcactcaacgtgtagccctttacagatatgctcacaaattgtnctcaagattataatcacaagtaccattttcttctattttttgattttggaagaaaccattttcttatactctgagataggaaaaaacatat

SEQ ID NO: 60087 - DNA, 1518 bp, Arabidopsis thaliana landsberg
gtttaggatgtgaatagattccaattggtatggtataagtctctctgtataaaattggtatcaagctgaaaggtttgagattagaaagggcctatatcctaatgatgcacacccgtgatgcatttctctcatacaaccccttttttagaatgaaacgaaagtactgaaccatttcttgtaataataaagccgactgttttgtaacacaaatgtaagtcttgctcgtagcttacagaagaaatctcgagtcaaaaggtaagtcagtttacaaaaacgaaaagttttctattcagaagattattccaagcatcttagaagttccaagagaagatcgtaactctctcacacatcagccaagtctttgattaatttgcgctggtaccacttgcaggagtcttcaactctcaacctacaagaagaagcaatggtgagcaagaagttgacctagtaagaaaaaggatacatagtgtgagagtatgaaactattgtgagatgctttcttttatgaaatcctttcatcctacaacagagtggaattaatatatgattgaacaagttgatcaaaatgtgaatgaatcgtttctaggtacacaacactatgagctaccactagtaatgtaacttaagaaggtgtgaaactgcttttgttattgaaattcaccaaactagagagactctaaagtctcaagcaatttgtccaaccaaactctagaaaactcaagattaatgggcaacattttgtggcttatataggcagtggtgaaatctcaatgtctgaaactaattgttctttcatgagaagcagtaccagcaaactataacacctctagaaattcttgaattctccgtagactaaacaattgtgaagaaatcaatgaacaatgagaagtaacccaccaaacataagagcttgctatgacattcagatcacgtggatagcttgattgatcaaccagagttatgagatcatctcactaacaaacaatcgtttcaagatgcataacactatgagctactactaccaatgtaacttcatgtaagcagaaggtgtgaaactgcttttgttattgaaattctcaagcaatttgtccaaccaaactttagaaaacttgttaagtaaattggcaacattctgtggcttatacaggcagtggtgaaattactacgcttgcttgacctctctagaaattcttgaattctaagttgattaaatatcaatgaacaatatcaatgtaaccaaccaaacaaaaaagctttctgtaaaacttagatcatatgaatagcttaatttatctaaaagagtaacgagattatctcactagcaatcaaatcatagttacgaatggagggagagaggtagagaaagagctgacctgagctggattcgggttctcataaccaccagactccaaacctgatactctaccttccagagcactgaatttctccttcatctgcagcattgaaattttgttaacgatttgcaggatattcaaatgaaaactttcccaaaagatg

SEQ ID NO: 60088 - DNA, 330 bp, Arabidopsis thaliana landsberg
ggacagaactaaaaaggtttttggcccacccacggcatgccacccattaaccctggccctggactccaattttattaaaactttaacacgctgactttggaaaaggagcccctgcttttaccaacagagggttttataatggggagttgaccatgccttggcgaagcttgcgctcttcaaaaggttggttggacaacacatgttgcaacttgccattttttccctaaccaaagctacactagtacaagcctgattcaatttttaatctccccaatgggttattcagcagcttgcgtccgattgaacatacacagtccatttttctgttgg

SEQ ID NO: 60089 - DNA, 378 bp, Arabidopsis thaliana landsberg
cgttgccagccttgcgcatcttgaaaacggtcaaagcggttaatcagatatacaggggatggcacatagcgacggttcacctcaagcacatctaagccaagccggctggccagtcgcatgacaaaccattcattgatcacggaatgactgtaatcctcatccgggtgatcaggtttcatgatgtgggtagaggggcgtctcgcctgctggttcaaacagcgcatcctgctggagaacaacagccagcttgtgctgggcacccgccagcgacatgcgcttgcttgctgaatgcgtctacggtgcttttggcagctgccgtatgcgcgcctgtaatgcatcgtcgggcataggacgcacaggttcgatcatatgcaatgc

SEQ ID NO: 60090 - DNA, 436 bp, Arabidopsis thaliana landsberg
taaacaatggagagggagaatgaaaattttgttaggcgcttttttttttcggtaagtatttcgggagcaaaaaaatttattttattcgtcgcaacaatacacaacgttttaaaacgaacgagtgctatgtattctacattcctaagaagagttccaaaaatttagatcttaccaaccagacatagcgtttgtaaagtgcaaacactatccaaaattgaaggatatgccaactatagcaaaaaggtataaaacgttatacgttactttcttgtagtgggaccactttacttcttggcgatcgggtagaatattttccgacgacttaattccgtactgaaaaatactcatgtcttctacttaatttaaacccttcctattgcctcattagccttattggaatgcctataattaatttcatgtttgatgttagcacaaa

SEQ ID NO: 60091 - DNA, 1407 bp, Arabidopsis thaliana landsberg
aaaaaaggggtctttggggttttaaaaggaatgggccaggtcgttttttgtcatttcttttcaagaccggttcaaaaggtaggaacctcttcattacctttggattttcattacatgttggtaagtatgaaagttctcattttgtttttttttttaaaaattgtttaacagggtcttctaagtgctgttaagcatgaattgccaaatgctaaacatagaatgtgtgtgaagcatattgtagagaatctcaagaaaactcatgccaagaaggatatgctcaagatgttagtgtggaaattggctggagtctccaataaaaaggaatccaagaagaatctctataacttgagatgctatgatgatgcattgtacaatgatgtattgaaagaggaaccgcatacttggtcaaggtgtttctacaggcttggtagttgttgtgaggatgttgacaacaatgctaccgagtcattcaactcaaccatcaccaaagcaagggcaaagtcattgattccaatgctagaaacaataaggaggcaaggaatgactcggattgtcaagaggaaccagaaatccttgcgccatcaaggtagattttctaaatatgctttgaagattcttgcattagagaagcaagatgcggatagaagtacagtatatcgttgcacacatggtgtttctgaggtgtatatagatggaaatagtcatagagtggaactgcaaaaatctcagtgttcatgtgggaagtggcaaataagtgggataccttgtgagcatgcttatgctgctatgataaatgctggtttggatgctgagaactacatatccgggttcttctcgacagatatgtggagacacaactatgagacagccaccatgccattaaggggacctaagtattggatgaatgtaggttacaacttggtaaccgcaccaccagaacctgttttgcctggacgaaagaaagaaaaacctaaaaaagggaagtttgcaaggatcaaagggaagaatgagtcgccaaaaaagaaaaaaaagaagaaaaatgaagttgaaaagcttagcagaaaaggtaagatcatacattgcaagagttgtggtgaacctgggcataacgcattaggatgtaaaagattccctaaggagaaggtcccgagaaagagaaagagtgatggcaatgatgaggtttgtttctgttttaaagtttctttcttcatatactatgtctctttagtagcttactacttacttactcagtttgaaaagaaagctaagaaggctaagaaagaaagcaaggacaagaagtctaagaagaagactcaagggccggatacgatcagcatcacccaacccttctaaagcaacacaagagtagtctctatgttatgcttcttcggcaaatggttattgaat

SEQ ID NO: 60092 - DNA, 1327 bp, Arabidopsis thaliana landsberg
  unsure (1)..(1327): unsure at all n locations
attttcatagatgttatgtatcgttgaagaagatagagaacaaaccaagtcttatagagaaaacggtgggagcaacccggtgaatgaaggaaagaagaagctatgtataagtagaatcggttggttttcttattttacaattaatgaagaaatttttttcaacttttaatttctaaaaaaccatataatgataagttttatttgatgggcctcacactgagtcattgcatgtaccgatgtcactgaaacacgacgtgtttcgttttggagtgccacatatagtacgaacttgatcgactagagagcagagcatggccatgtcggaataacaaataatatactattgtaatagcaaatggtgaaaatttatcaaaaaatccttcaaaatgtttaacaagtggaaattttatatgttaaatcgactggaaagctaatataacacttgattttgtggtgttttctaatgatttttttttgtttattttgtaacaaattgacaacaaaaattaaagattgtttgcggactgtttctttattttttaagttccggggctatttacaaagtatttcggaactttctctatttaccgaaaacatccgatacctttactatttactaaataaccccgaactctgttgttatttatagaaaagcgcagcagcgattttttctatttacataagaaatcctgaaactcttactatttttgaaatgttctgcaacttttatatactaaaatcttcagtaatatgtaaaaacgtgtcaaccctcagttgcacctctaatactgaataacaaagcagtgggggaaaaaatcaaaattactacgtagtacaaaaaatacagatccactattcggtggcttccaccaacaattttttttttgataaaaagaatatatggcttgtccgttttgtcttttaatcaaatgatatggacagtacatgtatatgcaaaacatggttacactttaattaagatgaaaaagcctaaggagaagattctagaagagcatggaacgttctagaagaagaaatggacataccttgtttgaccggaaaagagacatagtcgatcagagggagagaacatgaggagggcaagatcgatgtcacaaagtgttgacaattcataagccttttttattaaaccttttttacgttttgagaacgtaatttgtcggttcgtgctcttctctatacgctntaactccaatttaacccgacccatatccgatggtcacttgcaaataatcaaaacacaatctattattagttggcacgagagaaatngatcgaatgcaaattgtatatttagtaaatgagt

SEQ ID NO: 60093 - DNA, 475 bp, Arabidopsis thaliana landsberg
ttatcttcttttgaatttctaggatttcgcattttgagatttttactctttatacttttttttcataggcaaggctttttgtatttattaggagaatatttaccagcttatagatcattcctaagggtgattggttaacaagaaaaaagaaaaaaaagaaagaattaagaaccccttattaattaaaaagaaaagggagagatggaatttttaataagtaagaaaaataaaaagggtaaaaggccaaaagataaagagaatgaaatattttaaatagttcttttttgtttgtcaacaatttattatttgttagtttgctttcagtctcagtttttttataaaaagaatcgatattaattctactaaactcataataatacaacatattacaagagaacaaaaagaaagaaaatatctaagaatacattaatttgaaaaagtttcaggattttaaaattgaatgattattaaaatc

SEQ ID NO: 60094 - DNA, 1190 bp, Arabidopsis thaliana landsberg
agtgaatcttgttacaagtctgctgcaggtctatataatccattaagctactttgattgactttagaatctatttgatgataagtaattaaacatgttttagtgattgttaagtaagtcatttagtcatgtttttggagcatcgagtgaagatctaatatagctttaagcttgcatcttctcattacgctccatacactaattttcacatcatatttgctattggaaacagataagtttttggttcttgtttccattgctacttgtgatgcacatcctcacaattttctctcagttttggttcttatttctctggaacagtttgatttgttagattgtatcactatgaagaaaccctgaagctaaacttgtttataaacgcaggtgataaacaagaatggcgactgtacgaatctcctccactagcatgaccaaggccgttcttagaagccagacaaccaacaagctcattactaacaagagctacaacttatctgttggatcaacgaaaagggtttcgagatcttttggtttgaaatgctcagcgaattctggtggtgctacgatgtcggcggtatacaaggtcaagctcttaggacctgatggtcaagaagatgagtttgaggttcaagatgatcagtacatcttggatgcagctgaagaggcaggagttgacttgccttactcttgcagagccggtgcgtgttctacttgcgcgggtcagattgtgtccggcaacgttgaccagtcggatggttcgtttctcgaggatagccacttgcagaagggttatgttttgacttgtgtggcttacccacagtctgactgtgtgatccatacccacaaggaaactgaactcttctaagtcaaagtctctctatttggtaatgatgaaaaaattgttatttgagtgatctttttagatattatggttatcagtttcgttctacggatttgtgtggttttaaaggtatgcatttgtatgaaaatgactcaagatatgccttttagtgttcatggatcgtcaccgggtcgcaattggttaatagaatggttaagtttcaaccaatcattcatgttatataattggttaatgtgttcataactggatcatcttaaactaaatttcttttcctcacttgatagatatgaagtagcatcattatcattcagtaacatgttaaaataggc

SEQ ID NO: 60095 - DNA, 396 bp, Arabidopsis thaliana landsberg
gtttcaaactacaagattttgttttgatatggctctttattttcaattttttttgtgattgctggtttgtttgaattgtttgaaacaattgacactgaaagctctttgcattctgaacaggctataagtgtagttagcacttcttctataaaaagcagtgtctcacatttggatatgaagaaagcatttggtcaaactgtcagagacctgtaaggattggactacatataattaaatgaattatctttccaatccatgtgtggattatctattattattgacgaatccgaacattatcttttcatccatttgttgcagcaagagaggggtcaacagaaagtgcttaaagtacctcgaatagaacagaaagtaaagaatgctcgttgcttctctcta

SEQ ID NO: 60096 - DNA, 1483 bp, Arabidopsis thaliana landsberg
gagtcaagatcggaccctaaccattgaagaaccaggacagaagagtgaaactctacaggtctcaaaagtgaggattgaccgatggagcaacctcaaaagagcgattttgcttaggagattcgtcaaagccttagagaatgtaaggaaattcaacccaagagagcctcggttcttgcctccgaacccagaagttgaaacggacaaggtgaatcttaggcatcaagaaacccaaaacaagaaaaatggcgatgaatggatggtcgataacgcacttcaaggagtggtttcgaagctaacaccagctcgcaaacttaaagttcagttattggtgcaagcgtttgagtcactttcggctacagggaactgagaccaagcaatatttcttattacaaagtttccagttcataaggtaaacaaagcatcagaatactttactctttacttagtttctccattgtttgatgataacttgatacagctttgcagcttcagaaaacaaagaaccatgaagaacaatatctaaaagactaatcaaggaaccggaagataactaaagacattttatttgctcttgcaaattatctcatgtgtttctttgtcttttgttcttgcattgattcattattttgattaaaatggattcaattacagagttgtcaaacctctttgagtttcgtctatatacacattctcttgattttgatgatataaaagaaataaaacaacagtgtatactcagtgtgatattagagctgagatagttgtcatttgtgttgctgtgtgatcaatgaattcaaaaataaaatatttaaaataataatacgaaaaatttattttaaaaattaaaaaaatatattcaatacgaaaatctcaaatataagagttttcaaattgagttttaaagaattttagaatatataattcttataaccattctaaaatacatcaatgtttcaacatatagtttattttgctaatagttttaacaattattttatttattgtaaaaataaaaaaccttaaacatgtattttgattacaaagatagatttggatcgaatccggatatactcactcctaaatcaatccaaatatttcctattttttgaattatagattaagtctcactttattgttttaacttttaacgcgtttcctaataggattcgacattggtcatcaacatcttcataccgctataaatacacatgttcagttccaagctttagaagaagaaaaataaaacaagtactgaagtaaacaattagacaacttccacatgtccacatacgtgtcctctgtcttctctctcgccaccatgaaacaaaaccctctgaagcgcaaacgcaacgatgagatcactgaagagaaagtcgtactactcatggctatgcacaaagaagacgacgagcaccaacataccaaaccgtctccaccgatcttgggagattctctgccttgttggtcgttacatggaccctga

SEQ ID NO: 60097 - DNA, 1077 bp, Arabidopsis thaliana landsberg
aaaaacctccgaatgcttaacttaaatagtacactaacacttaaataagatcatgttattaacaaaagtcaaaaaccaaacacatgtttaatgttgagtgttgttggtcgtagaagctaccacatcgatacgaggcaactctcgaaaccgaaaaacaaaaccaaacatatttcatctatgttggtgtattttccaaaactctaagcagtaaactaactttagaaaaaaaacgaatgtttaagcttaaatcatacacttacaccaaaataaaatcatgttattaagagaaacatacacataacacttgtgagtgtgtgtggtctaagtctcttagaagactctacaacgattcataggtaagtctctaagcgcacatggaatctataaacacaaggaaacacaatttcataattcgctaaaagacttcattggtcatcatcactgatcatgcttattcacaaggatagatatttgtgaattttccacccagaaagttacatcagaatacagtaaataaaacatgagattgcaagcctgcttctctagcatatgaaagaatttcgagtcaaattcccaaattctccaatggtgatagcagaaaggccaaaagcctttttttgttttgttttaaacttgtcgaaactacatttgtacctaaccataccataaagcttacctgaaacccaaaatcagacagagttttcttttgaattcgtgtgattctctctcatctaggaggaggacctgtgttctggttagcttctctatctctacgtctcctacctgaacgtcccagcagaacgcgtccttgtcgcctcattcgacttgccaaagagttactgttactatgcctctcctcctcctcctcttcctcttcttcttcagagaaattcagctcacttgttcctcggttgattgttgtcgagtcattcgaatctgaatcagagcgtctgatctgattacctgatgccccaaaagcatgtaacagaaggaaaacattcacaagattcctaccaaatgcagcatcgatcccatcatcatcaccacccgtcgtctgaatctgaacagttggcattg

SEQ ID NO: 60098 - DNA, 477 bp, Arabidopsis thaliana landsberg
cctgcacgggacgctggggagttctaccacatgcgctaacggtggcaagtacagtactcccatgtccaccatagatgtgattctgattgggatggggatgccaggagtacggttctgtgattttgtctcgtcgaggggtcgtggccggcagcctgcccgctgtaacagcgtctccttgccaagagagtagagagtagtgatgaattcggataggaggcgtatggaatccaagtccatcgaacacggacggcatttttttacaccattttcatagtattggacagaaatgtaaattgaataactggaatttagatctatattcgaatatatgctaggttttaaataataacataaacgcacattgttgttggaggctctctctggcccaaggtccttaaaatattgatttcaattattcttatatttgtttcagttaagacagagtaaagtgtcgaaggacaccttcgttaaaatgat

SEQ ID NO: 60099 - DNA, 806 bp, Arabidopsis thaliana landsberg
agcgtcactcatgtaataggggaatttcattttcattagcctgtttaccaaaaaattgattaaaagtgggttaatgacttttttattcattgattctataaaaaaagtatttcatatcttgcttggtccataactgccaataactcggcaaagaaatccagagaagatgatatgtaccttgactatgaaaactatgtcccattccaaacctttcgactgcgtaaagacatacaagagatattagccaatatttccattactacctaaagaagctaattctaacaccaattgataacaaactgtgaactgctcgagtggatgaaaaacacctgatgaatggtggtcaatgtgacagaattttcattgtcacgtcttcttgaacgaaaattttcagtttcccgctcagagatatagttgataaatgaatgaagttgattgcagccttttttttctttgattgcatcctcttcttctgttgtagtgcaatgagtggaaataaactcagctacatcatccattaagtactggagtacctgcaaaacaggaaattattccccaaaatagttttaatacatacataagtactggaaaaaaaacgattccccacttacagatctaagatcgttgtcttcattaagcagttttcctccatcattatccacaactgctcgttgctcaagaaggtatttctaaaagttgtaaggaaagacacagtaaatcttcaaagcaaagtcacgtgttcaaaaactattttcagtgaaagttataacttaagcctataatcacgatttctgcaaactttcaaa

SEQ ID NO: 60100 - DNA, 1649 bp, Arabidopsis thaliana landsberg
  unsure (1)..(1649): unsure at all n locations
atataattagtgtcgtatctatggtgttagtaaaaaggcaattgcctaagccaccaattttttttaatttttaggcctcaaattttattttttaatgactattaggccacattattttgttaagaaaatcattccgccccaatgtatttgagagcttcaagaaaatcattgcatcccaaattatttcgtatttatattttttttgaagactctaagaattatttgctgtgggtcaaactcttatttagttttaacgagttttgatacataaaaactaatgaatgtatttaatattttttaatattaaatttaaatatatattttttattagttgaattagttataattaataatattttataatataaaaaagatacattaaatgagataagaacgagttttcacaataaaatgcattacttaattagcatcatcgccatacattcacgtgatctactaaatatcatagaaattaaactagcataaaactgagaaattatctagaggataaaaataactttgaacggtagtatattctaatgatttgtacatttttgtgcttcaaagtttctccttaataataataaaataaaagcataccaacgtatatagaaagatatgaagaaattgtcttggatttttaatacagtaaaaatcatttcagtcaaatccttgttttaaatttatttacaaaggggcattatcaaggctctctgaccctttcgccttattgacttggtaaaacagttgataataataatacaattacttacaagtcgtgtcttcgttggtaaaaaatatctcgcaagtgttattaatcgtccataaaataactccaacctaaactctatataaatcctcgtttctaagttctaaccaataacacacaacatagaataaaagagcttatagacaactaagaaaaaaaaataaaaatgaagatgtttatctctcctcaaaccctagtactattggcattagctcttgtcctagcttttgcagttccactgaaagcccaagaccggcgacaagactaccttgatgtacacaaccatgctcgagacgacgttagtgtgcctcatataaaatggcatgcgggagcagcccgatacgcctggaactatgctcaaagaagaaagcgggactgtcgtctcattcactcaaactcacgcggacgttacggtgaaaacttggcatggagcagtggtgatatgtccggagctgccgcagtgagattgtgggtcagggagaagtctgactacttccacaaatcgaacacatgccgtgctggaaaacaatgtggtcattatactcaagttgtgtggaaaaactcagagtgggttggatgtgccaaagtcaagtgtgacaatggtggaacctttgtgacttgcaactattctcatcctggtaatgttaggggacgtaggccttactaactatatgtgtacgcagacgaaagaaacttgtccatagaggacgtgtgtgttttctataatttggaataaatgatcacnnnnnnnnnnnnnnnnnnnnttcctttgtacgtttatagcttgtataatattttgtcatggaataatacttttttcttgtgtgtgcttaaaactgtaattatcattagatgatgcataatgggagttattaatatt

SEQ ID NO: 60101 - DNA, 116 bp, Arabidopsis thaliana landsberg
aaaaaaaaaaaaaaaaaaaaaaaaaaaaaaaaaaaaaaaaaaaaaaaaaaaaaaatagaaaaaaaaaaatgaaaaaagaaggacaagcattacctgcggtcacttcctcaagtggg

SEQ ID NO: 60102 - DNA, 1109 bp, Arabidopsis thaliana landsberg
tcagcaacaaattacgaatctctgtaactaactaattattttttagacttttaagatgaagaccaactaggccaagtttgtggttttaacctaatgatggcttgggttaacataattaaaattcagtaattaaaagcccaatatcgttgttgggcctaacttcaggcccatttgtcttatattcaggcacgacgggacaatgatcgccgtttcttacaaccactctccgattataaaccctagccgcgtcttcttgcaaatttcaatttcaatttcactgagaagttacaatccagaggaaaagattatctttttccttctgggttgagggaaaagatgaagaattctgagaagagaggacgtaaacacaaaagacaagatgcttcatcggcggaaaacgccggcggcgaagttaaagaagcttcggcaaacgaacctcaatcccctgagcctgtttcagcttctgaagccaacccatctccgtcgcgacgcagtcgtgggagaggtaaaaagcgtagattgaacaatgaatcagaagctggtaaccagaggacgtcgtcaccagagcgtagtagatctcgtcttcatcactctgatacgaagaatggtgattgtagcaatgggatgattgtttcaacaactactgaatcgattcctgctgctccgagttgggaaactgttgttaaagttgtaccttcaatggatgctgtggttaaagtcttttgtgttcatactgagcctaatttctcgttgccatggcaaaggaaacgacagtatagttctggtagtagtggttttattattggaggaagaagagttttgactaatgcacattctgttgagcatcatactcaagttaaactcaagaagcgtggctctgatactaagtatttggctacagtcttggccattggaactgaatgtgacattggtatggatcttgtatctaatttctgcatctgttttttgttgttttgagttgcaatagaatttttaagtagtcagaattgattttagtatgtaattacagctttgttgacagaaactgatgatttactccttttagttgtacttgagttgcattaaaatgtaactagtcaaaattattg

SEQ ID NO: 60103 - DNA, 501 bp, Arabidopsis thaliana landsberg
  unsure (1)..(501): unsure at all n locations
agaatggaaaagatttcgaatcaatatatatcttagattttcccctctaaagagacattagttatacacactttacacacacaaatcattctaaaatcacataagtcaaagtttagaaaggtatatcataaaaaaaactttagagctctgcaacttgtttgatttcatatacagtttaagtttgttgaaggtcgaactctcgaagggcgggatatacgatttaaacantgtggttgttgtatactggaaagcgtttttttaacggatcatacagttaattgtttagcataatgttttagatacatgctttaacaatttattgttcttatagacagtccaaggcaaacctttgttatgaaaaaaattaacattacaaaagaaatgttaaagttagaaacgagagcagtttaaatttaagctaatctttattttaccgtggattcaaacttaaaacctaataagcggaaaaattattgatttgatcatatagtaattatactt

SEQ ID NO: 60104 - DNA, 961 bp, Arabidopsis thaliana landsberg
tctcattctttgttggattgttaaaaacagtttaccttgaatatccatcatctgaacctcgaggtttagcccatgttggtgtgcgtcttgatctcatggactgagcagcttgaccttgactactacttgctgctgatgaaagtgaggttgatccgtggaaacttgggcttgggtcgttcatacatgggaaatcctcttttggcaattctcctttgctaagtttttcgatgagttcctggcaaataccagaaatgaaaaaaagtcatcaaagtcaaaagtagtgtcctgtgcaaataggaaaatcaacaaggccaattgcgactggtacctcaatcatggggtaaaaacgagataactgccatgctgcttcctcttggcgctctttcctgacagctcgttttttctgcagccgttaacagacaatgttaagaaaatgtacatttttaacattataaaggaagattgagagagaagatattaccttgtgaaggtcaaatttcaaagtgaaacctcccggggtattctttttagcatcgacggctgaaccaagtaagctcatattatttacagcggtcatgtcatcagatgagagtttggccaactagaaacacaagcaatactaaacccttagatggggtggatgagaaccaaactaagatccacaagcgctaaaaccccaagtaccttcattagattttcacctttttcaccttcaaacttttcagggtaaattgttgcgaggatcatcaacaggcgtaacttaccttcacggcttgcctcctgtacagtagttcaaaaaattataaagctcatcagctcaatatctcatgaagtattacagtaaatcaacaactgttaactagatgcaaacctcttgagtactcaaatatttaatcacatccttcattccagcatcaccaaaaacaaggtcttgttcaagttgtccaagctcccgaagtcc

SEQ ID NO: 60105 - DNA, 1014 bp, Arabidopsis thaliana landsberg
  unsure (1)..(1014): unsure at all n locations
atgtcggaaactcggaattgaagacctttctttcttttactaactaaatattttatcctcaccactgacaacatacaacattttttttggaaaacttcttctttttttaactaactacaaagatgtactctaacaaagaaaaagtaaaaaacctattcgaattttagtcaacaaattctttaattctaactaaacttaccaaaattatgcttactattattgtctaatggggttgtattagctaaattagttcattagacattagctagtttagttaatcggttaggcgctcagtctcacgttatgagctagtatatgtcaagatccaattaatcatctagacgtttgactaaattggttaaactcgtataatcgattaacctaacatcttcttatctataagattaatttctttgtttttcctgttttcatatttggaaatggattctttttaaatttcttcaaagtgaatttattgtatcttatcaatgtgtgactatccacaataaatttgtaacaacttctatatggtaaacgtggaagtcgaatttatttagtatttatggttttttcttcagattttttttagctttacaaattaccgatttttttttgataaattctatcggttaaaccggtaattctcggtgaaaacacaccaaaatacttagaaattaccgagtttttactactttacaatatttaaaaaatctaaatttttggtttgtattcgtgatggattcatagatcgtaaatgattcatactggatttgaatattactaacttttttgccattttcataactggaaattccaaattttttctttttgtaatcctttttagttgaataccaacttttgacaaaacaaattgtgataaattcatagattttaaatcatttatcttagatttgaactcagatccgataatactaaaagcaacatctaactggttcaattggccgcactngcactgccaactttcacctttaactgaatnttaattatagagta

SEQ ID NO: 60106 - DNA, 1121 bp, Arabidopsis thaliana landsberg
aggcattgcgatcataaaacaggtttatttaaatcctcacacttaaagaggatgaagaaacctcctcttcctctttaatcatttatctaatctttggattaattcttcaagaagagatacttacttatataaatctcctcgaaatctgcaaacccccaaaacacagcttgtctttgttttaattaaaagaagcttttgtctcattttcccttccccaccaaacacacttttgtcttctctttaataaacctcattcacttcatcttcttcactgttaacggtcggaatctaaaaaatgtctcctaactactccttcttcttcttcatcttcttcctcacttcacactcttctgttttctccagaatcttaccagagacctccacaaccactacctcaattctcaatgtcgctgactccatccacagaaccaagtatacgtcgtcgtttcggttaaaccagcaagaagaacagactcactctgcttcttcttctttcagcttgcagcttcattcacgagtttccgtccgaggaactgaacactcagactataagtcactcacactagccagactcaaccgtgacacagcccgagtcaaatctctcataacccgtttagatctagccatcaacaacatatccaaagcagatctcaaacccatcagcacaatgtacaccactgaggaacaagatatcgaagctcctttaatctccggcacgactcaaggaagtggcgagtacttcacacgcgtcggtatcggaaaaccggcgcgtgaagtttatatggttctagatactggaagtgacgtgaactggctacaatgtactccttgcgctgactgttaccaccaaaccgaaccaatcttcgagccatcgtcgtcttcttcttacgagcctctctcttgtgacactccacagtgcaatgcccttgaagtctcagaatgtagaaacgccacgtgtctttacgaggtttcttacggtgatggttcttacaccgttggagatttcgccaccgagactctcacaatcggctcaactctagttcaaaacgtcgccgttggttgtggacacagcaacgaatggttgttcgtcggcgccgcccgggttactttggaactcggcg

SEQ ID NO: 60107 - DNA, 486 bp, Arabidopsis thaliana landsberg
  unsure (1)..(486): unsure at all n locations
tttttacaaaaatatcaccggaatagaaattaaaaacaaagattctttaatcaatatcggtctatattaatcatttttataattggattaatattttcttaattgttagcactatcagatgagttctaactgatttttgcatgaaagactcggttcatgtgcagatcacgctttgcttattttgtaattcacttcactgattttgtaaaaatgaatgatggacaatgaaacttaggtaaaaattatgtgccatataacacatgttgtataaagagaccattccactttcaaattcaagaaaaaaagaaatatataataagaaagataaggaaatggtcatttattcaaaaatctcattccatacaaaaaatccaagaaatgctacagattaatctgtagaagaatatatgcaattgtttatagaagaaccncgnaaaaatctaggttggtagaaactataatcatataaaaggaaagagagaaaag

SEQ ID NO: 60108 - DNA, 1369 bp, Arabidopsis thaliana landsberg
  unsure (1)..(1369): unsure at all n locations
ttttgaatctatattttgatgcaatacaaaacattttgtaaaattagttttttttttttaatcgttctgagtttttggttatgtggtcctcatatattcaatgtttctccgtataaataactgactgtttcataaattttctgggaaatggacacaccctttaattcataagagtgatgattatcgctgatggttcttaaaaaagtaaggttagattttttcttttcttttctaaaattctctctctctaacgattttgagattttctcgcgtatactccggannnnnnnnnnnnnnnnnnnnnnnnnncgatagggtctctcgtaatttttctcttagttttgtctaaataacgaatttgtcgttctgctctttgttagaaatcgattttgatccattttcagaattcaattttgaattggttctgtttgtctatacatttttggttgtgattttgattttgttttccccagaaaatcaacatgactggtttcaatttcattctttctatcaccgagtttttgatgatctggagttttattttacctgattttcgccaaatgattgattatcagatgctttttatacatatttagtaacctaaagacgttactagtaactgtgttctaacctaaagacattactagtaaccgggttcttgttgctggttttactcattaattgcttcatctggatgttgttgtttctgcatcatctttggtgtcagggttgtcttgcattgcatttcttgtctgattgatgtaatggagtataattgttttgtggttctgttctgtgttcgtgttacatacttttttttatgtttttgtgtctcaaccttattctactgcttcttcttcctgccaggaacaaacatctgtttcgtaagtttcagcaatgtacagtggaactgtgaagagggtatcaccactgcaagatattaaactggtaagatcatcaaatcaattcttatgtttgtttgaatttttcaagggtttggtttttgtatgttcatgatgattcttttgaatgggacagagattgctttactgagtggtctatattttacagcgtgtgcagattacagtttctttggaaatggaggataatgatccgaataaagaatatttgtatgctaaaggcttaagtgaatttgttacttggctaaatgctgataaggtgagagtttgcctccacaactattttattttggttgtagcaagcctgtcaagcttttgtatgtcggacgatgccaaaatgcaatgcggcagtatcattagttntcttccttacataacttcaagctatctggttatttgaaaaatacaaactgactgcacctcttagaaaccgtttacatgtgctggga

SEQ ID NO: 60109 - DNA, 641 bp, Arabidopsis thaliana landsberg
  unsure (1)..(641): unsure at all n locations
tcagaaaaaaatcactaaataaaaatatttttgaagagaactcgaagcattaaaacactttaaaaatgttattggtgagattatgtcggtccatagtaaccatcatctctctatttgaaggaatctcttctaagttctaagcgtttgtcacaaattgagtttcttaattttcccttaatcaactaaccaactaggtttgatatcaaagtgatattagtagattnnnnnnnnnnnnnnnnnnnnnnnnnnnnnnnnnnnnnnnnnnnnnnnnnnnnnnnnnnnnnnnnnnnnnnngtagtagtcccaacaaatacctttaaagattttatttttttgaattatatatctttatatcttataaaaccatataaatacttgaatcgagtctccgagtattgagaagtaccttataaaccttataaatattttcaagtttagtgtagggcatttatgaaaatgtacagctaagtggaatagtttttgaaaatatgtacattaaaagggaaaatgtcccttttttgtcaaggaattctttttttataaaaatgctttagagagtcacatttctttctgtttttaattacagatattnttatgtaccttttactatgaacgttatttaccactcatatgtttcaact

SEQ ID NO: 60110 - DNA, 522 bp, Arabidopsis thaliana landsberg
  unsure (1)..(522): unsure at all n locations
attttcagatacaacacctaaanccctgggccaaatgcgggcaaaggatagtgaaaaacaacatccagtaaatccttgnnnnnnnnnnnnnnnnnnnnnnnnnnnnnnnnnnnnnnnnnggcacgttgaaccttatcagcggcattactggcagattccatcgccgctcgtgcctccttctcatccaccaacgccgcacatctagcctcagcagctgcaacagccgcagcacgagcagcatcaacagctgctgccacgacgacgacaggagcagttcgatccatgggtgcggcggctagggttcggttgtggaagggagctagaggaaaggaaagaacggcacgatctcaagaacggctaggtgcgtctcgtgcggcagtggtgaactcgtaacgatagcggttaacggctgtgagacgtcaactgtatcagtgtaataaacatcatccttacctggtaatggaggcgtcattttcatttcagagtgtaggtcttcccctggcttttatatagtcgaatccc

SEQ ID NO: 60111 - DNA, 497 bp, Arabidopsis thaliana landsberg
ctggcgttcgcggcgtgcggcaccccatgctggttgcgcaatccgccggacaggcgttgccgaccgtagcgcaatgggaactgaccgtagccttgcctgcgcaggaaaaaggcacgcacatgtcgcgttttgtggcattgcttgagggctaccgggtcaagccaatgacacctttgctgttttgccagatggcgcaagacatgctgcccttgcttaacgcactagaaggcgacatttcggccagctttccttatttcctgaccaagaaggcgcccgtatcgggtgtggaaagccttttggactacgacatcgcctgggccgtgcatgtcgatgcgcagggtacccgctttcagttgtcgatacaggtaccgttgaccagcctttgtccctgctccaaggccatctccgagtacggcgcccacaaccagcgctcgcaggtaacggtggtaatggggttgaatgcagtcgagtcaatagatatcgacgccattattcgc

SEQ ID NO: 60112 - DNA, 462 bp, Arabidopsis thaliana landsberg
tctgacttagcttttataatgctatggatattttaagtttgacaacttgctgagagaactcaattgctatttaactgataagaagtgtacggatatgtacatactaacccaaaaacaattgtaaaatcatgagaaaggccaagaagatttcctttttgatcttctggtttgtcctcacaagcataactagtgttgttttttcacaacaatgcaacaacactggtttgtttttgaacacaatagtacttatggtgccaaccgtgagcacatcctcacatcgcttgcttctaatatgaagggtcctgacagtttctacaattcttcgttcggtgaggttgctgaccgagtgtacgtaatggatggtgcattccttggaccgaacaaacggtttgctctgattgtatcaaggtcgcatcggaccagttactacagatttgccctaccagaccgagcgttacatgg

SEQ ID NO: 60113 - DNA, 1196 bp, Arabidopsis thaliana landsberg
tatgcactgttgttcaataagatcaatgaggaatcaagctcctttgccttggttaaacttctgatcttttcgcaagcagaatccacggatggaaagtttaaaatatcttcaaactttgcttgagcagtatctagagtttcaacactctccaacgtgttgtcataagcactcacagcagataaacatctagttgcaagcctcgcaacagctgctcaaaaataacaaaacaatcatgaaactgtgggaatcaataagtaagcaacatgattaatgttttaagtaccatctcggtcttccaagccatcaagagtttctgataacaaagtaacatagcggaaaaactctcccgtaaagtctctgcgtctcttggcagcgattgcgtttatgtctgttgggttttcttgaatctccttcaaaaggtcattgtgtttctccatttccttatctatctgcaacaatactcactcctataagtacacaacaacaacaataaactaacctgagttcactaataaacacaaaatacaacactataaataccttcttgactttactttccaaagataccagtttctgcttcaatataggatcagtttcggtatcagctcggattctgcaacgcttatagaaattaacactgtacttgttccattcatctcttaaaaccaaatacgtcttccattgtttaactttaggtttctcattcaagaagagatcaataatcttgtcacaaaactgagccatagtgtaaccttcagcaatctcaacttccattggatcctcaacagagctttttacttccgcacctaaacacaaaatttctatcttcaataaaaaaagcttctctaactagacgaatcctagtctatgaaaagggtttagcttatctaatggtgacaattaatacaaattggaatctaaagaaatagaatttattggtaattagacagaaagattagagatttagggtttatgagcttacttgtagtgccattgtaagtgacagtgtcggtagcaaaggtgatagttgagcttttgcgtatctttcttcctccattgatgaaagcagagaaagggagatgatgggtttgagaattcttaggagggaaagccagtaccttatcagcagaggagaaaaagattgatgtttaaagtaaattcgccattttttatccctcacaaagttcgtcggggtt

SEQ ID NO: 60114 - DNA, 356 bp, Arabidopsis thaliana landsberg
caaaattaggtatttgttaaagatttccctttgtcataatttttcaaaaacaagcaacttaaaaacataaatagctacagatacaaaagatgaggttgtcgtgtactcaaacctcaccacttttacaagagcactagattcttatgtggggaaaaataataaaaaattggcttctcctaaatttgctttgacttgttgaatactcaaatatctatatcaaagtttggggctcttactaattgtaggaatgacaatgaagagggcttttcatgtcctaaatctattttcatcgtcataaatatcatttttatcgtggttactagttcatatgatgagagaactgttaataaaggttc

SEQ ID NO: 60115 - DNA, 1069 bp, Arabidopsis thaliana landsberg
  unsure (1)..(1069): unsure at all n locations
gctcacatatattaaactgcttttccaaatcaaaatcttttgtagtttcaacgcttcctatgaagacttgctcacatcggagactccggtcaacaagccgatccctctagctgtgagttcctacacttctccaaaaacatttactctctgcttaagttggtttttgtcgtctgtttcctttgagaataatctcttgtcatagctatcaaacatctctttcaaccctcactggtgtggtgttaactttgttgcaatcttctttgtaggaaatggtggattttctgttcgatatctggcacggggatggtcttttcgagtaggtaacagagaggggattctcagtattcttggtacagaaatttagttgcaggatggctctaatccatttaggtttaaaggatcaaagtcctttatctttagaagaaactcttgttttttccattgacttaccatgaagatatataactaaattaggttcttttgagattctcttccatgataaattcaccaaacctgtatcatgcttctgatgccatttggttcttttctttaagattgacactttagtagtggaatttaaaagaaacggtagagacgaactttgggattgggttaagaaaaacgtgtatgatcttgataagtgcgactgcgtttggtgattgcttgcgattgtgtatttaggaggtgtcgaaactcgaaacgcactcactcaaaaatttcccattgaaaagtcaaaaagaaattcgttgaccgtgactcgtgaaaataaagcgtcttaactcttaataattcaataattgttctataacaagaaaagtcttaaccaacaaaattacaaggattagttggccaatgatggtcctagattttgaatcatttttttgtataaacatacggtagttcaaaaacctgcaagtttaaggagctgcaatgccactattgtagtatttgatctgagttaattataaaataagcattggttttgaggttcaatgtatatgaaagaatntgcagacgagcaaaatacataaaatttgctttcccgtaaaaaaatgccaaaaatttacag

SEQ ID NO: 60116 - DNA, 256 bp, Arabidopsis thaliana landsberg
caaattggaggatgaaacaaaacgaatatttcgatgtatttattaggcaactgccttatctaggataataggtctatctatttattagtcaaaggatttcgcttgtgtctttctataattatgagattctgaacagaaatccaaatgtatttccttttgtgttcttataattaagaaattctgaacttaaattctaaaatattttctttcgactttttatatattagagattcacactattttgcaaccgcttttt

SEQ ID NO: 60117 - DNA, 385 bp, Arabidopsis thaliana landsberg
aggaaacgcatcaggtatatagatgaggctacgaaagaaaagaatgatcaaatctattttattcttaaatttggatatatctaaggtttcttcggcaatatatggagcttacgaaaacgaaagagtgagctacgaggaactaaatcaatgaagataagaggaatgaaggagagaagatcaccaaggtgtagaaatttgtgaagtcgactcctccaacttccactattggattgataggaacttgagaaggcgttgaagccaagccattagtaacctgtctatggccataagtgaccttaagagagaccaacctggggaaaggatcatgatcatttccaacaacactgccgaccacaagaggagctctacggcttaaatgacatat

SEQ ID NO: 60118 - DNA, 590 bp, Arabidopsis thaliana landsberg
ttcaccctaggcaatacgcctgcatcgaagggccattatttttacgatgcatttaacatcgacaggactgccaaggcgagtatccccggattgcctcaacagacttccggctctgctcgtccttcagcgatctgttggtacgcaggaaggttgttctatgctggtgtaggagccgacggtttctccgacaaggtttacttcacccagatcatcgagagtgactctcagttcgggagatgctatcagatcaacgatccgacttcggaaaccatcttcgatctccttgatacagacggcggaaccatccttctgcctttgatcgagcaggttgtttccatgagggttctgaatgatgcattgatcatcatcgggactaacggtgtcttctcgatcagaggttcagacaacggtccgttcagagctaccgactactctatcgaatacgtgtcaagcatcggagctacttctgatctgtctgtcgtttcggaagatgacggccttctctggatcaactaccacgcgatgtacgccatgacgaaggatacgacccgtatcttcttctttttgaacaccatcagcaagaccacgat

SEQ ID NO: 60119 - DNA, 1549 bp, Arabidopsis thaliana landsberg
  unsure (1)..(1549): unsure at all n locations
ccatgctgggcctcaaaacgcagtttttcggtacccaaacaagacgcagcaccctcgatcgcacaatgcttgttgaggtcaaagttaaaccctaacttggaagatttatgaggtgaaagagatagaccaagatccaactccatttctaaggcagcttcgtctttgatgaaactaaaagcttttgttcttttattattggctttggaaaaggttgtgttcgttggtgttgattgctgaattagaggatcatgagtattcctatttatagtaaaaggaaatgggggcagaggtcaaggagtaatatatggctttatcaaaaatatacatatatatgtatataatattatgtacattttatgtaacccacacaaatatagatgtggatagatggtatcttaaccaacacgctactatttattctaaacaactaaaacagtaatcattcaagtattagaatatactagtaatttatatcgttaaattctgaacttttagttctatatcttcttggcccataatatagaacatatagttgactaggataattattatcttaaaatgtttcatagtagtatgtaaatctagacccaacatgactgaagtaacgtttcaccagataacttatctttttacgaatattcatctctatatgatccaatgaagtacgaaatcatatagttcaggaagtaacacaaaaccaatagtctataccaaaaacaggtgatactaaacagttttagattttctgatttttatgaatatatgaaatttatggctttcacgttaagcgaaaggtagtgaggaagttcctagttctccgaaggaaaaaaggtcttttgggagagaagtaatggcttccgacattgattaagttcgggtcggccaatatcccaacattgatgctaacacatttttacattattttatctaaagttttatgcttttctgctttaaatacatcttataaattttatttttatattcaagatccaccttatctacactgtataacaagttctcacctacttttaatttcaaattttgatcaaaacataacattattacaaacgattatatcataaattccgctcattatataatgagcaaaacttgcaaaataaatttatggaaggatttacggctgctaacttgtgttagatgtgcgtctttaattcatacttttggcaatatgacaatcaacatatttaaaaaaaaaaaattaagcatgtactaaaagaatgataaagtgcatctatactaagaaataagaagatgcatatttcgtcaagagacacatgattcaacgaatttagacatccaacatcaaaccaacacgaatattagtaatagacaagtttggttaatgttggaacggacaacgtcccatatttttngttacattctatgtttccaatagaaaatttggtttcgcacggaaaaggtggaatttaagaatcattgtatacaatactattaatgtgatacttaaactgataactgtaagtaatactcctagcaaactctgatttttcagcttgtcataactttc

SEQ ID NO: 60120 - DNA, 215 bp, Arabidopsis thaliana landsberg
caaaacataaaaccgaaccgagaaatcaacaaccaccacagcagacccctcaaccagaacgaagaacgcacgataaaaatccaacaaactcaaaaaacaacataccaggggcagaaaaaaacaaccaaatacacgactacagccaacgggaccaataaacaaaaaacccacacccccagctgaccaacaaaaaaaaaggaacccgaacaacaaac

SEQ ID NO: 60121 - DNA, 365 bp, Arabidopsis thaliana landsberg
aagcctcttatcttctcaagaaaagggttgatgccaatgtttttgaagttttccgcatatcgatgtggtccagcacaaaccattgttatccactttatcttttatttttctttaaccccaacgttttctactttagcacttctacttatctctagtaattctgcatttatcacttctacttattgtccacttgattcttgagcttcatattgttgaattcgattgtacttttctgccatcttctctatatatgcttaaattgtatatttttacgcttgctgtatagttttttaatgattatctgtagtcctaataattggggatttaaatgattttttcctttgtataaaaatatacagtaaaga

SEQ ID NO: 60122 - DNA, 514 bp, Arabidopsis thaliana landsberg
gtagaatttcagaagaaaggaaaaatactagttgaatttcgacatatatgtgagcgccagggtgtgaattgcaaattaatcaaaaatctattgggccatttgggcctcaaaattacaattattcaggtttaaaaccctcaatatgaactgtttgagacacagttcccgcgaatatccaaaccttgaagaataccaaactttgcctttctctctctccttctctgctctctctggcttctctccgcaacactgaaacaatccttttccttgttccaacaatctaaacttcctctaatctctcaaattcaattatcttcaagtaatcatcatgtttatatataatctcttcttctcttttgatttatccaactcaaggaacctcactaaactcaaatcttcctctcagtttctcccactcttcttcctcaaccttccgatttatcggattactctaaaatacccaaaatggaatctcatggaaaaacccatcagaaagagcacgataatgatctct

SEQ ID NO: 60123 - DNA, 391 bp, Arabidopsis thaliana landsberg
ccggtgcaggagatgcattcgtgagcgggttattgaacagcttattttctgatcttactcttctcaaggtactttacttatctcttaagctttaccttctctggctttttgtaactaagactatgaatcaatgacattatgtgaaaatttgcaggatgagaagaaactaagagaggcgcttctatttgcaaacgcatgtggagccattacagtaacagagagaggagcgataccggcgatgccaagcatggatgctgatcaagatcttctttcttctactcgctcctaaaatgcttcaaaagtctcttttgagtgtatcaattcattaccttttacagtggttctgtttttttaaatatttttccccaatttgtaggaactcaagaatgtt

SEQ ID NO: 60124 - DNA, 622 bp, Arabidopsis thaliana landsberg
agtctctataggttaaaaaaacaacataatatcagaagaaatcttgtctcacctagttccctttgaacaaggctgggaaagaagtccaacaaccggataatcaataggagatgaaagccccgctgcttctgcacaaagagggaaatgggagaaaataagttttaaaagaataacttaaatgcaacgctggaggtcttcatgtttgcatttaatctgaagtatgaagtggatatggttccctgccaagaattactttgcaaattatttggtgaaggtagatagaccactaagaaataaaataatgcctaagagctgaaaacaaattttttctaaagtcagtcgtgcttctaaacacatttggtcatcacattgaaggagggaaccctacataccagataaagcatcagttggaacataataaggaagctgcagtaatttcccttcgtcagcgctgtagtttagaacagacaccataccgtactcatcaccaacatacctgtgaacaagatatgaaacacacttaattacgccctagttactgtcaatggaataatagtgctccaaactgtaaatctaataagctcatttacatgtaaccagtgcccttgaagggattgcaaac

SEQ ID NO: 60125 - DNA, 952 bp, Arabidopsis thaliana landsberg
gcttctgatattatgttgtttttttaacctatagatggaaagcattgcttgatgataagttcattaattcaaatttaatcttctcattgaactgaagtgctatataaggaacatgtgtctctaaaactgaccatctgtgcctgtcatagcacatgaaactagtcttttcctttttaacttttccctctgcatctactaattatttagtttcatgctccaatgtccccgaccgttgagcttaaaataaggacaccatctgaagatatcataggcggaaatagtgaaagcatttagtgatcttcatgtctaacttgagaaacattgtatcattttttctttttgcactgtgattctaatcctgtcaaaagagtgaaaatcttgattttgctatgctattacagtgtattataagcaagaataagatctttcttatgattaattttcataacgatattgaagtaataatcctgcagattgttgattgcattttcaaatggattactttttctttgggatgcatcagaagatcatgtcgtgttagttcgggggaacaaagatctacctgtggagggtaaaacagttgctgattctcttgaagcttcacatgatgagctttccaatcttgaactcgatggaaaagagataagttctttgtgttgggcatcaactgatggttcagttcttgctgttggctatgtggatggggatatattattttgggacttttctgatgggcaaaaggggaagccatctaatcacgttgttaagttacagttgtcttcggctgagaaaagacttcctgtcattgttatgcattggtgtttggatgtatccgcaagagtagtggtggaaaactcttcatctatggtggtgatatcattggatctgacgaagtacttactgttagaactcagtccacataagaacgttcatagcacacattggtgatctt

SEQ ID NO: 60126 - DNA, 852 bp, Arabidopsis thaliana landsberg
atcttttctaaggaaatgaatatctagcaaattttattttagcagaacctaaaaccggagggggccggggcctaaagaaccgaaccgagttcggtatagtcatcccttattgaatccaccgcaaattctcctgaatcttcgaaccaaaccaaaaaccctttcgccgtttcttgctttcactaacctcgccggcgttgttccctttccaagtcacaaactttgtcctcgatctcagctgggtttcccataaaagttctctctttcccgagaaaccccgtttcatggttaggatcttagcgtcacgagtaagatgctatggagatgcaattgggtgaagcagaggaagagaatccttaacacactcagtttctcttcgattcacggtcaatatcctcgggagtatactgccgcgaagccactcacgcacgataatgtgtattcttgtttacgagaatctccagctgatctcaaaactttgaatttcttcttctggtgcgcgaagcagaacaattacttccacgatgatcgagcatttgatcacatggttggtgttgttgagaaactaactcgtgaatactatagcattgatcgaatcatagagagattgaaaatctctggttgtgagattaagcctcgggtttttttgttgttgctggaaatattttggcgtggccatatctatgataaggctattgaggtttacactggcatgagtagttttggatttgtgcccaacactcgtgccatgaatatgatgatggatgttaatttcaaactcaatgttgttaatgggagctctggaaatttttgaaggaatccgttttcgaaatttctttattttcgacattgtat

SEQ ID NO: 60127 - DNA, 393 bp, Arabidopsis thaliana landsberg
  unsure (1)..(393): unsure at all n locations
nnnnnnnnnnnnnnnnnnnnnnnnnnnnnnnnnnnnnnnnnnnnnnnnnnnnnnnnnnnnnnnnnnnnnnnnnnnnnnnnnnnnnnnnnnnnnnnnnnnnnnnnnnnnnnnnnnnnnnnnnnnnnnnnnnnnnnnnnnnnnnnnnnnnnnnnnnnnnnnnnnnnnnnnnnnnnnnnnnnnnnnnnnnnnnnnnnnnnnnnnnnnnnnnnnnnnnnnnnnnnnnnnnnnnnnnnnnnnnnnnnnnnnnnnnnnnnnnnnnnnnnnnnnnnnnnnnnnnnnnnnnnnnnnnnnnnnnnnntattgaatagaatcttgaatagaatctattcagaattacccggttttaactaatttacaccaccccattatttatttgatttcctattccaacca

SEQ ID NO: 60128 - DNA, 594 bp, Arabidopsis thaliana landsberg
  unsure (1)..(594): unsure at all n locations
cgctagttaaagatcgaggacaaggataaatctattaaaagttacgtaaattaagaccacaactgttacattaccctaattataaaaaatcatgacttaattctatattgaaaaaaaaatgtagaagtaaagtgctttttcgatgttttggttgaattaaaaaccacaaatgccttttataccataaagtgtatataatatattttcttaaggaaataagatttataaaatacaaagaaagtggagaaaagagtgcatgtatatgaagctttcttataacaaatatgatcattgcttaggcatgacttgtcacaaagaagagcaaaagggatgatagtggaactgtgaatgatggactaaagagaagagaaaggaagaagataagggaatttattaatttcatagaattttaaatactaaactgttaggttggtggatacatttttttttaaaatgaatgataggaaacgaanaatngataacgacgacaatgattgtaatacatttgaagtnggtgaatgagtatactttcgttctactactttatgtgtgacacatnggctaaacattcacacctttataaacaaaagaaca

SEQ ID NO: 60129 - DNA, 533 bp, Arabidopsis thaliana landsberg
gaaacaagatacttgaagaaaacgggcagttactttcggagtttacaatttccatttctcgagaagaactatttgggttatcaatataggtcatatgatatgactaatatctactgcagcacccattttaataattctagaaactctaaattcaacatttagtgggtattaaaaaatagtttaatagactatgacagtccattggaccattaaacaaaaactacacgcccttatcagagcgacgaattttttgtaacttggatcagaaattcaataaagttatagtaataaaaatgaaataatttggaaaagaaagaaatgaatagagaagaaaacacatgcgaaattataatggcctgcctctcttccttcttatctcttttacttacactctccaggtccctcacttccctcattggacctctctaactttcctctctttaccttctcctgtttaaattcttctccttcctttccacaattgttgcctaaccaattccaacaccaaaaaattcatttcttgacgatgaaac

SEQ ID NO: 60130 - DNA, 548 bp, Arabidopsis thaliana landsberg
  unsure (1)..(548): unsure at all n locations
acgataatagattttgatttgctggtaaatttacatttcacttttctttaaatgtgaatataaatattttaatttagaaatttatgtattctttatttttcttttctgtcaaacagaaaaatctgtcttcaatttcatcttgtgataaaaaaaaattataagaagtccccagtaacaatcctttacaaacaaattgatgaattcaacaaaaataagggagagggcaaaagcgtaaataacaaaagtcgatgacgagagccaaagccccaatggaaggtgttaagctaaactctcttcttgtctgatatttcttctactctcaagtctcaaccacataaccaataaaaaatgctactaatcccaatttcttcttcttcgtcttcgtctatgtaagtttcctcctttntaacattcaaattctcatctcttaaccatattactaacatcgtctttgntgtagtagccctccttctaattcatatccatcgaatcatcactctctgttttcttcaatctcacattcccagttcaacatggtacttatcctt

SEQ ID NO: 60131 - DNA, 538 bp, Arabidopsis thaliana landsberg
tgtaaaacataaacacttgaggtataaatataaaaacataaacattaatccgtgcgcgttcgtattgtttattaaacatttatgccatttctcaatcctatatggataattttaaaagaactgttttcatatgtgaaaatcggaatcatttaatggtttatgatctgatcagcaaaagaggaagaaaaggacaactcttttttgcaattacgattagaaataaacttttaacaataaaataaacaatttaaaaataaataaagaaaagtaaataaaatgaaatagcttaataaataaaattgtagtcttgaccaaaaataaaaatttgtaggtagaaagcggcgtccttcgatatatgtggatagccaagtgtgccttttctgttttattataatgtaccaacaaagaatgtcaaaaatagacttcagaaaccaaagaaatagccaacttttcactttcgatcatttccaaaactatcatcggattttattagttcaagcaaaacaaacaacccttctacgctttgttttaattattt

SEQ ID NO: 60132 - DNA, 664 bp, Arabidopsis thaliana landsberg
aagctaaacaaacaaccctcctacgctttgcttttaattattttcttctttgcttccatcatattcatgctctctctcacagaccacaaataattttacacgtttatcgattaactaattatataagggtcttttatataaactcctaaattatgatctaagatattgtgattgattggttctgttttttttgtaagacctcatccaaaatagctcatggtcggctggtcgaagatagatatgcaggtcgccaaaaacaaaacaaaaataataagttttgatcctatcggtttggtccaaaatgatcatttcggctcatcaatatcctataatatcatcaaatgtccattcgtattaagcctgaattatcttgacttccagatatcctcgacttaaatgttgatatagaccagcgtgtaaagtatacaatctataatggcaattttttttccagttattcttgtatatcaaattttaattaaatcatttaagattttaattgcttgttatactaaaaaaaaaactggatatttcatccagaatattcttgtgttcactaaagtaaaaaagaatactagcatttatatgattaattaacccgtcagaaaattatggatcgaagcttctcatgtctggctggttctaaactgtcaaaatgggtcgc

SEQ ID NO: 60133 - DNA, 912 bp, Arabidopsis thaliana landsberg
atccaaagtgttagatttcttattaagagttttcttccattacactcttttttcaatctcacaaggtatattcaatacatgtagacgacaaatcttgaattttgtgtgaaataaatatcacaatggctccaatgaatttgtttgaaataagcatcacaatagcttcgattcgtaacaccacataataaaataaattacagaataaaaaatttgtagaataaaaatcatagtgaaaaatgacataattaaataagcaaactagatactcattataaattcctattccgcgattatacaattattcacaccagaggccgtgctaacattatgttctcggataatgtcaaagtgatcactatagctctcataaatacaagccttgatatacttcatatgtaagaagaaatctcacggcttcacaactcggttgcttagagtctagctgccattgcctccgacatcaatatatccatgagagcgaagctactaagactcatgcccacgtacctattaacctgcctcggattctactcttccttattcattctactcaattctcattatgtgtaacgctgtaaagcaaaaaccattccctctatagaaagttaattttctttaatttactcaaccttgaaaaaagaagaaagagaactacaaaacactaaaccagatacaaacaaaaaacaactaaagtatcagtggcttgatccctcaacaagtaaggctaagtcggtagccaaggtacacaaagtgccaagtgagagacatgagagtaagtaaatttagccgcgaagagtacgcatttaacttacgcatcctctcgctcagctttgtcagtctctgcttaaccacatcctcatccgtcttctctgtaaccttcttctttcctctggttcgaccggcagattcact

SEQ ID NO: 60134 - DNA, 1070 bp, Arabidopsis thaliana landsberg
gaacggtggcggaaaaaacggcagaacgttctattacacaaatatgggcaagatcttgaaatctaaggtatgttctgtaaacaattcgtttacaactctcctttattttctttgctaaaaacggctgcgttttacagtcttcttggccaagaaccgtcgtgaggaaatggttaaacctacgtagcggcgcttacgaatttcactctgattacccagtcaaaggtgagatgttaactcgtgccgttttagatatttttgctcaaatttcttgccgttttttttaatattctcgtctgacttaccggaggtttttttttctttctagggatggagccaaggcgaaaaagctgctccgacatgatcgtgccggaaaattttcaaggtaaaaatataaaaactagctcatgaatttgatttaattatactactattgttttgttgcatcgaaaacggcgtcgtatctattgtccgtagaccgtactgaattgagactgtctccgtaccagataaagctttgggtccatctctaaccgtaggattagacatctgtgttaaaaacgacggcatataagaaactgagattttctcttgaaaatcgtgtttttttttgtcggaaaaaaaaaaaaaaaacgagtttacaaatgaaaattgtatcatctgtatccacgtgtagggtgagagataaggtttaggcggaaagttaaaaaaagtctttggttttaggtgtacttgccactctaaccattcaccagtttttgttttatccacataatatctctgtctgattataatagtctaaatactaattaagtgaagtatataactaattggttttgtttatgttttgtggttgaaataggttggttgggccaaggaaatggggatttaaaacattcaaccggtgaacaacatgtgacacgcgttgatgacaaacttgatcttaagttataaatactttcatgattaacctataatttagctctggtctataattagctatgatcattaacgtcgtaattgttcaattgttgatgattagaatgttcgcggggacatggaacgtgggaggg

SEQ ID NO: 60135 - DNA, 1076 bp, Arabidopsis thaliana landsberg
  unsure (1)..(1076): unsure at all n locations
gaggcagacagtgtttaatacaacgttggtagcaggtgttgcttgggcgacatccgacatcacaattcctgagacacaaagcccgtggttgacttattttgctttcacctgaaaatgtcatcaagtataaccgtagtttatgaacacaaaaggtctaaaacatgcgataaaaaaagaagctatagacaaaagagggaaagtttagttacttccaggaaaagcgcaatgaatgatacaatcagaacaagcaaaacttttgctgtcacgacatttagtcgcgcacgttgttcgtttacattcttccaccgtctttgcactgacgccaaccactaacaaaaccatgatcatcattatcttcatgatactcaccatttttgtttaatagttttgattcaacacaattttgttttaatttgtgatacgtggtgtgtttgtttgacgtacttttctagactataatgggtacttatttatagatttagcaatggttgaattatacataggtttactatgttgttgaatgtttaaatttaaattggaactttttgttcgaatgagtaatatttactatgttgttgaatttttaaatttaaattggaaatttttgtttgaattaattactacatctttgactatctaaaataaatcatatggtattatctcttattaactatagttgaatataaatgttttatatgttattattgtatatttcgttgaccctattatatagtaagattagaaaatttattaatatcatatatattaatttaaataaatatttctgattagtgaatttagttaaaagagataaatgaaacgtgtcatctaaagcgggaaaataaagcaggtttttataagaaagctttcaactaagagagagggtcacaacaaaacactagagagaaaagtacttattatagttcaaacatataaaaaaaaacaataagttgaaaaaataagaagagacaacttggggtaaacacaccctgaaggagctttatccttgtccagcttcattcttgatacatcttagtgatgatggtactccagacactctccaactncttcatctt

SEQ ID NO: 60136 - DNA, 594 bp, Arabidopsis thaliana landsberg
tgagtaccaaaactctgggctcgggtacactactttatcctggcggttctaccaacaggaacaaggccaacttgttgatcaaaacctagacggtaacgttgctcttacttttccttatggagctacccaaccaccgataacccttaagactaacccttgaacactcgaatcgcgtgggtgcccatacaacctcgagcggttacatctttagagtgtatgtatggagtaatgacaaaccggcccttatatgagacgagacattccatcacgctcacgtctaacccgtccgagccaacttcgctttgggctctcccacgaccagagagtcgagaccatccctctcatggtagtgacagtgataagcattcactctatttttgaaaatcaaatttctttgcaaaactcatacattttctcaaatcctttgtaaaagaacttacaatgagtttatgaaagctttgtggtgatgttataagatcaggtggctatatcatcatctctctttatataaaagcaggcctacacattatgtttgaaatataaatacttatgcatcaaatggatcaatgatcctgccgttgtttaaatgacaaa

SEQ ID NO: 60137 - DNA, 298 bp, Arabidopsis thaliana landsberg
ggaatcctacaaataatagattactgtatatcttcctgtgcttataaaacataatattttcctttgagtttcctcggttaatttgaagcttgtttgtttattttaggccgattcttgttctaccccctgctgatgcacgggtcatttactgtgaactttcggagtctgagagggatttctacgacgcgctatttaaaagatccaaggtattgttttccttaggattatttactcggacttttgttattaagatgccttatactgaagatgctgacggatctttttcaggtaaaatttg

SEQ ID NO: 60138 - DNA, 855 bp, Arabidopsis thaliana landsberg
ctttaaaactcagaaaggggataaaaaataacttgattactcatcatttgcatttgccccttgtgaaggtgtaccagaggaaggagctgattctgctggctgcctcacaatcaagtgtaaagtatgcccattttccaaatctatgacgatgtcaagttatcaactatactgaaagtagaaaagcgatggaaggaaacgacagacataaacaaaaactaagcttatcgaaggtatatatatatatagttctctttctggattacagcttcctctacggtgtaagactcacaaaagcagagatgcacttgatcaatcaaaaactagacttccgacagatttggttaacatgcattttatacacagggcacatggcataatgcaacaaacagctacactataacatacaatcaacaagttaacaaagtcgctagcactaggatacgatactccgagagaggatgatcatctttcaaaacccgtcctcggaaaatgagccgctgctgaccaaccggcacccctgtctcactagcaatcttctccttgaatagcaaaacagtttcctgcaacaagtcaagccctaaatagtatcagatataagcaaactaaacttaagcaaatatgcaggtgaagcagaagaagaagaagatttcttacattcttgttcacttggaaagtatacgtccgcgagtctaacgttttgatgttaagctcaagggttgattctggagttttctccgacgcattggtgctactagagcactggttaatgggttgatcttccatgaaccctaaagtattaaaatttaaaaaacataaagcttgtaaattcatcttacaaaaggaatgatcgtcata

SEQ ID NO: 60139 - DNA, 138 bp, Arabidopsis thaliana landsberg
cacattgcccatgggttaactgggtgtgtctgcctgtaactatccggtacatatatgacattcaatccttttgatatttctcgagccatataagacgcctctccatgctattctatgaaacgcaacaacaaatggaca

SEQ ID NO: 60140 - DNA, 484 bp, Arabidopsis thaliana landsberg
gatcttaggaggaggtgctgacatcgggaccccacatggcattcaccggatggtttctacgcgagcgcttcctacgaccgactggtgaagcggtcccactaacagagacaccagcgcgcatgcgaggtgtgggtggtggctatgtcaaggtgtggcccacatgtcatccgcaggcacgcaacggtgggctggggctggcgcagcaaacggaaatggagctgggccgtgagggtcaatacggcccatagcacagatgagtctttcccctttttcattttattttctgctccttatttcttttctaatctctatttttagtttcctagattcaaattaaatctaaactttcagttttgaataaattccaacctcaaatacaatgcaccatcaagtaaagctcagcatgtaatgcaaagtcatccatatgtatgttaggtattttattcatttgggtacaacttttcaatgtatcattcatgaaaga

SEQ ID NO: 60141 - DNA, 371 bp, Arabidopsis thaliana landsberg
tcagagtagtatatgaatgaagtgcaatcctatcaagtggaactggcaagtgcacaagagcacagatcaaacatgtgccatcagtctagatagctccaggaaatagttactctcaaactctgagaacaaccagaaaaattaacatgccatggagacagacaatttactttcatggacttcttcacatcgccctccatggaaccgtacggcttcctctgcggtatcctcaacaagtacgaaatatcctccagcgattcctgccaaatgtagcaatgtaaggcaacgcccagacggaagaatcgaataagcaaacctacatgcaaatcctcaggagcaggcaaacctgtatggccttcatcttcggattagcg

SEQ ID NO: 60142 - DNA, 582 bp, Arabidopsis thaliana landsberg
  unsure (1)..(582): unsure at all n locations
tatcgccggtaagagaggtcattaccatgcccttaacaaggtctgaaccaaacagcacctaagcaagaaatggtattttgactttaactagtaagaatacttaagttggggaaaacaaactcaccagtgtccagtgttgaaaattagaacatcatagaacttggtgacgtttatccaatcattagcaggaatgtcaacatccactctgtatgttccttttattccatccttcctaacttctgaattctccacaggaagccacctttttatcattagtcaccaccaagtaagcttcatgattttgttatgcaaagtacaagaaaaatgcaaccctgttattctaacaaacacaggtgcaagaaatagaaatgtattaagcgccgcatgtttaacaaatatgaactttatgtggcaaataagaaatgtcctttgcctccttgngatgttccagtacatctaatcctaaacaaagtgcacttaaacatgctgctttacatacatagagatgtacaatgaagaagcangaaacggcataattactcacgtttgatacaatacacacaactaaccatgcaacataca

SEQ ID NO: 60143 - DNA, 528 bp, Arabidopsis thaliana landsberg
  unsure (1)..(528): unsure at all n locations
caaagatcgtttgagggagataatatacgctactggggagtaccatttttatccgattgatctatatcatttagataaatattatttaaagaaagagaatttcctctatcagttagttactatggaaatggaaatggaagaagatagaggggtcttaaccacagaatgtgtgaacggtgatgatttacatgtctataagtgtagatttgcatctgatgcacttctacgcgttagcaaaagtgttattaaacaccgtcttagtcttagtagatggatatggatattacacacccccgcaactcactaagttgagggatctcaaggaaggccactataaaggcttaggtgaacagaataacgttaaagcacttgtaaagatacaatacagttgagtgatagtttctatcatacaaatcanactgatatattagcatatattgatggtattatccccgatggtcttataaaagatctaaaccgacaggttgttagtctaccaatctattctattcagaatcataatatgat

SEQ ID NO: 60144 - DNA, 218 bp, Arabidopsis thaliana landsberg
tatgcctgcttgggcgtgcagatcatagcttaactgagtcatttttgcttcgatacttcctacaactcacaatgccgcactgaaaagttcttaaacgtccctgactttagtatacaaacagtccatccaaaagtcacattgtcttgcttatttcaacgaatggctccctcttagctttgcacttaggtctcacatgccaagattggcctcactgtata

SEQ ID NO: 60145 - DNA, 132 bp, Arabidopsis thaliana landsberg
  unsure (1)..(132): unsure at all n locations
aacccgagactctttccgagctcgtgattaaggttcgtcctcgggtacatgatccgatgatgcgtcgagtctgctggtatttctatgtgntacgacgtctgaaaccggcagatacacgcctggcgtgcatct

SEQ ID NO: 60146 - DNA, 1454 bp, Arabidopsis thaliana landsberg
ggggttcaggatggatggccaagcgcttctgttgtttgcagtcactccagagtcagtcaacttgtttagtatgcaggcgcacaccgaaattgcagactttggatcatattgggggcagtgtgaatactgttacaatgagtgaccgctcggtacatacttcgcttcttctgacttgttgattttagaatatgttcttctatatcttctagccagttgaaatatgttgtgttctacaggaattaatagttggtcgacctgaggctgtttacttctatgaagttgatggacgtggtccttgctgggcttttgaaggagagaaaaaattcatggggtggttccgtggctaccttttatgtgtcattgatgattctaaaactgggaacactgtttttaatgtctacgacctcaggaatcggcttatagcatatagcattgtcgttgataaagtctccaacatgctctgcgaatggggaaacataatacttataaaggctgacaaatccttattgtgcattaccgagaaggatatggaaagcaagttagatatgctgttcaagaaaaacctgtacacagtagctattaatcttgtccagagtcaacatgccgatgctgctgctactgccaatgtgatgaggaagtatggagatcatttatatggcaaacaggactttgacgaagctatgttacagtacattaacacaattggttatcttgaaccatcatttgtgatacaaaagtttctggatgcacagaggatctacaatcttactaattacctggagaagttgcatgagaagggtctagcatcaaaagaccacacaactcttttgctaaactgtacactaagttgaaggatgtagaaaagctgaacacgttcattagaaaagaagatggcatcggtgagctcaagtttgatgtggaaacagccattagggtctgtcgtgcagctaattaccatgagcatgcaatgtacgttgcaaaaaaggcaagaaaacatgagtggtatttgaaaattttgcttgaagatcttggaaactacgatgaagccctgcaatatgtttcaagtcttgaacccagtcaagctggggtaacaatagaacagtatggtaagattcttatagagcacgagccaaaagagactattgatatactcatgcgacttggcactgagcaagggatgcccaatggtgtgttcctgtccaagtagcaagcacatgtggacttcatcactgtgtttgttcagcatccgcattcattaatgcattttctcgagagatacgctgaaatagttcaggattctcctgctcaagcagaaatcaataacacactcttggaattatacttgtctagggacttgaattttccatcaatctctctaaccgaaacccgtctagataaggtcttaatagatcataaggtagaagctgcggtgtctaaagccgatcctgaaaaga

SEQ ID NO: 60147 - DNA, 374 bp, Arabidopsis thaliana landsberg
atcaccatgagaacttaattacggcacaagaagctctacttacacccgtcctgaaagttattcatattttagttattggagtcttttgaggatattactatacttcagtatacgattagttaaggatttgggttccgaccttatctaaggttttcatataactttcctctttcgtaattcaggatgttaggtaaagggatatgttcagacaaaagcactttgatctgaccaaaggtcaaacataccgcatttgtggcatcaaactttccacctaatccaaccttcaatatagcagcatttaccttgcttaagaagcaataagccgaccctcttatatcaataaagagaacatgacgctagattatctattcatg

SEQ ID NO: 60148 - DNA, 360 bp, Arabidopsis thaliana landsberg
ggcgtgctggtgctcgcgagcatgacgccgctgatggtcatgatcgttttcctgctgctggcaccgcaggactggcgcaccgagcatttactgatctggaccaccggcgcgacgctcaccgcgctggcttgctcgctgtggcttgcgcatgggctcctggcgcccgtgtccctggcacgcctggcactgcatgcctatcgccgcgaacagcgcctgctgccgctgccgctcgaccttgatggcgaagccggcgggctgctcaacgatctgcgcgcgacgatcgaaacctgtgaacgccagcggcagatcttcgccgagcaggccgactgggcatttcgcagcaaggcctcgcccttgctg

SEQ ID NO: 60149 - DNA, 120 bp, Arabidopsis thaliana landsberg
aatccacacgaaaaccatacgcaccccccgctttgatatcaggtcctccgaacactgaccctataaactcttcatgaggggcatttgtagagaacagagccgccaaatacctcaaacacc

SEQ ID NO: 60150 - DNA, 488 bp, Arabidopsis thaliana landsberg
tagggctgctcgtgtcggcgtaagttattgaccagtaccaaatgtgacaaccttcaattcaagttacaaaaccatgaatttgaaacagaagttagggtgcttgatgtacaaggttatgatcttattttaggcattgactggttgtcaagttttggtcaaatgacagttgactggagtaaaggaatgcggaaactcaagcataaaggcaagcaagtgatcttacaagtgcaagatgtcacagctgaactgaaggtgtgccagggaacagttgacttgcacaaggaaaagaagaaaggaagccaagtcatcatagctcatcttttcacttcacaaggcgctccgcgttgtttgttttgaaaagagaggggcgataggtttctggttgcaaggaggacaagagatgggtgcttagaaacaagggctgctggacaaagtattcacaggtaagctcataggcaagtgatgagtacataacatggaatggaaaa

SEQ ID NO: 60151 - DNA, 566 bp, Arabidopsis thaliana landsberg
taacatgaagtttttgaaatgggaagcgcctctttttttctttcaaaccggctttccccatccgaaatcggcatcgtacaagccgagcttacaccagctattactcatccacaaatccatctcatttcctcttccatatactttcccaatctcttccaaaagctcaaaaattctagacgaagatttcgacatctccttgcagttcaagctgaatatttcctttgccctccttatctcatcaaccacatcttgaattctttcaatcgcagcttcttcgttcttgagaatcatgagggaaagcatattcccaattgtgttttcacacaaagaatctacctttcctcttaggttcactagtatctgcagcactgaagttcttggtgttagagaactcaatcttgaaaccttagtaacgcatcttcaaaacagagctgtgacggcttcacacgtgttggattcttacaaggatgctggaactttgggtctaagttctttgtcttcgaagataaacacaaacctttttgtacacacttattttttaaactttttttggatcattggtttga

SEQ ID NO: 60152 - DNA, 1522 bp, Arabidopsis thaliana landsberg
aaaaaaatggattggcgggtcttaataaataattaataaggtctaaccgaaaaggtctatccacctcttttggggtgatatacatttttttggggtcaaatatcttagcaaaaaaaaaggtctaccaaattaaaacatatatcacttcttttgggatcaagtatcctctacaatggtgaagttatttggactggtgaaccggaccgttgtgatccaagacgaatttattatgatacaaaaatctttttttctttgataattcaaaaactcttcatttgttagcaaaaatttgctttttgtgatacaaattttttgttggatattaattttatatgggatgaggtttgaaattaaaaacaggacgacatatatgaaaacacaagtttgtgctcacctttagttataagtgtacatcctttatcaaaaaaagtcttcgtccttatatcaaactatatgtgtagaattgtaaaaaacaaaacaaaagaggatagaaagttaaaagggtctaaaaactttgtgtatgaattaatatatatgtcttccaacatccgctatacgaacatattatattttggattttaagtttttagtaaaaaagttattgcacgtatgtaaactacgagggactgacgtgaagatctcatgtggttgtggtacatgttggatcctttctgattcccgatgcaataagataaatcaacccattgcaaagcacaagaatgtaaaatcgagcagttggaaacctaaaattgttgtcgaagataagctctgacaagatatagtgcatatttataattcttaggaaattgataaaaccaacacacacaaaagatcacaacttggtatatagtttattaacaaatgatcaaaaaatactggcaaaaagtattcccatgtgattttattgattttaattagtgagataacacgttaaactctactgtaaagttcttacaagcatatcttcttgaaccaaaaaaaaagtttttagaaaaatcagttaagtggcaaagttgtttgagattctcccgcaaagccttcaaagtgaggagttcaactccactatctaacaatttgcacccactaatatttttcctctgacaaaagaatagaaagttttacagtttcttttactgcgtaattaaacaaaatatcatttattaaatatatcataacaactcttttagaaagcatactcaataataacttttataaaccaaagaagagtaatcgagtataatattagtttagtagtcagtgacatatggatctttgctagagattgaaaatatgtagacttcaaatattaatctgaatttggatattcatctttgctacacaagagtcccatttaatcaataatgtatcatcttgttttgttctagtacttttcggctatataaagtataaaagcacaatgatccaccacttgtggtattcttgaagtaattctcactcactttaatttggtgggtaatctatttcaagaatactcaattagagcttaaatgataaaatcttg

SEQ ID NO: 60153 - DNA, 530 bp, Arabidopsis thaliana landsberg
tacctacaaaaggaaatgaatctcttttaggtacccaaacttgcttgggtccttggatgttagtgaccaaggtctttggcacccaaatagctttctttttgtttccaacaattgaagtaccaacaaatttagcatgaacaccttttgcattatgagaaagaacataacaatgctcaaaacaagtggaggatacatttttgaacttgggacaatttttcttaacgtgtccctttttgtgacacttgtgacacactttgtcacattctttcacaaacaatgtcttttgctttacaaaagcattctttcctttcttgggaacatatccaagaccttcacggttaagagagcatcgttgacttcccaatatgaaatccaatttagccttaccaccatatgccttttctaggtcatgagttagagtgtttattctatctactaacacttcattctcaacaataatcttgattcatcaagagcaatgttatcattgagagaaattttgcatttatcacaaatagagttagtaggta

SEQ ID NO: 60154 - DNA, 1178 bp, Arabidopsis thaliana landsberg
gacctcccacaaaactacgaaatccatatttaacaatatcttatttcattcttgcacccaaactcgacctaacacaggactatgaaatccatatttaacactagctaaacgcatttatgcaaccttgccattagggtccacaatatcatttgttggggctggcagggacggttcagatatcatcggcatttggcttaaattggcctaaaataagaaacagttgcatgtaattagtttgttagtggtaacgagagtaaaaaataatgaattatatgatctaacattatcggctgtagcaggtgggtcagcaagtccttctccatctttgtctgaagcaccgtcatcaaccattggcccgggggttgacttacattgggcagtcaaatcagactctatctgcaaggcaaacaacagacgttagagccaatacacggaaaaaaaaaaacatagaaactatatgagaaggtttgaactcactatggatgggatggtgttcccaaactctggctgacctacattgtatgcaacaccatccatgtcaacaagcaccacatatggatctgggaggctgggctcagattcaaagaactcattgacgtctgtgggaggaggaagcaaacactgagtatgactcgctgcagctggaataggtttatcagggctagtttggatatcatcaaggccctctccacctatcccatcaccgggggcatcaaccaagatattatcttgatgggatacaattttatcaccagaaacagacttttccacaaacatatcgtctaattctttagccggcagagtggaagagccaatgtcatgaatcccatctctagctgactcatcctcagtggtatcagtcaccacccctccaactttgttgatattgacagcttcaggggatacatgtttatcagcagaaacagacttttcacctgaactgttgtctactgctggcgtcaggatggtggctgctgttgggccattgttgcctctcttccgtttctgtttgttatgaaaacaatacttgaattaggaagaactctcataaaatacagaatatttacaaaactgttaaacgtataccagagaactacgcaatccaggcctagtcggtggggataagcgacctatgggggttgtagtctgtgtaggttctgcgtcgttaatatcatgca

SEQ ID NO: 60155 - DNA, 448 bp, Arabidopsis thaliana landsberg
ccgatctgctcctcggtgcaggcccaataacgcggcgtggtatcgctttcgcgtctgcgtgcgtgcgtgtgcaggcaggcaggcggctggcctccgtccgcgcatcctcttctggcgaggagctcccccacgcagccgctgctctctccacgtcctctgttccttcccctccccgatctcccccaatccgaccaaaccggcagagccggggggcggcgatggcgctgcgacgggcgctcctcagatcggcagagttctctttcgaacgcaaggtccgaccccccctcccctcttctccgtatccttgacattttgttcggttggatccagtagccgggagattcggaatcccgcgcgcgagttgggcctggccagctggcgtcgtagccgcactctgggaggcctgtgggttcgagccgcgagggtaggggtaggggcgggtttcagt

SEQ ID NO: 60156 - DNA, 511 bp, Arabidopsis thaliana landsberg
tttgtatcgtaattcacttctctgcaacttggtttcttaagaatttgtgttggtttctggttttggtttgtagcgaatcattgtgttatttataagaacttgttttgatatctattttgcccgaaaatgctcttatcttccaccacaaaacgaataaaaaaattgaaataaaaattgaaggacttgaattgagattgaatacgaaatcaattggtctgttgcattatgcaaagtcttaccttgaattgagatcgagtcactagtatcatttgcagtcatcatttcttcttgaagaggattatgaacttgtatatgtagtagtagagaacttgaaatatctagcatatgactttggaaaagaagaaatcaataattaatctgaagtggtatatattacatcaactacaacacacccaacacagaaacaaagttactttgcagttttgtgtaacctaaggacttatgaccgaccaaagatgatatccagaaacatgatcctatagtttcttct

SEQ ID NO: 60157 - DNA, 1138 bp, Arabidopsis thaliana landsberg
cgcaaacacagaaggaaacaaaactcttgaatttctccattccgttgtctgcttctatacgcgagttgttgcgccttagggtatgggcttcttcttcgatgtctattgctctgaacctacacctccttttcagaatccaactgcctgtgaattacatgtactactaaagtgattataaaatagtacgaaaaaaagagtacacattagttgtgctgtctactcatttttcgtgccgtttattatgttcctaccaaatcacaggcggcagggaatgaagcctttcagtctggacgacacactgaagcagttgaacattacacagcagccctggcttgcaatgtggaatcacgtccttttacagctgtgtgtttctgtaatcgtgcagctgcatataaggctcttggtcaattttctgacgctattgcagactgcagccttgctattgctcttgaccaaaattactcaaaggttttaatcctaacatatcacttttggtttcatttgttttctggtttccacggaaatacggaatgtagttgaaaggtttcaacgttttgacataaaactggattgtgatcgttgggtaataacttctcttaaaagtaaataggttgctgtccagctgtatatcagtgtttctgtttacgtttcaaatgcataagctacaacattaaggatgtggcagcaattctcgtatgattcaaggctacttttctgtctgattggctgaaaaagtactctattgtgtcacttaatttctttctttctttattctcaggctatttctagacgggccacgttgttcgagatgattagggattatgggcaggcagcaagtgatatggagagatatgttaatattctaaccaagcaaatggaagagaagacctctggaacccttgacagatctactagtatgtccaatgacataagacaagctcgtatacgactttctgaactggaagagaaatcaaggaaagaaaattcattggatatgtacctcgtcttgtaagtagactatcctgctacgttaattttattccactaatgcctgcgttatgttctcccgttctcccatgaattgaaacattccccaaagcatgcaaaattcccatttccttagaaaagacctaggttt

SEQ ID NO: 60158 - DNA, 364 bp, Arabidopsis thaliana landsberg
acatgggacggccggccgtccttgctcgcactcaacgcgcctcagagccgtcgtggctggtacgcgatgatcccgcagctcggagcgccactcggcttcatgctggctgccgtgttgatcgcatttatctacgccagccttacggaagccgacttttacgactggggttggcgctacccgctttatgtcgcatttgcgatcaacgttgtcgcactgttcgcacggctgcgcttggtcatgacccccgagttcacgcaatagctgcagacgcgtgaactggaacctgcttcgctgcttgaactgctccggacgcaaggtctaaacattatgctcggcgcgttcgcaccgctggccagctacgccc

SEQ ID NO: 60159 - DNA, 1146 bp, Arabidopsis thaliana landsberg
tatcgagcggaccatcatctgcaccaacagcatgaagaaccacaggaatggtcgagaaaagttggatggtcaaaggaaaaaccgcaggggcaacctcatctattgacacggcctctggtgactcagtgtcatggacagacaatgcactgcattttgcaacgcacacttcacaaggactcaccaaatagacagcttccttcatgggcttgaaaaagcctcttccacctctcttggaatagagtttatcgacgattaacgttgatgttgcctctagccagtctgcacacaagccttcgatttggtcgtagtatattctccgttcaatctgtgacagcatcaataacaacaagtgtttagcagactgtaaacaggaatttagataaatttaattgtggtaaatgaatcagtagagacttacgccaagcttgctaatgtaaacagtcataaatcttgatcccaagttcattactctagcttcacacggaaaaatctgcagagaaagaaataaatgagtttccttaaccaacataaacacaagaagcatcagaatgatgcaagttatcaattcacttacctccttttgcttcagcacaaaccaagtgtaaagcttatcacatgcatctctgacttttcgagcagccagcttcctctcattgcaataagcagcgacatcagagagtatttcagtggagggaacaccatgtttcaaagcagcaaccgataatgcttccttgccctcgatagattcagcagcgtctttattgaaatggatgccggtgaaacagcttctcccttcatcaattgctgtttgcttctgctttgagtataactcctcagcctcaagagcagcagctaacgcacggtgaacgactatgtctgggtaccgtcgaagaggagatgtgaagtgagtatagagaggaacagctagtgcatagtgtccccactcagcaacactgtccttcaaattcccagtgcagaagtaagatgctagttgcataggttttatagcataattgttgagaatatccacaaaaactgagtcatccttgaggtttccagtgattttctccaatgaatcctgaagttggccagaagaagaaatgtccaaatccataccatgcttagaacaaaacccttcaaattctt

SEQ ID NO: 60160 - DNA, 697 bp, Arabidopsis thaliana landsberg
tctattttgtgtatttactatgtctatttatcagattcaaatgcttggttagaagttgctatgggtctcatatagtcagaaaatttaaggtactcgtatttaattcgtatatgtacatcagtacagataacatgtacatctatgtctaattgatcaagttgttagaataaagaataattatttaaatttagatgatggccattttaggttatactagacataaaaatgataggatatatataaaaagttgaagacataaaaagatcaatacatgataggatttatatatacaagcaaatgagtactgtatgagttgtgaaagataaacatatataccaccacgaaagagtgtgatacaagtaaaattcatttaattaatataaaatatagtaggtggacatggagatggaatactatatcatcatagaatttcattttatataatgaaatgatagtcgttgaaagaaaacatgataaattaaaatggaattcgtaggaatacgtaatagagtttgatcatcttcattgatatgaccatgtataatactataacacacacaagtgactacacctactcaatcatgtagtatagtcattacttgtagacttgttgtagcattgtttttcttttcctgacgtcatatttgtagcaagtccgattaaattgtgtaagtgaggttcttctgtgacgtgaaca

SEQ ID NO: 60161 - DNA, 215 bp, Arabidopsis thaliana landsberg
ctactaatctcccctacctctttctcattacctagttcttttagattcctcttctaaggccacaatttcttgaggaccagaataagctctaatgggattctcgacaccatcgacaaaatgtaatctcaaccgtccatctactctagaaacgtggaaaatctctgggcgatcgaccctaacttgtgtaagttccaaactaccgtcattttttcacc

SEQ ID NO: 60162 - DNA, 1474 bp, Arabidopsis thaliana landsberg
ttaatgggtaattggtgggccttttaaagcccaaaatgagttatcgtattaataaaccctagttttaaacccgaccgactaaaccttaacccagacccggactcgactggatcttctcttctcgccccatctctctctatcgacgatcgaacttacttgagtacttcttcttcttttgaccagagctctcacacatacgagtcactataatggaaggcgatcaagagacgaatgtttatactttggtggcaaggaagccttccttcgatctcccaacagcttgccctaattgtcttcctgcttatatatacctgaaattagcccagctaccttttgaacttgcgttcaattcaaccttccctgattcaggtttgcttctgttttgattcctcgcttcgtattttggttgttgttagattaaggttttggttgcgtgatgtgtatctgttggaagtgaacattgttaattctattagcttgaattgagattcgaatcctagacaagataattttgagttctggattcgaattcgtactattaagatcctgctcttaggttaatcagagtttagatagggtttttaggcaatagtaattcaattttgaggtgtatatatgcattggtgaatttttctggataggaagtgttcatcataatttcttgttatagctttggttgaattcctcgttatcgtaattgttaattcgaagagaatgatgatgtttcatacttgttcagaagaaattacctgtttgatttagctattgagtttgtatattaacaatatcttcagaatttctatgttatgtttgataatatctctagacacttcgtaatcctttgttcacggatttacaaatttgtgcattcaatatttataagcttgtgtattgacaatgttaatcatttgtttttaatatagatgaactgccgtactttgaaagtgatacatatgttgcatataacaatgaagatggaggagtaattgaaaaactgaagaaagatgggactgttaatctggactctcagctacagtctctttcggattatttatctttgaaggctcttattgtgtcttggctacaagaagcgcttacctatgagatatgggttggtaccgaggggatatctacatcgaaaatctactattcagatcttccttgggtgatcagcaaggtcctgttttataagcagacattcttggcaaagaaccgtttaggaatcaccaaagagaacgcagagcaaagagaaaaacaggtcgggtttgtttaagttttgttgtaactttagaagacctgtggtttatatttgtgagcatttgaactagttattaaagttcatagtcttaaatgtgaacagatatacaagagagcaagtgaggcatatgaagctttgtcgactaggttaggtgaaaagaagtttctctttgaagacagggtattgcaatcacattccggagctggattctttccc

SEQ ID NO: 60163 - DNA, 163 bp, Arabidopsis thaliana landsberg
atatacatgtcactctagaaatactcttatattatactgcttataaatatctgtctccacaaaataaaacgagagatgatgatgaaaatggtgaagctgttgctgctattgaagatgatggtaatgttgttgatgaacactgacgatccggacgctccctctc

SEQ ID NO: 60164 - DNA, 287 bp, Arabidopsis thaliana landsberg
ctcatcttgggtaagcttgattttgtatcttgggtcaatgacccaacgatcatgtattggaccacagaaaaatgaaagtcaacttatagaaacttaaaagaaaaaacaacttttagaattttacaacgtcattttttttattgtcaacttccattccaccaaacgtttggtaacgtgtcgaaaaaatataagaaaccagaggaaaagaaaaggctaaaaccatgaaactagagatcgaaacagggaattgccaggagtgacgtctataaccagaggatcgtagagac

SEQ ID NO: 60165 - DNA, 1143 bp, Arabidopsis thaliana landsberg
taatcacaggcaatggctgaaaagatagaaagattagaacttcaatcagaatccaaggacaaggtatgaaaacacacattgaatccatatcccattaatgcctcacataacatttttgtaacgattatgttggccctgcagcgagtcgttgaccttcaggagctatacaattctcagcagattttaactgcagagttgagtgagaaacttgaaaaaactgaggtatacgcctgggcctgatttctcttctaactcctcatgaaaccatttcttatatatatttatcgaaatgcacaaaaagctaactgcatatctttctacaaatatcagaaaaagcttgaggaaactgagcacttattgtttgatcttgaagagaaatacagacaggcgaatgcaaccattaaagagaaggaatttgtgatatctaatctcctcaagtcaggtacttgattttctttttagtacccgttctcatgaggggaatcctgtcttagcagttagaaattcttacaataacattcttgtgacttgcagaaaaatcacttgtcgagcgagcctttcagctacgcacagaactagaaagggcatcatcatatgtttccaacttgttttccaaaataggtaaaagattcatggaccaaatatttttgtttctgttgataaatgttccctgcttcataaatgttgttgttatgcagaaagaaaggacaaaatcgaggatggaaacagatttctcatccaaaagttccagtcacagctcacacaacagcttgagctattgcataagactgtggcttcttcggtgactcaacaagaggttcaactaaaacacatggaggaagacatggagtcctttgtgtcgacaaaatctgaggtgacacatcataatctgaactagatttttgtttatttctatatggtctttttttattctcactgatcatttttggcctcattctgctgttttcttgtaaaggctactgaagaactccgtgatagactttcaaaactgaagagagtttatggttctggcattgaagctcttgataacatagctgtgaagctagatgaaaattctcagtcaacatttagtagccttaactcagaagtttcgaaacattcgcatgaacttgagaatgtaag

SEQ ID NO: 60166 - DNA, 284 bp, Arabidopsis thaliana landsberg
gaatgatgacagtgaggggggggagtctaccaactgacctgtctgaaaagaaacaacatatattgcttgaagacatattaccgatatatcactgtgaagctcagaccgcattcacctctaccaactagccagtgttcggtcacccttcctggaccatgacttgaaacactcgctggagaaaacccggtacagtggattggaagatccagacttggaatccctgagatgagcgtaccgggtccgaagattagccaacgacctgtgtacactgaccactaaaatac

SEQ ID NO: 60167 - DNA, 327 bp, Arabidopsis thaliana landsberg
ttgggaccacgcttacttttctttgtaaattacactaatggatttcttaaaacaaataaactgtcatgatttatttataaatgggttaggtagcttaagtgatcacgccataacagacacaataattcttgaaagtgttaagaatttttattgttattaatatatcgcagttgagaattcaccatgttgatctaatatgagacgagatgagttttttcctctgtttccatgtttgtagctgtatatatatattgtgtcgctagaaacatggtatactacagactgaaatattagtctgatttggatcagattaagaattaccctttt

SEQ ID NO: 60168 - DNA, 2054 bp, Arabidopsis thaliana landsberg
  unsure (1)..(2054): unsure at all n locations
aaattaagaaacaatttgtggcagggaagcagtggtttttgaacggtcggaggagtcattgtttaggtttttttggttggatatagtttggtgacaaataatgagaaacaatgaatgtgtaagtaagagaatgaactataactttgtcatagtttcatgttaagtagtagcgcacaaaatgacaagtcaacaacatgttacatgtacgtgccttcctcactccaaggtaaaataagttcattccacgacctaattcttgaaacattcttaagacaacatgtgttttcgttaactttggaagaagactccgagttttgaggattttatattttacatttaaagaaaccagaggaaaatgggattttattttctaacaaaccatttttatattcaatttggtttaggtttagtcccattggacaccaatgtgaggggcaagagcattgtgaaaacaggctataaagttctttgcaagatattagcggacggtccatcacagacgacggattatcaagtgttataaacaaatataacctcgtaaggtggtagggttatcaaggatccggatctgatcacttaaattcgcttagattctgaaattccattccacttctaacaaagttatttcacgtgtcgtcacatagaacaacgttatcgtcctatgtgctttaccggtaatatatccgtataaaacacacataattaaaaacataatcctttcttttgaacaatcaaaatagaatttcaaacgtatctagtgttatttgtagagtcggggaaatatctttcgatccttattaacatccctaatacaattggttttggctatgtctactaatcttattgtaattgcttttagtttggatcttaacgaaaacaagactaaatctcaattgatcaattgtggcccaaaaccattttgccacttattgcaccacctttcataattaagtcgccttaaaaatgtttatctactacttgatgataactatagtttcaaggcattttccacgtacggccatggaaaggacttaaccaacgatacctcttattgatttatgttttactgataaaatatacagaacctgcgtaatccagaagtatacttgctactagtttatgttttttttctctctggtggaatgtcaatttgtataattgttaacatcttattccctttctaacgttttctttatatggtcgttgcatttgaaactacaaagaaagagcctgggtcaacaacacaacttcctcacacacgcgttagaagtttccgcaggacttgttcaaacagataaagtcttacccgttaaatttaaaaccaccaatatatgtagtaatcaaattgcttatattattcaaattgctttttaaaaaagagaatttcttacaaaaatatgaagtatcatgaacaagtccacaatgtatttctttttgagaaaaattattaacatctccatgttgcactctatgttaaagattgtttttttcaccatcccttgtacccagaaacaaagcattagctagaaaccaccaaacttaaaaaaaaatcaagtcatggaagctcgtaacatggtcaaaatacacttcgatagctcggaggaagaactactgtactccttcgtcccccatctgtccgccgcattcgggcgtaaaggcatctctatgttcacagataaacacgatcaatcctacaagtccattgcttctgtattgattttctctgagaactacgtgtcctccgaggaatctttggatgaattcataaaaactatacggagacacgaggaaggccatatcgtgaccgctatcttttatggagtcagtagatcaaatgtgcaagaactgatgggaagtttcagcaaggagttcttggagcactgcgcttcaggtcatgtaacgcaatggcgcaatgctctttcggaaataacaagcttacctggccacgaaataaacaataatcaaaggttagagacactttctacttttattntttccttaatacggcatataacacagaagtgctaagggcagtacggtttttgtagtgacta

SEQ ID NO: 60169 - DNA, 1440 bp, Arabidopsis thaliana landsberg
ctactagtgttactaattgtaataatttgatataagcagcgtctaaaatcgagctcaatcttcggagattcactacgactagcaccaaaatcgcaacttaaagccgcaaaggctaagagtaatggtgcttcaactgtgaccaaatgtgaaattggccaaagcttggttgagtaacaaaaaagactcaatctttattcaaattctgtatcataacgattcgatctttgattaaagtttcttacttttgaatgtataggaagagtttttggcacaagcaactcctgacaagggattgagaactttgctgatgtgtatgggagaagcattgagaacaatagcttttaaagttagaacagcttcttgcggtggaacagcttgtgttaattcctttggtgatgaacaactcgctgttgatatgcttgctgataagcttctctttgaggttttttgttacattttgaattaacttatgtcataagctttgtatcagaaaaatggttcattaggttttgatttgtgtattggttttataggctttgcaatactcgcatgtgtgcaagtatgcttgctctgaagaagtacctgagcttcaagacatgggaggtccagtggaaggttggttttacataaacttaactaacatttccgcttctttaaatcgcgcgaaaaatagttatcgaaagaatatgaaatttatttggacaggtgggtttagtgttgcgtttgatccattggatggatcaagcattgtggatacaaatttcactgtgggaaccatattcggtgtttggcctggagacaagttaaccggagtcactggaggagatcaagtggctgcagccatgggaatctacggtccacgaaccacttatgttttggctgttaagggctttccaggaactcatgagttcttgcttcttgatgaaggttttggtctagtcctgttttatcaagattccttctttggtaagcttttaaactaagctcaaaattttgcctcagggaaatggcagcatgtaaaggagacaacagagatcgcagaagggaaaatgttctcaccaggaaacttaagagccacattcgacaactccgaatacagcaaggttcttgctttggatcgatctaactttaatctttgctcaaatctaatcctcactctgaatgcttttcttgtgaaatcagctgattgattactacgtgaaagagaaatacacactgcgatacaccggaggaatggttcctgatgttaaccaggtttgttcttcttcaacactataacaggagtttttctacttgtgactggaaacttgactttagtagtaacttgggtttttggcagattattgtgaaggagaaaggaatcttcacaaatgtgacttctcctacggctaaggcaaagttgaggctgttgtttgaagtggctcctcttggcctgctcat

SEQ ID NO: 60170 - DNA, 929 bp, Arabidopsis thaliana landsberg
gggtaatgtggtgtaactacggtttggtcgtggagaaggtaaccgggtgggtttaacctgttaaccacagtggtgcagttgacattggtttggttatggtttataggatactcggtttgatgagagtttgagaggagatcttccacctttggaacgtcttcatcatgatgatgatgatcaaagttaatatcatatctccaaactacacataaaatagaaatcaatttaagaatattaatagtggccacaccaacaacatatatataccagggggatgatgtgtgaagaagagagtaccatcggaaccgtcatgcctaagttcttcttcttcactattgcagattctcaaaggaggtgtcaatgaaaatcccaaccatttcttcatctctctctctctctctctagctgtctttctcgctcttagtttatatgtatagggtttcgttttatatgatttgtagtctcatacgtgcgaatatacattaatatttttcataagtctaaaacatttaataaattatataattaaaaaggtggaaaaaagatttgagacaaaacaggtggcggtgaagttttgtcgtaagcatgaaagaaaggaagaggaagtttctctctccctcactctttcacattctctttcacacacacttgcatctgacttctagagttttgtgcccactctccctcggatcttttcgatgtatacgtatatatatatgggagatacacatgacacactacaatgaaaattttcgttctttggtatttgattaacttttccgtaaaaaaagcacacagttgcgcttaaaaaagtcagtattttgtttctttcgaagtatgttaattagacaataatacatttcttttattaatgtctttctttcgatataatttgggatattttatgatagacttaaagaacattacat

SEQ ID NO: 60171 - DNA, 310 bp, Arabidopsis thaliana landsberg
tcttgaccactttgttgttgttcagtgcaaagttttttgcaagcatcctcgcacattataggagtagcgtttttaacttctttcaagcattggtttgagacacaatgtctaatacacatatttacattattcgaatgtgagatttgtgccgaaaacatcattgcgagcaaagttgtaatgatcagaagatcgcatgttttcttcaaactttgagctgccataatgtatataaatgtattgatattgattagaacaaatgttattagtaaacaagatgatttggtgatgaatattgggtttcgtttagatg

SEQ ID NO: 60172 - DNA, 949 bp, Arabidopsis thaliana landsberg
acgtctactcatttcatcataaacataaaaagctaagtatctatttctcaaattctaacttcaaactatcaaacttcttaattctattattatatacttttaaaactacctatttcactaaaattccacaacttattcttagcttttgtatgagttttatcctcagttttctatataggattttgaaaattcgttatttttattcgtgaagagaatgtacatactttgagatcattctagctacaatagcacaaaaagatcattgaacttgataatgtatatttgatggagaagttaacttgaagaggaccgatgaactttaatttcatcccaaagcaattaagtatcaaaacttatgttatagaaagaacatatatttagggattttaataacataagtttggggtttcacaaattaagaaccatgaaccggttaactcattttacgataaaccgttgtagctcttaaagattacatgcctttatgattttaatcaaaaaaaaaaattatcctcttacagctttctagtgtcttactaagtttggtcttcggttaaattatctcattcaaaccgtttcgattcccagcaaaaccaaatcacaacaagcacgtataacatatatatgacttggatcaaacaatttaattactcaaagtctttttaccacaatcaacacaaaaataattatctaccattttgctcggaaacgattgctaccagtgaccagtcaacaattttttggaagttacgttacaatacaaaatgattcaaacaaccaaaattggaaaattgtggttcaaatgttaggccttttgtgcttttgtttttaataactttcccgtcttttttaggaaaaacaaacagtagttaaaacatgctctatctttttccttaggccacagcaaaagcgacttcttcttctttaatattattattctttttccatc

SEQ ID NO: 60173 - DNA, 586 bp, Arabidopsis thaliana landsberg
catgatcatcgaaatggtcactatacgtttggtgaaacgatcgtggaaagtttttttttttctcgaagatctctgctgcatacaaagaggggctagtgagtgtgaagtcgtcgtccttgattggtaaagagagactagagagtacaagtttcatgatgtcttgtgtagtgaatgaatctgcgtagtagtagtagtttcatggttgatttggcttcagctgtactttggaagtaaaatatcgttttattaaaggttttaagcagaacgagtcaaaagtataatttggtaatcccgtaaccatcacttgaagtcaaaggtctgaaattagattaccaaatatccccattcccaattaagtaacaatcctccattattcttcaataaataagcgggaagcttgagtagattacaagaatgacccaactgataaaaaaaacggctcctttaaatgcaaaaaaactcctttcagtttcaaaggtatcgtctccctcaaaatcacaagctctacatacaattcctgctcacatcatcacatggcttcatcagattcgtcttactctcggaaattcttactcatcacctttct

SEQ ID NO: 60174 - DNA, 436 bp, Arabidopsis thaliana landsberg
  unsure (1)..(436): unsure at all n locations
gcacagnnnnnnnnnnnnnnnnnnnnnnnnnnnnnnnnnnnnnnnnnnnnnnnnnnnnnnnnnnnnnnnnnnnnnnnnnnnnnnnnnnnnnnnnnnnnnnnnnnnnnnnnnnnnnnnnnnnnnnnnnnnnnnnnnnnnnnnnnnnnnnnnnnnnnnnnnnnnnnnnnnnnnnnnnnnnnnnnnnnnnnnnnnnnnnnnnnnnnnnnnnnnnnnnnnnnnnnnnnnnnnnnnnnnnnnnnnnnnnnnnnnnnnnnnnnnnnnnnnaaaccagcattcgaaacatgagctgcggatacgggggggaaagctctgcgaacctggttcttctcgagctggatcctatagaaccacatgannnnnnnnnnnnnnnnnnnnnnnnnnnnnnnnnnnnnnnnnnnnnnnnnnnnnnnnnnnnnnnnnnnnnnnnnnnnnnnnn

SEQ ID NO: 60175 - DNA, 488 bp, Arabidopsis thaliana landsberg
cggttcatcggaatgtagcgggggccggcgaacaggcagtggtttcgcgtggcgtgtagaaaacacgtctcccacacgtatcagccactaaatcatctgcgtgtttattaattatctttttaagtgtgatttaattgggtttggactgttcttttaatgtaatccttactgaaccttttgcgtaattgcccttttgtgcttcatcaaaataatataatggccgacaaaacaaaagcaaaatcgtttcacgtagtcatggaagctataacggacggttctgcatgtacatggaagctatctattgtaattgcttatgttgtagttagtctatcatcataataatgttagtaaaatacttcttatgatgatataatatatggctaaaaaaatcaaagaatacctataattattatttctgctttgctttgaaggagccaaaatagtttgttttttcgccaaaatcagagaatctcaagagggtcgatgtc

SEQ ID NO: 60176 - DNA, 216 bp, Arabidopsis thaliana landsberg
acgcaaaatgtagagaagcagaaacgtaaatagagaagctataaattgatccaacgcaatcttcgccggtttcatcatcaccgtggagttcacggcggagagtttgagtgtctgcgccgccgttgctttccatcggcgaatgtaggaggctccggcggtgaatcgacgagtagagagagagaatcgagaacaggagcgatgattagccttgagact

SEQ ID NO: 60177 - DNA, 1469 bp, Arabidopsis thaliana landsberg
accggtctcctcgtcttcggtcttcgctttgaaatatcggtatcgttcttcgccagtttctggatcccaatcaatgatgaaatcttgatcaatctcgtttttgggtaaagaatcttgatcaagaacggaatcaagattcttttcatggatgggtttagcatcttgattaagaatggaaactctttctccggaggtttctcctgtgaaagtttcgttcttattgatggtgaggttttctccgaccgtagatttgtctgaatcttttcctccctcgaaggtttcattttctgcgaaacccttgtctccgtctttaccaagaacaaaaacatttttctcttctttacttgttaccacatcttcactagccggcgcagtgaaattgttgactggtgcacgtaaagcgggctgagaaccggcagtgaggcaataaaggtcagtgagcttccgcgaagagatgcatatatgaacgacgttaccagagataacggtcgtggaagtggaccaaagataaatcaagaaaagaaagagaatcgtgagaggtacacgataaagaaatgatctggcggaaaagatcgaaaaaaggttattacagcaagtacgaggatctttaagtgttttttcgggatttccggtttcggtctttttggacgttcttggtcgtctcaactttgagacggagacaggcattttcttgtttggttgttttttggattctcttttgtgtacaagcttttgtagatgttttgatagggacatctggacatgcactcacgtcgtcacataattgtagtaaaatgatcaatgagtgtgcacgtcttgttgtaacaaacttaaatcatttgatttggaaacctgataatagaaatagatgcatatgttaatattatatagcaatgtttgttagtttagtattcattgaatcttatagtgaaattaataatccaagttttggtagttaaaacgaattaaattaacgtgcctccaagttaaaattttggaaaacaacttctcttatatatggttgtggaatattcactttgactttggatgcgagtgaatatatccataataacacaagatctatctagctggccttttttggtcaacttaaatttataattcaaagtaggggttatgcaaccaatccggaaaaaaaaggaatctataaaacacaaagttgacatatagtatacgagaagaaaacgaagcagaaatgtttacttttctccttgcaacaacattgtcccattgatgcacacaccgttagttttgggacgatgaagaagattgttattgccttcaatcattctccatgatctatcaactcctcccaatgtgaatacttgatgttcaaaagatggaccatcccagtaatcattcactttttctgacatgcacaatacataatttatactcaccattgactggatcatacccgaaaaagttttggataatggtttttcttgatt

SEQ ID NO: 60178 - DNA, 308 bp, Arabidopsis thaliana landsberg
gtgcccgggccagcccggcccattttacgaggccgtgcctgggctgctgggtgcgcccgccgggcggcacggcccggcccgccagagagcggcaggcacggaccggcccggtacggggaagcgcatagcctcggcttcggctcccgacccgactctccgtctcctctctcactcagtcactctctcgcgctcgcggattcgctctcgccctcggcctctccgtctctcctcctgctctgctggctgctgctcaccgcctcaccgtcggccgtcgccgtagtctctgtcggatctacgtcggcgtagtc

SEQ ID NO: 60179 - DNA, 456 bp, Arabidopsis thaliana landsberg
tattttaattgaagttttcaacctctaatccatagacttatgcgtttgttctcaaatgtttccaaacatcatgttcacctaaacctttcctttctttggcacagtcctgcaaaaaaaaagtctctgagcagagtttcatctttctatcaaactaaggttagttttcatttactcatcatttctctgtttctcattggtttcactaatttgttttgaatactccagcaaaacggaccatcatgatctgcacggagtcaaaccaccagcggttttcgtttgctggtgatctcggccagtccgataaaggaactcctatggaacaacaaccatcaggcccggtccgaagagacaccactcttttggattcatcaaactcagatttcgagttccacatctcaagcaactttgatcctggagattcctcaccagctgacgagatatttgcggacggcatga

SEQ ID NO: 60180 - DNA, 1020 bp, Arabidopsis thaliana landsberg
ggtatgtatcaaattgagatttctgtaactactagagtttgaccaaacagttttagttaatctgaatgtgtatgcctaattgcctattgcctcataatgcatcaagcaataccatctactaagcgaaaatggctcaagaaacaaacgtagagaaatcaaacattaggcattaagatttgggatagatgtgctagaattttctttgattgttacgataaagaaacacaaccctccaaaacatttttatatgattgctttttttaggtcgggtttttatatgattgttatttccaaggaaaactaaacacaaaaaataattatgaaacgtttttcggattgttattattagtaatagattaaatctgtatttctaaattttaaattttattaccaacaaataaaatgatatgatttcatatatcaaattgtaagttttgtgagcaaattttcaaaaagaaactgtgggtattcatcaatgataatctatatttggattattatcatgacaaaaaaaggttacagaaaaattaaacaattgtagatattgtttttattttagatgaaaccttctgtccgtattataatttgcatctcgaggttcttatacgatttgtactgaataaaacatattttttttgtttttaatcataactttcccaaaaaccatctgttccatcgctagctgtaccggtttcaatctcaaatcctgggaattgaaatttgtttctctgtcggagaatcatcatcgacttctctgctacttctctccgcgctctccttcgtcctcgtcgatctcttcagcttcaccgatctcatttccaatcctgaaaaatcgatgtggtactgatctacgattgtgctccgttggtagccttatgaattagggtttttcttacgcatcttcgtatgtggagattggatcgtgttcggaaaacttctggacactgtcttcgctgctagatttttggatcatccttttgcgaaaatggcaaccccaaggccgactggaggccaggatct

SEQ ID NO: 60181 - DNA, 1172 bp, Arabidopsis thaliana landsberg
  unsure (1)..(1172): unsure at all n locations
catgatcaaggagttttacaagaagcagatacacagattccagctgaattattctccttatgttacagagagttggtggaaaaacttgtggagtatttgcagtcgaagaggtacattgttgtgcttgatgatgtatggaccactggtctatggagggannnnnnnnnnnnnnnnnnnnnnnnnnnnnatggaagtcgtgttatgatgactactcgggacatgaacgtggcttctttcccatatggaattgggagcacaaagcacgagattgagctcttaaaagaagacgaagcttgggtgcttttctccaacaaagcttttccggcaagtcttgagcaatgcagaacgcagaatttggagccgatagcacgaaaattagtcgagagatgtcagggtttgccattagctattgcttctttgggaagcatgatgtcaaccaagaagtttgaatcagaatggaagaaagtctacagtactttaaactgggaactgaacaacaatcatgaactcaagattgttcgaagcattatgttccttagcttcaatgatttgccatacccgcttaaacgttgtttcttatattgttctcttttccctgtgaactatcggatgaaaagaaagaggctcattaggatgtggatggcacaaaggtttgtggaaccgatcagaggagtgaaagcagaagaagtggctgatagttacctcaatgaacttgtttacagaaatatgcttcaagttatcttgtggaatccttttggacgacccaaggcgttcaagatgcatgacgtgatatgggagattgctctatctgtatccaaacttgagaggttctgtgatgtatataatgatgacagtgatggtgatgatgctgcagaaacaatggagaattacggtagtcgccatttatgcattcagaaagagatgacacctgatagtatacgtgcaacaaaccttcactctcttttggtttgctcttctgctaaacacaagatggaattacttccaagtctgaaccttctgagagccttagaccttgaagactcttccatcagcaagttaccagattgtttagtaactatgttcaacttaaagtacttgaatttgtccaagacacaggtgaaagaactgccaaaaaacttccataaactcgtcaatttggagacgttgaacac

SEQ ID NO: 60182 - DNA, 1802 bp, Arabidopsis thaliana landsberg
attcgctttttttttttcttttttaatttgttaaaaatgcatgtgaacacttacaagattattttttggacaaaaaaattctatttctattttgtttgtttgttttaaaattatttttgtaaaaagaatttatcgttgtcttcatctcgtgatggagacttagagaggaggaccaaactctctgtcgttagccactgacaatttactaaatcgtatggttgctaaaatgtttttgcattgattttacagaatttgtttttgtttattgtctatttaaaaaataaaaaaagtttgttgggttaatattgttcccagagtatcctctgttttattcttataagatataataatcactcgtgaaggaatcttgaatgtttttaaagctccttgaggaactttcatctcttacagaggattttcttgggaacttttctcactttcttctttaaatcaagttgctactttttttgtttctttagataaaatcgatattccattcacagttacttcataagtttgcagaggtatttcttcatctcaaaggaaacgatttgtcttttcattttctcattcttcttactctgatgaaaccaaattttgtttccaggaaaaataaaatttaatctcttgtgctcaaaagtttcctgcatcttttcttcttgcaaggtgtcttaaagaggagattctgtaacacatgtggtgagttcttcctgtttttctggaattcacatgcaaaaatcatatttttttagtttgaagattgatttctaagattctcttctgtttaatgcattaacgagaaagtggttaaaatatcaagatcttgagagtggaccctgttttgtaagtacattatatataaatgtgattcttgaatgaaatgtgtctctctctttgcaggttttgatgatgatgcttatatgattttatttagtagttgtgtgtgttttatggtcttgtgtggctatggagaaactctattgtggcatgccgttactgcttctggttctgcttttagcttccattgatggctctacacagctacaatcatctcaatctcaaaccctcttgaggctgcaacagcttctctactatcccaaagtgttaaacagctggaacaactatacagatttctgcaattctgagccaagcccttcgctaaccgttgtgtgttatgaagatagtgtaacgcagcttcacattataggagacaatggaactcatatgttaccaaagagtttctcaataaactcgtttgttactactcttgttaagctccctgatgttaaagttctcacgtttgtgtcccttgggttatggggttggttacctcagaaaatcaaccgtttatcctctttggagattctcaatgtgagttccaatttcctctttggaccaatccctcatgaactctcgtcgcttgctactcttcagacgcttatactcgacgagaatatgttttctggtgagttaccggattggattgattctttgccgagtttagctgtgttgagcttgagaaagaacgtgcttaatgggtcattgccttcttctttgagtagcttgtcaggtcttagagttcttgctttagctaataaccggtttaatggagctttgcctgatttaagccatttgacaaaccttcaagtgcttgatcttgaaggaaactcttttggaccgttgtttcctcggttaagtaacaagctggttactcttatactcagcaagaacaagtttagatctgcagtttcagctgaagaagtaagttctctgtatcagcttcaacatttggatctttccta

SEQ ID NO: 60183 - DNA, 107 bp, Arabidopsis thaliana landsberg
gcagggtggagtatcggtggcgggatcgggcagggtggaggtataggtggtgggatcggcaaaggtggaggactccgcggcgattacgcatgcgaatatccttgaat

SEQ ID NO: 60184 - DNA, 2083 bp, Arabidopsis thaliana landsberg
  unsure (1)..(2083): unsure at all n locations
attcttaaagagaaaaaaaaaatgatttgttctttcgaaagaggttactctgttgtacctcttttttgccaaagtttaatgctttatatgagtagctcctgtaggctgtgtagtaatggaatagtaccaacggtttgcatggcccacggctcctgtcctctgtgttcctgccgttttaacaaaacatcaaacaaaaccactttccttaacaacaaaggaattatacatagccagaatccacaacattaaagagtgtaaacttgaatgattaagatataacccattgttgtcaaaaagttaaaggtattgtatacttcaaagtacaattttgaaatcaaggaaaaagctttcgatacaatgaatatgcaatgccattgaaccgtaactcaacttttcatgctgtttttttcgtagtntcgcttaaactattcgtcaatataattagaaacgaatacaacatataatggaactatggcagcataggtaattgggttataaccaaagcagcttatagatggtgtatacaaagaatctcactaaacatgttcactggtaaaagtgttcaagaaagtgtaagagtgtcagtttaacaggcgccttcaacgacgtggctagttaggaaggtctccagaaacccaaattaggctaattttccagacaagattggaatgagatggatatggttagacaaaagcaaaggataaatgtatagatgtagggaaaccaatgaagaaagatacttaacttcccagcggttttcgtgaactgaactcttttgtacaatcattgtcagattctttcataacagccttaatctacttagatttccaaagcaatgttttttaagtgaatctaaattccccagggtcacagggacccactgtgcttttacactttaaagcttcctccaaatcccaataactgatatataacatgactatatctacaggaaggaacacacacaaaatcagaactcagaagggctataatctcataactccttaacttctcatttctttgaagaaaagaaagatactctgaatcttcttgtctgcctaagagcagaaatgttgggttccagtacaagatcaatgttttttcttctcgtctgcataggattactagcagacaacagatataatgtctcagccatgagacatagagagtttttcctcaaagaaacacaagcagaaaaagcaggagttcagacagaggaaatttctaagctcaggagcatcggtgttcaattcatacacacccttgaagatcaagaaatgctcattaaaaaccgacgcgttctcgaggaagttaacaaagataaaatcaaagctgaggagacacaagaacgaaagaataagacagaagactcattcaaatcaagcaagagacgtgtaagacgaggatcagatcctatccacaacaaagctcagccattttcttaaacggcgcaagagaaatcaaatacagaaaaaggcaatatactatagaaacgcaagaagaagaaaagggcataacaatcaaccttatcaaagctggaggtaggttagttggttattctcagggtttatttttcaagtataggttttgataagaacacacaatatggtgaagccatcagattatgcagaacagcattatctgttcagatacaccaagagaatacatatttgttttcaagatatttctttgaccaagtccccactctattgtttgcattagttcgtataagttttgttctttctgcaatgcttttgactcccaccaaaacatgtcctatgtatataacatatctcaaaagttttgattttgctacaacttcactatgcaacctctattttcacacaaatcacatttgcacttgaaaggtaaacaattctgtctttctaacaaatatcaaacttatcatttgagtgaaaatgaaaatctaagaaattggaattctaaggattcttcatgaacgtagccttaagatcaaccttcaagaaatttacaatcacatgaagattttagtggaactaatacctacattgtgatgcgatccaactaataatcggtagatcaacctctcaaaatcgaagtatta

SEQ ID NO: 60185 - DNA, 425 bp, Arabidopsis thaliana landsberg
gatggatacaaattttattgtttataagccaaaaaaccatatagaacaagctttttaactatctacatatttaaagaatcactttcctgtttttttcttcaaatagtaattctaaatataattatgtggttgttaattatggaaaaaaaaacaaattatgaggaaccacaaaattacaacataagtttgggactttgtgtattaaagattcaaatcgggtaattttgataaagaaaatattttatgggccattacattgaaaacgcccaaggcctagtttacgaatacatatcatcaaaccacaaagaaaacgtgaacaacaagaaaacaacagaaaacagatagatagccctaacaatggtcaagctagttaaaaagttgaaaaagaatcttcagtcttttcttcctgaagaaaaatcatcttc

SEQ ID NO: 60186 - DNA, 1072 bp, Arabidopsis thaliana landsberg
tttcttcgtcagctgaaaacataaagtgacatagaaagtatgtcttttttatgtttctttgccatacaatccggcaaggtttcaactactacttgccttggccaatttgcgaatcagattttcgatgaattgaggaggtgcgcagttaataccaactgcgtaaatattgttgcttttgttaagaggttcaagacattcctcaaagctctctcctgatggagctttctcaccatctacagatgtgaagcagatccatgctgggatttgcactttctcttcctccaaaagctcaacgcaagcctgagcttcgagtttattcggtatggtttcaaaagcaagaagatcaggaccagcttccactaagacttgaagtcttctcctgtgaaagtcctttagtttatccaaacttacattctcaccatagtgaccactgcaagaagaacatcgaacaactataagtccctcatcgacagaatcttgaaaatctattcaaaaccaaaacaatgtgtattgtgaattcatttatgcttaaaagggcacctgtactcagagccatcagcaagataagcaccatagcttccaatagatgcagctacaagagctctgttatagctatgtcctgaaaccttgctcactttctcccagaatctatcacgagcttcaacagctaattctacactcttttgaagcaaagactcgctctcttctatcgataaacctctcgaaagaaaccccgggatcgtagcctgaaataacaaagccggtaagtcaaaatctaaatactttcaaagtgaagtcagactgaaactaattacaaatcctaactttgtaaatctttacaacaacgataaaaaaatacaacgaagtaaagtatctttctaagttctttaaagattggaaaagaaacaaaagagatagattgttaaacaagaaagagaatgaacaaatcaaataaaatattggtgtttgctttataatattacctgataagatgaagtaaccacaatgtctgcaccagcttccaaatattccatgtgaacctaaacaaaaatttcatcaaactctgttcatt

SEQ ID NO: 60187 - DNA, 580 bp, Arabidopsis thaliana landsberg
gttattgaacgtaactatgtaatacgaaaattcgacggccacaaaaatgggagatgtatactttataatatattgcagatttggtattttcttttactactatatattatttcacataacgcattcaagtgtaaggatatgaatcatcataataagtatggaggtggaatataaagaggcataatattcttgaaaaatatacataagaaatgatttgagattacgatttatattaaatgacaacttcttaataacatggaatgcatgtgtgatgtatggatggtgcttgtgatgtagggacgggacaaacacattttccagcgtaaaatacctatttttaatttgtatataaaatcagaaaaaaataaaactttaagcattaaaataaaaatattaggtactactaaaaaaatttccaaaaaaatgaaaatttaattttgtcaatgaagagaaataaaagcactgcaagcgcacatgcaattgatacataagaacaaacgcagagttttcagtccgtatttattatcaggacagtgcatgcgatcggtataagtttcttaaccaaacctgaattgataac

SEQ ID NO: 60188 - DNA, 464 bp, Arabidopsis thaliana landsberg
  unsure (1)..(464): unsure at all n locations
cgagccttaggattagattatacaatcacctatgaaagatttgatcttccgatgtcatgcatcaaatgaaaaagctcgattaacctaaaattacctgaagttcaaagctgcaatgaaaagtgattcgcaacactaggaattagggtttttccaatgtttttcatagaccgaaagagatgatgaaactattatgagtggagaataaataaagtatatatagagggagagagaatcaaagttgagatttntctttcctttttcttcaccaaatattggaagagaagaagaaaacacagagaatgtttaaaatgaaaaaattctattctattttatgaatataattattctaacttgccagaagataacaatcattattttttatcatttccaaggaccactaaagactttttataattttaatgcctggtttatgatacttttttttatatgtttatatttcttta

SEQ ID NO: 60189 - DNA, 1188 bp, Arabidopsis thaliana landsberg
cccaatttcgtgtgctggttggttgatatttcaacaaataatgctgaaaaacaagaaatctgtggtactgttacttcaaaatttgattcgaaataatcaatgaacaacttcaaatattttttgtggagttccaagttttcaagttaagatgggacaatttgctcaccaacttattcattctttagttctccactcctccatctgtcccattcacaagttgcgaatatttaggaagtcaactaaaatacgccgactaacatttctttttcaaatagttttctgattaattaatatatttgatggtccttttctcaagtcgggcaaaattttgaatcgaataaacaaaggaactccgtgtgagactgtgagtaatctcatgtccttctctaatcctgatgagacagacaaaaaaaatcgaatattataaagttaagaaaacaattaaaaaattacttatcaaacaagtaaaataaaaaagaacctcgttaagaaaaacaaactccagaagacgaaaggttgacacgtgtgacgtaactaatccacggacaacacacgtgttcacatctccgatatttacacgagatgatctcactattcgccacgtatcacgtttaacaaaaaaacaaacgtcgtacgtgtaaacacgtcgtaacggcgactctaacggttagtaacggccactaacgtcccggtatatactccgtctaaattaatttctccgtcggttacgtctccgaccggtaattgtataggaaaattttaattcttctcttcacaaaaaatcaacacatcgtaaaaatttccaaaaaccctaaattaaatcctttaattgcgtcttcttcgtcattatcatggtattcgtatctatggcgtatattcgattatttccccaatctccgtcaatgccaaacgagcctagagtctttgtgtacacgacacgcatagcagcaatgcgattcttccgctctctgaatgtatcttctcggaggaagatccgtggaaggtaaacaataccgagattgtagatatcttccatacgccggcgacggagaatttggcggtgaaggcgtgacggagaacggcgattttggagatcgatcaccgcttgaagacggcgaagattcggtcttatgcgaagatctcggaggtgatagaacggcacggatcttggctccgcagatgcgatcg

SEQ ID NO: 60190 - DNA, 623 bp, Arabidopsis thaliana landsberg
  unsure (1)..(623): unsure at all n locations
actctagtagtctaagctttaatttgggttacatttaaaagagttatacatggtcattgatatacaagtaattacaaattaatggatggcaaagaacgataaatcgaaagaattgtgagaaatgttttcacaaagtgaattcacatgacacttttcttcagaaagctgtactcattaacaattccgtgtataaaaatgggacaatccttgcaacaactgaatgtataaccacataaaacgaggaaaaacataagcatgaagcataattaacggaaacaatgatgtttattttgctcttagaaaaactccaaatcaaactcaaaaaccaaactttttttcttagtatatgtagatctgatcataaacccaaaaatgcaaacaccgaaacagcaagaatcattcccacaagtattttgttatttcctgtaaaagaaaaacaaaaatcaaaacataacaagattgaccataatgctaaaataaagatacaagagagaactanaattgcagttattttgttctttattgtcttaaatacattttatttctaaatttatttgaaaaaaacaaaatgtgttacattgaaacataagttatatataatcgaaaatttactacaatatata

SEQ ID NO: 60191 - DNA, 244 bp, Arabidopsis thaliana landsberg
tgttcgggtctgtcttgaagctgctgacataccgtataattaaaccgcgtttggataacgctgatggaaacgcagtttcgttggaacgcgggtcggaaccgacgagtagtagccggagagagcgtatcgtggagattagtgataaatgcttttgtgaaagccctttttattatgttctccaatcaactttttcttttcttggttatcatacttttcatttttcatcgatggttacttttttctg

SEQ ID NO: 60192 - DNA, 1015 bp, Arabidopsis thaliana landsberg
agagcaaacatggattcatcaaaatccgagaaggaagctgatcagttatccaaaaaagtttagtgtctctgctccaaatttagctttcggtcctgcaccgagtttcgcgccaggacctgggccaagttatgcgccaggtcctgcaccgaatcctcgtagttatgattggttagcacctgcaagttctccaaatgaacctccagctgagacaccggatgaatcgagtcccagcccaagtgaggagacaccgagtgttgttgctcctagtcaaagtgttccgggtcctcctcgtcctcctccacaacgggagaagaaggatgatatcttgatgaaacttatcatcgcggttgcttctaccgctgtcttaacgtttgtttttgttgcattgatcttgtgttgcttcaaacgcaattgcaacaacgcggttggttctagagatggacctagagatgaaggaccacttctacgtttatcaactggtatgattctcttagcattttgcctaaaaggattcatgttttggtaaactcattggacaatgtaactcattgttttcaggatctactgagaactctcccaccgtcgcaagcacgagccggaaaatgtttagtgttgctagttcgaaaaagaggtcgtttctttctagagtatctttaaagagaaatggtcatgagttttcaacggctgaatcgtcatcggcagctggacttcctccgttgaagcttcccccgggaagatcagcacctcctccacctcctgctgctgctccacctccacagccaccacctcctcctcctcctaaaccacaacctcctccaccgcctaaaattgctcgtcctccacctgcaccacctaaaggtgcggctccaaaacgtcaaggaaacacttcctctggagatgcatctgatgttgattctgagactggagctccaaaaacaaaactaaagcctttcttttgggataaaatggctaaccctgatcaaaaaatggtttggcatgagattagcgccggttc

SEQ ID NO: 60193 - DNA, 1384 bp, Arabidopsis thaliana landsberg
gtgtttggtttataaccagagttttacttcctagtttatacacaatattacatgttctaaaaaacaccgactacgcttcacagaaagaaatccattttgcggatgcattttgagaaaaatctttagtcaaagtactactatttagaattattgcattttccaaaagaaataatataatttcatgcaaaattggttatatatgaaaattattgaccgccactaggtctccagtcaggtcacggatctcatcgtgtatgaattatcatgagtcaatttccatccagaaggattatcccttaaaataaatattagttaaatatgtaactctatgcatttatttcgctccgttatattacatgctgtgtaatcacatgtatgatgtaatctatgcatatatgtaactctagatactttagacaattggatgaagactgtcatagtgtgcaaaaatactggttttaatttgttttgtcgtctcgtctcgtctataatcttaagacacgtgttacgttgtatcaaatttacataattaatgggctttaggcttgaacaattaaggcccacaaaagcctgttaatcccatgggaagttgaggacgagaaacagagtccgggaaaagaaaaaagagctctcggagattcaatcactcatggcgaacgaagacgacgacggtgagaaatccagaagtctgcaccaacagattgctagaaaacccaaaacccagatcgtgattggtgtgccatcgtaccaggaagtttcggaaagctcacagacgaagtccacgcttccatctctcttcaagccttcccagagtttctctgacggtatcgctttcgtcaaatcgtccgacgtctactctcctcctcctccttcctccgcagccgcctcttcttctcagccgtcgggcgcttctcaggtgccccacagttcaaggtgttatatatatgtttgacttacctttggaattacaaagtctagattagtttgatgaaattagtgctgcaattccgaacatttctactgatttttaccatttttctgcagtgatggtacgaaagtcgaattagaattgatatctctatgaaaaatgtgattttggttttgtttatttcctgagaaagaatgaggttttacacttgcaccttatgtagcttgatcatgtctctaaagattgagggtgaaaagtcggaaacttaatgtctcttacttcatcttcttgtgccaacagctagattcagctttctgattagagtgatacatacatactatatatccacttatttttgatgggagtatggttctttcgtcgcagcctaacgcatcaaactgatggaggctaatcttcttctactcctagagccactgtctctgtaccatcgaacac

SEQ ID NO: 60194 - DNA, 539 bp, Arabidopsis thaliana landsberg
atttcgttatcccaaaaaaaatgagaatgggcttcaatcaaatgtaaaccgaactatatctgaaagtagtggtcataaaaataattgtagactcatttagtcccataaccccgtttccctttttaataaggtttccttctcctagaagttactaagaatcctattcaaattcttctaaatctcgtaattaaatcatgatgcatgcatatgcaacgatgttttctacatcagcagtagaagcttctatgagatttgagcatctgagattctagagtatgagaagaataaacttcaccggcgagtcatgaagatgacatgtgaggcaaatttcagataaaatggttcaggtaaatggacattcaaagaagaagtgaaaatgggattaattcagccatcgagtgaaaaagcatgtagttaaattccgttgagaatctgatatttgatcttactgcaggagggagtcttctgacaatgaatatctgattctgccggtaaattatggatcgagttaactcacagtgaataacgtgatgacttgg

SEQ ID NO: 60195 - DNA, 265 bp, Arabidopsis thaliana landsberg
tttttgttttccaattcagatgacgaggtttgactgacgatcagggtcatttgaacgttctttcttgaaacagcaccctgacatgtggccttcagtcctggtcacattgaataatatcactcaatttcctaaacatttctagttatgttgttctgaaggccagacagaccgatcatcttctactattttcttggcacttattgatggatgacagttaaattcttgatctgctggtcaagctggttcaactgaatgtgagacctgg

SEQ ID NO: 60196 - DNA, 1005 bp, Arabidopsis thaliana landsberg
taagtttataaagttaatttaaactgttttacagccctacataaatgatgttttctgaagacaaaaattaaaaagaaataaattgaatgtttttaattatgaaggataaagaccagattagaggatttttgtaatactagtaattaaacaggtcatgaatattattcttactttttgtcaaatttcaaataggaaaaataggaaattgctatataaaataaacataaatatatctatataaaaaagaggaaagtaactagggtttttggggttatacgtttcactgtttgtttcatcctcgcttattcctcccttaaagactgtcgccaccaaaacacacacacacacttgcctccttcttcaacctctcttcatcacattgcgtcttctccatccgatccttcaatcctcgttctgtttttgatccaattgaatcgcttccgtgttttgattctgtttatctttccaagtttctaatgatggcggagactgaaggatcagtggccgatgatcgagaattgatcacccgtgaaggtggtattgggactaagtctccgtggaaaacaacgacttctcctgttgagacttttgacgctcctgtaatgggagctcattcgtggcctgcactcgccgacgctgcgcaactaccgcgtcctaagaatcccccggcgcctgcacctgcaccgccgtctaaaatcattccgacatctatcccaatccctactccggttagttaaataaccgacttctttccgttgatttgtcaatgttgtttgattatgctttaattgagtattaattttccgattgtaatggtgcgtggtacttggtagagctgagagttatctgatactggatatcagttgtgttcgtgattggtttaagttggtgatattgaatctttgatcgaatttgatgcatgatgattatgacctttatttatttgtcgtgattttcttttacttggcttgaaagggttatagtgtgattggaaagtcttatgtt

SEQ ID NO: 60197 - DNA, 579 bp, Arabidopsis thaliana landsberg
  unsure (1)..(579): unsure at all n locations
tatgtcatatttaatatgtataagttaaaaatcttgaatcatttattccttttccacaaagctcctctatttatatggtaatatatggatggaataaaaaaagttgatcttctgtcatatatctagattaggtagttgaagatatagacaaaaatcaatgcaaatttcttatatatattaacatttaatgttatccatcttatgggacatttgttgatgttttatcatctatcttaattttgtttgattatatgtcatgtaatggtatttcctataaatttactcgttgattattattgttcaaaaattattcatagtttataatttaaataagtaagtgaaaaaaataataggatggatgagtcaatctaataacacattgttttccatttactagggaatatattagagggacatttaactcataaattttgcttcnttctttttcgacgacatccaacaattagatttgaattttgatgatgacatatactcattcgaaatctcattagattaggtgatgtatcaattttttttctaaattatcaagtttttttattatgcactttaaagaaatga

SEQ ID NO: 60198 - DNA, 1080 bp, Arabidopsis thaliana landsberg
ttaataactacgtcacttgtttgcattcattctcactttccctttggctattgttatctgcagctcccatgctttttcttgttgatggcgtagcatccggaagatgtcactagatggtcaccctggctttgattctgtaagttgagactgcataagaatgacttgtattttttgaccttcttgattgtgatgaggaaagaatccttctttgggatcaagtcaaactcttctcttcccctttcctcgtgggggtttcgttggtcgagttagcatatctgggcatctaagttagctagttgcaattgatgaataataccagtctacatggctgcaatctatgttgacaagggtaggctagttcgacgttttaaggactattatattgaagctagaccttagttgtagaattaaatttaacacctgtatactatgaaaactggtgagcctcgagcatatttgacctgagtctgtcctgtcatatttccttgctgttgcctctgagactgagctgcttcctatctttgcagggtggtgtcttatggttccagaacttgagtgatcttcctggtggctcttttggaccagtcttcccaattttaattgctaccttccattacattaatatacaggttcttgcgaatacttggagcttaaaatatatgttgatgggatcgatattatacttgttactcttacaatttatttgtttttgcagtattgtttccgttgagtattcaaattgcaggtgacagtattatatatgtatgcttctaacttttaaccctttttccagatttcttttgatacatccacaattcgtcaaactactggcttgactgggctgctcatgagagtgagttgaacaagtcttatctgctgccttggttacttaagtcttacagaattttgttgtatgcttggagtactaattcttttctagcatgaagatatattggtattgttagtgatgttactcatgtccatgtttctgttctgtattaatattagaattcatgcgtccataatctgaagattgtacttggttttttgtttgaggtattacaagttttatttggagat

SEQ ID NO: 60199 - DNA, 483 bp, Arabidopsis thaliana landsberg
  unsure (1)..(483): unsure at all n locations
ataggaaccataccaccacatcggttggatgatgtaaagctaagctctttgctctctaagaccaccaccaagtcctctgctgctcgatactcttctcttcaaaactcccatcttcgatatagaggttttcttttagggtttttctttgattgttttgagttttagttgcgaagtagataagagaaagtgattaattgaggtgaacaaagaaatgtctttttatagaagaagaagaagaagagagttgtgtagtagggacaagaagtcgaagtcgcgcgtggaaatgcaccccaacccacccgacactgtctctcaccatccacttgtgttaaatgtcacatatcattttcaatgttttgagatagacgattataattgggtggtgtgtattcgtgttaccgtcatatatgttaggatttgaattgcgaaactgatttataaaacanaattgaaacataagtaaaaactagttatggtgattca

SEQ ID NO: 60200 - DNA, 484 bp, Arabidopsis thaliana landsberg
  unsure (1)..(484): unsure at all n locations
ctccatataataggagtggtgtaatattctcttttccgttaggattctcctgagattacaggttattatggcaacaatatttaatctatttctcacggaaaatctctaaaaagattatatatacagccgaaaaataagagtttatatacaaaacggatatgcgttacgtaataaatgtttccacttcacagcatcattgaaataactcaacaactgctaccaatttccttgatatttatatttcaatttcttcgtacagtttgtttgtttatgtatactttagaagatatattaatgagtaaattagtaaaaatagaattgttgatgatcacgtaaacgtaggtaggtaaggtaggaggaaactaaatgtttttcttttttgtgttaaaaatctaaagtagcttctaataaaggtatcnnnnnnnnnnnnnnnnnnntggccacttttggcttcttgatatttctttcctagtcaatttctcat

SEQ ID NO: 60201 - DNA, 146 bp, Arabidopsis thaliana landsberg
  unsure (1)..(146): unsure at all n locations
atcgacagtgtagtcggtgcccagatgttcggttcgaatgtnagttttgacccaataaagacgcaactttacgggttgggtgtttaaaccgattcccattctttcgcaaggaatcatattcgacagtctttccaaaactaattttc

SEQ ID NO: 60202 - DNA, 1104 bp, Arabidopsis thaliana landsberg
tgttggtgtttgaagaagataacggaagcaatagaaagttttattattccttaaattaggttggactcatcaacctattgttagcttatttattattggtagtgagaaaatatcatatggttagctaagaagtagttagccttcttccagcttaattattctgttaatgttaattaattaatgtataaatttttatttacaggggttaattcggttgctattgatagtgccaaggatttggttatagttaaggggatcattgacgtgaaacaactcactccttatcttaacgagaagcttaaacgcacggtggaagttgttccggccaaaaaggatgacggagcaccagtggcagctgcagcggcggctccagctggcggtgagaagaaggacaaagttgctggtgaaaagaaagagattaaagatgttggagaaaagaaagtcgacggtggtggtgagaagaagaaagaagttgctgttggcggcggtggaggaggagggggagggggaggagacggtggtgctatggatgtgaagaaatcggagtataacggttacggttatcctccacagccgatgtattactacccagaaggacaagtatacggtcaacaacattacatgatgcaaggtcaatcatcgcagtcgtatgtacaagaaccgtattcgaaccaaggatacgtgcaagaatcgtatatgaaccaaggttacggtcaagggtatggacaagaagcaccaccaccaccatatatgaaccaacaaggttacgcagatccttatggtcacatgcgtgcgcctgagttgtttagtgatgagaatccaaatgggtgttctgtgatgtgagtaaaacaaatggggaggaaaatgtaaataactaaaacaatatagggtgagaatgttagctatgacaaaaatggtatactacgaaagcacggaaacttccgagtccggtaatctaaaccggctggattggccggttagaaccggtttttgagaggcgtggattggttggttggtcttatttcttttatataggtactataattttgtatcgtaatcatcttctgttttataactttttgtgctatgtaattggcaggtgct

SEQ ID NO: 60203 - DNA, 1254 bp, Arabidopsis thaliana landsberg
tgacagtagtggatgagatattttgaggtaacttttgatttttaataacaaatttctttaggttgattagacaaaagttcaagctttagatttgatagagaaactacaaaggtgtgaccactaacccacttatatgtttctcataaaataaatttgcaaatctagcctctaggtatatcagtatatgaatctttaaactaattaatgccgctatagatcacatggcaaagcctacattataaaattcccagtattcttgtgaatattatacgacataacttcaaaaaataatggtcaaggaaaaacaaataaattactaaaatcgatacaattagttaattacagtaaaagaaaaatatttaacaaagggtcctaaaaccaaagagtcctaaaaccaaagagtatattctcgtgaagccaacgaatagaaaagcttcgttttttcctgtaaaggacaaaaaaagaaagaagcagagatttcaactcgaaagaatcgctttgactttcttcttgttcctccttggaaccagagttcttctcataagctttgcagactctgcttaattgtttttttggagtgaacgactttgctttttgtgttaaaattatttaaactcttctatttctaaaacaataagtatcgttttaatacttattatttgaatataaaaaattggtttcatgaattatatagaattcagtttataaaatcacaataattatggaaaaggttaaatatttatgcgaaagccatgtcaaaaggaaaagagaatatccaacagaaagcaactgtccctcccaatatctaaataccaattaacaagaaagtatatatagtaaagaaaaataaagactggtctgatctgattgtgaagagcattaattcattggattttatcttctttctctgccactaaagttttgtagttggatggagatcactttggtcatcatgccacttatatatttccatgtgtctatgtttatttttttttattcatttactcctctattattgagattatttttcctcctacgatcgactttcaagttgagaaacaaatcaaaatgatctgaaaagttttaaacagaacaaacgtgtacctttggcaatttggcattagtgaagtgagatatatcaataatgcatacctagtattttttttcactctccatggacttagtttatgtagtcgtggactttaattttggtattaattagaaaataatgtgtaaaaaaatgtaactagtttt

SEQ ID NO: 60204 - DNA, 1165 bp, Arabidopsis thaliana landsberg
gacacaagtttttgttgtgtagatttttggctaggaaatctaaatgcaagttagctttttggcactagttggtaacaatctcataaaacatgaaacagtaaaaaatcagaataactcacaagcatctgaagtgcaccatctttttcaatatttggcccaggtacgcatctgattatagcttcgaacaggggtcccaggtcttctgcaaggtcatccggagaaagccccgcctttcctttgatcccactagcatatatcgcttggaaatcacactacaagccacccagaaatatcattgaggttagtgtcatataaatatactcaaggtatataagtcacgcggcgaaataccaaagaaaggatagacaaacccaaatgaacaatacctgttcatctgttgcatttagttcaataaatagttcaaaagtggaattgacaacaaattcaggacgagcagaaggcctgtcaatcttgtttacgaccacgaccactgcatgtccaaactcaagagccttctttaaaacaaaccttgtctggggcattggtccctcaacagagtccacctaagaaattgaggagagaaaaattaaaatgagaaatacaggactaaacagttaattctaaaacattgagagaaagcaacatattaccacaagaagcactccatcaaccatgttcaagacacgctccacttcacccccaaagtcagaatggccaggagtatctataatatttactttagtgtttttgtaagtgatggaggtatttttgctaagaatagtgattcctctttcacgctcaaggtcatttgagtccatgatcctctcttgcatgacttggttatctcggaaaacctgcaaagtaaggcatgggttaagaaaaactttctcaagttgcccaatgccattatatgcgtttaaggtgttaccttagcttgcctaagcatagaatcaaccaaagtagttttgccatgatcaacatgtgcaacgattgcgatattcctcacgttatccctcctatccaactgcttcttcttcacctctactggcataacataacaagagtgattttatttagagaaccaatcaaccacccaaatacatatatatattgaaaactaacctacgtgtgataattcttagaacttttattgactaactttctt

SEQ ID NO: 60205 - DNA, 573 bp, Arabidopsis thaliana landsberg
  unsure (1)..(573): unsure at all n locations
aaaaatgaccctaaatattaatctttaaattaattatcttttttataatgtactttatccattaagaatctcaaaaagctctccaaacataaagagtttgatccttggggttgtattgtattaagtgaatgatataccaaattttaaagtgttttcttttcgaagcaccaaagtttaacgtttccattttcgtatagataaagatattcgacaatcaatacttaaaaaatgaaacattggtgagtgaacgatgaatgatggtcgtatgatgaatcggtaagttctgtcttggcaagtgatcaaagttggcgcgataacggatcttcctgtcattcaaaattcaagaccactagaccaaagaccatatgggtataaaaggttttatttcaaactatagtttttgtacacgaacccaattcaagttcataaaagaaaagataagaaacatttgtctactttctttagaaatgctgcataagaagnttgaaagctagtctaaaatataactgcttacactgcgaagcatcaatatctgttggacaataaggacacttgaacgaccttgaaccattt

SEQ ID NO: 60206 - DNA, 776 bp, Arabidopsis thaliana landsberg
agaaaaaccaagtaaactctgtgtataataaatatttatattgtacagttgatgtttatgatgaagctgagggagctcatgacgagtgtgaatcacactcgagctcagtaattaagagttccatcatctttttatacattggcatataatgatcgtttatcattgttctcgatagcctaatctttctgtacagttctcttggcgtctcatatatccttacacgctccaccgtcgtcgttcccactaccaccacttcgtcacgctctgtttcagactctgtctcagttactgacactatgtgcattatcttacccggcgggtaaaaccgctggttctctatcaaatccattgaagatgctgataccggactctggttctgtcctgtggaggaatcgcccccgccagtaatgacagtctcttcctctgttatctcctttgctgctgccgcttcttcctccatggcttcactgtctctttcgttctcctgtcgagtcaattctctgtccagttcgtcccatagctcaccttctgtcacgtcttcttctattgaagatgtttcagcgatgacttggtcaattgatatcaacggctcttcctcttcttcttcgtctggttcattgcgatcagattcactgccgctcgaagaactatgatctgttctcttgtgaccttcactgtctagcgctacagtttcagccagtagagcttcagtgcttgttgtttcagccataatagctgatgcttcacgcatgtctgtgactttggagttaagctga

SEQ ID NO: 60207 - DNA, 208 bp, Arabidopsis thaliana landsberg
aataaaaaaaaaccaaagcacccaccccacatcaaacaaacccaacccatatctaataaaaacacatcccatctccaaaaaccctacccatactacacatacaaacctaacactacctcatactaacaaaaaccaaaccacactcctcatacaacacaccccttaacaacatcaaaaaaataacataccaacctctaccaaaacaaaa

SEQ ID NO: 60208 - DNA, 645 bp, Arabidopsis thaliana landsberg
tctagaaatattattttatgtttgtgagttctaaaataaaatctaaaataattcagactggataacacatatcccataaaaactagagaaccgcttgtatacggatagcctactaccctcttcctggacctaactttattattgggtccttttaaaagtcttctatatctattgggccttctaaacaatgttgattgttgtttctagacttattattttgtatttgtgtgaggggtccatgtggaatttcaaaattcgaaaattcaaacagattacaaatatctcaaattaaagggacacaaatcttatcttcattattttagatttgaccgtttagaaaagtaagaaccagaccgtaccgaaccaaaacgaaccagagccagacgactccttaacggcggctaagctatctgtaaaccgaccgaaccacacagccacaggcacacaaatcaaaccttctagaaatcaaagagagacatttattctctaaatttattttcctattttgcccctacgaatatttttcttcttcgtctctctctctcagctcttgaagtctttggtctgttggcgaattttcagcagctttctaattctgaactgaaaatttcgtctttggaactttatattctctcatctgaaact

SEQ ID NO: 60209 - DNA, 1275 bp, Arabidopsis thaliana landsberg
  unsure (1)..(1275): unsure at all n locations
gatgctagaatttctctatccatggcgataatttaaacggcctagccgctatttgattcactgtgtggcgtatatgttttactaagtcaatgtgcctcctaaatgcagaatatacgggaatgatcttttgcccttcgttgcacgcacagtgctaaagctttggccatataaaactcccgaaatataatttagttcgcacaaataatatcatgacatcagtaaagaggacacgagagaaatccgggggacccgagatcgtgttgtatgtgtgtgagagtctatgctaaaatctaaagttatgatgcaacactatgtttttctgtacacaataatgttttgtataaattattttagaattcgttaacttatcggtatatatggaccaacgaaatttcgtgaataaaatgccataacactaacacctactaggcatgattggaaaagtatgttggatgaataaaaaaatgttatgagtgtgacatgccgactatacgtgagctcttactttaacgtacacacttatatatagaacggagaatatgacgttgccttttaacttcttattcatacgcattctcgttactatatatatcgactaatgattttaggtgggttttttagggctaaacggttatattaagtgaatgtataaaatccatgtttatgggtggacaattccaataatgctcatatacactcccgttccatctcctctcaatcatgttttttttatcccatactatacgacaatgcgctctctctctttgagacccgaccctatctagaacacaagcaaaagaaatcattatttgaaacaacacattaattatatgaaaacctaaaaaaaatcaacattcactgaaaaaacatacgaaaagaaatgtctttttcatttttcgcatattttaaaaaatgttaaaccgtgagatagattttttgaaagtcatttaaaaaaagttttatttaccatttttatataacctgtcttaattcccaataacactaatttttcaaaatctacttatttaccatatcaaacatttgctatatccaacatgcatgttttgattattcgttttgacatgataagtcttcagtgtgcaccaccatggttagatatattgcatccgtatatcttctacttacagagacttcttcttttgatctgtaagtattgcggtgcatggactaactcaataacaatagaagatgacttaactaacagtaacaatagataatgcggacttccatttttctagacatggttntattatc

SEQ ID NO: 60210 - DNA, 559 bp, Arabidopsis thaliana landsberg
  unsure (1)..(559): unsure at all n locations
ataaagtgtttcatcttgacggggaaatagtgcatttatcagtggggtaatgggacatcactcctcaagtatccagaaggtaaactagatgtatttctcatacatcaaatgtgcaagtttgagagatagctgccccaatttgtccagaaatttatttacctgtgcctccacaagtaaaatatttatttagccctctgtctttgttttttccatattctaagtttatacccgatgtataaatctacagatactttcttacctttgtttagttacgataaactttattcatcaattattttgtatacttttctaacctatgtaaatttagaggttaatttggactgtttaatatttaaatgttgtgggtggataatatagatatggatctaggggttatttagtgttntaagtaccaacagaggagggcaattcatgcacatactttagctctttattgcaatgatagataatttatatgaagtttacgacttatcttggatataatatgtcagaatgacagangtgaatctctagatataggttcaggagggggttaatt

SEQ ID NO: 60211 - DNA, 1110 bp, Arabidopsis thaliana landsberg
ctgaaagaaaaagaaaaaaagcgtagtcattctacatggtgaacgtaactcgtatatgccatattgccatacataaaagagtccataaatatggttcgactgcaaagaattaggggttatattgttatatacgtgtgtgtgtataacgagacttagagacactatgattagagaaaggaaaattagggatcgagggacatttatataacgaaaaaagtgaatggtgtgaaagggttaatggatagatggtcttgggatttgaacaaaaggctctctctccctcgcgcagtagacaaataggcatgcatgtgaatctgactccaaatcaagtgctacctcttttgccttttctatttttggtacccaatatttgttataattttcattttttctgttttatatatccattctcctcgaattctgtgtctaccttgttatatgttaagtattttggatttttctttggactagggtcaaagagttactgagatgacgtcaccttaagccgaaaggtgatgaggtaaaagaaacgacagccaacggctttgggtggacccgtgcaagcggataaatcagatgaggaacaaatgattagttatgtgatagaaacaggtctgaatcttacgtgtcttacactcgtaatgacacgtgttaaggacggcgccaccaaaccagacaatgggagctggattgctggagaaagacttaagaacatatatatgaatcatattcctctgttttactcttctccttagtttttctttcataatataatgttcatatatacacgattcctgatgttttaatggccaatgttcgttcctttaggtttactataaatctgagtttagtttaatcatttaagaaaaagttgagattgtggtttcgagtggatctagctagactcacattataaaattagatgcggtggtatattgagtgagatttacgtagtaatccataaatgtacatgcgtgtaaatcctttcgacgttgagatgtttatatacttaataagttaatagtaatatctctttgacaaaaaagttaatagtaatatctcaacaactttgagatattacgtgtcttatctatgggttaatgagacata

SEQ ID NO: 60212 - DNA, 478 bp, Arabidopsis thaliana landsberg
gggaagcgaagtgatggggacctgaggctgcacagcacttgggatgtggtactgctgctggtaggcggcgttcatctgctggacgggaggcggaggcaacggcagttgctgtggggcgtgcggcagtggaggctgcttaatcgtctggtgggtggggttccactccggtatgtcatcgtcgtcgtcatcccaggcacggggggcttcttgaacagatgatcttttaccatacttctgaaccagttccctcatttgctctgctgggcgagcagagggtggtggtacatgtggccacgggcccttgtatgcatgcgcagttacatttgcggcatggtgtgacgatttaacaaaattaaattcaggaagatcatcctcatccctagcaacaccgcgtccaaagcctggaggggcgtcatcagttacatcttcctcttcgcgctggctggtaaagcctggtggtgcgccgtatgagttggga

SEQ ID NO: 60213 - DNA, 1432 bp, Arabidopsis thaliana landsberg
ttctgacagtataattgaacagcactgggagaggaaaaggcattgcagaatggtgttcgagtttcacatgcttggaacacattttttgagcaagtagaaacgctgcgagtttccacaaagatgatgattctggtatgcttaactttttatttccttaatattgttctctccaatatattttccttgtttcggcagttaataatgggctgtaagtgtctggacttcttgttattgtagttattttttggttagtcttatgttttttgattttatttttttttttaatttctgaagggtaatgtaaggcttagttttctgtactatacatcttgaaatctttgtgttccctttttgttgattagcagtctctgagaagactcaacacttgagactaaaattgattattttttggtgataggctacttctggcatgccctacaaactcctgcctcctaagatacaacagttctttaagactgacctatcaaaggagtgtcagccaactatgtctgaggctgttccacaattcaatgtacaagttgttgaaagttctgaccaggatatagccattgacctgtctgctactgagttgttaaggcggacaatccaagtatttcttcatttggtgcatcagggatcccatactcactgtggcttaaagaagaaatacaaaggagaggatcttgaccagggttgcagagatgcagctcctcagaataatactgatcacagagcaggggaagaagcagttgttaaatcaaaacgtcttgatgatggttctttaaaagttccaccattacctatcaacatcaatgtgaaaccaaaatcaagcctgcagttagctgtctccacatttggttatcaaatactacagtatcctcaatttgctgaactttgctgggtgacatcaaagcttaaggaagggccaagtgcagatgtttctggtccttggaggggatggccatttaattcgtgtatcactcgcccttgtaattcctcggagcagactattacttcttccgattccaacaatgttaaaggaaaagattccactggaattgtcagaggtcttactgctgttggattatcagcgtatagaggaacctatatatcgctgagggaagtctcatttgaggtacggaaagttctggagctcttagttggacggatcagtgttaaaattaatgctggaaaggacagatgtcgatatattcgaattttgtctcaagttgcttatctggaagatctggttaatagttgggtatacgcgatgcgaaggtatgccttataatatcttgttttatgtatgttcgttttaatacacatacataacttccattttttatgtttgttttaacacaatttcattgtttacagtttcgaatcaaccactcaaacagagtcaacgaatccattaccttgttctgtagtc

SEQ ID NO: 60214 - DNA, 464 bp, Arabidopsis thaliana landsberg
  unsure (1)..(464): unsure at all n locations
agctgtttacaattagatnnnnnnnnnnnnnnnnnnnnnnnnnnnnnnnnnnnnnnnnnnnnnnnnnnnnnnnnnnnnnnnnnnnnnnnnnnnnnnnnnnnnnnnnnnnnnnnnnnnnnnnnnnnnnnnnnnnnnnnnnnnnnnnnnnnnnnnnnnnnnnnnnnnnnnnnnnnnnnnnnnnnnnnnnnnnnnnnnnnnnnnnnnnnnnnnnnnnnnnnnnnnnnnnnnnnnnnnnnnnnnnnnnnnnnnnnnnnnnnnnnnnnnnnnnnnnnnnnnnnnnnnnnnnnnnnnnnnnnnnnnnnnnnnnnnnnnnnnggtcagcgggatacccgtgagttaagcatataaaagcggagaaaaaaactacaggattccttatacggcagcgaccggagagccactgaaatcgacgtttcgggtcgattgatctgagagcgtctaggacgaccggctagtcctgaagg

SEQ ID NO: 60215 - DNA, 335 bp, Arabidopsis thaliana landsberg
  unsure (1)..(335): unsure at all n locations
attctgtgacacttctttttatttaagctctttattttttacttcttttttagntgttaaaggacatagaattataatttctcattttttttgcaggcatattatatagcctttctcattagatgtaggcatgtagctcctttggcatccatattaaaaaagtttttgtcacaaatattggaccttacattttttttccccaaataaaatttggtgtggcgaattttcnatggttacacanggactactacactaacataaactgtgagactcattaaatatcatgctcggataattcatgtattaacattaataacatagagattttatttatt

SEQ ID NO: 60216 - DNA, 479 bp, Arabidopsis thaliana landsberg
ctggtttcggtttattttaggcaatcacgcggagtaaattatcggggccgaaatccgtttaattcggtccgttgcttctcacctcaatctaaatctttaaaaagtgaattaacggtacaaattcatccgacatagttcttatatctagatatttcttccgcactgccctctctattcatttgacatgcttaactttgtctcgtgcatgtacgtatattctcctcatctagaaacactgagtccctggaaacgatcttttttttgtgtgctcagcccaagtgaacagaagagagatagagcaaccaattttcatatctcccacacgtcacttggttccagctcactgctacgcgtcaggctctctccttcccttatcttcatgcgtggacaccttgatcttttcttagcctgatttttccagcctcatcccgtcatggctgtaggccatcggccctatccaattgcgccctggagctcgc

SEQ ID NO: 60217 - DNA, 511 bp, Arabidopsis thaliana landsberg
ttctttcggttcatgtctttatggatgcaaatccaaaccattttgctggatagagtaagtgaaacaaaaaacaaaaacaaatgttcttcatttttaggtcaaaattgggaaattttgactttgagacattagggatgcttttttgggtatctgaatctttgaatggaagaatttagaaagtaggaaactttcagacaaagaacattgtcaatgtcaaagagagaaacagaggtgtcgtttagaaactcattagtattgtttcttttctaaatgttgaatctttaaatgtatttgcttggaatttgttaccttgtcttttgggctattagctgataatagaaatgtgaattatgtgtagggaacatttggtatgacacatcaacaagctttagcacaagtcactgcacaagcagttcaaggcaataatgttcatatgcagcaatcacaacaatctgaatatccttcttctacacaacaacaacaacaacaacaacaagcttcattgactgag

SEQ ID NO: 60218 - DNA, 242 bp, Arabidopsis thaliana landsberg
  unsure (1)..(242): unsure at all n locations
cccttagggacctgcaaatacgacagaataatcttaaccagtccgtgcgtagaganacttttcaactaaaacgtctaaagaactccactaggttttcctataaacgttggagtaactgaccagtccttctcctgaactgaactccaacggttgatcattattgtcaatcttgctatcatagaagacagtcttcttttcattgagaagcatgcccttgtagtgaacgctaaatctgactatct

SEQ ID NO: 60219 - DNA, 1582 bp, Arabidopsis thaliana landsberg
ctaaacagacagttcaccgtcggcgagtccagctggcggtggtgggagcccaccgtgtcaccttaatcatcgctgcgctgccctgtcttttttccattattaatttttagcaagaagaagactgggctttctaaattagttattaatgggctttgggctttcgtggttagggttgtgtaggggcttaatcgtcatttcggagatagaataaaccctaatctccatggatgggctctccgatgtttgtctttttgatttttgaaatttgattttcaaaaataaactaaagcatcattgcctcccattatcgtcacgcacgcagatcaatgattctctcactctgcttctcattcacgcttcttctttgaattcacttttctattcctttctttttctccgtccgagagagtatagagagacccatttcttcgatccatccgctgagaaaaaaaaggtaccgtcgtattgttctctcatgtttctgggtttctttttgtttcgaaatatattcttctcgtttgcagtgtgattttgagggtttccttgtctaaaaaatgcagtttttaattaatggatttacaatagaaatgtagttagattcttcgacaccatcttcgttttcgattggatctacatgttatgctctctctttttccttggaatactatgtcagattgagtaatggttgtccttgtattgaattacagaagaaaaccaagcagtagtagaatggatcattcagcgaaaaccacacagaaccgtgttttgtcagtgaagatgtggccaccgagtaagagtacccgtctcatgcttgttgagcggatgaccaagaacattaccaccccttccatcttctccaggaagtacggtcttttgtctgttgaagaggctgagcaagacgccaagcgcattgaagatttggcctttgctactgccaacaaacacttccagaacgagcctgatggtgatggcacttctgctgttcacgtctatgctaaagaatccagcaagctcatgcttgatgtcatcaaacgtggtccacaggaagaatccgaggttgaggtgagcaaggatggtgatgtcttttttgatatatctggtgggagcagagcttttattgaagaagaggaggcacgcgaccttttgaggcctctggctgacccgcgtaactcctataccaaaatccgttttagcaacaggagttttgggtctgaagcagccaaatttgctgcgagcgttttgtcttccatcaaggatcagctgacggaagtggatctctcggattttgttgcaggaagaccagaggctgaagcgcttgaagtcatgaatatgttttcatctgctttagagggttctaagcttaggtatctgaatctctcggacaatgctttgggagaaaagggaattagggcatttgcttctctcatcaattctcagcatgacttggaggagctctatctgatgaatgatggcatttccgaggatgctgcacgtgcagttcgtgagcttaacccttctactgacaaaatcagggttcttcagtttcataacaacatgacaggagatgaaggagcaactgccg

SEQ ID NO: 60220 - DNA, 545 bp, Arabidopsis thaliana landsberg
acaaaaagtctttctccataatttcaaatctcaatttattttcttgttgtactagtacacaatattaaaattaaataaagaaaaattgagggaaaatcaagaagaaaaaaaattcagacaaaataaccaatcatcttttctcctcagtaggaaacatccatcattgtacccaacaatccctttcaccactagaaccaaaaacctcaatttccttcttcttcttcttcttcttcttcttcttcttttcactcttctttgatctacacacattttacactcaatacatacatgcatacgcatacgcatacatatacataaaatacatacatacacacaccttggaatctctatataacctttttattctcttctctcttttttccctctcccccaatttcctcacttctctctctctctctcttcataatcttttcattgatcatcgaccaaccaaaaacaaaaaaaactcaaaaaatccaaaaaaatcagatctttgaaagcttttcttttgtacactcgaaaatggatccgtcctgtgcaaactc

SEQ ID NO: 60221 - DNA, 1408 bp, Arabidopsis thaliana landsberg
cttaatgcataaaaacaaagattaacacatttgtcactgattaaccacaaacttactaaaacttaagttagattaatataaaaataattatacattgatcttagtttgttgagtacaaagattaatttaaagatctcatgttttacttctttatatcttgcttttcctgtatttctttaactcttagtctgctctatgagtactttggtttttcaacatcaagtaattcattcatgatctccatctgcaaacagttttacaaatccacataaaacattaggaagtaaaaaaatcagcatgttagttaacacatatacaccttaaggccaattattttacacattagtttgctgatctttattccttaatgtatgatatataccttttgaatttaaatgacataagtgatatataacatacacattaaacatgactaaaccatcaaacatctactaaatacgctaatcaaaacagcatgtcaaagtgaaatcatagtaaatgaattacaaaaacacatattaatttgaaaaacaccacgatgagcaaaaaaacaatcgtgtagcataatgcttcttcatgtttcagtctattcccaccattatagaaaaaatgaaatatttgtttttaagaagactatgaaaaagtttccttggagaacaacttcattggcgaatttgattgtgattgtcgaagaatcattttttttcttctagcggtaaagagcacctagtggagttgaggagtttacttttcaatgtattgatatatatcaaaaatctgaaaagaaaagaaaatattatgttgatatagaaatatagcccaattacctctcgtaattttgtcttcaacacttcatgttcctctcacccctaaaaccaattattcctatcgaaactctgaaccattgaaactgtagagaaaaaataagtgccaaaatattcactgtaaaagaaattagggttttgaaaccaaggaagaggagaattatattttgtattcgatcgagtgagaaattgtctgatgtttgtgggagtataaaaggttgagatcgtgggcgaagaagaaggatcgtgcatcatgggtgagcagtttccagaaattgttgtcgataaagttcatgtttaattttttccttgttatcattatttcatttaatttgttttttgttaatttttaaaacatctatctggcaaattgtaattggtcaggtgacttgtgatttataagataaaagatatctttaaaaacaattgctaactttaacaaaagtaagaaaaaaatgtttaatctgtcatatttaaagttttatattaaaaaaataattttactttttaatcattgttaagtttggtaaccatttttgagttagacacatatataagctacaacattcaatttatatttttat

SEQ ID NO: 60222 - DNA, 107 bp, Arabidopsis thaliana landsberg
ttttttactttatgtagatgctaaacccccagtattgtctacaatctacgttacaccttccatttttcgcatgctattcatctttaatctgtaaactgcctttccac

SEQ ID NO: 60223 - DNA, 437 bp, Arabidopsis thaliana landsberg
ccaaactcttaatcttctccgtcaaatcatgaacctccttctccttattgtcaatcttctccctcatctcttcctctgcacggaactttttattcttctcatctaactccttcagctccaaagcaccaagctttgactccaattccttcattctcttctcattctcctccttgacagtccttaaaccagcgacctctttctccaattcctcaattccaccacctttctgtgaaatctcagacctcagcttctccgcctccgccgtagcctcttccccttccgtcctggccgcgatcagttcatgctgcagccgtgcaacttcggtctctaactccgaggctctagaagctatggcttcaagaaccttcctctcctcatcggacttgtcaatctctcgctccatctcacccatcttacgcttgtccttggattcggct

SEQ ID NO: 60224 - DNA, 1751 bp, Arabidopsis thaliana landsberg
cgaagtgttcttatcaatctcctccgccttctcacggacggctctgcatctgaatttcttcgaggaagcttaaattgaagagtggaagaatcggatttgaaggtttctggtgttcaacaaggaagacgaaggagggatttgcagaagcatcatcgccattgttttttttcagccaccaaaaaaaacagaaagcaaatcttttcaccttattatttttatttattgtatgacacacaattttttttttgtttatcaccattttcttaaggtataccattttgttgtattagaggttccagtgtaatattttacatatatacaacttcaatatagtatataaaatccataagtaagaaaaatattattagactattttataaatatgaaaaactacaaccaacaattgttttgtttctcaggcgtttatattttgattcactgaaagttttgtatatctaaaatagtctaaaatttatttattttacttatggattttgtataatttattacagttgtatataagtatataactaagaaatatcactttgcaatctctaatacaacaaacagtaaaacttaagaaaatggtggtattatcaacatttactatatacaatttgttttactatatgtgaaatttgttgtctctactctttcccaaagctttcacccatattataaaggtttcctatccgaaaatattctcttttccataaaatttggtttgtacacgagtttgaataattgttagactagctcaacatgccatagaccaaatcctatatttatttatgtataaataataagtatgtcataactagctttagttcctagctattaatacagtccaaaagaaagaaaataagatagccaagaaaacagtagtggccagaacattcttcatcaatctctggctatcatctttcttgatgttgaacgggttcgggaatctccagctggagtcggttccggcaacgttcttgatcctgaacaaagcgtaacaattcattgtttccgttgattctttttttataccacattttgacctcttactcgatgactcgcttgatattgtttcttgatgagttggattagttggtcgaaacgcttggctagctttcaacgcttcttcgtcgagctttattatatcatcgttcagaatctcggcgtaacaatcatcatcggtatcggcctgatcctgcatcgcaatagaaagagatcaacttcagttacaaactctaaactctaccaatacaagaaaactaaggatgttcagcccaagtgttggtttagtctatagagttataatattagtagccaaaataaaaaccaaacattggatatattggtttgttacgttttaagtttagaatctgctttagtaaaataacaactttagtgaaatctaatgtactatgaatccgttatagtatggtactatggtgttggtttggttttagtttcttaatcggttttgttttcggaactatattgaatttaatgtggtttcgattgagattggagcggataattttaccagtattaaacatcgttaaaagacacattcctcaaaagcaagctgacctcaacaacatttgatgattctgcgatgtcaccatttggtatctgatgctcagattcataatacgatttgtccttattatccgaaccaagcttggacaacgtagccatcgtcttgcacaacaccatcctccattttctgggtcgccctagccccaaaatcggctttt

SEQ ID NO: 60225 - DNA, 1832 bp, Arabidopsis thaliana landsberg
aaatcccttttgacttgcgctttcttttgtctctgtatgatgttttcttctgttttgtgtgcctactacctttttgggaaggtgatgtacattgtttttttatacttaacatatatgggatggttgtattcatctcctttgtttgagtctcattcgtaattgacctgttgcttgtttgtggtttcaggttttgagctacgatggattacacgcacctgatgctttagctgttacatctgctggaattgctgtgtatgtagggtcatctttttccgtttacatatgagtgaagcttttttatcttggcaaagttgacatggctatgtaataaatgaataccgcagagctctttcagaagtaccaaatgcgaaagcgattgcaggagttcgggttggtcttattgggggtgaattcattgtcaatccaaccgtgaaggagatggaagaatcacagctagatttgtttctagctggaacagatactgcaattctaacgatagaggtaaactctaatctttacttgagtttgcaagatttgccctttctctcctgtttttttttttttttctatactcagcccttgctcattgaaaaatctgggattgcagggatacagtaattttcttcctgaggaaatgcttctccaagctgttaaagttggacaggtatttcgatttttaattcggattatttcaatttttaaaagtctgaattagatactaaatgtaaggctttttcatttttaccaggatgctgtacaggctacatgcattgctattgaagttttagcaaagaaatatggaaagcctaaaatgcttgacgctatcagattaccacctccagagctatacaagcatgtgaaagtatgttatacactttgtttctgtttcgttttgccagaatggaattgcattgatattattttgtaattcatgtttaaaatgaattgttttatgtacacaggaacttgctggtgaggaattgacaaaagcgttacaaattaagagtaaaatatcgagaaggaaagccatatcgtccctggaagaaaaggtcttgacaatactgacagagaagggatatgttattgatgaggtagcttttggaaccatagaagcacaaccggatctgttggaggatgaagacgaggatgaggaagttgttcctgaaggtgaggtggaccaaggcgatgttcacattagacccatccctcggaaacctattcctttagtgagtctcttaaccttttcaacatgataacttgaatgtgaccttttatcatattcattttttcttaaatgtaatgctaacaaactagtcatttccctttgctagctattttctgaagtagatgtcaagctagtcttcaaagaagtatcgtcgaagcttctacgtaggcgaattgttgaggtacaacatctgatttcttggtatttataccctagacatgtatgtttaaggatttattttctcactgaagcattttatgaactacactacattaaagaatctaacatgtttgaagccacacatctttcacattgtctcctagtaattctttcctaaattttcaattttgttttcactttttcggaatgagctttattgattccatatgacatctttcttcatccatagggaggtaaaagaagtgatggtcggactctggatgagattcgtccaattaattcaagatgtggactgcttcccagggcacatggaagtactctgttcacacgtggggaaacacaggtaacataggaatgttgtcttctggagaaatcctgcgtggctatttcatataacgataatttctcttatcgccttttatgtatt

SEQ ID NO: 60226 - DNA, 806 bp, Arabidopsis thaliana landsberg
cattttacattattatagaaaatattttgaaattctctttttttaatcataacactttgttttggcatggtgcttttggaatttggatgattatgtctttttatataatatataccagaaaataattcgatatgtcgtattttttctatctatatatcttttgacttctaattgtaaccataggaaaaattagatgacattgaaaatcaggtaatgatgcatagcatttgttcacaacaatattgttaaagttaggaataggagtagtatcttttcccttttcttcaatcatacgagctagtcaaccgttgacgataaattcacggagagcaccggaacctttaagtatgagaaactacttcaataatcttagaaattacttacctaaaatatcttgcactgtgtagaatttggtaagagacatatggtctccaaatacgttctcagctagcgttatgtcattgatgccaaaacgttctttcatctttctaattagaaaacaaagatgaacaaaagtttgtgatacactccctttggtcagacgaaaagagtttgtgacacactccttttgaccaagagtttgtgatacaaagatgaacaagagttcatgatgccgtaaatacaaatattttgaatgtgtaactttttgttaaagttataagtgataaactgttttttttttgaagtgtatatataagaaactctaagcatttggagaagaaaataaacatgtcgcataagacccacgatgtcaattaccatttattaggcctttatcaacagcccacctcacaatgtatctatac

SEQ ID NO: 60227 - DNA, 1531 bp, Arabidopsis thaliana landsberg
gcaccattgattgggtgctgtctacatctgttaatcttcatgtaacatactgggaccttttagtccatacataatttattatgtgagtatgatccatttatcctactatgcgatgaaagctttgttattggctcctcttgaaccaagtaatatcagtagaaaatacataatttagcctggtgtcatagcttttccatcatattgagttctacaattagcacatgaaaacacaagcacaagcatttcccttgtcaaaagacaactcatgaactttcacagaaatcataatgatgcaaatgaagttcagacctgacttaatattctaccatcgagaaagtaaaagactaaactaccattacagaaacatggtaaaaacaaaaagcaaacagactacttagacctaggaaataccatcacagtttattgatcttctcttgagatcttttctgcagaaagcgtactagcttataaactgggactgtgatttacttcttcttccttccaccagctcctttggttttcttatttgctgctcctttagtggtactctctgggatttcctatagcaagtaagaaacagttcataaacaccaaatgatcgatgcatatctagaaacatgtgaaacacaaagtagagtgttatattgatcccaggaatcttaaaaatggaggaacttggttctatgtacgtaagatagtctcctgctcacagctgtatattcaccggatattcagattcttgtgcctatgacacctccagccatgtgaaccgaaaggttggaagcccgggatagagagaacagcctaacgctaacaatgttatcggaggagtaccatccaaaagcatgcagagaggagactttattgctgatggctggtttatactgcctgagcaagcatttggtaccctgtgatccagtatattgggaatcactttggaggcaactaggcatataaggtttccctaaagtgtacatatatttctattcatttgtggacatgtgttaagagtttgtggcaggctatggacaataaattgataataacaagatgtaggtggaaagcatgaaaatgttttaagtaccactaatcgggagttgtcttacaatccatttggaaagccgtagagttaccaattaatttactaatcagtgtttcttttgcaattaaggaattatgtgacgtacacattcatgtacatgtggaaagaaagaagcttaagaactaattggttcaaccatatataaaactgtaagggacaaacctttctcttagcaggtacggatgagttagcaactggcttgaaaaatgactccagcctgtgatatgtttaaaacagaaatgagtggaaggagaggtacaagctaaaatcaccactaatttgttcgaaagataccaacctgccctgcgatgatttattcttcgcagttttaattttctctatcgcctatacaagaatttcagatcatccacaatattattatcagaataaagcattgcacaatatggaaaatatggaacaaagtatgat

SEQ ID NO: 60228 - DNA, 161 bp, Arabidopsis thaliana landsberg
  unsure (1)..(161): unsure at all n locations
tgatgggggcgccttcacaataatgctttcgtacttaatgctgccaatctcaaaatccngtagtccctgaaatgtgaccttgatcgccgcattgctaatggtgaggggcaaccgtgatgacccgatcgatcataatacagttgggtccaccataacccgaa

SEQ ID NO: 60229 - DNA, 608 bp, Arabidopsis thaliana landsberg
  unsure (1)..(608): unsure at all n locations
agtttcgtcttgctaactttgatcttacaaatttttccttaatttgataatgagatgaaagctttgatgtgtattgtctttacttttatgttttatctataaatgtctctgctttatatttatccttttgtcgcatgatacttttatcattcaatagatgaagactaacaaactgaaataccaacgaattgattactaatccacaatgaacgatgtataatttaaacaaaacaaaaggacgaatccatactaaaaggaatacaattgctttaaaatctacaagaaaatttccatttaaaatcaataatattcaaaaaaaaaagaggaacaaaatcaataatactctgttttatgttagtactaaaaaaccaatcttcagagagtttttttcttttgatatttggtcaaccgttggataaaataaattatactccctattttataataattttattcttgtttctaaataaataatgttctgtcattttcaatataaacgaaataaggatgtaaatggttttaaatttttatataattntgcattcaaccaaaaagatatttaatacgaaaatgaggaagtatataaatataagcacctttatatgaaa

SEQ ID NO: 60230 - DNA, 496 bp, Arabidopsis thaliana landsberg
  unsure (1)..(496): unsure at all n locations
taaatagtaatgataaagtgataaataacagtagttctttaatccgtgaaaattaaaattgtacatgtaaaaaaacgaaataaaaagggcgcttggctcccgcatccgggcgccttcttcctccaccatcccccgaacgccttcttcctccaccatcctaccagtatggcggacgagctccacgacgacctcatggatttgatactcgtccgcgtcccgtgcaaggtcgaccgcgccagcatctccctcgtctgcagggcgtggagagacaaggtcgcccgcctcgggggccaggccccgcccccgctcccgtggctcctcctcccctcgcgcttcggcaacgaccccaccttccgcgcccgttgcgttctcagcggctgctccgtccacccncagcacaaccttctcaccaccatcccgcccggcgcgcgcttcgtcggctcctacgacggcgcctggaacttnctctacttcgatgagacgcgcacgcacaggc

SEQ ID NO: 60231 - DNA, 518 bp, Arabidopsis thaliana landsberg
caggcgccgcctacaaagccagcaatgcctcaacgcaaaccgcagaagcagcggccgcacaccccggaccgccagccaatctcttctgctggcttaccgccggtggcgggcggcgccagcttgcttgcgcgaggggctatactgccaatcaccgggtcgcccatactgcccagcagggcgcggaactctgatggtggctcgagcccgatcaggatctcaaccccagagcggcggaagctgaagcgcaactcgtcagctacaaacagcccgttgtcgccgctgctgggcgctgagccatcgccgccgccaggccgggccgcggggtcgcccagccccaacgcgcagcgctccctgcgccttgttgtgccgccaacttgtggtgtgctggtgcactgctccgagggcaagagcaggagtgtgactctggtgctgaactacctgatgcaggtccaggtgggtgcgcacaggaggcagcattctgactgtcgttcgcgttgatggctgtattgctccaatgt

SEQ ID NO: 60232 - DNA, 358 bp, Arabidopsis thaliana landsberg
catgtaaaattcaaggcctcggtaaatattgaaaacaatactgatcacttctgcaaaagtgcaaaggactaaaatacgtatggggcgtgtgagacaaacacatttaacatttatacgattctatgcgactaatttatataatcgcctgttatagcgacgttattccaatttccaagaaaaatcatcccaatgttgattgataccatttacgtaccttacaagttactaaaaaattcattttaaaaatgtattctataattggaccgacgctacaatgtgaaatccgataataaaatactaactagcaacttatgagacacaacagtggaagaaggaccaagtacacatgctcaagccc

SEQ ID NO: 60233 - DNA, 973 bp, Arabidopsis thaliana landsberg
ttacagaaaactaatttcaaagagcatgacaaccctcaaacattattttttttgttatcgagtttgagaaatcgaccagatactctcgaatatagtagtaagctttggtatcgagtataagaaatcgaccagatactctcgaaattagtatgctttggtatcaggtttaagaaatcgaccagatacacgatgttgatctaagaaagtatgcgataaacaaaaacatgttgaaagagagggtcactacatttatttacatgcttccaaaatttatgcaatcaaaaaatatggccctctaatgttttcgcacttaactatgcctaaggaaaaacaagaacaaacagataccgtggcaaattcttatccgttggactaagaatcatagatctcgtcgttggatatcgtcggatttgataataacgtcacacgtacacgaacacttatatattcattcgcacgtgaaaagacgagcggcgcaattttaaaatttaacctaaaaagggcaaaaggagaagaagcagagacgaaacatcataacacaaccacttcccacgtaagggcgccacgcggcgcctcgtagcccagtgttcatgaataaagctttttctttttcaaaccagacagcatcaacaaaattatccctgtatttaatgtatatgtttttccctaatataatacattatttaatcagcaacaaaagaacacttttactattgctaacatggaaatttgtcgtgaagaaaaaaaacaaaacaaaagaaggaaatttgtcttaaaacacaaaagcaattttgtgtgtgtgtgtgtgagataaagagacattgttttagggttaatggtccattaagcacatgcaactaccaaattacgcaattattggtgatagacatatatagtctaagcttcaattaattaatggtccatccatctagcgcaagttgaaagcataggctccttgtaccaatctttgaat

SEQ ID NO: 60234 - DNA, 524 bp, Arabidopsis thaliana landsberg
  unsure (1)..(524): unsure at all n locations
aataactattataatcattgctttcctttgtgggtcattcttcttttataaaaaggtcctttcgaaattttaaattttcaaaaaataataattcttttttaaccctacattaatttagaacaatcatgtcttttcatctttaatcctaccctctcatgaatattttattaaagcaaaaaaaaacatactcaatactttgaatatgtgaaactacgtgtgtaagattttttctagataattagttatgttgcttcaaataagaaacctatggaattggtcaacacatttgacaataaatcatatgcccatgagattaattaagacagattttaataatgaaatggtttttatttaatttcatgtgatcgaagcatgcaataatgattgaatgaaataaaattcaagtgtctctcaccaaacaaataaaaggacaataaaagcagagattaagctgagcacattgacaatnntgatatgacatgcctnttatgtttccctattactcaaattatctttaatgacat

SEQ ID NO: 60235 - DNA, 539 bp, Arabidopsis thaliana landsberg
  unsure (1)..(539): unsure at all n locations
cttcttcttcttgtttttgacatgatctccttcccaatccgaatcatcctccttcttatcggagagcagtaactcatagagtcgcgaattcgtcaaatgggtcggttcattttcatgggtttggtactgggcttcgtcggaaatctccgatagagacgattctggttggagtttggtttcggattcggataagagtttctggctgtacaaagcagctctgctgcgggaagctttgaggagaaagaagatggcggagacgaatgagaagagggcgagagttagtagagataagacgagaaagggatacatgagagggtttagtgtaattttgagttgtgtgaaatgcggagccgccattaacgtgcttcgtacatcacagagaagggagagaaagaaccaaaaaaaaaaagataaagagaaagcgacgacgaanaatgcttttcttaaatatcttacgatatttntaatgaaagttntaactacttctgctcatttttttttcagggattaattctgaatagaaatataactatgagata

SEQ ID NO: 60236 - DNA, 529 bp, Arabidopsis thaliana landsberg
caaaaaaaaataaaaatggggaagtgattctcacaaatcaagtttaaaatctgctaccatatgtcatactgacatgagacagcagaataacgtaattatgttttgtgattttttttttttttttgttaaagttgtatttgttttcaaacaacttgatcaatgtattgactttgcaacattcaaagcaatttgtaatatttcttagcttctcgttctcaaagccacacatttccataaactaagatatccatgtacacaatgacgtactttaatttgtgcattatctatgtattcattcatatgaaaagtttgctgatatggttatcgggataaaagataagactagttacataattcaatttatttagctcatattagacatataattcatcactaatagctgaaacaatcttgcaaataccttttattagagagcccttgaggacttgatgaggtattttctcttaaaataagaaaatcatttatattcatctggacatttgagtttcttactagaacaagttgtcac

SEQ ID NO: 60237 - DNA, 478 bp, Arabidopsis thaliana landsberg
cattattttgtaagtaaatgaattgatatgatggaaaaatattttgaatttctaagtagtagacttctacctaattattcaacttttcattttggtttggtgagaaaaagggaaaacaaattagattgggaggacgaccttcacatgctgatcaattaagtatatagtagaatataaacaaaaagaatatgaagtgtaaccgtaaaactaagatgttcgcatgcatgagaaggatattattcacatttccaatattatttttgtacaaatatatttctattatgatatttcattcgcgttagcaaatttatactactaagtgggtattagtaggttttagttaatatcaaattcatacattagaatgcaactcaataaaatatattcaataaagattgatcaagtacacaattaatgaatcggataaaactttgatgctacgtttaggcgttgacatataaaagaagaagatttgatg

SEQ ID NO: 60238 - DNA, 739 bp, Arabidopsis thaliana landsberg
aggcccgatacgccgccgatgccgatgcgcggacgcacgacccagaagcgcgtgtccttgcgtgtcaggcccgctgagctcttggccagcgacaccgtgacgatcacgtgagagccgtcgtcgctcagcgcgatatcggataccgcgcctaccgtcacgtccttgtacttgaccggtgtcttgccggcttccagcccggtggcggtgcggaacgcgatggtgatctccggcccggccgacagccacgcgtgcagcagcatcgacagcccgatcagggcggccacggccggcaccagccataccagcgatattctccagcggcggcgggtgaccagcggatcgccgggagtggatgcgtgttcgggtgtgtcgctcattgttcctcactgtcccagatcaggcggggatcgaaatgcatggccgagagcatggtgagaatgaccaccatgccgaagaaaaggatgccgatgcgcggctcgatgtcgctcagcaactggaacttgaccagcgccgcgacgaccgccaccaccagcacattgagcatcgaccagtagccgatcagttcgaccagcccgtaaagtctggcgcgttcgtgcatggcccagcggctacggcgttcggcagtcgtcagcagcaggccgagaaccaggaatttggtgcatggtcccgccacgctggcgatgaaaataccagggcgatgccgtccaaatgcttttccgaactcatgatgccggcatga

SEQ ID NO: 60239 - DNA, 918 bp, Arabidopsis thaliana landsberg
gtggatgaaacacataaaatgatggtgggtgtttttcatgctataacaggatattgctaggctgacacttatagctttacgtaatgagaagatcaatggaaaacttctgactttcgctggccctcgtgcatggacaacacaagaagtaagcaaggctatagttaccgctcttttgaatgaaaggaatagagaaatattactaaagcataaccttttactacccttttgtcaattcaggtgataacactatgtgagagacttgctgggcaagatgcaaatgtcacaaccgttccagtttctgtattgagagtcacgcgtcagttaactcggttctttcaatggacaaatgatgtcgcggatagactggccttctcagaggtaagatttggccttcatcaccaaacaatgatgcttttgtagtttgtttcatagtagcttttcagatcagctgaaatcatgcttctaacatatgtgtgacactggtacgtttaggttctctcgagtgacacggtcttctctgctccgatgactgagactaatagtctactaggtgtggatcagaaggatatggtgactctagagaagtacttgcaggattacttcagcaacatattgaagaaactaaaggatctaaaggcacaatccaagcaatcagacatctacttctgagtttctgaccttgtagtgtcttcataagattcaacactatttataaactgcatttgcaaccatactgtgagattcgttgttgctctgttcttcaatggttattgtgcttcttcttgtaattaaagagaattattgtaatgtaaatgtagcttgaggtgcccagagagattctttgttaccttgaggagaaaccaacaggtaaaaaaagataatgagattcccttacaaaaccatctctgtttgactttt

SEQ ID NO: 60240 - DNA, 182 bp, Arabidopsis thaliana landsberg
tccgatgaatagctttaaaatcaaattggctcgggggaacgggtggaagacaagatctactcacatttagacaacttatttgagtcgagtctatttggagggtcaatggtgatgtgaatgctctactatggtgttcgaggccacctcttacggaggaagatccattggaactagactactat

SEQ ID NO: 60241 - DNA, 200 bp, Arabidopsis thaliana landsberg
acatagtttcttttcttcctgtgattgcaaaaggtcttgtacaagttttgctcatcagatctgatccacaaggactaatacctttgcatgatctaaactacatgagaaccgggaacacaaatgatttatctagacaaaactagctcacatagatgaagtctatattacttaggttatctcacgcaaaggggccttttttg

SEQ ID NO: 60242 - DNA, 400 bp, Arabidopsis thaliana landsberg
tcgaactccacacctgctcgctctcggtttataatgaacattatatgatctgcctccacgatcttgtagtacctgaaacatttcaagaaagccccagtaagaccgttaagctttcactgaatttccaagacattctaatccaggtcaaatctatggttatagcgagaagaggactaaccaaatgcctggttggagagggagacagtctgagtcactacgaagaatgagactagaatgttcaaccggaattcgtgggtgagtcatggatattgtgttcagtgctccatcattgtcctgccaatcttcatctctgtaataccaaatttgaacaagagattaatatagtatggtgtagctttaagtggtgatacaaagttcaataagtcttgacctgtagcct

SEQ ID NO: 60243 - DNA, 887 bp, Arabidopsis thaliana landsberg
ttatctctcccacctgccacgctagtaaaaatcccctcatacatgtcaaaagcaaccactgaccagtcagcattatcaaacccaatccccactgtatgtgtcttacatgtatcgtgctgatgattcaggtgactgtgccactcggaaatcatgagaagtgccctgtttcagtttctttcataggaagacacggtggtgaccgctttttactagatacggtgcagacaatgtatccatctttacaagagtactcgagtattattaccgatcccaaatcttctaaaaagactatcaccaaagaagagtcagccgagattgccaaagagaaggtcaattaatatccattgcatgtctcattttcttaatggcattatcatccataatctaatgtggtttttatatctttgtgtcccgtgattatgtaaaccagggtaaccaagcgttcaaagagaaactatggcagaaagctattggtctatactcagaagctataaagctaagtgacaacaatgctacctattacagtaacagagctgctgcatatcttgaacttaatgggtaaatgtttcgcagatccttaaaaatactttttagtgagcaaatctttctatgtggcattgccttgacaaatcatttacatacagctttcttcaagccgaagaagactgtaccaaagccatcaccctcgacaagaaggtaactttcattaaaacacagaaacaggtttctcttgaaaaaaaaccactctttactttgtaagaacactcaacacaaagatcgtttttgatttctttcagaaccctaaagcctatttacgaagaggaaccgcaaaaaaaataataggcgattgcaagggagccatagaaggtaagcttagagatcagaat

SEQ ID NO: 60244 - DNA, 792 bp, Arabidopsis thaliana landsberg
cggaagagtttgtgtatataagtcttcatatccacattgttgctagttttcagctaaatttttcattttggattgacttgtgattgctcttcgcttagatcttgattcgtcttctaatcgcattgactctacaggtcaaagttggaaactttaccttgcttagttctctaatcttctcatcctcaatgctgaatgaagaattgctagatttaaatgagatggttctagttccaacacaaactatctgaagtggtccttactttgattgcattatctccatgggactgggcattgacccatctgtcgctattacggcactgattgtggtcattctggtggttccaatggattgccaaagacctcaactggtgaacatcggtgctgtttttgcttttgattcggttatcggaagagctgcaaaagtagctctagaggcagctgtttccgatgtgaacaatgataaaagctttctcaaagaaacggagctacggctattaatggaggattctgcctgcaatgtctttcgtgggtcctttggaggtaccgtgactgttcttctagttcttttgtgtttcaaacacttgtgacactcatccatggctgatacagtatatcaaacatattatagaaagcggtcaatgcacatcagtagcaacaatatttcattttgtgatagttggaaatgattggcacatcgatttacgttttaatccgttttttattggtacatattttgggttccgaatgctaataatgcatagacaatatagaccgcataccctaaacaggctg

SEQ ID NO: 60245 - DNA, 1397 bp, Arabidopsis thaliana landsberg
aaacaaatacgaatcatgagtaaaagtattgtgtttttttctaccgttcttgtttttctcttctctttttcatttgcaactcccggaatttttgtgtgttttactaccaaaattataaaacaaatacaaacaacaaacttatcttatacattttcatatcaacctacagcgaaatgttataaaatcattttcttttatttcatgtttgatagcatcagcatgttacagaggtactcaagaaggagtgatgatcgctgcagcgagtgatacattatgggacaatggtcgagtttgtggcaaaatgttcaccgtgaaatgcagcggacctcgtaacgccgtgcctcacccttgcacggggaaatccgtgaaggtcaagatcgttgaccattgtcccagtggctgtgcttctacgctcgactttctcgagaagcttttgctcagatcgctaatcctgtcgctgggattattaacattgattattttccgtaattatttctcccaatctttatcacttaatattctttgttactttagaaaagcaggattttaattatgagtttgtttatttggatttcagggcctaaacgtcaatgaagctatcaaggaaaataatgctcaagtctagaaagtcctaatggaaaatgtacacacatcatgacttttgtatagtatttcaaaatatgaataaaatcgtcgagagcttacacagaataagataaccaatcaaagtaaactaccatgataagaaatacttactgatttctattattttgattctcattttgaaaacaaaatataataaccatacttggtttttacatgtaacataatctgaaaatgacagacatatgtgcaattgaaaattggtacaaccattttcttcacatcatcgaattcggatatgcagaaaaagtgcttgtgacaagttatttgatggtttaattccggtgacaatttatgtacactcacatataccaaataatggtttgcaggtaagagttttgccgaaattagcctgctctaacttggagattgagtgaacactctaaatcattaagtatgaaaacgtgagactgcgactctggttatttcaaaatgtataaatcgaaggtttgatctcaacaaatgatagaaatatcatcgcaccttgatgaattcttcctatatataatatggttcagacttcagagccttgtaaaaactaaaaaagacaatatggtcactactatatcccaaactactaagcacaattcaacaaaaaccttgaacccctactaatttcatggctactttgatgaatccaaaaattcatcggctgccaagaaaaaccaaccctgaaagaaaccgaactaactcgagccaaattactcgatatttatatagtaagaggaaaaatg

SEQ ID NO: 60246 - DNA, 972 bp, Arabidopsis thaliana landsberg
  unsure (1)..(972): unsure at all n locations
ctttcctcctggttaatccaaggggcctccccggatagcaatgtggaattcttacccttttttttttggtatagtttcctaatccttggttgagccaccctgtgccacgagcaaccaatggaggtgcacctctcaggtgtactcgccctaaactagacagtcggtttgtccttgatgtgaatgtaattgatggaaccgttgttgctccatccgccccatttactaagatttggaaaatgaggaacagtggtcagctggtgtggccacagggcacacagattgtctggatcggtggggacaggttctgcaactccttgtcagttgatttacaggttagaaacaatttccttagttttcactcttttagctcgattcttaccactaacagagcaattatgttgtttgaatttacactcgatggcttgagttaggttgttttcttcacgaagtgactatagctgcttgattatataatactaactgtttttttctctctttacacatggcagattccaaaggagggtgcccctatctatagtgaacttgacgtcaaagttgattttgttgcnnnnnnnnnnnnnnnnnnnnncatttcttattggaggatggctacctctgacggtgctaagtttgggcaacgtgtttgggtgttgatacatgtacttactagatttgtgcagcttctgtcctttaattctttgtctctttctatcatatgtgtttgatacattttttctttttgcatggttaggttgatgcatctctgaagaattctgttgtgaatgagtttcatggactgaaccttaatgcctccccctcccttgatgagaattttccaagcgaatttctagggattatgaattatgagtcagctcaacctggcagctccagtgtcaatcctgggaccgctaaaggtactgatctagaaggcgaagttggtgaaacacaggccgtggaaaaagaaaccttttg

SEQ ID NO: 60247 - DNA, 714 bp, Arabidopsis thaliana landsberg
atttcattaataaagctgttaaaagcatcttcgtacctacgaatcagaaatgtccagaactatgagtggacatgccttggaataaagtgagccaaaggacgatcacattgataagcaaagagtataagaaaacgggactcgggattaatgacatacatagtcacaatatagattctcttttattcttgccaatagtttttagttcaacacttcattcaaacatataacgacaataatcacaacagaattcaacccagtcaagtaatgtccttacactatctctatgattgcaccaggaggagagtagggcagatgccaaggttccctgaaattgtttggacccatgaagtacatacggtaagcatgggtttgcgtgtcctcagattttgcgcctcgaacctggaatgacaagaaacaggcatgtgtttggtcgacatgaaaatatgtgtacatatatatgtcttaaagagaaaagataagacttgaaagaagatgatttacgcaacacgatacctcagagagtgacagaagatggggtaaacaatgtgcactctggtgttcaatggaattagcaccatagaaactcaatctgagcaatttgatacttaatgtgcttagcaacagacccaaaactaccaccacacaagatagaagaaaaaaaaagggcaatggccctccaaatgtatagacaagctcttccagagatgtatagca

SEQ ID NO: 60248 - DNA, 366 bp, Arabidopsis thaliana landsberg
cgagaaacaaacaagaataaagggggaacctggattatcttaagaggacataccacggctataccgcaatgtgcatctgcaagcacatgatgaccgtacggatggcattaaacagccaaaccgagacactgacacacacacattgactgtagataactatgaaagtggacatatgtccaaacagaggacgctctgtgactgacaaatacacaaatatgatacctacctatttcatgttgctatgaccatcacaaaatagaagctgcactcacatcaggactgacggacagagtggcaccaccctaacgcttctgagggagcatcctgaatctgataacctgcaactgcgaattaataatgaatgca

SEQ ID NO: 60249 - DNA, 1034 bp, Arabidopsis thaliana landsberg
  unsure (1)..(1034): unsure at all n locations
gttactcacgtctgcctaacgcacgaaccatgcaaatatatacttgtcttctccattacattaaattattatgtgctaaactaaattataactatacaacgtcaaattgaaaccataatacattacactaatataaatattaacctattatgagttgcggttcatcgtgtaggctacatggggataagccaatctccaaccatgtgataattggtctaatttaataaacggttgacacatagaattaaaataaaattcccaatggaggtgttactatagaccgaccaaagattacttcttaaaaatataaaggtcaagggatgatatatacattgaacattcacccacatctcatcttcaatcaaagatattttcatataattgaatacatatatggggttcaacaaattataattctaaatttacattagatgtctaaattcgtaaaagtgaaaagaaaatatataaattgatcattggtcgaatgtgcaatcatcaataactaaacatatgtataatttcccattggagctaataatttatttgtgggtgtggagggatccaataatcaaaatgaaaaattctgatttaaaactatagtctatattttaagccaacaagaaaatgataaagtatagtagccaaatagacaaataggtgttaaagaggtatttgtatgatttctcatagaaccaaaaacacttgttgaagccaaggaaaagtcacttcaattcatcgtctggatcgtacgatcagtctaccttcctttcatcggacggtccacatttactccattttccggtcgccggcttaaagaacgatttcgattcaaccggagggaatttagtttttttattaacgttcaaattttttgctttaaacgtacgtttcaaattcaagaagaagctttaaaggtatgatattaaataaagaccgttgctttgattntaactntaacgttcttttcctttcaatttaaagtttcagactttctcttagttcttgatncgtacttactttnttttttgattccg

SEQ ID NO: 60250 - DNA, 905 bp, Arabidopsis thaliana landsberg
agtactttttggtgtttgagcacattgaaatattcaagaacatcgacaataacatataatctcataatttctcaagaaaatttatttatttttgtaggataaattgcagaggaaagcatgggagctgaagatggaggccaaaaacagcgaagaactaatgatttctccaattcagaatctgatgaaactcccattactaaggtttctgctctattgctttcggaaaacaaaacaatatcaactaaaagagaactaaaatgattaaagggttagcatcaaaactctattaaattttgtttccaatcattttctatggttcgggtctgtcaaggaaagcgatgacatttatttgatttctaagtttgtgcacacattttaggttcatagctgcatgggcaagaaggcaatgtctcatcaatgcaaaactactttattattgtttcgtcgactataagaaatgccttacttcttatgcgtagctagggattctcgatcaaccctttcacggtatcgtgatgggcaagaatacgaaactgtgtatggctttaatctttttcgccgtcaatcttttaatgtaatgaatggtatgcatttatatcttttgatgtaacattattctaactttcatttaatttttcaacccatataattactaattttttgctacctagttatatgtatgcattgtctatactccttagttcactttctattaactaaaatttgttgaatatgttagacatacttatattaagtttatttttaaaatataagtatatggaacatatctcaacaagtaaataaaggtgtatatgttgaaacttattaatattgtataatatcatagtccatagtacactaaaataatgacccatagattaagtaaatgcgtaaaatgcgtgtac

SEQ ID NO: 60251 - DNA, 427 bp, Arabidopsis thaliana landsberg
ttcgggttcaactgaaacaatcttccaaaggtgacatttcgattgatgagtatatacagcatctcacagcaacgttcaatcagttagctctcctaggtaaaccgattgaccatgaagaagagatcgagttcctcctagcagacctacatgaagactacaaaaccatggtggatcaagttgaaggtcgtgaaaatacaccattggttattgaagttcatgaaaagcttctcaataaagaagcaaaattgatggcactctccctttcggcatcaagcgttgtacctgcctgatcaaacattgccaactctcgccaaagatcatatcaaggcaagcaatacacacgctcaaatcagtcatggaacaacaacaacaaatcaaaataccaccactcgaaacaagagactgatacgaccaggggataccaggg

SEQ ID NO: 60252 - DNA, 1273 bp, Arabidopsis thaliana landsberg
tatcactgcatgttgtggaactgtccattaaagttaggttacctgaaaactgaaagatgaccacaagacagaacattcagcaaatttgaaaagcttttttcatgagaacttaaaagtgaccgcaaaaccaaaaagctgtttacattaccttatcatctctaaatcttcaaatgtacaaagcttttaccacagcaacgctatcacacacaaacctgtatatacgaccaaaatgaccacacaaaatacaagatttagtaacttttggggtttcataacaaaggcttttttaagaaacttgacatgtctttaaagcagaacagaacataaaaagtcaaaaagaaagtcatgtgttacccatcttgtagtttaatgatataaagaaaaaggagggagccactgattttgacaagtaccgaaattttcaaactgccttcgtctataggacatctaactatttatttattaaagtgcctaccgacaaaaaaacttgtagcatactcactcaatatttgaccacatcacgcgttttaacaaatcaaccaattctaaacatgtccaattagttcctattttcaattcaagtctgtttaacttcttatacaatgagttttgcctaaaccaatgctcaaaggtacgaaagaacagagcaggattcaataaataaaacaaaaacatcattttgatgaggcaaacaaaataaaacgacagagagatctagaaatctcaatgataaaacctaaaaacagatcagaaacttaaaaatgtgaaacagaacactaaatgatttgagagaaaacgtacctgattcaaaagagctgtgtaaaacacaaaacagagctagagaatcacgagaaaaaaatgcagattttctcggaatctcagggatctcgaaaggagaaatcactaagaggaagatcagggattttttttttctttattcgaagaaaaccctaaaaattgcaaagagctcactaaaaatccggaatttggaaagaggaggagaagagagaaaatgaaggagatgggctttcgtatttatagagtccgattctctcaaaaatacattacaaaataaagcacaattaaaattaaattgtccgtttctcaaggagacacagagagagacgttggttaacaaggatatcaggctgtttttattgaatcccgaaaatacctctcatgtttgatttatttaccaactttgccatcagacgaaccagaccaccttataaactttcttattattgaatttaacgaggtcgtcattagtcat

SEQ ID NO: 60253 - DNA, 390 bp, Arabidopsis thaliana landsberg
ttttatcttacgaattcagatcaagtgggctcaggggcgtgttgaattacaattcatggacaaacctatggactgagaggcaacaaatggctatcaagaactatgaacgcgtccaaaacggcgtagatacataagctcacggcccgtgacgagcggtaaaaataaaacctatcaaattatatgctataaatccagacggggctctatagataccaaaccacttctattaaagaaccagtccagcgctctcttgtgcccaccctaccatttacagtatgctctctggacctctttcttgggactaaaagatctccgtctcttactaaaatcaagaggaatgatgaagagagcgcaaaccctctttgccggatggtcgtgctcaccttacca

SEQ ID NO: 60254 - DNA, 420 bp, Arabidopsis thaliana landsberg
agcaacggcacacaagaacagagagggaaacgcgtgcgcgcacacacaaaaaaaattgaaaaagagaaataaagccctggtgccagcttgccaggtcagccacgaggcgccggcgtccggcgacgtgacgagccagaacagaaaccgaacgccagcgccacgcacgcagcagccactgaaatctcaaatacaaaaaatcaactcacggcccccgaaaactcccgcgctctccgcaggcgggtggacgccgcggcgcgtttgcggcctcgcgccaacactcccaatttttttaaaaagaaaaattttttccccaatctttccctcgctccctccccctccacggagtgtcgctgccaaaactcgaacgaatttccaaatcgaggcctgcgcgatcgaaaccgggaacccaaagcacccgag

SEQ ID NO: 60255 - DNA, 572 bp, Arabidopsis thaliana landsberg
  unsure (1)..(572): unsure at all n locations
tattcgtcggacaaattgtctatatccatcgatatactaattatcattttaaattatactatgcacatttgtcctcgtgttctacataaatttccttaggaaaaacagttttatacttcggtgggtgatctaaatatttaaagagtcatgtttaacgcaacgtagctcattgaacctaacatatccaagtcttttgatttagagatggtttatcacctttcaaatcctaaatggaattttaaatataatatttctaggtattttatatgaatcgctggaaaaaatacaccacattaaacaaaacaccaccgtatacaatatacataaactataggtctttgatctttggagaaagtgaccgtacgtacgtatacgagtagatcaatgtgattcacatgcaagcacgcaaagagatggaatcgttggtagtggtcgtgactcgtgtgaagaagtcaatcacgtggaccacatgcttcttccgactaccttctacggtttttcgtaaatcgtcgtaacacttcaaccaaacaanttttttatatatcatttctttttggaggcatccgtcaata

SEQ ID NO: 60256 - DNA, 549 bp, Arabidopsis thaliana landsberg
aaagcgagagaaaccccatctctctctgtcctttttactcctacctgccgccacacgagagggtcatgggggtgtatatggggaacctttgaacttgcacctgcctacgataatttgcttatggattcggtcttactgaaccgtatagacgcgagagatgggtaaccctacacgttaatctaacacgtagctccataacttctgagggtgtagatgtgccaaacctatttactccataagcaacacctctatctgcatagaaacaggtcctgcctctactaaagacaagggaccaacaaagctcctagagaatttaccacttacgtgatgacacctcaaacaacaatcaaatactcatactaaaatttcaaattctcaaactaaaatttaaatttcctttcccgtcgggtttaacaatgacccgacataagaacgagtcgggcgctccggaaccaaactggcacgtggagaccttggaggcacttgttttagctgatgtccactacaatcgtagtagatcacgcctgagtaattcaacggctcacattt

SEQ ID NO: 60257 - DNA, 1294 bp, Arabidopsis thaliana landsberg
tagatcatttagagtcgcattcatttctgaccatatcagaagtatattatgttctgaagtaagagcctttatagtgggtgaagcagaaagtatatattgttgtacttaatttctaaaataatggagatcgaaaatttgtgtctttcggcgatcttcttaaagttcagacgctcatgtgcacttaattatgcgcgcaaccttcctcttatctctatggcttgcctattctatgtacttctactctttacatacctaggattatatatatgtttcactacattatttggtcagtagtggtataattttatcacgttccttttactttcttagcatagattatcacgtttgacaacttgtatatttctctttgaagcgtcatgtaggagaatgtttacacttcattctctgaaaacgttagtgcttttattgatgtcgatggtcaaattgttttttttggttattagttgctattggaccaaaacttgtaaggtctattttaataaaatatatacattatcaatataagaaagaaaaaaaaaactactcttttttagtaagtaccaagaaaatcgataaaacctaattaggtccatctatgtcaacatggatccctggttgtacatatattatatcaattgaatttgacccatcaagtgtagtatacatggcctgattaaatgggcttaacggatggataaactcgacccaaaaagttcaaagaagtctaaacatattgctgttcacgtgaaaaagaccacgacttaagaatatgacatttggtaaatgttacttgaagtcttgaagactactctttaatctttatcatcatcatattcgacaaataagcgtgtgcctgatttggtgtgatattgtatgtaccgtacgactctttcaaagtgtctccaacaagtatcattggatatactacgcggcaattaaacaaaataatgaaaaagctttaatttggttgaaatttttgccaaatgacgtaacctttctttattttacggcatagcaaaactataagtcgcaattcgtacgtactatttcgattgtataaagattcaatgattctacaatttttctaaatcaaaaagttgttgaaagattcaatgattctaccattattctaaatcaaaagttggttgtcgaacctccgtccgagtaaagattgagtttaatattattagttttatctaaatttctttttgtgaatttccaatagtcttcaccttaatttggacatctctctgatcatgctgactattaaatcctttaacattctaccataaaa

SEQ ID NO: 60258 - DNA, 447 bp, Arabidopsis thaliana landsberg
tacctgattcacaggcttatcatcgatattgggttcatcatgtgaggataacaagtgcactggcttcagaaaccttcgtttccataggatgagctggcaatagaaccattggtggtacttcttcgggctccattgacaagcgactgctggagctaggacttgcattgttataaacagtcattgccaaccctcgttcaccatttctgcgtacggacctctttaacggaggtaattcagtcacaccatcatcttcatcttcctcttcaggctgtgtctgtttcaccgaaaacaaaataaacacaggctatataatatgaccaagaaacccgaaaaacagatactaaacataccttgagatcctcgttgttataggaagatgaagatgaagatgaagatgaagctcttccacgtctactgcgcaacctccttttcaatggaaattcatct

SEQ ID NO: 60259 - DNA, 103 bp, Arabidopsis thaliana landsberg
caaaagccacccgggggacctgtggaaatcataactggagcttactatttattctccaacatatacccacaaacgaaccaatcttgccctatctcaaagaaac

SEQ ID NO: 60260 - DNA, 941 bp, Arabidopsis thaliana landsberg
ggaacagaataacgtaatttctatatactaattctaatttttgattgatttctgatagtaatagataaacagattgtaaccatcagattaacgaaaattttggtttaaacaaacatttttgcactctttttttgccgtatcacctgtatacgctctcaacccatcattcaaacaaacatcttcttagtttccttcatttttgattcttagtttcttcgtttgatgctttttttttcctcttggagtactctgaggattttgtaggtaaatttcaaaggaattttgtttatgtattcttaaatcttttcttattagggttatcaatttgttctttttgatatatagaagaatctgcagaaagataaacctacaattttctgagatgaattcttgtttctctctgaacaatattttggagtcttgactatatacacaattttttttatctatcattttgttttcctcaatatttactgccaccactttcttattttctgggaaaagtgagttttcaaaacctatcattttgttcttctgtactcccatttttcttatttaaaaaagaaatcataaacctaaaaagagatctatgcaactcacaatgtcaagctccaagatgaaaagcctcttgaaagggctccgatacatttctcaagtatttggtaagttcaccctatagatctcttgtttaatttcttctgatttttgttcgcataagagtttatacatatgataaatccttgctttccttatataaaaactcgaacttcatgatcagttttgaattactatgatgcagatcacgtagaaaatttgcatgcatgcattgcaagtacgtttatatggattgaggatgaatctaaatgattgattatactttcttgtttctttctttcatgatgatagacagtgaaaaagaagagaaaatactaatcggaaat

SEQ ID NO: 60261 - DNA, 908 bp, Arabidopsis thaliana landsberg
agaacgttattaaaatgcataatcgtgttactgtagatttgatcacatatataaataatgcatcaaccatgagaacttttctcattgctcaaagtgcatcgtcggatgtattgggggcaatcttatgttgtttcgaatgccttagaatggttataaaacctgtctggctatgagatatccttagcctttgttgaagatggctctatggatctttcttcttttcactactaattagtcttcttttttgtggttagtgtaattatttgtaacactaacattctatgtttttgctaattgtgcaagttttttttttgttgtaacaacttttaataaataaaaactttttcttcatttttatagtttagcgcctaaaacgtgaatgtgtaggtccatgtccaggtttgaaaaaatggccttccgattcttttatttattttcgttatgaattctaagacctacaaaagaatgttaccaataatttcaattgaaaaaaaaaaaaaatcatcactttcgtttataccacagaaatatgctttcattgtagcacacaacccaataataaatctacatatcaaatttttaaaaagaaaccaaaatttgaacttgttttttaaagttaaaccttcacatcttcttcaatcaatcaccatctttaactttactttattacaagaacataaacttatattattgtttaaagagtaccaaagacaaagaccaaagtcacatttttcctactttcatagttttgtcttaacctctctcactcgaccgttcctctcaaaattttcaaaaactcaattttttcgaatctctcaaaaaaaggaattttccggcgttcaaatcgataaaaaaatcaaaactccggtgataatgggttgcgtctcatctaacctcctaaaccccga

SEQ ID NO: 60262 - DNA, 325 bp, Arabidopsis thaliana landsberg
tgaccacagcgatggggaggggggcaatacttcataagccgcttatgatagtccacagacaacattgatataaacgtgtcatacaattcgttgactctcaaacgtgaaggactaacgttttcatgtgctgaaagatggaccacactacatcacctccagcagattggtaccgggctaagctacacaaggaggaaagacatccttgacgggcgcactcgcatgtatcagctcggggtacgctagtatttgcagattagtcttgcagggattcatcagcagacatgattggtgggaatcagttaccactcacgccctagttaatcag

SEQ ID NO: 60263 - DNA, 112 bp, Arabidopsis thaliana landsberg
actcatggggggatgcgatttttttcggcgaattactatataaagatcaagaagagttgtaaactataggactgattgttcgagtcggaagatttaggttcctatcctttct

SEQ ID NO: 60264 - DNA, 1716 bp, Arabidopsis thaliana landsberg
atatccaaaagtaaccaaaaacccaaaaataactgaaatacctgaaaaataactttataattataattgaagaataaagctataaagctattataattgtttattgttatggaaacgttttatcctttgtgcaaagtgtataaaacgtacttataacataattgaccataatttaattagcccatcaatgcaatgttgtaaataattctgaaaataatttcgtcattaatgctatcaaatgaatatgtccattaacacaaggcttaaagttttagtaagataatcaaacttatagtttaaactctagaagttggtgttaatatcatttttctacatgaataaaatattaaatatttaagcaaaagactataaatatataaacaaaatcatatttgatcaaaagtgcaccaaataacagtttttccgaattcttatgtagtttatcaaacttgaataaataaaacaaaatcatataagagaaataaatccattcaatgtactatatagtatttagttacatacttagtttatttttaaatcccgcaacgacataaatatctgacatgcacgacataaatggaaacgtgatgtctaccaaaaaaaatggaaacgtgatggctaagttcagtattataagtttgtaagatcaaacaatgaaggattttgagaaactattgtattttcacaaggcaaaacagagagtattggataaaagattaacgacatttgtatatgttcttttcaaccccgcttttatggtaatgaggaaaaccgactctttcattattcactttttctcaacgtagagaaatagaatttacaaatataatatgcaaacatatatagaggttttagatttcaaaatttatggtactttattgttttgaggttataactaaaattaagtagtaaatcagtataaattgtgtattggtgaaatgtgaacgttattggaagaagaaaattgaaccgaatatgagtagattgttttaaaaaaatatgtgaacgttgcgttaattagaaaatggacggaactcggaatacttaattttagattattttacataacaatttatagaaattgttttgaaaactgtagtgagagttttcaaaattgctacaatgaccatttattttttacttcgttacttaatttgaaatacaaggaaaaaaaaacaaaaacaaagtgatgttgatgcatgtaaacaaacaggcttaagcgatgttgtcatagaaataaacaaaaaatgataaaaattgacttaaatctaacctttttcatttttgtatatattgacttttttttgtgtatatattgacttctttgtcgtagaacaacaacaacttatttctggtcacattgtgaactctattgatggagtaagtagaaaagtacctaatagtaagctacgctcaatgtctcatgtattttggtttttgactgatccccgtgactcaagagatattcgtgcttagtcaggtaaaactcatgatagcaggcaaaaatccatttgatatcaaaatcaaaaatatgtgaacactagtttgaaattaggtatataatagttaggatcatttaccttctcatctctaagaagacatgtaaggcttagtaagatgttgtttctcctaacaacaatcttattcttaccattggtttctttctcgttggagagtgtatctaggctagtgtagggagtatcacggttaaaccga

SEQ ID NO: 60265 - DNA, 119 bp, Arabidopsis thaliana landsberg
taaaagccactggggggtggggtggagctctaaactggagctacctattatatatcccaccaataccaacaaatgtactgaaatggtcccatcagtacggaactactaagcttacccca

SEQ ID NO: 60266 - DNA, 1450 bp, Arabidopsis thaliana landsberg
  unsure (1)..(1450): unsure at all n locations
ataatgacgatcaaatcaatcatgtatgcggcagttccacctccactttatataagcatcgcatctttcttccaatcttattttggcaaacttggttcgtagaagtttttttatttattatgaaatgtcgagattttgtgcggaagacaaaatcatggcttgattgtttactttggagaaaaacttggtaatcgtggaaataaaatcagagtttctagagaaccaaggagataaagacatccatttgtctctttcaaaagactttgttgttcatgatcagttatatgcattgccatttttgatgtgggacattttatcatacatattttatttatgagtgattctaatattggtgaaaactgatagaatgaggatattttttaaattttttgttttgggtatcttaattaaatttaagaagagttgaaagttaattataaatcattcaatcgtatcgtgtgtatccattaaccatcttgccattctaaattgtctagcaatgaccatgcaaagtatcacgtcacatttactttatccacactgcaccagtttttttttaatcaaaaaatgaaattatttacaagaaatctattgaaataaaactcataaattcataaatcaatccaccaattgcctcattaagacttaaaagatacctaaataaaagatgcattgggaaggtcatcattaactcccagactctctccatatcgatccacgaacattaacaccataaaacattaaaactacactgcaacgtttgggctgaggatcttcccttaaaacgacaccgtttaaaacttcaaaattctcgtatactaaattctaagtcttaaccatcaccaatgctacaagccataagcaacagaaatggtgagaaaatagctaattcaaatatgtggtttcagagtataacaataacaagatgtaacaatcttctacatcaaatcttgcgaatcgaaaagataaaaaataaaaaaaatcttgcgaatcgtaccaagactttgtttagtactcttcaacattcatatcttagtttgtcaaaaactgactaataagttttcatgttttgggcacttgccactaccttttgtttcttttcggaagtagcccacaaacttacaaggtttgcagcaaagacctctctcctactcattatgaccgtactatgatcagtcccagcgataacctcgacttccaccgcagggaactttcctttcatgttcgatagacaatcaataggaacaacaacatctttatccccttgcatcacattgattntaacaccggattttatcaaagtttcaaggtgtttatccgtgaatttcgctccttcgcatattacattgtgcatgctatgccatcctgattgatgtgtgtgctttgaaaatccattatcgctgtcggtagttcctgaacatagaggaaaccagttttttttttttttttt

SEQ ID NO: 60267 - DNA, 345 bp, Arabidopsis thaliana landsberg
tgcaactcttcttggaaggtgccgaacatccggtcccagatgatcaggatcccgtttgtagttcttgtccaggtagatcgggtcggagccgtggtgcacccggtggtgggacggcgtgttgaagatcagctcgatcgggcgccacagcttgccgacctgttcggtgtgggtgaagaactgccagatcagattgacggagaacgccaggtagatcgcccacggggcgaagccgaggaacggcagcgggaggaagaagaagaactcgaaccaggggttccacttctgtcgcagggcggtgccgaagttcatgtactccgaggagtggtgggcctggtgggccgtcca

SEQ ID NO: 60268 - DNA, 102 bp, Arabidopsis thaliana landsberg
cacggtaagctctggcatggggggtgataagccgtttgacgggtagtgaactcaaaatccagcactagatactcggatgggcccatgggcaggagattcgca

SEQ ID NO: 60269 - DNA, 259 bp, Arabidopsis thaliana landsberg
actcacccctcttgtacacctgcaagtctcaccgtggaaaatcttctacatggacatttgtggattaacactaacatagctccattctaattacgacttttattattaactagctcgatactcgccttgggcccacaccgatcaaattgtacatattattatttatctaaagtctgattggttaccacttgcttataatcatacaattatttagggcagatttccaatgattcatcacaaatgttatattgatcatact

SEQ ID NO: 60270 - DNA, 1713 bp, Arabidopsis thaliana landsberg
catatcccataacatttggtaagtcacctgaagcattgcatatttggttgcagttttcattgaatctttcggtttcaagtaattaggagacaatgtattgatatatatcttacctaatctccctcgaagatcgttaacaatattgtaaatttcttcaaccggtaaggataagtcatacttgtaaacagctcctgctttctgtaacgcctctgttataccctgcagggttatgattatgactttattcgtcgtgtaccatcaagctttttcagaggaaataactctcaagtgttttacctctcgtatgcgccaaaatgaggatgcctggttaatgtcttgagcgattacaccatcagaaactaaacctttttccagtgacttcaacaggaaagcttcaagcttctccctgcattagtttttgaatcagacaaaaactctctcaagggatctgaaatacttagaattcatttaaatggtactggaaaattgtgaaagtcacagaaagaccagaaaattctcaatacctgtcattagtttcatcactccctgttgtctcgatcagaatataaaagttctccgaagaggaaactggattacgtacaccgtctaggtggttcagtacctgttgaatgaattaaaaacagaaagggtttagcaaaatcaaagccttgtgcacaagataaagtgtcaggaatgcaaacagttcctattagtaacttcctaaaagcttaccaaatccatggaattgttatcaagaaactcgaaagccgagagtatctctccaagatttctctttgcttcaacaagaagtttctgcaaacaaaggaaacacaatgagagataacagttcacgcactatctcctctgtagatagaattcaattacaggagtacaaaagaaattgtattaaacctggcagctgagataatctttgcaagcaatgaaggctaaatttacagaagacaattttggttgtgtgagaatagaaactttagttacaataccaagtgatccttcactacctgtggaaaccagtaaagagaaaaaatcaagatgatttagtctattttgctgatgaagtgatacttgaaatcattgtacaagcacaagccaatataatacctaccaataaacaaatgttttaagtcgtacccagtattgtctttgcctaaagttccaagcatgtcaagcacgttgccatttgctgtgacagcttctagacctgagatgaagaaaataaaaatgatgagaacatgaaatccaaatgttttcagatggatcgaaagtaactaaaactgtaagtcattacccaatacagttccatgaagtgagccataacggattagacgcaaaccaccagcattagttgaaacatttccaccgatatgacagcttccttttgcacctaagtctagaggcataataaaactgaggaagcataaattttatgttgctacatctgacaaaacaaccgagctagttgagtaataatgaaacactcttctattaattttcagttcattgttgctaaaagaaggtacgaagacatggttctattacccttttgtgtcaaggaaagttgccagattttctaatatgcatcctgcttcacacaccaagacgccactaacctggagatagagcatcgtatcatcatcaagtatataattatattgctcaaagaacaatgaagcagcagttgatctaaatata

SEQ ID NO: 60271 - DNA, 437 bp, Arabidopsis thaliana landsberg
ctgtttttccaacaattgtgttcaatgttgatactatagtatagatgccaacttttttcctttccatataataaccaaaattcaggaccatgatacattttcgacagcatgcgaagcaggcagatattttgttaaacaaatattcctaaagcggatacttgattaaaatcgcaagctcaaaccttcgagtttgatcttataatgccaactgggtgatgtggaatgaactcgcatgcatacaatcttacaatcatgtatggattctcacatggcatactgatcaaacttcagcctaataatcttgttatacgtgcataatatcatgtttaactcgcacgtccacaataatctttgtatggattctcacaccaattatctacatggatagtttaattaactcctcacaaagagtgtcttgtcacatcttcctactacag

SEQ ID NO: 60272 - DNA, 2138 bp, Arabidopsis thaliana landsberg
agatcaagtgagttttctaccataaaaagcttggatgtgtttagattgtagttttttttactaattgattctctactcttaggtgagggatataccatgtggtaccaaaggaggtgtcttgattacctttgagaagatagaagtaagtgtcttaagatttgcttttctgctggcatcaccattgcttttttaatcttaattatatgtattgatcagattaaacatgtttacaggttgttaatcgactacgtaaggattttgtttatgacactttgcttaactatggtgtgaactatgataacacatggatttatgacaagattcatcatgagatcaaccagttctgtagctctcattcacttcagcaagtctacattgacatctttgaccaggtacttgactataatttaaacatataaactttttgatcttaacagtttggaagcttaagctcatgtcattgactggttcatgtttttgatccatatggagtgacgtttccttcctctttttaggaaaacagcagtgattaaagctttctttgatagttttctaattgcgtccaaaatctggaaagtttacgatgatttccgctaattcatttgatcacatgtgtttcagattgatgaacgaatgaaagatgctcttcaagctgattgtacacgttatgctccaggaattgagattcttagtgtgcgtgtcaccaagccgaaaattccagagagtgtaaggcgtaactttgagcaaatggaagaggaacgtaccaaggtaaattccttttgaaccttgtccttggcaattcaatctgcactggtttgctcatatcatcaattccgttataatggactctggacgctttaagattgcttatacaattggaatgaatgattttgaaggtcttgattgctattgagaaacaaagagttgctgagaaagaggcagagacaaagaaaataatggccattagtgaagctgagaagaacgccaatgtaagcaagattctgatgcaacagaagttgactgagaaagacagttcaaggagagaagctgatatcgagaatcagatgtaccttgaccgtcaaaagagtctcgcggatgcagattactaccggtaatagcccgtctttttttcccatttagtttccttatgaatcaaacaaacaaagaacatatacagaataaatggctctaatgtttaaatttttcccctgatcaatgtccttagtgtactgagagaagctgaagcaaataagttgaagctcacccctgaatttcttgaactcaaattcatcgatgccattgctcgtaacaccaaaatattcttcggggacaaggttttactcgactctatctcatttctgaattcacatatctcgtgtcttatctctgttctgctgttctgaagaaagtatatctcttaactgtgcaggtacctaacatggtgttggatcaaaggctgcttgggaatttcctcaatcattcgacaaaagacaaagatggaagcttggaaatggccactgatacatagactagatgtttcagtcccacaattacaatttttcttttgtttttattgcataacataaaacacttatcagtgaaatttggaagcttctcccgtagctttcatttagttgcaacccagtctcctagtaaccatgtttttgtctaaaaagaaatctcattaagactaagctaattcggtgtaacactttagccattttatcagattcaatgctccacaaaatattaaaaatgactaagagattctctgtcagtttgagattcaaagtccaaacatatctgagctcattttggtcttattaggctgaaaatgaatgtgtcttgaaatccttcattgacattatcttttgatatacacatgtaaccctctccatacaaccgtcaacaacacacatgcaaaaacagagagaggaaatgcagggttggccaaacattgtccaagaagatccggtttagataaaccgagaatgcatccaaagcggtggggtaaaccgggtaagaggcaaagtccataaatgttacaagaaaagaaagtgtttttgtgttaaagaagaagagtagaaatgtatgtggttgagagcaaagcatgagctataggatgtatgatactctca

SEQ ID NO: 60273 - DNA, 640 bp, Arabidopsis thaliana landsberg
tagctatcaacaatatgcatgcattatacaaattaaaactcaaataaacaaaacaacaataatatgtattaacacaaattacagtattacaaattatggaaaacacataatgcagaatttatgtacataaaacgacatttacaaacttctccgtttggctagtgactttcaatggaaaaaaaaaaatactaatctaacagccattagatggttacttctcagacaatatatattctataacacatcacaatgcaccattacggtttgatagatcgatatttatggaatcaattaacaaaaccaataagcaaggaagagggatgggtccatacatgacacgtgaggtaaacgacaacatgggatggattctttgccaattcctaaaaatatcatttacattttccgtaaatgttttggttgagatatttggagttattatcactcggaatttcgtatccattctttgcttttggttgttgttgttgaatgaaatctttgcttttcttaaagatgttctttctttacatgcttaatttatcatccaattgaaccttttacaaaatagaaagaacaatctttaaggacatattgttgaatttattgaaaacttgcaaaaaaatttgtttttcgttagcagtgt

SEQ ID NO: 60274 - DNA, 378 bp, Arabidopsis thaliana landsberg
tttccttcaaggggcagggtgatttttaataaagtcaagtaccgaacctcctactctcgtacaagaaacagaggaagacctggtaagcgaactatggggaacgagggtcgacaccaagtgaagggtactaccaaaattccatggcctattcccatcctgcgagcttatgtcaccattgcagacgacactatgctaccgactatgtgatacacctagtctaggtcaagtatcttcaagggtacagaagactgtacctacctaagtagctctgatgccccttaaccaaagaatgtcggctagtacgaagcatactccccgtgcactacaatgcacgatctcaccgacagaagaccatttttatctttctatgtactccca

SEQ ID NO: 60275 - DNA, 1050 bp, Arabidopsis thaliana landsberg
  unsure (1)..(1050): unsure at all n locations
acttcttcgtgttgttgagctccaatcggactattacgcaaaaaaaaaaccaaatgggttcaatgtactgagcatctaaaaccctaaaatcatcgagacaagcattatcaatcttgttcaattcactcaactccaatcgacaaaatccgacatgtatcggattgtaccaagcttacggtttcagctctgattctagacaaagctccaaagaacccaccattgatttgaccaagtttccttcagaaaagattcgaaatttctccatcattgctcatattgatcatgggaaatctactttggctgatcgnnnnnnnnnnnnnnnnnnnnnnnnnaagaaaggtcatggtcagcctcagtatctcgacaaattgcaggtactgtctttacctcaaagttgatgtctttcattgtcaatgtttgagaatgattatagttttgaggttatatgtttgaattgagtagagaggaaaatgagggttagtgatatctcaataaagttttgatttttaggtagagagggagagaggaatcactgtgaaagctcagacggcgaccatgttctatgagaacaaagtagaagatcaagaagcgagtggttatcttctgaacttgattgatacaccgggtcatgttgactttagttatgaggtttctagatctttatcagcttgtcaaggagctcttttagttgttgatgcggctcaaggtgttcaagcacaaacagtggctaatttctacttagcttttgaagctaaccttactattgtacctgtgattaacaagattgatcaaccaactgctgatcctgagcgtgttaaagctcagttgaaatcgatgtttgatcttgatacagaagatgtgcttcttgtgtctgctaaaaccggtttgggtcttgagcatgttcttcctgcggttatagaacggatacctcctcctcctgggattagtgaatcgcctctacggatgcttttgtttgattctttttttaatgagtacaaaggtgtcatttgctatgtttctgttggtgatggaatgctgagtaaaggagat

SEQ ID NO: 60276 - DNA, 349 bp, Arabidopsis thaliana landsberg
actcatatgccagtgagggcatcgtagatcctaagcaactggcttgcgttcttattcgcaacgcgattggacgcgacgactctcaatggtgtagaatccaaccgaccttgaactctaagagcgcctattaatcacccttaccgaaatggcaatgaaagacatgcggtgtgcagctggtgtgagatgcatgattagcactatatatatatatacaagacaaccatatgcgcacgggtcggatatagcgagagaaaggagcagtctaatatagtcaataattctgcgacaggcacgatataggggtgatgaggaggggataacgacctgaccattgagcgtataccggctc

SEQ ID NO: 60277 - DNA, 134 bp, Arabidopsis thaliana landsberg
tggattaggatatagagggcatgtctcattagccggcactggctaactcttcggggacaaccttgactcatacatgacgaggccgtatgacaccttgcagacctagctataggagcctggaagcatgctgacga

SEQ ID NO: 60278 - DNA, 850 bp, Arabidopsis thaliana landsberg
atggacaaaaccaattctagtccctgttttggcctaataacatcaaatctagtgataaggcttgctctacggagatagatccagttacctagctcctgtgatagccacgaactgctgaagtttgtcacggttgcttctgctcaacttatgctacagaaaacaaaaccaatcatatgattaacaaagatgtcgacaatcactgaaatcgcaaaattaaggagccttgttcgttttctactcgacttaaaatgaaactctaagaatcagaaaagcaaagacgccataagaggatccgcaaacctaaagcagagggaaaaaaacaaaaggaggagaaggagaaagcgcgtaccatagtgaagaagaatccagaagccaaaatacaaaaccctaacaaggtaatcgaaggaagatgaaatggaagacgttcgatgtttactatctctctctctctgactcttaatcgcgaagcaaaaaggtgtgagaggagaggagtgactcagggaagactcgagagagtctctcacgattgcttcttcactttcctctctctccgcctctctctcttctatgcaaaatgtttttttcatttctacttttctttcttataaatgttgtttcagttatgcaaatactccggttcgccaaaccggtttgtttagtaaaatgtctccctatacaaaatggaccggaaatttagtccggtatactgttctgtctttaagctttggactagagttaatcagctgggatataaattgtaccttatagtttataaaatcctgatttgatagagaatttgatacattttaattcaattggagctagaatgtggtatgaattttttcgcggg

SEQ ID NO: 60279 - DNA, 1570 bp, Arabidopsis thaliana landsberg
tcagatttctccaaagggttcaaagaaaaatgaaatggcagtgagaagtaaatttggattggaattgtcagagccacttgtaacatttgctctctcatgtggtagctggtcctcacccgcggtaagtacatgttcatatcatattaaatataccttaggtcttgtttgtttgttttgcatttgtgtttaaagttggtgtgttctttttccaaatgaacccacaacttttagtattttgttttatcaaaatacgaaaatatgaaatatttttcacttatgaacgcaaacttactcttagaaaatgaggtcttattctctcctaaatagtcatggttccaaaactaattgatgggttgcaacctcatgaaggtacgggtgtacactgcgagtaaagtagaggaggagttggaggtggcgaaaagagagtacctagaagcatcggtggggatatcggtggtgaaaatagggataccaaagctgatggattggtatagtcatgactttgcaaaggacattgaatcattgcttgattggattttccttcagttgcctactgagttgggtaaagatgctctcaactgtgttgaacaagggatgtctcagtccccttcttctactcttgtccatattatcccttatgacttcacttttagatatcttttttccatctgaaaatgttttttttttcctaaggggggttgttttctttcttttaattttttctctgaggttcaaataggttttgtttacacttttacatcaacagaaaaatgtacataaataaggaaaaatcgaacctatattgtgttcgagttagtttggtgtttgttttccaacacacatcaatttcaaagctgattaggtatatggcgagaaatgaaaaagtatttagataaatgattattgctagagtttgtaagtaggaaaaaaaagcaccaaccaatatatgagtgaaaatgtaacatattatgttctaaataaacatgaaaatatattcatttggtaattatatacattgataaatcaatatatatcacgttaaataattatgtaatactacaagataaaagataacataattatgtggccaaagtaaccatctatttcaaatttcaatcaaatagatgtctctacttaaatacgtaatataattttttcattaaaatattttaaataattcttatttgtatttgtatttttcttgtatttgttttagttttttttctttttgggggcaaaagtctctttcttaagtgatgaaaaatgttgggcttcatttatcactgggtctcataccgtcgcacatctcgcatgccctagtcaaaacggccctgcttattatggccgttctgtttttcttccgcatgagccaaattccaaactgttgaacatgtaattcgattcccgttttgccatattatattttaaataaacttcattttgcctagttaatcttagattttctaatttagaatgaaaaatgtacataagtagtgactacaaaaaatacatgtaaattagttttttttttgtttttttttggttttttcccttggtcaaggatacattt

SEQ ID NO: 60280 - DNA, 331 bp, Arabidopsis thaliana landsberg
  unsure (1)..(331): unsure at all n locations
ggctgcccaccttcataccgagcaccgcagcgtctatccccttggcgccgaacacgaaccggctcttggcgatgtacatgttgcgggtgtccgcgtccgtgctgccctgcctacgccgggcgggagtgcacaggtccgggtagtccttgcgcaggaggtcgttgttctccagctcgttcttgaacgtcttgaggtgccgttccgcctgctcagcggcgtctgcgaacgccgcagcgaagcgcctgtgctcgtgcgcagcggcccacatcggcaggatgaggaagaaccaggtgctcttgcctgcgtcgcggnggctgatgatggcgtcccg

SEQ ID NO: 60281 - DNA, 489 bp, Arabidopsis thaliana landsberg
taattctgatctcatcttacttctacatctaaaaaaacactcctctagacttctatacacattcaataaaattatgtagaggttggactgctcaattttaaaaaattaaaaactctaaaagtcagaactacagtttgaacataatataaaaaatatgaacgcaaactttaataatagtaattacagagagtttggcagacctagtaacgtgaatcatagcacaactaattaattaccttatttatttctgctataattcttcacgtaatttttttattttttaaattcacgtacgtaagcatgtacatgtaccaccaattaattcttaactcactgttttgaagatggagttctgaaaatatgattgtttatcaagatattatattcattagcattttttgtcgttagtaatattaggaactaattaaaaccaacaacaattttttacaacaaactttgatgctagctaatcagataacactccagcga

SEQ ID NO: 60282 - DNA, 314 bp, Arabidopsis thaliana landsberg
  unsure (1)..(314): unsure at all n locations
taatttgggggaaaagtgggcggaatacatctattatagaatgctaaatctgctccttacgatggtttaacatcagactgttatcatgcatgtacatgattatgaatcagatttttcaaacgaaatcaactttctattcagacagaaaaaaaaaagtatgaatcataatgttaaaacagccatttgaaggataaaaaacgcttgaaggagnnnnnnnnnnnnnnnnnnnnnnnnnnnnnnnnnnnnnnnnnnnnnnnnnnnnnnnnnntccagctgactggactaatcatacttcgggcattaaaatattaaat

SEQ ID NO: 60283 - DNA, 421 bp, Arabidopsis thaliana landsberg
agacacgtagatcactgggccgggcggttttgagtcaagccaatcaaggcattcgttaacttgtgcattgaagaggttgattccgtagtctttgtcacctgctaatcgtttgtctaagtacattgatggaatcatcggtcctatgttcttgaccggccattggtttttcatccattgtagcacctgaaaaaaggattaatacacgcattaaagaaacgttgataggttgattgtattaagatcaggttcaaaatcaatcaaatcaatttcatgcatgcttttatgtacttcattaattacaatcataacatttattgcatctataataattgggtgtcaccagtatatgactcacgtcaacttttttcttcctaaaacaaggaacctgtttattttgaattgatagaaagctgaacccata

SEQ ID NO: 60284 - DNA, 728 bp, Arabidopsis thaliana landsberg
catctgacccatttgttggcccaatattaaccaacacccacactaaaaaaaatactatggagggagtaatctacttgcctacattccaaagcaggcaatatcgttttttcatgtctgaaaacgcaatttttttttctaattgttaagttggttcaaaagaaatgaacatgggtaataataaaaatgatgtatttgtttgcaaacagcagttctcacttgtctctctctatatgatgaaagacaatgttgtaatctttataggtttcaatatagcgggtatacttggtgacataaagcgttatgaaattttaagcagtaaataggaaatgataaatgattattaaattcgttattaaaaatgtaagaaggaatagtacaatatagaacggtaaaaaaaatggcaaaccatttacttcaataagaaaggttagcaaccacactcagcaaatgggacacataggatccgacgtggtttatattatagtagtctgatattgtagagtcaatgggtatatttgtctttttcaaagactcagttccattgaagcgtaggttacttctttaaacaagactctgttttgaatgatattgtaaagttaaggggtacgtttgtctttttcaggacaaagcgagaccatagatgacgtgtcaactgctaattttcaaaaactcggtctacaaaccataaccaaacttatttattcaattatttccgtcaaaaaaatata

SEQ ID NO: 60285 - DNA, 1266 bp, Arabidopsis thaliana landsberg
tcgatcgaactgagctctttctctctttcctctgcttttctctctctatctctatctctcgtggcttgataagagtttctctcttttgaagatccgtttctctctctctcactgagactattgttgttaggtcaacttgcgatcatggcgatttcaaaggtgacttctttcaaaaaccctaatcctctgttttttttttcttttgctggggggctttgtacggactttcatgggtttttgtagcttttccctcggcttttgcgcaaatgagactttctggtttttttttccagctttttataatttcatcaggtggatcgaattcgtagtttcagcttagatctctctccctcttcattatctggactttccagactttgagttcttcgggattgttttcggtttctgggttttgttttaattgcgagatttaagcttttttcttttttactactgtacttggtttgtggttgaccttttttttccttgaagatctgaatgcgtagatcatacgggatctttgcatttttgttgcttttcgtcagcgttacgattcttttagcttcagtttagttgaaatttgtattttttttgagcttatcttctttttgttgctgcttcatactaagatcaattattgatttgtaagactactgtatctgaagatttcaccataattttttttttcaggtctgaagctggtttcgaatggttggagatatccgtagtggttaagcatatggaagtctatgttctgctcttggttgctctgttagggcttcctccatttggaccaacttagctgaatgttgtatgatctctctccttgaagcagcaaataagaagaaggtctggtccttaacttaacatttggttactagaggaaacttcagctattattaggtaaagaaagactgtacagagctgtataacaagtaagcgttagagtggctttgtttgcctcggtgatagaagaaccgactgattcgttgttgtgtgttagctttggagggaatcagatttcgcgagggaaggtgttttagatcaaatctgtgaattttactcaactgaggcttttagtgaaccacgactgatttgtagagttgaccttgaatcctactctgagtaattatattatcagatagatttaggatggaagctgaaattgtgaatgtgagacctcagctagggtttatccagagaatggttcctgctctacttcctgtccttttggtttctgtcggatatatgataccaggaaatggc

SEQ ID NO: 60286 - DNA, 1361 bp, Arabidopsis thaliana landsberg
ggctatagggaggtaaagatagaagaagcttttaaggtacagaaagatgccatagataagttctgagaggatcagaagctgatgaaacgttggtcatttggttcgaaattgaatactaatcttctcgagaagaaaatggaagagttagcggaagattttcggatgaaaatggaagatcatatccggatacttcacaggaggatccatgtagccgaacaaatacacttagagagcaagagcagctatatcaagacgcgagacaacacacaaacagaagaaaacagaggaaacagagcagtctctgaaacccaattcaagaaaatcaaggaaatggtggaacaagggcttgctggaccagagatggcgatgaagaagctggaagaaagcggggaattagggaaccgagtaacgagattagctaaagagatcgattcagcgagaaagtgggtgaaggagaaggacaacaatatgaagcatgaggtggaaactctagaagcgaagctagaatgtagagaagcgcaagaatctctgctaaaggagaagctatcgaagctagaggctaagctagcggaggaaggaacagagaagctgagtctctcaaaggctatgaggaaaatcaaaaagcttgagattaatgtgaaggagaaagagtttgagttgttgagtttaggagaagggaagagagaagccataagacaactatgcgttttggttgattatcaacgttgtcgatatgatgatctcaaaacttccatttgtcacgtagctcttcaagcataaagttcacttcttcttctcctttttgggtgtaaaattgtaaatatcatatgttgcaagatttgggtattttttcattaatggttgtaaacttaactaattttttttgtaaaataacatattttaactttattttttttgtaaataacatattttaactttatttttcaaatattcttaatattgaacatcctacgcgttttataaaagtctccattagtttgttaacttttttttttttttgtaaaagtctccattagtttggtatgttttggccttcatatatttaatcatccttttgttggaagttaggttagtttgtattaaaatgttttaagttatcatcaattatagctcatctggtcaccactattttatagaaagaaatccagagaagaattatatatgaatgaaaatctggtaacaattaataaataaaaaagcataatgtgaaaaccctattaataagaacaaatcacaaataaactcaaaactaactactaataaataggagaaaatgaaagaaatataattgaaatgaaaattactccttaaaaaaaaagaaataaatcagtccccttttt

SEQ ID NO: 60287 - DNA, 1141 bp, Arabidopsis thaliana landsberg
ggctaaaagttatataaagaagtgaaacataagaagccagttaaaaagacgccaatgagattcttcagtcgtaaagacaatactgagggtcactatgagagtgtgttacaggaaatggaacagaacatacgattggggcaagctgaagtttcagcacctggaaaggtatgcctctgatggttacatgtaggacctgcgaactggatacatctttctcataattttgcatgttttctctcatcacgtaggaagttcgagctgcttttgtatcattcaagtctcgatatggtgctgcaacagcactccacatgccacaatcaatcaaccctacttactggctcacagaaccagcaccagaacctcatgacgtacactggcctttcttctctgcatcatttatgcagaaatggcttgctaaaattctggttgtgttcgcttgtctcctccttactatcttatttcttgttccagtagtacttgtccaaggtctcaccaaccttcctgcactagaatttatgttcccgttcttgacattgatcctatcaatgtaagtgacagatttttcattatcattacctttgaacaacaacactttaagcttattgttctaaacattagcaatctctgttgcaggaaagttgtaagtcaaataataactggataccttccaagtcttatacttcagacatctctcaaagtcgtacctccaaccatggagtttctctcttctatccaagggcacatttgccacagcgatatacaaaagagtgcttgtaacaaggtgatctggttcactatatggaatgtgtttttcgcaactgttttctctggatcagccttctacaagctttctgtaattctcgatccaaagcaaatcccgctcaagttggctgtggctgttccagctcaggtaaaaaaacacttctcccaccatttattgtctcacacaatggtcatttttacagaagtggtttacatcatttttgcaggcttcgtttttcatcgcttatgttgtgacaacaggatggacagatactctgactgaactcttccgtgtagttcccttcatggtcagttacataaaaagatcttttgaaccgtcagatgaaaatgaatttgttgtaccgccaatgcggtacca

SEQ ID NO: 60288 - DNA, 228 bp, Arabidopsis thaliana landsberg
aaatacatattttatcaaaagatttgatgtagcactttggttaaatctaataatctagaaccttttacatttttttgagaaatccgggttcaaataccggcagcggaaagtttttttgtttgaaatgtcgttaaaatgttaaccttaaactttcaataaaaaatgttccacttcattaatatagattacgaatgtataacattggatagcaaaataaacttttaacgg

SEQ ID NO: 60289 - DNA, 1280 bp, Arabidopsis thaliana landsberg
  unsure (1)..(1280): unsure at all n locations
gtacggtaccttgatttcggatttgcgtagaatcttaatgagaaaacggtcatctttggaaagaagaaacatgttaccaactttgctagaagaaagcttccttaaggtctcatcattacagatagacttcatgtactcatcatgattgatatcctcaagttcctgtataagtctgcaagaaaagaaccaaccaaaagtaaagaaaaatgagacaatgagaaatcctcaaagacatacagagagagagagagggaaaagaacctgaatcccaagggacaataatccttccattcgaactcagtaatggttccaggaggaagatgttttatgtgtttggaagagtatcgaatcctgtttttctcagtggctttcacgtcctttgctgttatctcccgcgtaaacatttccaaattaccctctctctctcaacttctcctgatatcaaatctcatctatgcccacatcttttaatttgtatactcctatacattagaagaaataatcccacatttttcaataagaaattgacataaatctgcagatatagatccaaaatttatggaattgagggacaacatgaaaacggagaaccctaaaaattgttcggctcaaaaccctagaaatcgaacacaataattgatcataccaacacaaatatatcatgatcaaattcgcataagatccggtaaacaaaaaatgagaggaagaggttgttacctgttccaggagctgggtaaacgagagaggaggaggagaagaagaagagtgcgttgaattttaaaagaaacaagaaattttaaaaatgaagaagaagaagatttctgttttgtttctttatttgtttgtgttgagaaaaacaattgttttgccaaatttggccgtcgaagttcgccgctcgatccaactcattttcctctgttttcaaagacgnnnnnnnnnnnnnnnnnnnnnnnnnnnnnnnntcatttccgttactcgttttagttattattatattactcacaaggcccatagcttaagacaaggcccataaacaaaaactacccaatcaaactcgacatgtctttaagttcaacttagccaaatcttgaccatgattcaacaatgcttattgagaagttatgcaacctacagactggctacaattttcccatttatttattttcccctgaagttaagttattgatcggccccaaaaaaaacttggcttgtggcccaataatagtcagagccggctctgggagaagtgtaggacgtgctttcctacgtatttaaacgtg

SEQ ID NO: 60290 - DNA, 1363 bp, Arabidopsis thaliana landsberg
  unsure (1)..(1363): unsure at all n locations
gggaactgtggatgaatgagcataaggaatgtgagctattcattattagtcggtgaccggaagagtgagaatcgagaaaatgacgatgagaggaagaagaagaagaaggaacgagtacgggaataaaagaacggactaatttgtaattttaaaacaatgagtgctattttggtaatacataacttataaagggttcataacaataaatgaaacacttttttttctttcccgacatgtattttttgttgattaatacaaaattatcaataacattcgcacatgttatgtggatatctaatttatttttgtaacatccgataaaaaaatgttaaatttattttgcaatttggctcttcgattttcaaatttggtttttttataaataacaagaatttgtcactgtcttccctataaaatttggaggaagcaaaggcgcttgcttttcgcagcaaagcctatagaaactttacttccttctcctctcgtctcatgcaccgaatgtatttccctgcttaaccaattctctactttgtcctcttcttctccgtttcgattttacaagattcgatcttttgcaatcgaaatacctaatattccgattctcgattccggcgtcttttgcttcgggcttttttggtaagtgtactcttacactatctccgtctctactcttttgcgtcttgcattgctgattgttggaaatggatttctttgtggtgtaatgcggtttccaaacgagttcgagttggctcttttagaaagattctttcttctttagtctgattctcaaggtttcacattcttcgttttgataatgcgtttccctaattgcgttgtgattatcgataccgagtaaaaaggtgttcttggacttttcactttgccattgatttgcttcacttgtattactttagaactctcagaaacgatcattgattggcttgtgtagagataattgagcagttccatttatctacttagatcggagatataatgcctgccaggtgtttgttatatgcaattttgggtagagcattgaaattttgaccgagagtagtatcatgattacaagccatgttctgctttagtttcgtagtcagtgatggttattaggaagatgattgaaactagctttttttgcagcttcaaatgcataacattttggttgtaatgtagggaacattttaatcattcagcattctacattttgcatagctactgttgttaaccaagccatttgttttgcactgtgaattagtgggaggaatgtcaaagattgcaagctcttcgaatagtgatcctgattcaagaagcttacangtgcttctcgatacttttgggtctcgggtttctcttgatgaca

SEQ ID NO: 60291 - DNA, 332 bp, Arabidopsis thaliana landsberg
cgaagattgcatccgagtaggcctcgacgatgggtagccacttatgagaaagaaaggaaacactgtctactaactacatgtgaaggcaaaatgatcaagttgataaaacctacattacgattgtaatatcatacaagcatatatgcaagatgactgcgaattacaaacagacaactctaaaaagcagtcatgtacgtaaaagtttagaatgtcataatcaaaagacaaagccaggagtcgatgggaggtgcaagctgcggagataagacagagtgttcattgatgtggactagcatcaacgaacaggactggtacccggagagcttaaaggg

SEQ ID NO: 60292 - DNA, 100 bp, Arabidopsis thaliana landsberg
ccgaccgagaaccgctgaaaaaactaccacacttccacaccgcctacaccctaacgccaccaagaacaaaagggggggcactcaaggcaagaccacgccg

SEQ ID NO: 60293 - DNA, 1203 bp, Arabidopsis thaliana landsberg
tccttaaggttctccttttcattctttttcttgacaagtagctctttgcttttgctctgcattaatgaaaaaataatcagctaattgtccacatacttctctgaggccagtattcatcaatatctcagctagtaactagaaaaataaatagatagtacagaaatgatacctggaagatgatctttttctttctgggattattttctaatgtttccgtgccttgatgcacttctgagatagatttggactaatacctttgtggttttaggtagatgaagacgctgagtcttctggtagacaaagtccagccacttatacacgaatgctgagctctgttacaagaggtctttacaggtctgcttctgtgactgatctattttctatcctgcttaattgcgatgtaatctaggagctttttggtgaactttttgctgcgtccggacttcaagacatctataaataacattgtcataattttgtgttatatatatttttctggtaaccgggcgcaaaatagatttaatgactctgatcaatccatggtctttagtagcttgcactctctggtagttttcttttgaggtgtactcaaatttgggaagaatatcatattgatgactttgctcttcactcgtttcatgaatcaggataggaactgtattcagtcaccttgcaacgtctctgtcatctgttcctgtggcagatggtccaatcctttctttgttgactgttttctggcccattttggagaagctatttaggtctgaacacatggagagtggtagtttagctgcagcagcatgccgagctctttcagtggcagttcagtcgtcaggtttcaaacttctcatctccctattttattccgctacatttgactcgttgtgcctttattagcctggaacatttctttattccaaagcgtcctttacaccaattatttcttgttttcgcacagtaggcaggtttcactaacatgtgaaaatttgcattattcacaggtgagcactttatgctgttactacctagtgtactggattgtctatcgagaaactttctgtcattccaaagccaagaatgttacataagaacaggtgagggtttcttaattcaggtacaggctccacttttggagaaaaatcttttgagatgctagcgttgattcatttgtcacagtttttattggcgagcttgggataaata

SEQ ID NO: 60294 - DNA, 1079 bp, Arabidopsis thaliana landsberg
taagatgaaacaaatccattttagatgaacatccccacattcttgggaaattttgattttttttttcttttaatggaaaaaaggatttacttctttttatgtaaaccaactatttatttttcttaccaaacaatattgatacatttaataaccatttacaatgttcacatataaataaatcaagcaaatttgtaaaacgggtacgtgaatataataacttcaaatctataaatacaaggacccattgttttgtgtagaaaatcaacaaaagagcatattaataagaatatgaataatatgtctttaagtgatatcttcgagaggtttgacacgagcaaagatggtaagatctcttgggaagagtttcgtgacgcgattcatgctctctctccatctatcccttcagaaaaactcgtcgagatgttcatccagcttgacacgaatggtgatggtcaggtcgatacggccaaattcgcttcgtgcatggaccaaacagctcagtctagtggtggtgacgtggaaaaagagttgaaggatgcttttaaactatacgatattaattgtgatgggaagatatcggccaatgagttacatgtggtgatgactcggcttggagagaagtgtacggtcgagagctgcgtagggatggttcaagctatcgatgtagatggtgatggttatattagattcgtaggagtttaagactatgatgatgcgttctaggaaatagtgtagactatatattcctcctaaggacccaagcctagaatttgatcactacaaatctataatgttatagtctctgttcatcaatttgagtttcgaattgaagctttttcaagtttgctaagatttatgacatcatcaattggttttgatcgcagcttgagggatcaaaatcaaaagtaaattaaaaagtataagtagaagaaaatattaacatgggaaatcttttgatttgaacatttttactggatgtaaaatccttcagtttttctgtaaactgtaaagacaggtaatttagtatgatgaattaatgaagaatttgagtagaagaatgatagaaatcaaacaaagtt

SEQ ID NO: 60295 - DNA, 226 bp, Arabidopsis thaliana landsberg
cctggctcgactaaaccatgcttggtacacagacgagacaccgtcagatagggcacacctaactattcttgtttgcacaaggctaccctcaccacgtgggactttgaccaatacctgggggtactgtaaacgatccttacacatagcgtctatctagaagacactgcgcgcgatcttacgacacgtacctactttcatcagccacatcttgctatcttacacacga

SEQ ID NO: 60296 - DNA, 736 bp, Arabidopsis thaliana landsberg
tggtaaagtaaaacctatcaatactctcttcgttttgtggaaggagatcttgaaaagataaaagaatcaccagttgtttcatttcaaaagtcctagcctttggattactaagtttttgaagaaaatttaacactcggtataccagccttatttttcctgaagatttattaggactacaatctcaggatcttttgacttaaccattggagtactttcagcaaatatcaaaattggtgttttaggtctcctcggttatttccacgcaaattttcttattctacaaaggacacggaaaattcaaacagatctagttaatactttctttgtctaaatcttataaagtctagttatctgcatatgtttttagtatatttgtacaaaccatatatatatatatatatatatatatatataaataaaaaaatcccattttagtccgtgttggttatatagaatgtcctgaatccaagtaaaattatctaagacattgtacaaaaaataagattattggtttacaaaaatcaaatgaaagataaacaagaacaattatttccacattcttgggatctcgatattgtctccattaattgctttattccgtgagaagacataaaacaatggtagcttctttgataatatgtacattcaacgaaatctagaaccgcaataacgtctttatacatactcgacattcgacaatattataaaacttatgagtaacttcatctcgaatttg

SEQ ID NO: 60297 - DNA, 171 bp, Arabidopsis thaliana landsberg
taactaatagtacttagttttcttttttttagttaaaattatttggcgttagatgttttatttattttaatgcatatttattaaaatatttttttgtaccagataatgccacgcaagcattttacgggaccttttttcctttgcattccaaggtcccgccggctcatttta

SEQ ID NO: 60298 - DNA, 1022 bp, Arabidopsis thaliana landsberg
aatcttagcttttaagttctcaaggagtaaccaagccaatgagaaagattcaggacataagtaaatctacagaattactggaaacatgcaatgagctacaagtcttaacacattccaactttttagttcacaaacgaatatcaacattaccagagtaacaaaaccccaagaatctaaatcgaaatcatgtaaaaatctgtgcttggacctaaaaagtagtttgttgttaatctaaattcaaagcaagaagttatccaccacttaaaaactataaactactatgacctgatgttcaaagtaaatcaaagattgaaactttcaatcataattcccaatcaatgtatctggaaaccaaagagcaatctcgcaagtaaaagggtttcactctaatttaacgcaactaaaccccaaactcggaatcaaaaggtgaaattggagaaacgaaccagtgataaggacatgagaaccacagtgtttgcagtagtatacgaagagatcagagtcgggtccatccggcgcggcgtcctcgctcgagtacgtgtgtgtcgttctcttcggcatctctcttcttcttcttcaaagttcgtcaatccaataaatttgtcggaaactcagctctcaactttgcgttaatctctttcacattgtttttaaaataataataaattaccaaaattgccacggcggcgatcgacggtggaataccagacgggctacgctgctttaagggtgaaaccgtcatttctcactttaactgttggttcaatgtacaacagcatctaaaccggatttaattaaaaaaattagtgattggtggtatataaaatcaacgaaaaccaataagaaaaccacatgaacatcaaaattgaataattccggttagtcatgtgtttgaagccaaagcgaatcttaaaccaaaccgaaaaaactagtcaaggctttcttgtcccttgggatttggattctgcgttgatagcttctagttctacagacaaaaatcatcttacagctggttacataca

SEQ ID NO: 60299 - DNA, 406 bp, Arabidopsis thaliana landsberg
  unsure (1)..(406): unsure at all n locations
catcgctaagacgttctgaattagttcctgtattgaaagttaaaaagcattttcattaaatctagcaggcaaatgaacacaaaacttaaagtgtgaatggtaactacaaggttggttgaatggtaactaagtatgaatggtaactcacagattccttgctggcaattttttcttcagctacaagcagttcttgctccttcttaagtagcgaagattccctggggagagacagcctgttttttgcaaaaaaaaaaaaaaaacatgaaaacattactatcttggctcccagaaatttttttgatgacctataatgcanaaccaaaaataacagagaattgtgtgaataaaacaaacctcttctcttttagcacacaaggctaaccgcatctccaagttggattttttt

SEQ ID NO: 60300 - DNA, 202 bp, Arabidopsis thaliana landsberg
cattatcaaactctgtgcagttattctttacaacaacaacaaaatacatttatccattaaaacttgatcctgccaaaaaaacaaccacctaataatcaatactctaaaacgtacaaaacactctgacatgtttatatatctcaaactcaatgaattgttgagacaaacataccaaaccttttaaacgaacgacccaacccca
